United States Patent Application Publication US 2004/0029129 A1 - sequence listing, part 12

SEQ ID NO: 31116 - DNA, 2376 bp, Pasteurella multocida
atgctaaaagcgggcagcagctcgcttttcttacttttattttctgagtgttacagtatgcttaatcaacaaatcagccaaattattgccacagaactcactgttcaaccgcaacaaattctcgccgctatccaattagtcgatgacggcaacaccattccgttcattgcacgttatcgtaaagaggtaacgggggggttagacgatacccaattgcgccattttgaaacccgtttaatttatttgcgtgaattagaagatcgtcgccaaaccattttgaaatccattgaagaacaaggcaaattaactgacgatctccgtaaccaaattcaacaagtccaaagcaaaaccgaattagaagatttatatctcccctataaaccaaaacgccgcaccaaaggacaaattgccattgaagcaggtttggaaccgttggcggatttactttggtcacagcctgaaaatgacccagaaaccaccgcactttcctttgttgatgccgaaaaaggcgtggtggatagcaaagccgcattagacggggcaaaatacattttaatggagcgtttcgccgaagatgctgccttactcgctaaagtgcgtgcttatttacaacaaagtgcggtcattttttctaaagttctggaaggcaaagaagcagaaggggcaaaattccaagactattttgaccaccaagaattactgaaaaatgtgccgtcacatcgtgccctggcgatgttccgtggtcgtaatgaaggcgttttacaattaggtttaaatgcggatccagagcaagaagaaggcgtacgccaaagttattgtgaagaaattattcgtgaccatttgggcgtgcgttttagcggtcaacctgcggacaaatggcgtgaacaagtaatcgcttggacgtggaaaattaaagtcgccttacatttagaaaccgaattaatggcaagtttgcgtgaaaaagcggaagacgaagccattgatgtgtttgctcgcaatctgaccgcattgttaatggcagcaccggcgggagcaaaaaataccatgggcttggacccgggcttgcgtactggggtgaaagttgctgttgtggataacacggggaaattacttgctaccgacacaatttatccacacactggacaaatggataatgcaatgaccaccctttaccgtttgattaaagcacatcaagtagaactgattgcaatcggtaacggcaccgcatctcgtgaaaccgaacgctttgccaaagaggtgattaaagccattgagggcaacaaaccacaaacagtggtagtgagcgaagcgggggcgtctgtgtattctgcctctgaattagcggcggcagagtttcctgaactcgatgtgtccttgcgtggtgcagtgtccattgcacgtcgcttgcaagatccgttagccgaattagtcaaaatcgaaccgaaagccattggcgtggggcaatatcaacatgatgttaaccaaagccaattagcgcgcaaacttgatgcggtggtggaagactgtgtgaatgccgtgggtgtggatttaaacacagcctctgcgccattattggcacgtgtggcggggatgaccaaaaccttggcgcaaaatatcgtggcataccgtgatgaaaacgggcgtttcgacagccgagatcaactgaaaaaagtgccacgtttaggaccaaaagcctttgagcaatgcgcaggctttatgcgaattgcagcagggaaaaacccactcgatgcctcgggcgtacaccctgaagcctatcccgtggtggaaaaaatcctccaagccaccgagcaatctatccacgatttgatgggtaataccagcgccgtgcgtcagctcgatgcgaaaaaatttattgatgaccaatttggtttaccaacggtacaggatattttcaaagagcttgaaaaaccgggacgtgacccacgtggtgaatttaaaactgccaccttcatggacggtgtagaagatatcaacgacttgaaagtgggtatgattctagagggtaccgtgactaatgtgaccaactttggtgcttttgtggatatcggtgtgcatcaagatggcttagtgcatatttcctcactttctgacaaattcgtggaagacccacaccaagtggtgaaaaccggcgatatcgtcaaagtgaaagtgttagaggtcgatgtccctcgtaaacgcatcgccctcactatgcgtttagaggaaaagccggtggataaaaacgtggcgaaaaccgaccgcactttatccgccagacctcgcaacaatccagcaaccaaagggcgtgatcgcaacaccgctaacagcgcgatgggtaatgcttttgccgatgcgttgaagaattggaagaaataa

SEQ ID NO: 31117 - DNA, 2628 bp, Pasteurella multocida
atgatgagtcatactgctgaaattgaaatcagcccagcacaagcagaagtgaatgtactggttgaaaaaggattgctggcattagaagcattccgtcagcttaatcaacagcaagtggattacattgtggcaaaagcctcagtagctgctttagatcaacatggggtgcttgctatgcatgcttatgaagaaacagggcgcggggtatttgaagataaagccaccaaaaatctgtttgcctgtgaatatgtagtcaacaatatgcggaatttgaaaaccgtgggggtgatcagtgaggatgatgtcacagggatcaccgaaattgcagaccctgttggcgtggtttgcggaattaccccaacgaccaacccgacgtccaccaccattttcaaagcccttatctcgctaaaaacccgtaaccccatcgtctttgcattccatccttccgcacaacaatgttctgctcatgcggcacgcgtagtctatgaggcagccgttgcagcgggggcgccagaacattgtattcaatggattgaaaccccgtcgatggaaggcaccgcagcgctgatgaaacacccaggcattgctaccattcttgctacgggcggcaatgcgatggttgaggcggcgtattcttgtggtaaaccagctcttggcgtaggagcgggtaacgtacctgcttatgtggaaaaaagcgcaaatatcaaacaagctacacatgatattgtgatgtcaaaagcctttgataacggcatgatttgtgcctctgaacaagccgccattgtcgatcaagaggtgtacgatgaatttgtggcagaaatgcagtcttatggtgcttactttgtaaataaaaaagaaaaagccttgttagaaacatttcttttcggcgtcaaagccaacagtacaaattgtgctaacgcaaaattaaatgccgcggttgtgggaaaacctgccacatggatcgccgaacaagcgggcttcaaagtgccagaaaaaaccaatattttggtggcagcctgtcaagaagtgggcgaaaacgaaccccttacccgtgaaaaactttccccagtcctcgcgatattaaaatccacgtcaacagaacatggctttgcgttatctgaagccatggtgaatttccatggtttaggacattccgccgccattcatactaaagaggcaagcattgccaaagcctttggcgaacgcgtgaaagccattcgtgtgatctggaactcgcctgcgacctttgggggcattggcgatgtgtataatgccttcctcccgtcactcacactcggttgtggttcctacgggaaaaactccgtcggtaacaatgtcagtgcagccaatttattaaatattaaacgtgtgggaagacggagaaataacatgcaatggttcaaagtgccttcaaaaatctattttgaacgcgattcaattcaatatttacaatcaatgaaaggcatggaacgcgtggtgattgtcactgacagaaccatggtggatctaggctttgtggaaaaaattgctaaacaaattaccgcgcgtggtaaccatgtgacctaccaattgtttgctgatgtagaaccggatccatctatcgaaacggtacgccgtggcgcagcattaattcgcaactaccaacccgatacgattattgcgttaggtggtggatcggcaatggatgcagcaaaagtcatgtggttgttctatgaacaacctgaagtggatttccgtgatttagtccaaaaattcatggatattcgcaaacgggcgttcaaattcccacaattagggcgcaaagcgcgctttatcggcattccaacgacttcaggcacaggttcagaagtcacgccatttgcggtcatcaccgaaggcgataaaaaatacccgatcgctgactactcgctcaccccaacagtcgccattgtggatccggcttttgtgatgagtgtgccggcacatgttgctgcggataccggactagacgtgttaacccatgccacggaagcttatgtgtcagtgctcgccaacgactttaccgacggtttagccctacaagcgatcaagctcgtgtttgaacatttagaacgctccgtgaaagacaaagatcccgaagcgcgtgaaaaaatgcacaatgcgtccaccatggcagggatggcatttgctaacgccttcttgggcatgaaccattcccttgcacacaaaattggcgggcgtttccacactccacatggtcgtaccaatgcggtcttaatgccacatgtgattcgttataacggcacacgtccacaaaaaacggcaacgtggccaaaatacaattactacaaagcggatgtgaaataccaagatatcgcgcgtatgctcggtttaccttgtgccacaccagaagaaggggtgaaatcctttgcacaagcgtgctatgacttagccattcgcgtgggtatcaagatgtccttcaaagagcaaggtattgatgaaaaagaatggatggacgctcgtcgccaagtcgcgttactcgcctttgaagaccaatgttcgccagccaacccacgtttacctgtggtaagcgatatggaggtgatcttaaccaatgcctactatggttatgatgccaatcaatactga

SEQ ID NO: 31118 - DNA, 582 bp, Pasteurella multocida
atgacatttcctttatttgagacgatcgccattgtgaacggtgaaattcagcaccttgccttgcatcaacaacgttatgcggcaagtttggcgaccttttacggcgagaaaagatcgaaagtgcaggatcttgcgaaaattattcagattccgaccgcacttgaacacactcaacatgcaccgataatccgttgtcggattgattacaatcagcaagactgtgacgtgcattattttccctatcaacgcaaaatttaccgcacttttcagcctgtcatttgcgatgaaattaactatgatctgaaatatgctgatcgggcattattaaatcagttatttgctcagcgtagggattgtgatgagattataattatcaaacacggcaaggtgacagattgcagtattggtaatctggtgtttcgccaaggtgagcaatggttcaccccagatagcccgttattttacggcacacaacgagcctggttattacaacaaggcaaaattcaagcccgtcccatcttattgcaagagatcgcacaatttgaagaaattcggttaattaatgcactaaatccgctgtaa

SEQ ID NO: 31119 - DNA, 861 bp, Pasteurella multocida
atgatataccaaattattgcactctttatttgggcaagttcttttgttgctgggaaatatgcttttacaatgctcgatccagtattaaccgttcaaactcgcttaatgataattgcgttacttgtttttccactctttttacgtcattggaaaaaagtggataagaggttgcgtccacaattatggtggctcggcttttttaattatcctgcagtatttttattacagtttgttggacttcattatacgtccgcggcaagtgctgccactattattggtttagaacctttattgattgtttttgtggggcattttttctttaaagataaagccagttggtatcactggttatttggtacattagcatttattggtgtcgcaattttaattgctggtggaagccacgaaggcgaaatcaccgtccttggttgtcttttagtattatttgcagggattttattttctgtttgcttacgttggacaaaaaccatgattaatcagatcaccgcctctgcttatactgcgatttctgtggtgttaggggcgatcacttgtttacctttcactgcgttattaactcaaaattggactgtcaattggaactggcaaggtgtagcaggattactttatctggctattttttgcagttggattgcttattggttatggaataaaggactgaatgccacccataccaactttactgggttattgaccgcacttgagcctatatttggcgtaggtctagcgattttattattaggtgaaatgatttcgcttgtatcttggctaggcatttttatcatcgtatcttctacggtaatggccagtatgatgccaaaatttaccgcgaaggaatag

SEQ ID NO: 31120 - DNA, 2421 bp, Pasteurella multocida
atgtcaaataatacccctgaaaattatggtgcgaatagtattaaagtcttaaaaggacttgatgccgtgcgtaaacgtcctggtatgtacattggggatacggatgatggtacgggtttacatcacatggtgttcgaagtggtggataattccattgacgaagctttagcgggctatgctaaggatataacagtcaccattcacaccgacaattcggtgtctgtacaagatgatggtcgtggtattcctgttgatattcacccagaagaaggggtttcggctgctgaagtcattatgacggtattacatgcaggcggtaaatttgatgataattcgtacaaagtctcgggcggtttacatggtgtgggggtgtcagtagttaatgccctttccgataaattgcaattaaccattcgtcgtcaaggtaaagtgcatgaacaaatttaccatttaggtgaacctcaagcaccattagccgcgattggtgaaacggatcaaactggaactaccgtgcgtttctggccgagtccaaccattttcaataacatcgaattcgaatacgatattttggcaaaacgcttgcgtgaattgtctttcttaaattcaggtgtgtcgattaaattatttgataagcgcaatgacagacaagatcattttcattatgaaggtggcattcaagcgtttgtagaatacctaaaccgtaacaaaaacccaattcatcaaaaacctttctatttttcgacagaaaaagacggcattggcgtggaagtgtcaatgcagtggaatgatagctttaacgaaaacgtgtattgtttcaccaataatattccacaacgtgacggcggtacgcacttagcgggtttccgtggtgccttaactcgtagtttaaataactacatggataacgaaggtcataataaaaaatcgaaagtggcgacttcgggtgatgatgctcgagaaggtttggtagcgattatttcggtcaaagtacctgatcctaaattctcctcgcaaacgaaagacaaattagtgtcttcggaagtgaaaagtgcggtggaatcggtgatgaatgaatatttacaacaatatttattagaaaacccgtccgatgccaaaatcattgtcggtaaaattattgatgctgcccgtgcgcgtgaagcagcacgtaaagcccgtgaaatgacacgccgtaaaggggcattagatttaggtggcttaccgggtaaacttgctgactgccaagagcgtgatcctgcattatcggaattatacctcgtggagggggattctgcgggcggctcagcaaaacaagggcgtaatcgtaaaaaccaagccattttaccgttaaaagggaaaattctgaacgtagaaaaagcccgttttgacaaaatgctttcttctgctgaagtggggacattaatcaccgcactgggttgtggaattggtcgtgatgaatataatccagaaaaattgcgttatcacagcattattatcatgaccgatgcggatgtggatggtgcgcacattcgaaccttattattaactttcttctatcgtcaaatgccagagttgattgaacgtggtcatgtgtatattgcgcaacccccactttacaaagtgaaaaaaggcaaacaagagcaatatatcaaagacgatgaagccatggtgcaatatgaagtcgcacttgcgttagaaaatgcggcactgtatgtcaatgaaaacgcccctgctatgagtggcttggcgttagaaagtttagtatcagaatataatgcagtacaaaaaatgataggtcgcttaactcgctattatccagaagtggtgttaaaagaattgatttatcatccagagttaaccagtgaattaatggcagatcaaaaagaagtggaaaactggattgcaaccctcgtcgataaactggtggcaaaagaaagcaatggtaaccattatagctatcgtactgtgtttaacagcgaacgtcatttacatgaggcggtgttaacggttcgcacacatgggattgatacggattatttccttaacttccaatttgcaacaggcagtgaatatgcccgcatcgtgaaattaggcaaacaattaaccggtttaattgaagaaggcgcttatatcatgcgtggtgagcgtaaactggaagtgagttcatttgaacaagcgattgaatggttagtgaaagagtcgcgtcgtgggttaatggtacagcgctataaaggattgggggaaatgaatccagaacagctttgggaaaccacaatggatccgaatgcacgtcgtatgttaaaagtttcgattaaagatgcggtggcggcagacttactgtttaccactttaatgggtgatgaagtcgagccacgtcgtgaatttatcgaaagcaacgcattacatgcaaatttagatatttag

SEQ ID NO: 31121 - DNA, 1350 bp, Pasteurella multocida
atgcgtaaatccaattatattaatcaaagtaagcgccaatttctgcgtacgggtgcagccagtattgcagctggggcaattggtacatctagttttttcttacctaaaacagcaactgcctcattacctaaaatccgttcttcagcaaaaattgtgattgctggtgccggggcggctggtcttacaattgcttctcaactcgctgcgcggcttgaaccaagtgcacaaattattttaattgactcaagaatcgcgcattattaccaacccgggtttacgctcgtggccgctggcattaaacctaaacactatgttgtttcacaaactgaggaatatttacctgacaatgtgaaatggattaaagccgctgtaaatgaatttgatcccgatagcaatcgcctgacgacatcaacgggtgagcacatcacttacgattatttatttgttgcaacaggtctaaaacttgattatgacgctattgaaggcatggatgttaacttgatagggcaaaatggcttaggcagcatttatcacagcccagacagtgcttataaaacatggcagttgcttgatcaatttgccaacaaaggcggagatgcggtcttcctacgccctgcaacagaaatgaaatgtgcaggtgcccctttaaaatatacctttatcgtgcgtgattatttgctcagacgccataccttagataaatcaagattattttataacgcacataataaaaccttattcagcgtgcctatcgttgatgcaaaagtcaaaatgctgtttgctgaaaaaaatatccaagtcaattacgatcgtagccttacagcaattgatctgagtaaacgtattgcgacctttaatagcccagaaggagttgtagaagtcccttatgattttattaatgtggtacctccaatgcgagcacctgatgccgttcgtcaatcagcactcgcgtggcaagaaggaaaatgggctaacgatggttgggttgaagtagaaaaacataccttgcgtcaccgtcgttatgccaatgtgtttgctgtgggtgatgtggcaggggttccaaaaggcaaaacggctgccagtgtcaaatggcaagttcctgttgcagtagcacatttactcgcagaattagagggcaaaccttgtgatgaaatttacaacggttatacatcttgtccattaattactcaattaggaaaagggatgctagtagaatttgattataacaaccacttaacaccttctttccctggtgtaatagcgccattagaagaactgtgggcaacatgggcaattaaaacattaggtttaaaacccacttatttaggtatgttacgtggattagcttaa

SEQ ID NO: 31122 - DNA, 288 bp, Pasteurella multocida
atggacgaaatattttcaaaatgtgatgaagcaacgaaatttttaaaatctttttcaaatcaaaatcgattaattattttatgttgtattttagatcaaaaacgcaatgtaactgaaattacacaacttacaggcttaccacaagcctctgtttccaatcaacttgctttattacgagaaaataaactgattgattgtgaaaaacgccatcgtgaaagattatattatattgccgatccaagagtgcttgaaattatgcaactcttacataaattcttctgtcaataa

SEQ ID NO: 31123 - DNA, 1014 bp, Pasteurella multocida
atgaatagagcattagcgattgaattttcaagagtcactgaagctgccgcccttgcaggttttgcatggttaggtcgtggcgataaagaagccgcggataatgctgcagtacaagccatgcgtttgatgttaaatcaagttgaaatggatgcggaagtcgtgattggtgaaggtgaaattgatgaagcgcctatgctttatatcggtgaaaaagtgggaaatggtaaaggtgaacaaatttctattgcagttgatcctattgaaggcacaagaatgactgccatggggcaggcaaatgcgttatccgttttagctgccggtgggaaagaaacctttttaaaagcacctgatatgtatatggaaaaattagtggtgggtcctgaagtcaaaggtatggtggatctcaatttaccactagaacaaaatttacgtcgagtggcatcaaaaatggggaaattactttctcaacttacagtgattactttagataaaccccgtcatcatgagatgatcaaaagaatgcaacaattaggtgtgaaagtattggctataccagatggtgatgtagcagcctcgatattgtgttgtttaccagatggtggggtagacatgctatacggtattggtggcgcacctgaaggcgtcattgcagcggcggctgtgcgtgctttaggtggcgatatgcaagcccgtttattaccacgtgatcacgtaaaaggagatacacctgaaaatcaagcacttgctgcagaggaaattcgtcgttgccaagaaatgggcattgaagttaatcaagtattaaaactagaagatctggtacgtgatgataatttagtcttttctgccactggtattactaacggggatttgttgaaagggattcaccgtaaaggcaatcttgctacgacggaaacactacttattcgtggtcgttctcgcaccattcgtcgcatccaatcagtacattatttggatagaaaagataccgcactttatcgtattattggtgcttaa

SEQ ID NO: 31124 - DNA, 1890 bp, Pasteurella multocida
atgttttatactgaaaattatgatgttattgtgatcggtggtggacacgcaggtactgaagctgcacttgcaccggcacgcatgggactcaagaccctattattgacccataacgttgatacactagggcaaatgtcttgtaatcctgcgattggtgggattggtaaaggtcatttagtccgagaaattgatgcgatgggcggtttaatggcaactgctgcggaccaagcaggaatccaatttcgtaccttaaacagtagcaaaggaccggcggtacgtgctacacgtgcgcaagctgaccgcgttttatatcgccaagcagtacgtattgcattagaaaatcaagaaaatttagatatttttcaacaagaagtgaccgatattattttagatcaggatcgtgtctgcggtgttgttactaaaatgggtttaaaatttcatgcaaaagcagtgattttaacagccggtactttcctttctggtaagatccacattggtttagaaaattatacaggtggacgcgcgggtgatcctgcttcagtgatgttagccgatcgtttaagagaactgaatttacgtgtagatcgtttaaaaacgggtacaccgccccgtattgatgcacgtactattgatttctcagtactggctaaacaacatggcgatgaaaaattacctgtcttttccttcatgggatctgttgatcaacacccacgtcaaattccatgttttattacccatacaaatgaacaaacgcatgaagtgatccgtaataacttagatcgcagcccaatgtatgctgggatcattgaagggatcggtccacgttattgcccttctattgaagataaagtaatgcgtttttctgagcgtaattctcatcaaatctaccttgaacctgaagggttaaccagtaacgagatctatccaaatgggatctccaccagtttaccttttgatgttcaaatgaagatcgttaattcaatgaaagggatggaaaaagcacgcattatcaagccaggttatgcaattgaatacgactattttgatccaagagatctcaaacccactttagaaacaaaatcgatccgtggtttattttttgctggtcaaattaacggaaccacaggttatgaagaagccgcagggcaaggtttactggcaggaattaatgctgggttatttgtacaagaaaaagaagcttggttcccacgtcgtgatcaagcatatatcggtgttcttgttgatgatctttgtactttagggacgaaagaaccttatcgtgtatttacgtctcgtgcagaatatcgcttattgttgcgtgaagataatgctgatagtcgtttaacaccaattgctcatcaattaggtttaattgatgaaaaacgttgggcaagattcaatcaaaaaatggaaaatattgaattagaaagacaacgtttacgccaaatttggctccacccacgttctgaatatttagacgaagcaaataaggtcttaggtagtccattagtgcgtgaagccagtggggaagatttattacgtcgcccagaaatgaattatcagattttaacttcattaacgccattccaaccagcaatggatgatcaagaggcggtagaacaagtagaaattgcgattaaatatcaaggttatattgaacatcaacaagaagaaattgcacgtcaaaaacggcatgaaagtaccgcgattcctgctcattttgattatactgtcgtatctggtttatccaatgaagtacgtgctaagttagagcaacatcgccctgtttcgattggacaagcttcgcgtatttctggtgtgactccagcggcgatttcaattttattagtaagcttgaaaaaacaaggcatgttaaagcgtggtgaataa

SEQ ID NO: 31125 - DNA, 633 bp, Pasteurella multocida
atgactaaccttgagcaacaacttagccaaaaattagaaattttattaaaacagaccgcactttcgataaccgatcaacagaaagagcagttaataaaattggttttattattaaataagtggaataaagcctataatctcacttctgtacgtgatccgatggaaatgttggtaaagcatatcttagacagtgttgtggtgagccctcatttacaaggtaaacattttattgatgttggtacaggtcctggcttaccgggattaccgcttgctattgttaatcctaataaacactttgtacttttagacagtttgggtaaacgaattagttttattcgtaatgcgattcgtgagttaggcttagataatgttgaagctgtactaagccgagttgaagaatatcatccagaacaaccatttgatggtgtattaagtcgtgcttttgcttctttaaaagatatgacggattggtgtcaacatttaccaaaacaagatggttatttttatgctttaaaagggctttaccatcaagaagaagtggaagaattaagtgaaaagtttactattcaacaggtgattcgactacaagtgccagagctgattggagaaagacatttagtgattgttaagtaa

SEQ ID NO: 31126 - DNA, 795 bp, Pasteurella multocida
atggcagcagagcttacaacagcgggatatattgggcaccatttagcattcttgaaaacaggggattctttctggcatgttcatttagatacccttctattttcaattatttcaggtgcaatttttctttttgttttttcaaaagttgcaaaaaaagcaacgccgggtgtgcctagcaagatgcaatgttttgttgagataatggttgattggattgatgggatcgtaaaagaaaatttccacggtcctcgtcatgctgttggaccattagcattaactattttctgctgggtattcattatgaatgctatcgatttgatcccggtagatttcctacctcaattagcccatttatttggtattgaatacttaagagctgttccaacagcagatatcagtggaacattaggcttatcaattggtgtcttcttcttaattattttctatacaatcaaatcaaaaggtatgagtggctttgttaaagaatatacgcttcatccttttaatcatcctttgttaattccggttaacttagcgcttgaatcagtcacattattagcaaaacctgtttctttggcgttccgtcttttcgggaatatgtatgcaggtgaacttatctttattcttattgcagtgatgtacatggcaaataattttgcacttaattcaatgggcattttcatgcatttggcttgggctattttccatattcttgtgattaccttacaagcatttatttttatgatgcttacagtggtttatttgagtatgggttataacaaagcagaacactaa

SEQ ID NO: 31127 - DNA, 255 bp, Pasteurella multocida
atggaaactgtaattactacaacaatcatcgcatctgcaattcttcttgctgtagcagcattaggaacggctttaggttttgctatcttagggggtaaattcttagagtcatcagctcgtcagccagaattagcaagcagcttacaaatcaaaatgtttattgttgcaggtcttttagatgcgatttcaatgattgctgtaggtattgcgttgttatttatctttgctaacccattcatcgacctattaaaataa

SEQ ID NO: 31128 - DNA, 471 bp, Pasteurella multocida
gtgaatttaaatgcaacactaattggtcaacttatcgcgttcgcaatttttgttgcgttctgtatgaaatttgtttggccgccaattattaaagcgattgaagagcgtcaacgttcaattgcaaatgcgttagcatcggcagaagcggcgagaaaagagcaagcagatacgaaagctttagttgagcaagaaattactgaagccaaaatgcaagcgcagcaaattattgatttagcgaataaacgtcgcaatgaaattttagaagaagtcaaagtagaagctgaagcaacaaaagcgaaaattattgaacaaggttatgctgaagtagaagcagagcgtaaacgtgttcaagaagaattacgtgttaaagttgcatcgcttgcgattgcgggtgctgagaaaattgtgggtcgtacagttgatgaagcggcaaacagtgacattattgataaattagttgcagaactataa

SEQ ID NO: 31129 - DNA, 534 bp, Pasteurella multocida
atgtcagaattaactacaatagctcgcccttatgccaaagcagcatttgattttgctattgagcaaaatgcagtagaaaaatgggcgaatatgttgcatttttcatccgaattaatcaaagatgaaacaatgcaaacttttctaaaaagctcactttctgctagtaaacttgccgatacagtaatttcaatttgtggcgaacaacttgatcaatatgggcaaaatcttattcggttaatggctgaaaataagcgtttggaagtgcttcctgctatctatcaagcatttcaacattatgttgaagagcaccaaaaagtagcagaagttcaggtcatatcagcacaaccattaaatgcaacgcaagagcaaaaaattgctagcgcaatggaaaaaagattggctcgtaaagttaaattaaattgtagcttagatagttcactgatcgcaggtgtaattattcgtacagatgattttgttatcgatggaagtagtcgcggacaactgtctcgtctagcaaatgagctgcaattataa

SEQ ID NO: 31130 - DNA, 1542 bp, Pasteurella multocida
atgcaactaaattctacagaaattagtgaattgattaaaaaacgcattgcccaattcgatgttgtgagtgaagctcgtaatacggggacaatcgtttctgtgagtgacggaattatccgtattcacggtttaagtgaagtgatgcaaggggaaatgattgcattaccaggcaatcgctatgcgatggcgcttaaccttgagagagattctgtgggtgcagtagtaatgggaccttatgcagatcttgctgaaggaatggaagttcaatgtacaggtcgtattcttgaagtcccagttggtcgtggcttactaggtcgtgtcgtcaatacattaggtgagccaatcgatggaaaaggtgagatcgaaaacgatggtttttcaccagttgaagtgatcgcaccaggtgttatcgatcgtaaatcggttgatcaaccagtacaaactggttataaagcggttgactccatggtaccaatcggtcgtggtcagcgtgaattaattatcggtgaccgtcaaaccggtaaaacggcattagccattgacgccatcatcaatcaacgtgattcaggtatcaaatgtatttatgttgcaattggtcaaaaagcatcaactattgctaacgtagtacgtaaattagaagaacatagtgccttacaaaatacaatcgttgttgttgcatcagcatcagaatctgctgctttacaatatttagcaccatattctggttgtgcgatgggtgaatatttccgtgatcgtggtgaagatgcattaatcatttatgatgatttatcaaaacaagccgttgcgtatcgtcaaatttcattattattacgtcgcccaccaggtcgtgaagcattcccaggggatgttttctatttacactctcgtttacttgagcgtgcttctcgcgtaaatgaagaatatgttgagcgtttcacgaatggtgaagtaaaaggaaaaacgggttctttaaccgcacttccaattattgaaactcaagcaggtgacgtttctgcgttcgttccaactaacgtgatttcgattactgatggtcagattttcttagaatctaatttatttaactcaggtattcgccctgcggtaaacccaggtatttcggtatctcgtgtaggtggttcagcgcaaactaaagtaattaaaaaattagcaggtggtattcgtactgcacttgcacaatatcgtgaattagcggcatttgctcagttcgcttcggatcttgatgatgcaacacgtaagcaattatcacatggtcaaaaagtaactgaattattgaaacaaaaacaatactctccgttatctgtagcacaacaagcattagtgttatttgcagtagagtttggttacttagaagaagtggacttagatcgtattggttcatttgaatcagcacttttagagtatgctaaccataactatgctgattttatgcgtgagttaacccaatctggcaattacaatgatgaaattaaagagtcattaaaaggcattttggatagcttcaaagcaaacagtgcgtggtaa

SEQ ID NO: 31131 - DNA, 741 bp, Pasteurella multocida
atgaaaaaaaccaaacgtctcgtaaccttgttcttagctgccacagtattaagtggctgtgcgactattgattcaaaaacaggtgagcgtaaagatccattagaaggctttaaccgcacaatgtgggattttaactataaagtagttgatccttatctgttaaaacctgttgcgacaggttggaaagagtatgttccaacacctgtaaaatccggtttaacgaatgttgcgaataacctagatgaaccagccagttttgtaaaccgcttactttcaggtgaatttaaaaaagcgatgactcacttcaatcgtttttggattaatacggtatttggtatcggtgggttaattgatgtggcaagctatagcccaccgttaagagtagaaaatcaaagccgttttggtgatacactcggacgctatggggttgaaactggttcttatgtcatgctaccactttatggaccagccacaccacgccaagacattggtaatttggcggataccacctacccaatgctatctttattaggaccttggtcactcttaaaatctggcgtacaaattattgacggtcgcgctaaagcattagataaagatgccttattagaacaatcacaagatccgtatattactttccgtgaagcttatttccaaaaccttgaatatcgagtgaaagacggcaaagtaagcacaccaaaacaggatctcgctcaagatatcttaaatgaaattgattaa

SEQ ID NO: 31132 - DNA, 1158 bp, Pasteurella multocida
atgtctgaaccagcaattttggtattggctgatgggagtgttttccatggcacctctattggagcaaaaggccacaccgtaggcgaagtggtgtttaataccgctatgacaggctatcaggaaattctaacggacccttcttattttcgacaaatcgtcaccttaacttatcctcacatcggcaataccggtacaaatctagaagattgcgaagcgaatcacgtttatgcctcagggctgattattcgcgatttacccttattacacagcaatttccgttcatccatgagtttgcgtgattatcttcaaacccataatgtggttgctattgcggatatcgacacacgccgtttaacccgtattttacgtgataaaggtgcgcaagcgggttgtatcatgaccggtgagattgatgaagccaaagcccttgagttagcgaaaagttttgggtctatggcgggcaaagatcttgcgcaagaagtgagtacgggtgaaatttttacttggacatcaggtcaatggcaattgggtaaagggtttattgaacaaacccaagcggaatttaatgtggtggcttatgactttggtgtcaaacacaatattttaagaatgctcgctgagcgtggttgcaaaatcaccgttgtaccggcaaaaaccagtgcagagcaagtgttagcattaaatccagatggcattttcttgtctaatggaccaggcgatccggaaccttgtgattatgccatttccgctattcaaaccttattagcctcaaagaaacccatttttggtatttgtttaggtcatcagttattaggtttagccgcaggtggtaaaactaaaaaaatggcatttgggcatcatggtgctaatcaccccgtacaagatttgaatacacaaaaagtgtttatcacgagtcaaaatcatggttttgaagtagatgaagctagcttaccaagtcatgtgcgtgtgacacatcgttcattatttgacaattctgtacagggtattgaactcagtgatcagtctgcgttttctttccaagggcaccctgaggcgagtccaggtccaaatgatgtggcttatttatttgataaatttattaatgaaatgcgcaaggcaaatttaagtcagttatcgacttatgtcgcgcaccattag

SEQ ID NO: 31133 - DNA, 3207 bp, Pasteurella multocida
atgccaaaacgtacagatataaacaccatattaatcatcggcgcaggtccgattgtgattgggcaagcgtgtgagtttgactattcgggggcgcaggcgtgtaaagcgttgcgagaagaaggctataaagtggtattggtgaactctaaccctgccaccatcatgaccgatcccgatatggcggatgtgacctatattgagccgatagagtggcgaacagttgaaaaaatcatcgaaaaagagcgtccagatgccattttacccaccatgggtggacaaaccgcattaaactgtgcgttggatttatccaaaaacggcgtgttgaaaaaatacaatgtcgagctgattggggcaaaagaagatgccattgataaagcagaggaccgtgggcgttttaaagaggcaatggaaaaaatcggtttaagtacaccaaaatcctttgtttgtcataccttggaagaggcgtgggcggcacaatctgaagtgggtttcccgactttgattcgtccgtcttttactatgggcggttctggtggcgggattgcgtataacaaagatgaattttatgccatttgtgaacgaggatttgatgcttcaccgacccatgaattactcattgaacaatctgtattaggttggaaagaatatgaaatggaagtagtacgcgataaagcagataactgcattatcgtatgttcgattgaaaacttcgatccaatgggcgtacatacaggggattcgatcaccgttgcaccggcacaaaccttaaccgataaagaataccagatcatgcgtaacgcctcgattgcggtattacgtgaaatcggcgtagatacgggaggatcaaacgtccaatttgcgattaatccagaaaatggagaaatgatcgtgattgaaatgaacccacgtgttagccggtcttccgcccttgcttccaaagcaacggggttccctattgccaaggtagcagcgaaattagccgtcggttacaccttaaacgaactccgtaatgatattacgggaggattaattcctgcgtcctttgagccttctattgactatgttgtcactaaagtaccgcgttttgcgtttgagaaattcccacaagcggatgatcgcttaaccacacaaatgaaatcagtgggggaagtgatggcgatgggacgtactttccaagaatccttacaaaaagccttacgtggtttagagaccggcatttgtggctttaatttaatgtcagaagagccggaaaaaattcgtcaagaattgggtaatccgggacctatccgtattctttatgttgcagacgcgtttggtgcaggcttcactttagacgaagtccatcattacagtaaaattgatccatggttcttaatccaaattcaagatttggtgctagaagaacttgcccttgagaagcgcacattagatgatctggattatgccgagcttcgtcgtttaaaacgtaaaggtttctcagataaacgtattgctcaattgactaaatcagcggaaagtgcggtcagaaataagcgcgtttctttaaacttacaccctgtttataagcgagtggatacttgtgcgggtgagtttacctcggataccgcctatttatattccacttacgaggaagaatgtgaaagccgtccgtcagataagaaaaaaatcatgattttaggtgggggaccgaaccggattggacaaggcattgaattcgattattgctgtgtacacgcctcacttgcgctacgtgaagcgggttttgaaaccatcatggtgaactgtaacccagaaaccgtatcgacggattttgatacctctgatcgtctttattttgagccattgacgctagaagatgtccttgaaattatccatgtagaaaaaccacatggcgtgattgtgcattatggtggtcaaacaccacttaaacttgccaatgatctacatgccaatggtgtgaacattattgggacatccgcagacagcattgatgcggcagaagaccgtgaacgtttccaacaaattttgcataaattacatctgaaacagccaaccaaccgcacagcacgcaatgcggaagaagcggtgaaactcgctgaagaagtaggttatccgttggtggtgcgtccgtcttatgtgttaggtgggagagcgatgcaaatcgtgtataacgtggatgaattacagcgttatatgcgtgaggcagtgtcagtgtctaacgacagtcccattttattggatcacttcttaaataatgcgattgaagtggatgtggattgtatctgtgacggtgcggaggtcgtgatcggtgggattatgcaacatattgaacaagcgggtattcacagtggggattccgcttgctcgttacccccttattccttaagccaagaggtgcaagatgaaatccgtcgtcaaacggcagagatggcatttgcgttaggggtgaaagggttaatgaacgtacaatttgcggtacaagacggcgtgatttatgtattagaagtcaatccacgtgcaagtcgtacggttccttttgtgagtaaagcaacagggcgcccacttgccaaaattgcggcacgtgtgatggcgggtgaaagcctgaaagcacagggtattcaaggggaagtgattccaccattctattcggtgaaagaagccgtcttcccattcatcaaattcccgggcgtcgatacggtgttaggtcctgaaatgcgttcaaccggtgaagtgatgggcgtggggacaacttttgctgaagcgttcttaaaagcccagcttggtgccaacgaacgtattccaaaaaccggtaaagtgtttttgtcggtgaatgatgcggataaaccacgtttattacctattgcacgtcaattacaagaatcaggttatggcttatgtgcgactttaggtacggcaaaattcctgcgtgagcacggtgttgcggtacaaattattaataaagtgcgtgaaggtcgcccgaatattgttgacgcgattaaaaatggtgaaattgctatggtgatcaatacggtgagcggcttagctgaaaccgtaacggatggacacgccattcgtcgcagtgcgttgcaacaaaaagtatttttacaaactacccttgcgggggcggaagccttagcgggcagtgtggaataccttgctgattctgaagtgtattcgttacaggatttacaccaacgtttactgtaa

SEQ ID NO: 31134 - DNA, 1230 bp, Pasteurella multocida
atgtggttgagattgaataacgtgaaaactcgaagaaaactcaccgcactttgttgcggcttattgtgcatgtcggtcaatgtatttgctaatgatttatctaaaattcaacaacaaatcaaacagcaagaacaaaaaattgctgagcaaaagaaagcgcagcaaaaattacaatcacatttaaaaaatcaagaaacccaaattaatcaagtcataacacagctacgtcaaacagaaacagatttaaaagaaagtcgcaaaatgattagcgacacagaaaagcaaatccagcgcttagagaagcaagaacgtgagcaaaaacaaaaattggctgaacaattagactcagcttaccgttcggcggctaatccttccgcactagagcgtatgctgtccgaggaggcaaaaaatgccgatcgtcttaaacagtattatgcccatatgaaccaagcgcgtttggcgttaattgatgatctcaaagcgacacaaacgcaattagcacaagaaaaagccacgatgattgctcaacaaaaagcgcaacagagccaattatcgcaacagaaaaaacagcagcaagatctgcaaaaagtgcaacaagagcgacagtccacgttaaaacaattaaatcgaaatttatcgcgtgatgaaacccgcttggaaaccctacgagctaatgaaaatgccctacgtcaagagattcaacgcgcagaacaagcggcacgccagcaggagcagcgtgagcgtgaagcttacgcacaaaaaaagcaagcagaagaaaagaaaacgcaaaaaccgtatcagccaacagcacaagaaaagcaattaatggcaagctcaagtggtttgggtaagccgaataagcaatacgcttaccctgtttcaggcaaattattaaatagttttggtgcaactcaaatgggcgaattgcgctggaaaggaatggtcattggcgcgaatgcgggtaccgcagtgaagagtatcgcagatggacgcgtaattttagcaaactggctacaaggctacgggctcatggtgattatcaagcatggtgaaaatgatttaagtctttatggctataatcagtctgtggttgtcaaagagggacaatttgtcaaagccggtcagaaaattgctgaagttggtagtagtggtggacaatcacaatcttccttgtattttgaaattcgtcgtaaaggggtggctgtgaatccaataggttggttgaaatga

SEQ ID NO: 31135 - DNA, 843 bp, Pasteurella multocida
atgaaaacaattggcgtcaaaagggtgaaaagtgcgctactttttgggggattttggatcagcatggcgttggcacagcctgccaagttagccattgtgatcgatgatattgggtatcaccagaaagaagacgcacaaatttatgcgctaccaaaagaaatttcggtggcgattatcccgtctgctccacatgctcgccaacgtaatgaacaagcctatcaacaaggtcgtgatattttaatccatatgcccatgcaaccgttaagtcatcagcgcattgaagcgggaggattacatgttggcatgcgccaagaggacgtacaacaacgtgtgcaaactgccaaggcgattgtgtctcatgccattggcatgaataatcacatgggcagtgccgcgactgctgacgcggagttaatgcataaattaatgcaagaactgaaagtgcaagatttgttctttcttgatagccgcaccattggacgcagtgtggcaggcaaaatagccaaagagtacggggtacaaagcctcgatcgccacatttttttggatgacaaagacacttatgcggatgttgaacgtcaatttcaacgtgcagtgcattatgcacaaaagcacggtacggcaatcgcgattggtcatccacgtaaaaatacagtagccgtgttacaagccggattaaaacacttacccgataatgtacagctagtcggcatggggcgtttgtggcgtagtgaaacagagacggcgccgaaaccgcttatttctctctttaatacaatgccagcaccaacatcgaacatgccttatcaggctgtcccaatgttgagaggcataccgcaataa

SEQ ID NO: 31136 - DNA, 477 bp, Pasteurella multocida
atgctagatattgttttatacgaacccgaaatcccacaaaataccggcaatattattcgtttatgtgctaatacgggttttcgcttacacttgattgaaccactgggttttacttgggatgataagaaattacgtcgttctggcttggattatcatgaatttgccgaaatcaaacggcataaaacctttgaaacatttttagccactgaacaaccaaaacgtttatttgctttaaccacgaaaggttcaccagcacacagccaagtgcaatttgagttaggggattatttgatgtttggtccagaaagccgagggattccaatgtccattttagacagcttgcccatggcacaaaaaattcgaattccgatgacggaaaatagtcgtagcatgaacctctctaattccgttgcggtcgccgtctatgaagcatggcggcagctaggttacggcggtgcagtaaatctcccacgttaa

SEQ ID NO: 31137 - DNA, 1380 bp, Pasteurella multocida
atgtcaacggaaaataaaaaaggtggcttttggtcttggcttggtttgggaaaaaagcaagaaacaccagaggcgacacagacgttaccgagtacagaaacgtctgacaatattgagcaagtcgaagaaatcaaaccagaggttgaaccccaaattgagcaaacagaaagtgcggtgatttctgatgaaatatcatcttcgaccacatccgatacaccggcgacattctccccaacattagacgaaacagacgcgcaacacgtgaagactgatgagggtgacgatgtgcagagtgcgtttcagcaggctgaaaaggagacgaaaacggaagactgccttgaagaaacggattctgttgccagtgcgctaacatctgatgaggacgtcaaactggctgtgttaacaccttctcaacctcaagaacaagaaaaaaagagtgaaggtggtttttttagccgtttagtgaaagggctgttaaaaacgaaacaaaatcttggtgcgggttttcgcagtttcttttttggtaaaaaaattgatgatgcattatttgaggaattagaagaacagctcctcatcgccgatttaggtgtaccgactgcgacaaaaatcatcaataacttaacgcaacatgctagtcaccagcaattaaaagaggcggatttgttgtatcaacaactcaaagtcgaaatggcagagattcttaaacctgttgcccagccactcgtgattgatcaaagcaaaaaaccttatgtgattttaatggtcggtgtgaatggtgtgggaaaaaccacgaccattggtaaattagcgcgtcagttccaaaatgaaggtaaatcagtaatgttagcggcaggtgatacgttccgtgcggcggcggttgagcaattgcaagtgtggggtgaacgtaacagtattccggtggtggcacaaagcacaggatccgattctgcttccgttatttttgatgcgatgcagtctgctgccgcacgtcatgttgatgtgttgattgcagatacggcaggacgtttacaaaataaaaataacctaatggacgagttgaaaaaaattgtgcgtgtgatgaaaaaatatgatgaaacagcaccacatgaaattatgctaacgctcgatgccggaacgggacagaatgcgattagccaagcgaaattattccatgaagcggttggcttaacggggattaccttaaccaagttagacggtaccgcaaaaggtggtgtgatttttgcgattgctgatcaattcaatttaccgattcgttatattggagtgggtgaaaaaattgaagatttacgtccatttaatgcggatgaatttattgacgcgttatttgtgcatgaagacgaaagcagcgtagcaaattaa

SEQ ID NO: 31138 - DNA, 1005 bp, Pasteurella multocida
gtgatctctatcgctgttttaaggatcaaaactatacaggcgaaaaagcatagtttacattcaagcaagaaggataaggcggaagtaaattggagggaggttatgcgagagcagtcctttgaaacacaaaatattaatattgaaaaaacctatggtggacaagaaagtagtagcatcatccactatgaaacctttgataatcttgccttattttatggacggaaatcgttggtgcattttcatgatcgcttttatcaagtgcactatttaactgaaggaagcattgcattacagttagatgcacatgaatatcgcctgtatgccccttgtttttttattactccgccttctattcctcatggcttttacaccgatttagatacgcatgggcacgttttaaccattccacaagagtttgtttggcagttattagaatcgttaaaacgcgatatcaattatttttatcccatgtgtattgaattatctccgcaagaggaagcacagcaaatttttaaatttgaatatttatttaatttattggcgggagagtaccgtcaacatacggacgaaaaacagaccgcactgcgtttaagtgcgaaattaattttattagagatttatcgtttgtcgaaaagcaatgagaaaaagtacagtccgcgtaacaacgagctgtatttatttaatcagtttaacttcctcatagaagataatttcaaaaataattggcgcattaatgattatttagatcgtttatgcattagcgaaagtaaattaaatgccatttgtcagcatttctcagctacttcaccaaaacgtcttatcattgaacgccaaattcaagaagcgaaacggaagctattatttactcagcattcgatctatcaaatcgcctatgatctcggttttaaagatcctgcctatttctcgcgttttttccaaaaagaaacgcaattgtcaccaaaagcatttcgcgatcaagatcacatatcttcgaatccatcgtga

SEQ ID NO: 31139 - DNA, 765 bp, Pasteurella multocida
atgagtaaatatgcaaaagtgatgtatcaaaatcaaatccatagcgtagaagtgcgaccaaatggcttgttaaccgatcaacaacaattattgccgagtgaagcggtaacctggttaccgccagccagtggcatgatgtatgccttaggcttgaattacgccgatcacgcctctgaattagattttaagccacctgaaaagccccttgtgtttgtgaaaacccatcacacttacaccggtcacaacagcaccacatggcgccctgataatgtggactatatgcattatgaatgtgagctggtggtggtgattggtaaaaccgcaaaaaatgtaaaacgggatgaggcgatggattatgtggcgggttataccctgtgtaatgactatgcgattcgtgattatttggagaactattatcgcccaaatttacgcgtgaaaaatcgtgttggcacgacccctgttggtccttggattgtggataaagcggatgtgaaagatccgatgaacttaactttaagaacatgggtcaatggcgagttgtgtcaagaagggaataccaaagacatgatctttgatattgcgtacctcattgaacacctctcccatattactacattacaaccgggcgatatgatcgccacaggcacaccaaaagggttagcagatgtgaaaccgggtgattgcgtagaaattgaaattgagcaaattggcaaattgacgaactacattgtgagtgaaacagccttttttgcgcaaaacgaataa

SEQ ID NO: 31140 - DNA, 1461 bp, Pasteurella multocida
atgattaagcattggataaatggtaaagaagttgccagtgaagaaacctttgataattttaatcctgcaacaggtgaagtaatttgtcaggttgcctctggcggtgaaaaagaaattaatgcggcagttcaagcagcaaaagacgcgttcccaaagtggtcaaaaacaccagccaaagaacgcgcccggttgatgcgtaagttaggtgaattaattgatcaaaatgtggcgaaattggccgaattggaaaccttagatacgggcttacccattcatcaaaccaaaaacgtgttgattccccgtgcctcgcataactttgatttctttgccgaagtttgtacgcgtatgaatgggcatagctatccagtcgatgacaaaatgctcaactataccctttatcaaccggttggggtatgtggcttggtttccccatggaacgtgccatttatgacagcaacctggaaaaccgcaccttgtttggcattaggcaatactgcggtacttaaaatgtccgaactttcacctttaaccgcgaatgaattagggcgtttagccttggaggcaggtattcctgaaggggttttcaatgtggtgcaaggtctcggttcaacagcaggtcatgcgttagtcacacacgatgacgtgcgtgcgatttcatttaccggtggcacggcgacaggtaagcatattttaaaacatgccggtttgaaaaaatattcaatggagttagggggcaaatccccagtgttgatttttgatgatgcggatttagatcgcgccttagatgcggcattgttcaccattttctcgctcaatggcgagcgttgtactgcgggttcacggatttttattcaagaaacagtgtatgacgagttcgtgaaacaatttgcagcacgtgcaaaacggttaatcgtgggcgatccgcaagatttcaatacccaagtaggttctatgattacccgtcaacattatgacaaagtgacaggctatatccgtattggtctggaagaaggcgccactttacttgctggcggtttagaacgcccgcaaaacttaccagcacatttacaaaaaggtcactttattcaaccaacggtctttgctgatgttgataaccgtatgcgtattgcgcaagaggaaatttttggtccggtggtgtgtttaatgaaatttaaagatgaagcagaggcattacgtttggcaaatgacgtggaatacggtctagcttcttacatttggacaaaagacattgcgaaagcattgcgtttatccaatggcattgaagcggggatggtcttcgtcaacagtcaaaacgtacgcgatttacgtcaaccgttcggtggcatcaaagcctcaggtattggacgcgaaggcggcgaatacagctttgaagtctttgctgaattgaaaaatgtgtgcatctcaatgcacgatcatccaattcctcgctggggattataa

SEQ ID NO: 31141 - DNA, 846 bp, Pasteurella multocida
atgggtaaactcgctttagctgccaagattacacatgttccgtcaatgtatttgtcagaacaaccgggcaaacattatggttgccgtgcttccgccattgaaggtcacaaagaaattagccgacgttgtcgtgatttgggggtcgatacgatcatcgtatttgatacacattggctggtgaatagtgcatatcatgtgaactgttgttcgcattttgaaggggtttataccagtaatgagctcccacactttattcgtgatatcacttttaattatgaaggcaatcctgaattaggtcacatgatcgtcaaacatgcggtggcgaaaggggtgcgcgctcaggcacatgagattgatagcctgaaattggaatacggcacgttggttccaatgcgttatatgaacgaagataaagcctttaaagtaatttccattgcggcattctgcacctcgcattcattcgaagatagtcgcaagctcggtgaggcggtattagacgccattaaagaatacgatggcattgttgccgtgttagccagcggctcgttatcacactactttattcccgatcatttagccaaagacgggatgaacagctatacccgtgaatttgagcgccaaattgatttgcatgtagtggatatgtggcgtaaaggcaatttcaaagacttttgcaaaatgttaccggaatacgcggaattctgtcgcggcgagggcaatatgcacgatacagtaatgttgctcggtatgctgggttgggataaatacgataagccagttgaaatcttgacggatttattcccaagttccggtacgggacaaattaacgccgtcttcccggtgtaa

SEQ ID NO: 31142 - DNA, 384 bp, Pasteurella multocida
atgccacactttattgttgaagccaccgaaaatttgcgtgatgacgtggattggcaaccattatttaaacaggtgcacgattatcttgccagtaccggtattttccctttaggcggcattcgtagccgtgttcattgggtggatgtgtatcgtatggcggatgggatagaagatgatgcttttgtacatatcacgttaaagattggtgcgggacgtgatgaagccagtttaaaacctgtcggcgaacaggtgtttacactgttaacgaattactttcaaccgctatttgagaaacgctattttgcgctgtcatttgaaatggcggaattgcatccgaccttaaatttcaagaaaaacaatgtgcatttgagatttaagaaataa

SEQ ID NO: 31143 - DNA, 801 bp, Pasteurella multocida
ctgaaaaatcactttaaacaagcgttaaaagagaaaaaaccgcaaattggcttatgggtcggcttagcggatggctatgcttgtgagcttgccgccactgccggatttgattggttattgctcgatggtgagcatgccccgaatgatctacgcaccttgttacatcagctccaaaccttagccgcgtatcctactactccgattattcgccccgtgattggacaaacgcataccattaaacaactgcttgatattggggcgcagaccttattggtcccgatggtggaaaccgctgaacaagcgcgcgaattggtgaaagctatacattatccaccaaaaggtgtgcgtggcgtaggcagtgccttagcgcgtgcgtcgcgttggaatagtattcctcattatctacaacaagcggatgaagaaatctgtttattggtgcaagtggaaaacaaaaccggcttacagaacctgaaagagattgctgaagtcgatggggtcgatggcgtttttattggacctgccgatctgagtgcgtccttagggcatttaggcaatccatcgcatccagaagtgcaacaagcgattgaacaagcgattgccaccatttgtgcagccgataaagctgccggtattttgtatgccgatgaaaaaatggcaaaacactatttagcactcggctgtacgtttgtggcggtaggcgtcgatacctctttgttaatgcgtgcattaaacgatctttcacagaagtttaagtcatcgaatgcactagaaaacacagctagtgcgaaccaaatttattaa

SEQ ID NO: 31144 - DNA, 1461 bp, Pasteurella multocida
ttgggaggtatttcaatgcaacaattttccctattaaaaaccaaagcctatattaatggcgagtatgtacaggcaaaggagcacaaaacctttgcggttactaatccagcgaaccaacaaatcatttgtgagttgccagatttaagcgcagaagaaaccgaatatgcgattgcttgcgcggcacaagcccagaaaaaatggcaaaaagttacgccgaaagaacgcgcgaatctcttacgccgttggtataacttagtcattgaaaaccaagaagaattagcccaattactgagtttagaacaaggtaaaccaatcaacgaaagtcgcggtgagattttatatggcgccagttttattgaatggttcgcggaagaagccaaacgtatttatggcgacgtgttaccacaggataaagaaaatcatcgcttattagtgattaaacaaggcattggggtggtggcagcaattactccgtggaacttcccgaatgcgatgattactcgtaaagccgcgccagcctttgcggcaggttgtgcaatggtattaaaacccgcacaggaaaccccactttctgcattagcgttggcagaactggcacaccaagcgggcttacctgcggggctatttaatgtgattacttcaactcgctccgttgaaattggcaaagtgctaaccgaacatccaacggtacgtaaagtgacctttaccggttcgacccgtgtgggcaaaatcctgatggcgcaatcggcgagtacagtgaaaaaattgtcattagaattgggtggcaacgccccgtcgattgtgtttgatgatgcggatttagagaatgctatcgagggcattatcgcctcgaaattccgcaacagtggacaaacctgcgtctgtactaaccgtatttatgtgcaagccggcatttatgaccgttttgtggaactatttagcgccaaagtggcggcctttaaagtgggcagtgccaatgaagccggtgtcaacattggaccattgattagtcaaagtgcggtcaataaaatccaagaacacatcgacgatgccactgcaaaaggggcaaatttggtgatcggcggtaagcttcatacgcgaggcggtactttctttgaaccgaccgtattgcgagatgtgacccaagcgatgttagtggcaaaagacgaaaccttcgccccactggcaccagtgtttaaatttgatactgaagcgcaagtgattgagatggcaaatgatactgaatttggcttagcctcttatgtttacacccaagatatttctcgcatctggcgagtttccgaagcattagaatacggtattgtcggcattaacgaaggcctgatcagcaatgaaatggcaccttttggtggcgtcaaagaatctggcttaggtcgcgaaggctcccgctacggcatcgacgagtttttagaaatcaaatacctttgtttgaaagtgtaa

SEQ ID NO: 31145 - DNA, 1707 bp, Pasteurella multocida
atgaataacagtgaacagcagtatttaaatgaactcgacgccaaattatggaaatccgctgacaaacttcgttccaatatagaggccgccaattataaacacgtcattttaagtttaattttcctcaaatatgtctccgacgcctttttagctcgccaacacagtatccaacaacaattaaccgatcctgaacacctctattatcttgatcccagtttttatgacagcgaggaagaataccaacaagccctagccaacgagcttgagcaattagattattacaccgaagaaaacgtgttttgggtaccgaaaacagcccgttgggatgtcttaaaaaccaaagccacgactccagtgggagcggtattatggcaagatgaacaaggcgaagacgtgaaaatgcgcaatgtgtcttggttggtggatctggcgttagacacgatcgaaaaaagcaacgataaactaaaaaatatcctcgctcgcattagccaataccaagtggaagataaccgtttaattgaactaatcagcttattttctgacacctattttgctaatccggaatatcagggggaaaaactcaatttaaaaagcaaagatattttaggccatgtttatgaatattttctgggaaaatttgccctcgcggaaggcaaaaatggtggcgagtattacaccccgaaaagtatcgtgaatttaattgtagaaatgttgcaaccttatcaaggacgtgtgtttgacccagcaatgggcagtgggggattttttgtgtctaatgacaaatttattgaaacccacgccaaagagaaacattatgccagtgatgaacaacgtcgccgtatttctatttatggtcaagaatcaacatcaacaacgtggaaactagcagtgatgaatatggtgattcgcggtattgactttaattttggtaaaaagcacgccgacagcttcactgaagatcaacatcctgatttacgcgcggactttgtgatggcaaatccgccatttaataaagatgattggtggcatgaaagcttagagcatgatgcccgctggcaatacggcaccccaccagtgggcaatgctaactttgcctgggtacaacatatgctgtatcaccttgccccaacgggttctatggcgctgttattagctaacggcagtatgagtagcaacaccggtggcgaaggggaaatccgtaaacgcttgattgatgaagatgtggtggaatgtatggtgtcattgccagacaagctatttaccaacacaagaattcctgcctgcatttggttcttgaccaaggataaaaagaatggtgtgtcgtttgataagaaaaaacgtaatcgcagtggtgaggtgctatttattgacgctcgccaacttggctatatgaaagaccgcgtattgcgtgattttaccgatgccgacacacaaaaaatcgtacaaaccttccacaactggcaatacggcgaaagttaccaagatgaagcgggcttttgctattccgccaaactcgctgacattcaaaaacacgactatattttaacccctgggcgttatgtgggcgccgtggcacaagaagaagactgcgaaccctttgcggaaaaaatgcaaaaactcaccgcacttttaaaccaacaaatgacagaaggcgaacgcttaaatgccgagattaaaaagaatctagcggggttggggtatgagtag

SEQ ID NO: 31146 - DNA, 3174 bp, Pasteurella multocida
atgatcgacgaaagcacccttgaacaggcggcacttgattggtttagagagacaggctggcaaacctttaacggtaaggaattattcaccgaggggagaaatccgcagcgtcatcaattaagtgcggtgattttagaaccgatttttcgcacgcagtttgctttgcttaatccgcatttacctgtggattgtgtggagcaagtgttggcaaaattgaagcaggcagaaagccgagatttggtggaagcgaatcaggcttttcatcgattgcttactcaaggggtgccagttacttataaaaaaggcgatgacatttgttttgaaacggcgtttttgttggattatgccgagcctgaacggaacgccttttgggcggtgaatcaatttgaggtgcgaggacttcatttgcgtcgccctgatattgtgtgttttatcaatgggttgccgattgccattttggaattaaaaaatcctgccgatgaaaaaaacgatgtgtggaatgcgtttcatcaactgcaaacttataaaaatgatctctttgatttgctaatgtttaatggtgccttggcaatttctgatggtgtgatcgcaaaagtgggttccttaacggcagatgaagagcgttttatgccttggcgtacggtgaagaatgaaaatgacaaaccaatggtagaatggcaattagaaattttaattcgtggctttttccgtcctgatttattcactgactatttacattttttcatcttatttgagagaaatgagaagaaccgtttaattaagaaacaagctagctatcatcaatttcatgcggtgagagaggcagtgagagcgactgtgattgcctcgagaccgttatctgacaaggtggtacgggaaccgcgagcgaattatgggcgagaggtgcaagtaggcagtaaaaaagcaggcgtggtatggcacacacaagggagtgggaaaagtatttccatgtgttgttatgcagggaaattattgcaacagcccgaaatgggtaatccgactttgcttgtggtgactgatcgtaacgatttagatggtcagctcttccagcaattttcactggcaaaagatttattaaaacaagatcccgtgcgtgcagaaagtcgtgaacaattaagggaattattagccagtcgtgatgtgggcggtgtgatttttactacggtacagaaattcgccttacaagaggatgagcaagcgcacccgttattaaatggtcgtcataatattgtggtgatttccgatgaagcacaccgtagtcaatatggcttgaaagccaaattgaacgcaaaaggctcatttcaatttggttatgccaaacatatgcgtgatgccttgaaaaatgcgacttttattggctttacgggcacaccgattgaaacagaagacaaagacacgcgagcagtatttggggattatgtgtctatctatgatattcaagatgctgttgatgatggtgccactgtgccaatttattatgaatctcgccttgctcgtttagatattaatcgtgcggagattgaggaattagctcaacaattcgatgagattgtggaggaagaagagcaaacagaagcggaacgtattaaaggcgaatttactcgtttagaaaaattagtcggtgctcaacctcgtttgcaacaaattgccaaggacttaatccagcattttgaaaaacggcaagaaagccaagatggtaaggcaatgattgtggccatgagccgtgatacttgtgtgcatttatacaatgaaattatcgcactcaagccagagtggcataacgatgaccctagcaagggcgctattaaaattgtgatgactggatcggccgcagataaagcgctgttacaacctcatatttacagtaaacaagtcaaacaagatttagaaaaacgctttaaaaatccagatgatcctttgaaattggtgatcgtacgggatatgtggctgactggatttgatgcgccatgttgtcatacgatgtatgtggataagccaatgcgtgggcataatttgatgcaggcgattgcgcgagtcaaccgggtgtttaaagataaaccaggtgggctggtggtggactacattggtatcgccaatgaattaaaacaagccttacatacttatacgaacgctaaggggcgcggtaaaccgacgattgatacccaagaagcactcaaagtgctattggagaaaatggatgccattgcgggaatgtttgcgacaccgttagaaggtaaggtgctggatattggtcagtttgaaacgcaagcagtcagtttattacctaaagcggcaaaccatattttggggttagaggacggtaaaaaacgttttgcggatttagtgttggcggcaaccaaagcttatgccttatgtggcacattagagcaatctaagacctatcaacgcaaacttgccttttatgctgcggtgaaagcgatgatgtttaaagagcagatcggtgatgggaaattgcgtaaacagcgacaagatcatgttttaaagcaaattttagataactcactgattgcggacggggtggatgatattttcacgctctgtgggttagaaaaacccaatattggtttgctatctgatgagttccttgaagatgtgcgccaaatagaacataaaaatcttgccgtcgagttactcgaaaaattgctacaggataatatcaaaagtcgaagcgctcgcaacttggtacaagaacgtaagtatcgtgagcgtttagaggcgacgttaaccaaatatcacaatcgaggtattgaaaccgcgcaagtgattgaagaactcattcagatggccaaagattttcaggaggcatttaaacgtgctgaagatttaggcttgaacagtgatgaaattgccttttatgatgccttagccaataacgaaagtgcggtacgagaactgggcgatcaaattttaaaagccattgcgttggaattggtgaaacaattacgccattctgtcaccgtggattggcaagtgcgagaaagtgtgcgagcgagattacgtattttagtgcgtcgtattctgcaaaaatataaatacccaccagataaagccgatgaggctattgatttagtcttggagcaggcagaaaccttatcttacgaatggagcgaaaagcacgagagagttgcctaa

SEQ ID NO: 31147 - DNA, 1617 bp, Pasteurella multocida
atgactgacttaaataaagtaatcaatgaacttggtgcacttggtattcatgatgtaaaagaaatcgtttataacccaagttatgagcaattgttcgaagaggaaaccaaaccaggtttagaaggttacgaaaaaggtatcgtgacacaatcaggcgcggtggcggttgataccggtatctttacaggtcgttcgccaaaagataaatacattgtgcttgatgacaaaaccaaagacactgtttggtggacaagcgatgcggcgaaaaacgataacaaaccaatgacacaagatacgtggaaaagcttaaaaggcttagtgacagaacaactttctggcaaacgtttatttgtgatcgacgcattctgtggtgcaaacgctgacacccgtttatcagtgcgtatcgtgacagaagtagcatggcaagcacactttgtgaaaaacatgttcattcgtccaacagaagcagaattagttggcttcaaaccagatttcgtagtaatgaacggttctaaagtaaccaacccgaactggaaagaacaaggtctaaattctgaaaactttgtggcatttaacttaactgaaggcgtgcaattaatcggtggtacttggtacggcggtgaaatgaaaaaaggtatgttctcaatgatgaactacttcttaccattaaaaggcatcgcatctatgcactgttcagccaacgtgggtgaaaaaggcgacgttgctgtgttcttcggtttatcaggtacaggtaaaaccaccctttcaacagatccaaaacgtcaattaatcggtgacgatgagcacggttgggatgatgatggcgtattcaactacgaaggtggttgctatgcgaaaacgatcaaactgtctccagaaaacgaaccagatatctataaagccatcaaacgtgatgccttattagaaaacgttgtagtacgtgcagatggttcagtggattacgatgatggttcaaaaacagaaaacacccgtgtttcttacccaatttaccacatcgacaacatcgtaacaccggtatcaaaagcaggtcatgcgaaaaaagtgatcttcttaactgcggacgcattcggtgtgttaccaccagtatctaaattaacgccagaacaaactaaatactacttcttatctggtttcaccgcgaaattagccggtactgagcgtggtatcacagaaccaacaccaacgttctctgcatgtttcggtgcagcgttcttatcacttcacccaacacaatatgcggaagtgttagtgaaacgtatggaagcagcgggtgcggaagcttacttagtgaacacaggttggaacggtacaggtaaacgtatctcaatcaaagatacgcgcggtatcatcgatgcaatcttagacggttcaatcgaaaaagcagaaatgggcaaattaccaatctttgatttagcgatcccaactgcattaccaggtgttgaccctgcaatcttagatccacgtgatacttatgcagacaaagcacaatggcaagcgaaagcagaagacttagctggtcgtttcgtgaaaaacttcgaaaaatacaccactaacgatgaaggtaaagcattagtggcagcaggtccaaaagcgtaa

SEQ ID NO: 31148 - DNA, 711 bp, Pasteurella multocida
atggagtttaaaatgcaaaaaattatcttaggaatgcttgttgttacagcaagtaatgcgatggcactaaacaataatttcaatgtgtacggaaaagttggggtggatctcgtttctcgttttgataccattgctattacacgacatgatactcaagccccgaaaaacacagcacgtttctcaccaagtctctttgcagaaatcacatataatgcaacacctaagactgaagtcggattaggtttaggttatattcatcgtaaaagcagtcatcacataattaaacaaaaaacagataatggaaatcgtgcattaattgatgttatagaagaatatccagttaatcggtacaattccataccactttatttccttgttaaacacaatttttatagtcaatcggatctccgctcttacctcaaagttgactttggttatgcattcaataaaacaaaatcaacgctcaatttaacagaatcaactgatgctgctggcaataatcagtattatattgaaaaacataacatctcgcttaatgtagaaaatggtaactactacggcatcggatttggcgttgagtataagaatatccttgctgaaattgcttatacacatacggactcacgtttaacttattcatctaaactcattcgaggagaatcagaatataaaaatgatgccctccgcttctcagtaggttatcgattctaa

SEQ ID NO: 31149 - DNA, 423 bp, Pasteurella multocida
atggcgaaaaagaataactggcatgaaaaagaggatgatgttcgcctagataaatggctttgggctgcccgtttttataaaacacgtactttagcaaaagacatgattgatggcggtaaagtgcattataatgggcagcgcacgaaacccaataaaacggttgaaattggttgtgtgatcaaacttcgtcaaggtaatgacgaaaaagaagtggaagtgcttgcgctttctacgcaacgtcgtggggcgccagaagcacaattgttgtatcaagaaacagaaaaaagcattgaacaacgtgcgaaaatggcgattgcacgtaagattaatgcattaacgatgccgcatcctgatcgtcgcccgaataaaaaagagcggcgtgatttattgaaatttaaacatcaagatagcttttcatcttga

SEQ ID NO: 31150 - DNA, 867 bp, Pasteurella multocida
atgacagacaacacagacaatgacaaactgtatcgctaccttttccaagatcgcgcggtgcgtggtgaatgggtacggttaaaccaaacgtttactgatacgttaaatacacatcaatatccgaaagtcatccaaaacttgctcggtgaaatgatggtggcgaccagtttattgacggcgacgttaaaatttgaaggggatattaccgttcaagtacaaggtgatggaccgttaaaattagcattagttaatggcaatcatcagcagcaaattcgcgcattagcgcgtttacaagcggatgtcagtgatgatatgagtttggcgcaattagtcgggaaaggggtattagtgattacgattgcaccgacagaaggcgagcgttaccaaggcgtgattgcgttagataagccaaccattactgcctgtcttgaagattattttgtgcgttcagaacaattgcaaacccagcttattattcgtgctggcgaatttgaaggacaacctgtggcagccggtatgttgttacaaattatgccggacggttcaggttctccagaggattttgaacacttagcaacattggcagcgacggtgaaagaggaagaactatttggtttaacagcagaagaattattgtaccgtttatatcatgaagagcgtgttgaaattttcccttcacagccgatctcatttttctgtggctgctcacaagaacgttctggtgccgcattgttgttgatttctgatgaagaattggatgaagtcttggcagagcataacggtaccattgatatgcagtgtgaatgttgtgggacgcattatttcttcaataaagcagcaattatgcaattgaaagtagaaaaataa

SEQ ID NO: 31151 - DNA, 1491 bp, Pasteurella multocida
atgaaaattgaagcagacaacaattgtattgtaatttttggtgcatcaggtgatttaacttatcgtaaattgattcctgcactgtataacttatataaaatcggtcgtttgactgagcatttctccgtgttaggtgtggcaagaacggaattaagtgatgagggtttccgtgaaaaaatgcgccaagcgttgatcaaaagtgaaaaagcgaatggcgaaacactcgatcaattttgtagccacctttattatcaggcattaaataccgcggatgctgccgattatggcaagttaattcctcgtcttgatgatttacatgataaatatcaaacctgtggtaacacactttactatttatccacgccgccaagtctttatggtgtgattccagaatgtcttgcggcacatgggttaaatactgaagagtttggctggaagcggttaattgtggaaaaaccgtttggttatgatatccgcacggcaaaagaactcgatattcaaattcaccgtttctttgatgaacaccaaatttatcgtattgaccactatcttggtaaagaaacggttcaaaatctgctcgtgctgcgtttttctaatggatggtttgaaccactctggaaccgtaattttattgattatattgaaatcacgggcgcagaatctatcggtgtagaagagcgtggtggttattacgatgattctggcgcaatgcgtgatatgttccaaaaccatttgttgcaagtgttagccatggttgcgatggagccaccggcaattattaatgctgactcaatgcgtgatgaagtggcaaaagtcttgtattgtttacatccattaagtgaggatgacttagaaaatcatttagtcttagggcaatatacggcaggcacagttgaaggtgaagcagttaagggctacttacaggaaaaaggtgtaccggcagagtctaatacggaaacttacatggcattacgctgtgaaattgacaactggcgttgggcgggtgtgccattttatgtgcgtactgggaaacggttaccaagtcgagtgaccgaaattgtgattcatttcaaaaccacaccacatccggtatttagccaaaaagcaccagaaaacaaattaattatccgtattcaacccgatgaagcgatttcgatgcgttttggtttgaaaaaaccgggagcaggttttgaagcaaaagaagtgtcgatggatttccgttatgcggatcttgcctcaccaagcttactgaccgcttatgagcgtttattattggattctatgaaaggcgatgccactttgtttgcgcgtactgatgcggtacatgcctgttggcagtttgtggagccgattttacaatataaagcacaaaatgggcgtgtttatgagtatgaagccggtacttggggaccgacagaagccgacaaactgatcgcgaaaacgggtcgtgtttggcgtaaaccaagtggattaatgaaaaagaaagtgtaa

SEQ ID NO: 31152 - DNA, 1455 bp, Pasteurella multocida
atgtcagtaaaaggtgacatcggcgttatcggcttagcggtaatgggtcaaaacttaattttaaatatgaatgatcacggctttaaagtagttgcatttaaccgtacgacttcgaaagtcgatgagtttttgcaaggtgcggcaaaaggcacgaatattattggtgcgtattcgttggaagatcttgccaataaattggagaaaccgcgtaaagtgatgctgatggtgcgtgccggtgaagtcgtggatcaattcattgaggcattattaccacacttagaagaaggcgacatcattattgatggtggtaacacgaattacccagatacaaaccgccgtgtcgcgtatttacgtgaaaaagggatccgttttattggaacgggcgtatctggtggtgaagaaggggcacgtttcggaccttctattatgccgggcggtgatgaatctgcatgggaacacgtgaaaccaattttacaagcgatttcagccaaaacagataaaggcgaagcttgttgtgattgggttggtcgtgatggtgctgggcatttcgtcaaaatggtgcataacgggattgaatacggcgatatgcaattaatttgcgaagcgtatcaattcttaaaagaaggcgtaggcttatctgatgacgaattagaagcaactttcaaagcgtggcgtaacaccgaattagatagctatttaattgatatcacagcggatattcttggctataaagatgaagatggcagccgtttagtcgacaaaattttggataccgcaggtcaaaaaggaacaggtaaatggacggggattaatgcccttgatttcggcattccattgactttaatcacggaatctgtctttgcccgttgcgtctcgtctttcaaagaacagcgtgtgcaagcctctcgcctattcaataaagtggtcggcaaagtagaaggcgacaaagcagcttgggttgaagcggtgcgtaaagccttattagcctccaaaattatttcttatgctcaaggttttatgctgattcgtgaagcgtcagaaaactttggctggcacattaactacggcggtacagcattattatggcgtgaaggttgtattatccgtagccgtttcttaggtaatatccgggatgcttatgaagccaatccggatctgattttcttaggttcagatgcctacttcaaaggtatcttagaaaatagcttaggcgaatggcgtaaagtggtggcgaagtcgatcgaagtgggtattccaatgccttgtatggcgtctgcgatcactttcttagacagctatacgagtgaacgtttaccagcgaacttactccaagcacaacgtgactatttcggtgcacatacttatgaacgtacggataaaccacgtggtgagttcttccataccaattggacaggtcgtggtggtgatgctgcatcgaccacttatgatgtgtaa

SEQ ID NO: 31153 - DNA, 813 bp, Pasteurella multocida
atgcgcattcctaattatcgtgaccaaattaaaattgtcttttttgatattgatgaaacattactcgttaaagacgaagactatattcctgcgacggtggtccccgctattcgaaaattaaaagaaaatggcattgtacctgctatcgcaacggggcgtaccttgtctaactttccgcctaagattaaaggattgattgagcaaacggacatgaatttgtttgtaacaatgaatggtcaatatgtgagttatcagaatgagccaatcgggaagcatcctttatctaaagcaaaaatccaagagttcgttgatttttgtgatcaacatcagattgtttatgcgcaagtgtcaccgacagataccgcagtttcagcgataactgatcaggttcgtgatgcattggatccgctaaaagggcattatcatgtagataaagactattttaaacatcatgatgtttttcagatactggctttttatgatgctacgcaagatcaatttgtccaagattctggtgtactgaaaggattacaatcggtacgctggcataaatactcggttgatttatttgatgaaaaaatctcaaaagctacgggtatcgcttgtgcaattcaacattttggctttgcaatggaaaatgtgatggcatttggtgatggcttgaatgatattgaaatgttaagaatggcaggagtgggtgttgcaatggggaatgcacatcatcagctaaaaacagtagccgatcatgtcaccttaccgatcaaagaacatggcattgagtatttcctaaaacaagctaaattgattgactaa

SEQ ID NO: 31154 - DNA, 1341 bp, Pasteurella multocida
atgcagaaattcgtaaaaaacgtgaaaaagcaaactgtacttctttcaacaagagccattgctgcacaaatcattttacaagttctggatcaaggtaaatcgctatcaaccttgattccagacacgcaacatcaagttaaaacacaagatttacctttattacaagaaatttgttttggggtatgtcgtgtattacctcgtttagaactgattatcaagcaacttgtggacaagccattaaaaggaaaaacacgcattgtccactgcttattattagttggcttatatcagctcctttatactcgcattcctgctcacgcggcagttgatgaagttgtcaatgcaacaaccgcgttaaaagcggaacatttccgtggtttagtgaatggtgtgttacgtcgttttttacgtgaacaagaaaccttattggtgaaagttgataaacattggcacacattgcaccctgattggttagttaatcgtttgaaagaagcttatccaaattggcgtgagattgttgaagcgaataatcacaaaccgccgatgtggttacgtgtcaatcagcaaaaaaatagcacagaaacgtaccgcactttattggcagaacaaggaattgaggcggaaaaggcagataatccgtgcgcattacgtttattgcaacctgtggcagtatctcaattgccggcatttcatgaaggcgcggtgagtgtacaagatgtgaatgcccaatggtcagccttgttattggcaccagaaaatggtgaactcattttagatgcctgtgcggcaccaggcgggaaaacgacgcatattttagagcaagctccacaagcgcatgtggttgctctagatgttgaagctactcgccttaaacgtgtgcatgaaaatttagcacgaatgcaacagcaggcaacggtgatttgtggtgatgccacacagccagcacaatggttaaagcaactaagtgaaagtgcggtacaatttgaccgaattttattggatgcaccttgttcggcaaccggcgtgattcgacgccatcccgatattaagtggttaagacaagcatcggatattagtgcattagtggcactacaaaaacaaattttacaagcgctctggacagtattaaaaccaaatggaattttattgtatgcaacttgctcggttttaccagaggaaaatgcattacaaattgaacaatttttaacgaacaatgtagatgcgaaattagagccactcccgtttacggctgtagaagggtcagttgggtatcagtttcttccaactgagaatgggggtgacggtttttattatgctaagttaaggaaggtagtttcatga

SEQ ID NO: 31155 - DNA, 1377 bp, Pasteurella multocida
atgaaaattatcattcttggtgcagggcaggttggtaaaacgcttgctgagaatttagtcagtgaagataacgacattacattagtcgataatcaatcactgcgattagaaaatttacaaagtaagcatgacttacgagtcgttaatggttctgcttcttcaccaagagtgttacgtgaagctggtgcgcaagatgcggatttattagtggcggttacgagctctgatgaaatcaatatggtagcgtgtcaaattagttatacgctttttaatacgcccactaaaattgcgcgtatccgtaatgcggaatatttacgtgaaaaagataaattattccaaaccaatgtgttacctattgatcatattatttcaccggagaaattagtcactgacgaaattacacgtttgattgattatccgggtgcgttacaagtggcacattttgcgaatggtcgcattagtttggtcgttgtgaaagcctattatggtggtcctttagtcggctatgcgatttctgctttgaaagatcatatgccacatattgaatgtcgtattgtgtctattttgcgtcaagataaagtcattcgtccgcaaggatcgaccattattgaggcaggtgatgagattacctttatctgtgaaaccattcatattaaagctgtgatgagtgaattgcagcgtttagagaagccgtataagcgcattatgatcgcaggcggagggaatgtcggcattggtgttgcgaagaatttagaaggaaaatgttccgtcaaattaattgaacgtaatgcagaacgcgcgacggcattggctgaaaaattatcgaatactttgattttctgtggtgatgcttctgatcagtcttttttgttagaagagcaaatcgaaaatgtggatgtgtttttatcgcttaccagtgatgatgaagcgaatatcatgtcagcattgttagcaaaacgacttggggcgaagaaagccttggtgttaattcaacgtatggcatacattaacttgatccaaggtggcaccattgatattgccgtttcgccacaacagacgacgatttctgcgttgttaagtcatgttcgtaaaggcgatacagtgaatgtggcctctttacgacacggggttgctgaagcgttagagattattgtgcatggcgaagaaagttcgtcgcttgtgattggacgtaaaatttctgaattgaagttaccacaaggggcgattgtgggagcgatattgcgtggtaatgaggtgattatggcgaagaaaaatctcgtgattgaagataatgatcatgtcattgtgtatttaagtgataagaaatttgtgtctgatatcgagaaactttttcagccaagtgtattctttatttaa

SEQ ID NO: 31156 - DNA, 1341 bp, Pasteurella multocida
atgacatcttctttacccaatattggttttattagtctcggttgccctaaaaatttagtagattctgaacgtattctgacggagttacgttcagatggttacaatattattccaagttatgaaaatgcggatcttgtcattgtcaacacttgtggttttattgacagcgcagtacaagaatccctcgaggcaattggcgaagcgctggaagaaaatggcaaagtgattgtgacgggttgcttaggtgccaaagaagatcgtattcgcgaagtccacccgaaagtgttagaagtaacaggtccacatagttacgaagctgtcatgcagcaagtgcataaatatgtacctaagcctgcctataatccgtatgtcaatcttgtacccaaacaaggtgtaaaactgacaccaaaacattatgcctatttaaaaatctcagaaggctgtgatcatcgttgtactttctgcattattccttccatgcgtggtgacttagacagtcgttccattacacaagtattagatgaagcaaaacgccttgttgaagcgggagtaaaagaaatcttggtcgtttcacaagatacttctgcctatgcgttagatcgtagcaaagaagaacaaaataaaacggtattctggaatggcatgccaattaaaaataacttaattagcctctgtgagcaactgggtaaactcggtgtgtgggtacgcttacattatgtttacccttacccacatgttgatcaattaattccattaatggcggaaggcaaaatcctgccttatttagatattcccttacaacatgctagccctaaaatcttaaaagccatgaaaagacccggttcaattgagcgaaccctagaacggatcaaaaaatggcgtgaaatctgtcctgatctcacattacgctcaacctttattgtcggatttccgggtgaaagcgaagaagattttcaacttcttttagatttcttaaaagaagccctacttgatcgcgttggctgtttcaaattcagcccagtagaaggagctattgcaacagaaatgcccgatcaagtcccagaagaggtgaaagaagcacgttttcaccgctttatgcagttacaacaagaaatctctgcagcgcgcctacaacaaaaagtaggcaaggtcttcactgtgctcgtggacgaagtagatgaagaaggcatcattgcacgttccatagcagatgcaccagaaatagatggtgtggtttacattgataatccaaatcgagtggctgttaaagcgggacaatttattgaagtcaagatcacacgggctgacgcctacgatctttacgcgtcgctaataaactag

SEQ ID NO: 31157 - DNA, 1431 bp, Pasteurella multocida
atggcaacaattgataatgcgatgatccactcgctcatccagcacctaggtggaaaaagcaacatccaaagtgtcactaattgtatgacacgtttgcgtgtcaccttgcacgattcgtccgttgttgataaagacgagttaaaaaaaatccaaggtgtgctaggtgttgtcgaagcggatgagcaactccaactgattcttggtccgggtaaagcaacaaaagccgcggaaatgatgaaagccagcttaggggataacatgagttcgccttctctccaagagattgcacgcacccaaaaacaacaaattaagtctgctcaaacgagtagtatccatcaattctttgcgaagtttgctactatttttaccccgctcattccgggttttattggcgcaggcttactcctaggcttagcaaccgtattgcaacaagcctttgtggctggggtagaaaatccaaatgcgtttttagtggatttgattgcgtacatgaaagtgttcagtaaaggcttatttagctttttaagtattctgattggttataatgcagcaaaagcctttgggggttcgggtgtcaacggcgcaatccttgcctctttatttatcttgggctataacccagaagcgaccaaagggatttattctggattaagcaatttctttggcttaactattgacccacgcggtaacatcatcggggttttaatcgcagcaattgttggggcaaaagtcgaacgttgggtcagaaagttcattcctgatagcttagatatggcattaacttccacggttacgctattaattatgggctgttttaccttcttatttatcatgccaattggggtgtatctctttaatggaatgtcttggttattctctaacttaaatggcaatccattgggtaccgcagttctagcaggcttattccttatctccgttatgctcggtattcaccaaggttttgtcccggtctattttgccttagtggaaacacaaggctttaacgcgctcttcccagtgcttgctatggcaggcgcaggacaagtgggtgccgcgttagcgctttacttcaaagcaaacaaaggcgccgtcttgcgtgatcaaatcaaaggggcaattattccgggctttttaggtatcggcgaaccgctgatttacggggtaaccttaccgcgagtaaaaccgtttattacagcctgtatcggtggtgctgcgggcggctttactattgggttaatcgcctacttaggtttcccaatggggttaaatacagtctttggtccatctggattactcgcgatcccattaatgacctcgccgaatggtgtattaccggctatcgctacctatttattaggtaccgttgtcgcttacgcaacaggttttatcacaacctatttctttgcgacgaaagatgtcgatttaagctaa

SEQ ID NO: 31158 - DNA, 906 bp, Pasteurella multocida
atgccaaatgccatacatgcgctcgtcaccgaaagtcggaatccatttagtacacatatcgaccagctttcaactttagacatgttagcagttattaatcaggaagaccaaaaagttccttttgctatcgaaaacgttttaccagaaatcgcccaagcggtcgatgccattgctgaaacgttcatgaaaaatgggcggttaatctatttaggcgcgggcacatcaggacgcttaggcattttagatgcgagtgaatgcccaccaacgtttggtaccccccatgaacaagttgtgggactcatcgcaggtggacaacaagccattttaaaagcagttgaaaatgccgaagatgaccgtagcgccggtgagcaagatctacgtaacttagcactgaatgaaaaagatgtggttgttggtattgccgccagtggtcgcaccccctatgttcttgctggcatcgaatatgcaaatcacgttggctgtgtcactgtaggcattagctgtaatccggattccgctttagccgcgcttgctaacattgcgatcacgcctattgttggtcctgaagtgattacgggttcttcacgaatgaaagcaggtaccgcacaaaaattgattctcaatatgctcacgacaggggcgatgattaaaacaggcaaagtttttggtaatttaatggtcgatgtagtggcaaccaacgagaaattagtcgagcgccaaaaaaacattgtcatggaagtgacgcaatgtgatcgccaacaagcggaacaagccttattacaatcaaacggacaatgtaaagtggcgattgtcatgctattgctgaatatgtcggcagaagaagcaaaaaactgcttggcgcaagccaatggttttattcaccaagcattaactttggttaaataa

SEQ ID NO: 31159 - DNA, 1923 bp, Pasteurella multocida
atgcttttttttacaaatttaacattaaagcgcgggcaatccgtgttgctcgaaaatacatcggttgcaattaaccccggacaaaaagtgggcttagtcggaaaaaatgggtgtggcaagtcatctttattggcattattaaaaaaagagattagcgcagaaggcggtgacgtcagttttccttccaattggacgttatcttgggtcaatcaagaaacgcctgccttaatgacctctgcaatcgattatgtgatcgaaggtgatcgggaatattgccgcttacaacgtgagttagtattagccaatgaacaaggcgatggacataaaattgctcatctgcatgcgcaattagatgcgattgatgcatggacaattcaagcacgcgctgccgcactattgcacggtttgggctttagtcaaagcgaattacagcagccagtcaaagccttttcaggtggttggcgtatgcgcttaaatttagcacaagcattactctgtccttctgatttattattattggatgagccgactaaccacttagatttagatacggtcatgtggttagagcgttggctggtacaatacaaaggcaccttagtgttaatttcacacgatcgtgattttctggatcctatcgtcaataaaattatccatattgaacatcagaagttgaatgaatataccggtgattattcttcctttgaagttcaacgcgccacgaaactggcacagcagaatgcactttatcgtcaacagcaacaaaaagtcgcacatttacaaaaatatattgatcgtttcaaggcaaaagcttccaaagctaaacaggcgcaaagtcgggtgaaagccttggaacggatggaattaatcgccccagcttatgtggataatccgtttcattttacctttcgtgaacccttgtctttaccgaatccgttgttagctatgcagcaagtaagcgcaggctatccgagcgcagagggacaaagtgcggtcgaaattttagaaaaaatcaaattgaacttggtaccaggatctcggattggactattagggaaaaatggcgcggggaaatcgacactgattaaattattggcaggtgaattaacaccgctttcgggtcaggttcagttggcgaaaggtgtccagcttggctattttgctcaacatcaattagaaacgttacgtctcgatgaaagcccactttggcatttacaaaagctagcaccacaacatacagaacagcagttacgggattatttgggcggttttgcgttcaaaggcgataaggtgaatgaggcggtgaagtccttttctggtggggagaaagcccgtttagtgttagccttgattgtgtggcaacgtccaaacttattgttactcgatgagccgactaaccacttagatttagatatgcgccaagcgctgacggaagccttggtagattatcaagggtcgttggtcgtggtatcgcatgatcgccatttattacgtaatacagtggaagaattttatctggtacatgataaaaaggttgagcctttcagtggcgatttagaggattaccagaaatggttaactgatgttaatcgcaatacggaagaaaaagcggataccaatgcaccggttgataatgccaatagcagtgcgaatcgcaaagaacaaaaacgccgtgaggcagaattgcgacaacaaaccgccccgttacgcaaaaaattgcagcaacttgaacaaaaaatggaaaccgtatcgagccacttagggcaaatcgaagcgcaactggtcgaatcggatttgtatttggcggaaaataaagaaaaattgaccgcacttttaaatgagcaagtgagcaataaaaaacacttagaaacgcttgaaatggattggctcgcgttacaagaggaactcgaaggactactggagtaa

SEQ ID NO: 31160 - DNA, 960 bp, Pasteurella multocida
atgatagaacaaaaatcaaaaccgtttccgctgccgataaactattttgggataatccttgggttatcggcattaagcctcgcttggcgttacgccacccctctgtgtgaaggcgctaccctcgtgagcgaaagccttttcgctgtttctgccatgatttggctcgcgtttattggtgcctacgcttacaaatggtttaaatcacatcagcaattgaaagccgatttacaacatccgctgttaggcaattttgtcagcctcattcccattacaacgatcttaatcggtattgggcttgtgccttataacatgctattcgggactgtactcatcagcctaggtattgcgatacagttagcctttgctacctactatattcccgcgatgtggcgcggcattcatcaagcagaaatgacacttcctgccatttatctcccgacagttgcaaccaattttgtcagtgccaccgcacttggcgtgctcggttacagcgaattaggtatggtgtttttaggcgctggctttttttcttggctagtattagagccgatagtattacaacgtttacgtacattacagcccgtccccgaaccgttgcgccccatgatagggatccaacttgcccctgcgtttgtaggttgttcagcctatttaactttaaatgggggaaaactcgacctgttcgcgctaatgttactaggttacggtgtattacagctgctatttttaatccgcttattaccttggatttttgttaacggctttacgcctgccatgtgggcattctcctttggtttagcctccatggcaaaagtggcattactcttttatcaaaatacttccgataatttgttagccacgttaagcttagcgctgtttattttcgcgaatttcagtattggtctgatgttgttgaacacgggctatttggttttaaaaggacgatttttcatcaaataa

SEQ ID NO: 31161 - DNA, 1026 bp, Pasteurella multocida
atgcaaaatctccaaccctttcatactttttctctgcccgtacaagcacagaaaattattgaaattaccgatattgagcaactgaaacaacaatgggctgcatgtcagaccaataaactaccggtgttattgttaggtcaaggcagtaatgtccttttcttacgcgattttcaaggtgttgtcttgcttaatcgcttaatgggcattcaacatacacaagatgctgattttcattatttacatgtcaatggaggagaaaattggcatcaattggtcgcgtggtcaatacagcaaggcatctttggactcgaaaatctcgcactgattccgggttgtgcaggttcagcaccaatccaaaacatcggggcttatggtgtggaatttaaagatgtgtgtgactatgtggaagtactcaacttacacacgaatgaaatctttcgccttagcaatgaacaatgccaatttggttatcgcgacagcatttttaaacacgcctatgccacgggctatgtaatcattgccgtaggtttgaaactcagcaaaaactggatacccgttttaaaatatgggtcactggctaatttggagaaaagtgcggtcaatgcccagcaaatttttgacgaagtgtgtgcgatacgacgcagtaaattacctgacccagcagaattcggcaatgccggtagtttcttcaaaaatccggtcattagtaaagtggattttgatcacttacagcaagaatatcctgacataccgcattttccgcaagctgacggacgtgtcaaattagccgcaggttggctcattgatcaatgtggcttgaaagggtatcaactgggtggtgcagcagtccaccagcaacaagcgctggttctgatcaaccaacaggatgcaacgagtagtgatgtggtagagttagcacatcacattcgccaaaaagttgctcaacgctttgctgtctggttacaaccagaagttcgctttattgacgaagacggtgaagtggatagtgaacaagccatttgttaa

SEQ ID NO: 31162 - DNA, 1707 bp, Pasteurella multocida
gtgaaaatcaagcactctgtttctactaaaatcgcaaattacctctttatcatcatgatttttgcgggcgtcattacgagtctcagcttgatgatcatggctagcaataaatctgatgccgaatccattaacgtgtccggttcattacgtatgcaaagctatcgtttattacatgagctggaacatcatcccgaactggtcgaaaccggtttacgccaatatcgcatcagcttacattcccccgccctactggaaattgatcaatggtttgttcctgacgaagtcaaacagtcttaccaccagctgatcaagcgctgggaacgcatggagcgctatgcgaaacaacgtgaaatcaacgcctataaaaacgaaattgcagattatgtggcacaagtcgatcaatttgtctttaccctacaacgctttgcggagaagaagtggattatcgcggtcttgatcatgtcattatccatgctgtcgattattgcgatggtggcttatgtggtgtggtatgcgcgtaaagaagtcgttatgccccttaaacaactcacgcaagccagtattcaagtgcaaatgcgccaatttagccatgtcaaagtcgatacacaaaaagaagatgaattgggtaacttagcccgggcgtttagccaaatgtcgagtgaactagaaaagctgtattcctcattagaagagagtgtgaatgaaaaaacccaaaagttacgtcaaacaaaccgctctttaactatgctgtatgaaagttcgcaacagcttactaccacgaatgtggatgaaagtatcttacagcacgtgttaaaaaatatctttattagcgagcatttacgttatatggcattagtggtcgaaggggctgagcactggaatatccgttttgggcaaaaacaagccaatcaagattgccaagaagtgacattacaaattgaagacgaaaaactggcagtgctgtattggcaagctggatttccctgtcctgacccacggaccatgcgcaatattgcacaaattttaagccgtactctgtatttccataaaactcaacgtcaacaacaacaattgctgttaatggaggaacgcgccatcattgcacgggaattgcacgattctttagcgcaagtgttagcatttttgcaaattcagctaacgttgctcaaacataacatcaatcaaaaaagtgaagaagcggctcaacaaagtatcaatatcattgccagttttgaacaagccttgcgtgatggctatgtgcaactgcgcgaattgttagccactttccgtttgactgtacaagaagccaatttgaaattagcgctcgagcaagtggttgactctttacgaaatcaaaccgacattcaaatgtgcgtgcaatgttcactgcccgcacaaagttttaacgcgaaacaattagtccacattttacagattgtgcgtgagtcggtcttaaatgcgattaagcattcaaaaggcaacaggatcgaggtcatcgctcacatcaatgaagacggtgaatatgagtttattgtgcgcgacgatgggattggtatccccagtttagaagaaccagaagggcattatggtttaaatatcatgcacgaacgtgctacacaacttaatgcacatttacgcattgcaaaccgcccgtctgggggaactgaaatcaaactgacattacatcaaaataggaatctgacatga

SEQ ID NO: 31163 - DNA, 2487 bp, Pasteurella multocida
atgaatttaagtcgtcgtgactttatgaaaaccaatgcggcggttgcagctgcagcggtcgctggcttggctattccagttaagaatgtggaagcgtcgccagataaaattattaaatgggataaagcgccttgccgtttttgtggtacgggttgtagcgtgttagtggggacacaaaatggacgcgttgttgcttcgcaaggagatcctgatgcggatgtgaaccgtgggttgaactgtattaaaggttatttcttaccaaaaatcatgtacggtaaagatcgcttaacttccccgatgttacggatgacaaacggtaagtttgataaacacggcgaatttactccggtgtcttgggatcaagcctttacgatcatggcagaaaaattcaaaaaagccttgaaagaaaaaggaccaaatggggcaggcatgttcacttctggacaatctaccatttttgaagggattgccaaatccaaattgtttaaagcgggactccgttcaaataatattgacccgaatgcacgccattgtatggcatcagcagcggttgcctttatgcgtacttttggtatggatgagccaatggggtgttatgatgacatcgaaaaagccgatgcatttgtgttgtggggatcaaatatggcagaaatgcacccgattttgtggtcgcgtatttcggatcgccgtttatctcatccagatgtgaaagtcgctgtcttatctacttttgagcaccgttcttttgaattagctgatttgggtgtcatttttacgccacaatctgatttggcgatcatgaactacattgccaattacctgattcaacatgatgcgattgatcatgactttattcaaaaacacaccaaattcaagcgtggtgaaacagatatcggttatggcttgcgtgaaacccacgaattagaaaaagcagcgaaaaacgtgaaaactgcgggtaaaatgcacgacagtgatttcgaagaatataaaaaattagtcgcaccatacaccttagaaaaagcccatgaaatttcaggggtaccgaaagaacaacttgaagcactggctaagatgtatgccgatccaaaactgaatatcgtgtctttctggaccatgggtttcaaccaacatacacgtggtgtgtgggcaaaccacttaatctataacattcatttattaaccggcaaaatctctaaaccagggtgtggaccgttctcgctaacgggtcaaccttctgcctgtggtaccgcacgtgaggtcggcacctttgcacaccgtttacccgcagatttggtggtcactaatcctaaacacgttgaaaaagccgagaaactgtggaagttgccaaaaggcgtgattcaaactcaagtaggttatcacgcggtagcacaagaccgtgcgttaaaagataagaaaatgaatgtgttatggcaaatgtgtaccaataacatgcaaggcggtccaaacatcaaccaagagcgtttcccgggttggcgtgacgaagaaaactttgtgattgtatctgatccttatccaacggtttctgctcttgccgctgacttaattttaccgacagcgatgtgggtagaaaaagaaggcgcttatggtaacgcagaacgccgtacgcaattctggtatcaacaagtcaaagcaccgggtgagtcaaaatcggacgtgtggcaattagtggagttttctaaatatttcactaccgatgaaatgtggccagcggaagtacttgcggcgaaccctgaatataaaggtaaaaccttgtatgaagtgttattccgtaatggtcaagtggataaattccaagtaccaacggataaaccaggttacatgaatgatgaagcagaacattttggcttctatttacaaaaaggcttgtttgaagagtatgccgtgtttggtcgcggacatggtcatgatttagcagactttgaaacttaccataaagcacgtggcttacgctggccagtggtggatggcaaagaaaccttatggcgttatcgtgaaggttatgacccttacgtcaaagaaggcgaaggggtggcgttctatggctatccagacaaaaaagcaattattcttgccgttccttatgagccaccagcagaagcaccgaatgcggaatatgacttgtggttaacgacggggcgggtcttagaacattggcatacgggtacgatgacacgccgtgtcccagagctccatcgctccttcccaaataacttggtttggatgcacccattagatgcgaaaaaacgtggtttacgtcatggtgataaagtgaagatcagctcacgtcgtggcgaaatgatttctcacttagatacccgtggacgtaataaagtcccacaaggcttagtttacaccactttctttgatgcaggtcagttagcaaactatctcactttagatgcgacagacccaatttcaaaagaaacggactttaaaaaatgtgcggtcaaagtggaaaaagcgtaa

SEQ ID NO: 31164 - DNA, 954 bp, Pasteurella multocida
atgacaacacaacttgattctctacgtaatatgacggtggtggttgctgatactggtgatattgaagctatcaaaaaataccaacctgaagatgcaacaacgaacccatctttaattctcagcgcgtctgccttgccacaatatgcctcattaattgatgaagccattgcttatgccaaatcaaaaagcaactgttcaaaacaacaattaattgatgcagaagataaattagccgttaacatcggcttggaaatcttgaaaattgtgccgggacgcatttcaacagaagtggatgctcgtctttcttatgatacacaagcaacaatcgaaaaagcgaaaaaattaatcgcactttataacgaagctggtatctcaaacgatcgtatcttgatcaaaattgcttcaacttggcaagggattcgtgcggcagaagaattagaaaaacaaggtattaactgtaacttaacccttttattctctgaagcgcaagcgcgtgcttgtgcggaagccggggtttacttaatttcgccattcgtgggtcgaattcttgactggtacaaagccaacagcgataaaaaagactatgcgccggcagaagatccgggtgtgatttccgtgactaaaatctataactattacaaacaacacggctataacacgatcgtcatgggcgcaagtttccgtaatgtcggtgaaattaccgaattagccggctgtgaccgcttaaccattgcaccagccttgttgaaagagttacaagaaaacaacgcaccacttgagcgtaaattaagctacacgggcgaagtgaaagcaaaaccacaaccattaactgaagcagaattctattggcaacacaatagcgatgcaatggcagtggaaaaactggctgacggtatccgtaaatttgcggccgaccaagaaaaattagaagcgatgttattaacaaaattctaa

SEQ ID NO: 31165 - DNA, 1248 bp, Pasteurella multocida
atgcaatcaaaagtcgttatcccacaaggtgaaaaaattcaactggatgccaaaggagcattaattgtacctgatcatccgattatcccctttattgaaggcgatggtattggtgtggacgttaccccagcgatgcgcacagtcattgatgcggcggtggaaaaagcctatggcggcaaacgtaaaatttcgtggatggaaatctatgctggtggtaaagcaaatgaggtctatggcgaaaatacttggttacccgatgaaaccatgacatttatccgtgattatcatgtggcgattaaaggaccgcttatgacgccagtcggtggtggcattcgttccttgaatgtggcgatgcgtcaaggcttagatttatataattgcttacgtccaattcgttattatgacggtaccccaagccctgttaaacaccctgaattagtggacatggtgattttccgtgaaaactccgaagatatttatgcgggtgtagaatgggtggcaggatctgccgaagcgaataaagtgattgcgtttttacaacaagaaatgggggtgaaaaaaatccgtttcactgaagattgtggcattggtatcaaaccagtttctaaacaaggtacccaacgtttagttcgtgcggcactacaatatgtgattgataatgatcgcaaatcgcttactctagtgcacaaagggaacatcatgaaatttaccgaaggcgcattcaaagagtggggttatcaagtggcgcaagagtttggtgccgaattgctagatggtggtccatggatgacattaaaaaatccaaaaacaggcagagaaatcatcattaaagacagcattgccgatgcgtttttacaagaaattctgcttcacccaacggagtacgatgtgattgcgactttaaacctaaacggggattacatttctgacgcgttagccgcgcaggtggggggtatcgggatttcaccgggggcgaatattggtgcagaagctgcgatttttgaagccacccacggtaccgcaccaaaaattgcaggacaagataaaggtaatccgggttctttgattttgagtggtgaaatgatgttacgtcacttaggttggttagaagcggcggatttagtggtcaaagcagtatcgaaaaccattgctgataaaaccgttacctttgattttgctgaaatgttagaaggcgctaaattacgttccacttcggaatttgctcaagatattgtagcgaatatgtaa

SEQ ID NO: 31166 - DNA, 717 bp, Pasteurella multocida
atgacaacgccgattgctaaatctacacgtcgtattgttgctgttgtgcctgcggcgggcataggtagccgcatgcaaatggataaaccgaagcagtatctgcacattcatggcaaaacgatcttagaacatactttatctgtgctgttaggttatccattaattgaaaaaattattttagcggtggcagcaaacgatccctatatttccacttgccctttattaacacacccgaaaattcagctggtcgaagggggcagcagtcgtgctgactcagtgctcaatgggcttaacgcggtcaaaagtgcggtacaaaatagcgaagatttttgggtgatggtgcatgatgcggcacgcccttgtttaacacatcaagatttagataaattggtgcaagtggaagatcaaaacggggcgattctggctattcccgccaccgataccattaaacgtgctttacacaatcagcaaattcattataccgaagatcgctcgcaactttggctagcgcagacgccacaattttttcccatagcaaccttagcacaagccttagaacaggcattggcgcaaggtttacaggtgacggatgaagcctctgccatggaatttgctggatttcgaccgcacttagtggcagggcgaagcgataatattaaagtgacccgtccagaagatttcgcgttagcagaattttatttaagcagaacaaaatag

SEQ ID NO: 31167 - DNA, 477 bp, Pasteurella multocida
atgatacgaattggtcatggttttgatgtacacgcctttggtggcgaaggtccaatcattattggcggcgtggcaattccttatgaaaaagggttacttgctcattctgatggtgatgtggcattacatgctttaaccgatgcgctacttggtgcggtcgcattaggtgatattggcaaactgttcccagatactgacatgcaatacaaaggcgcagatagccgtgggttattgcgcgaagcttacacacaagtacaagccaaaggttacaaagtgggtaatgtagatgtcactatcatcgcacaagccccgaaaatgcgtccgcatattgatgcgatgcgagcggcaattgccgaagatttagcctgtgatattgaacaagtgaacgtgaaagcgaccaccagtgaacgtttaggctttaccggacgcggtgaaggcattgcctgtgaagctgtggcgttagtggtgaaaagttaa

SEQ ID NO: 31168 - DNA, 474 bp, Pasteurella multocida
atgactgaaaaattaaccgcactttgtccctgtcaatcgggacaactctatcaagcctgttgtcagccatatcatcaacagcaacaatttcctgctaatgcgatgttattgatgcgttcccgttatgccgcgtatgccttgaaaaatattgattacattgtgcaaactactgtgccaaatcaacaagcgttgttgcccgtcgccgcattacaagactgggcggacaagacaacttgggttggacttgacattttgcaacatgtctccctgtctaaaacacatagccaagtcgaatttaaggctttctttgctcaacaaaatcaaacacaagtgcatcatgaaatctctttatttgtgaacattgcacaacgttggtattttgtcgatcccacggtgacattaccgaatatgaaacaaccttgcctgtgtggctcaaataaaaaatttaaacattgttgtggaggtttactgtga

SEQ ID NO: 31169 - DNA, 1002 bp, Pasteurella multocida
atgagtaaacctgttgtattaagtggcgtacagccttctggcgaactgacgattggcaattatcttggcgcattacgccaatgggtcaagatgcaagatgattatgaatgcttattttgtattgttgatttacacgccattactgtccgtcaagatcccgaaagcttacgcaaagccacccttgatgtgttagcgttatatttagcctgtggcattgatccggaaaaaagcactatttttatccaatcccatgtgccagaacatacacaactggcttgggtgcttaactgttacacctattttggtgaaatggggcgcatgacccaatttaaagataaatcggcgcgccatgcggaaaatatcaacgtcggcttatttacttaccccgtgttgatggcggcagatattttgttatatcaagctaaccaagtgcctgtaggggaagaccaaaaacaacatctggaaattactcgtgatatcgctaatcgttttaacgcgctatatggcgatttatttgcggtaccagaaccttttattcctaaagcaggcgcgcgcgtgatgtcattgcttgagcctgaaaagaaaatgtcgaaatcagatgaaaaccgcaataacgtgatcggcttattagaagatccgaaagctgtcgcgaagaaaatcaaacgtgcggtaactgactctgatgagccaccagtagtccgttatgatgtgcaaaacaaagcaggcgtatcgaacttgttagacattctttctggtgtcactggtaaatctatcgcggaattagaaacggagtttgaaggcaaaatgtatgggcatttaaaagggactgtggcggatgaagtctccgcgatgctcaccaccttacaagaacgtttccaccacttccgcaacaacgaagcactccttaacgacattgctcgtgaaggtgcacaaaaagcacgtgaacgtgccaaagccaccttagatgccgtttaccaagctgtgggttttgtgtctttgtaa

SEQ ID NO: 31170 - DNA, 1836 bp, Pasteurella multocida
atgcctaaattacgttcagcgaccagtacacagggtcgtaatatggcgggtgcccgtgccttgtggcgtgccacgggaatgaaagaaaacgactttggtaaaccgattattgccgtcgtcaactcctttacgcaatttgtgcccggtcatgtgcatttaaaagacatggggcaacttgtcgcccgtgaaattgaaaaagccggtggtgtggcgaaagagtttaataccattgcggtggatgatgggattgccatggggcatggtgggatgctctattctttaccaagccgtgatttgattgccgatagtgtggaatatatggtcaacgcacactgtgccgatgccatggtgtgtatttctaactgcgacaaaatcaccccggggatgctcatggcggcgttacgcttgaatattccttgtgtgtttgtctcgggcggaccgatggaagcgggcaaaactaaactgtctgataaaatcatcaaactggatttagtagatgccatgatccaaggtgccaacccaaatgtatcagacgaagacagcgcccagatcgaacgctctgcttgtccaacctgtggctcttgctcgggtatgtttaccgcaaattcaatgaactgcttaacagaagcccttggcttaagtctgccgggcaacggatcctgccttgcaacccacgcagatcgtaaacaactgttccttgatgcggggaaacaagtggtcgaattgtgcaaacgctactatgaacaagaggatgacagcgtcttacctcgttctatcgccaacaaaaaggcctttgaaaatgccatgagcttagatattgccatgggcgggtcaaccaataccgtcttgcatttattagccgcggcacaagaagcggaagtggatttcaccatggctgatattgatcgcctatcacgtcaagtgccttgtttaagcaaagtcgcgccaaatacgcaaaaataccacatggaagatgtacaccgtgcaggaggtattatggcgattttaggggaattagatcgtgccaatttattacataatgatactcgcacagtattaggcatgagtctcgctgagcaaattgccaaatatgacattgtgctcactaaagatgaagccgtacacaaattcttccgcgctggtcccgcaggaattcgtacgaccgaagctttttcacaagattgccgttgggatacagtggatgatgatcgtgaaaatggctgtattcgtagtaaaacatttgcctatagccaagatggcgggcttgccatgttatcaggcaacttagcgatggacggttgtattgtgaaaaccgctggagtagatgagagcattttaaaattcactggcgatgccattgtgtttgaaagccaagaagatgcggtggcagggattttaggtggcaaagtacaagcaggtcatgtggtcgtgattcgctacgaaggaccaaaaggcggaccgggtatgcaagaaatgctgtatcccaccagttatttaaaatccatgggcttaggtaaagcctgtgccttattaacagacgggcgtttctctggcgggacatcggggttatctattgggcattgctcaccagaagccgccgcgggtggattaattggcttagtaaaagacggtgataagattgaaattgatattccaaatcgatccattcaattatgtgtcgcggaagaagaactcgctcagcgccgagcagaacaagacaaactgggttggcaaccagtaaaccgccaacgtgaagtgtcctttgccttgaaagtatatggtcattttgcgacctcggcagataaaggcgcggtaagagataaaaccaaaatttaa

SEQ ID NO: 31171 - DNA, 819 bp, Pasteurella multocida
atgtcattttttcctttccgtgccattgtttccgatttagatggcaccttattaaatgctcaccatatgatcggtgactttacgattcaaacattacaacagcttgctgccaaagggatcgatattatgttggcaacggggcgtaaccacacggatttgttaccaattttaaaaaaagtgaatattgaaaaggcggtgatgattacgtccaatggcgcaagagcacaggatttacaaggcaatttgttagtgcgtgattatttacctgaacaaattgcttttgacattatgaatttggattttgatcgccaacgtgtgtgtgtcagtgcgtatcaaggggatgactggtttattaatattgatgtgccacaactgcgtaaatatcatcaagattcgggttttatgtatgaggtggtggattttgcacagcaccatggtcgtgaaacagagaaagtcttttttatcggacgtgaaccgcaagatcttatcggcttagagcaacacttacaagctaactatgcggataccaccagtattacttattccacgccggtgtgtttagaaataatgaataaaaatgtctcaaaagcgagtgcacttgaaaaagtgttagccgatcgggattatgacttacaacattgtctggcttttggtgatgggatgaacgatgtgcaaatgctcagtcgcgttggtaaaggttgtgtaatgggcaatgccgatcctcgattaaaagaggcgtgcccacatctcgaagtgattggcatgaatgcacaagaatcagtagcaaattatattcgtactgtatttgatattgaatga

SEQ ID NO: 31172 - DNA, 954 bp, Pasteurella multocida
atgatccgtgaaccccattttactcactttgccttggctgaattacatccttttgcagcacaatttccgttgcaagacgtacaagggaaaaaaggggtacgtattacctatcggcattttgtacaagacaatcccgtacagcgtaatttggtgattttagtcaatggacgtgcagaaaacttattgaaatggactgaactggcttatgatttctatcaacaaggctacgacgtcttggtatttgatcatcgtgggcaaggctattcacagcgtttattgccagatcatgagaaaggttatattgatgagtttcgtttttatgcggacgatatggcgattttattagcgaaaatcagcgcactttatccttatgaaaatcaacatattctcgcccattccttaggtgcattgattagtacttattaccttgccaattacgatcatcaggtgaaaagtgcggtcttttctgcgccattttatggcattcctctcaaacattctttccgagatgagctcattattaatctaatgatgttattaggtcagggttcacgctatgtgtttggcaaaggacgttatcaaccggcggatttggataataatgatttaagttgttgtcgaactcgtatgcgctggatgaatcgaattaatcgtcggtatccgcatattcatttagggggaccgaccttccgttgggtgcatttatgttttagtgccattaaaaaattaccgactattttgccgcgtattgagattcctgtgctgattctacaatcggagaaagaaaagattgtggaaaataaaaatctgcgcaaactcaccgcacttttaccacgaggagagttaacacaaattgcgcaaagtaaacacgaaattttatttgagcgtgatcttatccgctccgaggcactcaagaaaattagccaattttttactgccaatagcgccaaataa

SEQ ID NO: 31173 - DNA, 1110 bp, Pasteurella multocida
atgcaaaacgttggttttatcggttggcgtgggatggtggggtccgtcttgatggatcgtatgcaagaagaaaatgactttgccaatatcaatcctgtgttttttaccacatcacaagcgggtcaaaacgcccccgtatttggtggcaagcaagcgggtgagctgaaagatgcttttgatatcgctgaattacaaaaattagacattatcgtgacctgccaaggtggtgattataccaacgaggtgtatccgaaattacgtgcagcaggttggaagggatattggattgatgccgcgtccgcattacgcatggaaaaagacgcgattatcgtgcttgatccagtgaaccaaaatgtcatcagcgaaggcttaaaaaatggcattaaaacctacgttggcggtaactgtactgtgagtttaatgttaatggcgttaggcggtttatttgaacgtgatttagtagaatgggtgtctgtggcaacataccaagcagcaagtggtgcgggtgcgaaaaacatgcgcgaattattggtacaaatgggtcaacttgaagacagcgtgaaagtggatttagataatccagcctcctccattttagacattgaacgtaaagtaacagcaaaaatgcgtggtgatttaccgattgaaaactttggtgcaccactggcagggagcttaattccgtggattgataaactctgggaagatggtcaaaccaaagaagaatggaaaggctatgcggaaaccaataaaattcttggcttagacgacagtccaattcctgttgatggtttatgtgtgcgtatcggtgcattgcgttgccacagccaagcgttcaccatcaaaatgaaaaaagatttaccacttgaagaaattgaacaaattcttgcaagtcacaatgaatgggtgaaagtgatcccaaatgaaaaagacgtgaccttacgtgaactgacgccaaccaaagtgacaggaactttatctgtgcccgttggtcgtttacgtaaactcaaaatgggaccggaatatttagccgcgttcacagtgggcgaccaattactctggggtgccgctgagccacttcgccgtattttaaaacaacttgtggcgtaa

SEQ ID NO: 31174 - DNA, 2007 bp, Pasteurella multocida
atggcaacacgtagagaactggccaatgccattcgttttttaagtatggatgcagtgcaaaaagcaaaatcagggcatccaggtgcaccgatggggatggcagatattgcagaagtcttatggcgtgactttttaaaacataacccaagcaatccacactgggccgatcgcgaccgtttcattttatccaatggtcatggttcaatgctgatttacagtttattacatttaagtggttatgacctttctattgaagatttaaaacaattccgtcaattacattccaaaacaccgggacacccagaatacggttatgcgccgggtgttgaaaccacaacaggaccattaggtcaagggattacgaacgcagtgggttttgcgattgcggagaaaacccttgcccatcaatttaaccgtccaggtcatgaaattgttgaccaccacacctatgtgttcttaggcgatggttgtttaatggaagggatttctcatgaagcctgttctttagcgggtactcttgggttaggtaaattaattgctttctatgacgacaacaatatctcaattgatggtcatgtggacggttggttcactgatgatacgcaaaaacggtttgaagcttatggttggcatgtcattccagcggtagatggtcataatccagaacaaattcttgaggcggtgaaacaagcccaagcggagacaaccaaaccaaccttaattatttgtaaaaccattatcggttatggttcaccgaataaagccaactcacacgattgtcatggtgctccattaggtgatgatgaaattgcggcagcacgtgaattcttaaaatgggagcatgccccgtttgaaattcctgcggagatttatgcacaatgggatgcgaaagaaaaaggtcaagttgctgaaaaagcgtgggaagaaaaattggcagcttatgccaaagcttacccagaattagcggcggaatttactcgtcgtgtgaatgcggagctaccggcaaactgggcggcagaatcgcaagcttttattgaacatttacaagcgaatccggcgaacattgccagccgtaaagcgtcacaaaatgcgattgaagcctatgctaaattattaccggagtttttaggtgggtcagcggatttagccagctcaaacttaaccctctggtcaggttccaaaccaatccgtgcggtagaaaatgccgatggtaactacatcaactacggtgtgcgtgagtttggtatgtcggcgattatgaacggtattgcgttacatggtggtttcattccttatggtgccactttcttgatgtttatggaatacgcacataatgcggtgcgtatggcggcgttaatgaaacaacgctcattgtttgtttatactcacgactctattgggcttggtgaagacggtccaactcaccaaccggttgaacaaacgtctgctttacgtttaattccaaatttggaaacatggcgcccatgtgaccaagtggaatcggcggtggcgtggaaagcggcagtggaacgtaaagagggacctagtgcgttaatttttactcgtcaaaatcttgcgcaaatggaccgcactgctgagcagttagccaatgtggcacgtggtggttatgtattacgtcattgctgtgaaaaccaaaactgtccagatttaattttgattgcgaccggttctgaggtggaattggcgatgaaagcggcggatgttttagatgcagaaggggtaaaagtacgtgttgtctctatgccgagcaccaatgtgtttgataaacaagatgcggcttaccgtgaaagtgtgttaccaagccacataacaaaacgtgttgcgattgaagcgggtattgcggacttctggtacaaatatgtgggctttgagggacgtgttgtgggaatgaacagttttggtgaatccgcaccagctgaccaattgttcaaactctttggtttcaccgttgaaaacgtggtcgcgaaagccaaagaaattctctaa

SEQ ID NO: 31175 - DNA, 951 bp, Pasteurella multocida
atgacacaattagattcgttacgcagtatgacggttgttgtcgcagatactggtgatattgaagcaattaagcaatatcagccacaagatgcaacaacaaatccttctttgattttaagtgcttctgcattgccccagtatgcgccattaattgatgacgccattgcttatgcgaaaacaaaaagtgattgtccacgccagcaattggttgatgctgaagataaactggccgttaatatcggcttagaaatactcaaaattatccccggacggatttctacagaagtcgatgcaaggctttcgtatgatacacaagcgactattgagaaagcgcgtaaattgatcaagctttataatgaagcgggaatagagaatcatcggatcctcatcaaaattgcttcaacttggcaaggtattcgtgctgcagaagtgcttgagaaagaaggaattaattgtaacttgacgttgttgttttctgaagcacaagcgagagcttgtgctgaagccggtgtgtatttaatttcaccgtttgtagggcgaattttagattggcataaagcaaatacgggtagacaagattatccggctgcggaagatccaggtgtgatttccgtgactcaaatttataattattataaacaacataattataagacggttgtcatgggcgcaagtttccgaaatgtagatgaaattattgagttagcaggatgtgatcgtttgacgatttcacctactttattgagtcatttacaagcaagagaaggggaacttgttcgtaagttagcattcagcggcgagttaaaagacagacctcaacctttaacagagagcgagttttattggcaacataacagcgatccaatggctgttgcaaaattagcagaaggcatttgtaaatttgcagaagatcaagaaaaactagaaaaaatgctcttggaaagactataa

SEQ ID NO: 31176 - DNA, 456 bp, Pasteurella multocida
atgaaaatcgccattggctgtgatgatgcggcttataatttgaaggtggaattaattaagtttttaacttcccttggcattgaatgtgatgattttggtgcgggtgctggtgatacaacactgtatccgaatgttgctgagaaagtcgcaatcgctgtcgcaaaaggagaatatgacagaggcattttaacctgtggaacaggaattggtatgtgcattactgcgaataagattcctgggattcgtgctgctgtgtgtcatgatgttttttctgcagagcgagcaagaaagagtaatgatgcgcagattatttgttttggtgaaagggttatcggtgtcgaattggccaaagcattattaaaaacgtggttagcgtgtgacttcgcaggtggtggttctacacctaaagttgcgcaaattaatgaaattgattctaaatatcatcgctctttatag

SEQ ID NO: 31177 - DNA, 954 bp, Pasteurella multocida
atgagtgaagaagaaatggatttattaaccgagattgcagtttcttactatgaacatgagttaacgcaagaggaaattgcaaaccgatttaatatctctcgagttaagattggtcggttattaaagaaagcccgtcaggaagggattgttgaaattaatgtgaaatatcacccgattttcacatcaaaattagaacagcgtttgatagaacagtttggtattcatcgcgccttaattgctattgatactcagaatgaagtagaacagcgcaaacaagtcgctgcgttagtaaatgcctatttatctagtacgttaaaagacggtatgacagtagcagttgggcaaggacgaaatgtagccgccgttggagaatatgtgggcgtttttcctgagcgaaattgtaagttcatttgtggtatcggtggtacacatcgaataggtccaccaatagatgctgaccatatttgccgtaacttagcgcgtaaatttaatggcactaacgaaacgttgtattcccctgcttatttagaaaagcccgaatttagagatatttttttacaaaatggggtaataaaagaaacgcttgataaagctcgcaaagcggatattgctttggttggcatcggtgatatgaatgagaatagctatatggttcagttgggatggtttactcctcaggaaattacgcatgcacgcatgaatttaggtgtggtaggtgagattgcaggctatggcttttttaactttcaaggagagcctgcggataccgtgatgaataaccgagtgattggtttaagtcttgaagatttaagaaagataccttgcgtgataggcatcgcttctgaaaatacaaaagcgacagcaattttgggcgctttaagaacaggaattattaatattattgctacaaccgccagcaacattaacacaattttgagtttaacgaaaagttaa

SEQ ID NO: 31178 - DNA, 270 bp, Pasteurella multocida
ttgaccttggctaatatcaagtcagctaaaaaacgtgcgattcaatcagaaaaacgccgtcagcacaatgcaagtcaacgctcaatgatgcgtacttacattaaaaaagtttacgcagcagtcgcagcaggtgataaatcagtcgcagagaaagcatttgttgaaatgcaaaaagtggtggacagaatggcttctaaaggcttaatccacgcaaataaagcggcgaatcacaaagcaaacttatctgcacaaatcaaaaaattagcgtaa

SEQ ID NO: 31179 - DNA, 1533 bp, Pasteurella multocida
atgacgttgttatcacgcattctaggcttagtcagagatgtcgttattgcaaatttactgggggcgggtgtggcagcagatgtctttttatttgccaacaaaatccctaactttttacgacgtttatttgccgaaggcgcattttcacaagcttttgttcctgttttggcagaatatcgaaaaagcggtgatctggataagactcgcgaatttatcggcaaagtctctggcacattaggcgggttagtttccattgtcaccattttggcgatggtcttttccccgttgattgctgccctgtttggcacgggttggttcattgattgggtcaatgaaggacccaatgcggaaaaatttgagcaagcctctttcttactcaaaatcacctttccatatctttggtttgttacctttgtcgccctttctggcgcaatcttaaatacgattgggaaatttggggtgatgtcattttctcccgtcttactgaatattgcgatgattgctaccgctttgttcctcgccccccatatggatagccccgatttagcgttagcgatcggtattttcactggtgggttattacaatttctgtttcaaattccttttttaaaacaagccgggttactcgtcaaacccaaatgggcatggcacgatgaaggggtaaaaaaaatccgcacgctcatgatccctgcgttatttggtgtgtctgtcagtcagattaatttattattagacaccttaattgcgagctttttaatgacgggttcaatcagttggttatattattccgaccgcttactggaattcccattagggctctttgggattgcgatttccaccgttatccttcccactctcgcacgccaccatgtcaatcgtcatgatcattcaagccaaagtgctattgatttccgtcatactctagattggggcattcgcatgattctgcttttaggtgtgcctgcgatggtcggcattgcaattttagcccagccgttactgttagtgttatttatgcgtggcaactttggcttaaatgatgtacaagccgcttcgctttcactctgggcatttaatgctgggttactcagttttatgctcatcaaaattttggctaacggctattacgcccgccaggacactaaaacccctgtcaaaattgggatcattgctatggtcagtaacatgggctttaatttactggcaattccctttagctatgtaggattagcgatggcttccgccatgtctgccacccttaacgcttatctactctatcgtggcttagtaaaagaggaggtttaccattttagtcgtcaaagtgcggtgttttttggcaaagttttattgtccgcaagtgtcatgggcggattggtttggtataacactcccactttacttgaatggcatgcaatgaccttcttaacacgcctacattggctgatttggctgattggttttgccgtggtgatttacttctcaatgctagccttggtcggtattcgtaaacatcatttaaccactaaaggataa

SEQ ID NO: 31180 - DNA, 936 bp, Pasteurella multocida
atgcgactgattcgtggcattcacaatttacccccaaatttatctggttgtgcgctgactattggcaattttgatggtgtacatttaggtcatcaagccattttgcgccatttacgtcaaaaagccgatgcgttgaatttgccggtggtcgtgatgttatttgaaccacaaccgcgcgaatactttactggcgacgccattcccgcacgcctgatgcgcctacgtgataaattacattatctcgctcaagcaaaagtagattatgtgctttgtattcgttttaatgaaaattttgctagccaaaccgccgaagaatttattgaagattggctcgtcaaaaagttgaatgtccgctttttaagtattggtgatgatttccgttttggggcgaaacgacaaggtgactttgccctgttacagaagtcaggcgaggcatttggctttttcgtggaagataaccacagtttttgctgtgacgagttacgtattagtagcactgcgatccgagaagccttagccgaggatgatttagcctatgctgaaaaaatgttaggtaaaccttatcgcatcttagggcgtgttgcacacggcaataaattaggtcgtactatcggttttccgacagccaacattccattacatcggcaagtgaaccccgttaaaggggtttacgcggtaaaagtgcggttaaaaaatcaagagatttatcacggtgttgcgaatattggtaaacgacccacgattaatggcgttgtacagctgttagaggtgcatatttttgattttcattcaaccatttatggacagtgcctagaagtcgaattttgccacaaaatccgtaacgaatttaagtttccctcttttgaggcattaaaagagcaaatcgcccaagatgtggaaaccgcaaagcattttttcagaacacaacaaatttaa

SEQ ID NO: 31181 - DNA, 2799 bp, Pasteurella multocida
atgacagttgattataaaaacactcttaacctgccagaaacaggctttcctatgcgtggagatttggctaaacgtgagccaaatatgttaaaaagctggtacgagaaagatctttaccaaaaaatccgtcaagcgtccaaaggtaaaaaatcatttattctgcatgatggccctccttatgcaaacggcactatccatattggtcacgccgtcaataaaatcctgaaagatattattgtgaaatccaaaacggcattaggttatgactctccttatattccgggttgggactgccacggcttgccgattgaattaaaagttgaaggtttagtgggtaaaccaaaccaaaatatcagtgcagcacaatttcgtgaggcatgccgtcaatatgcggcagaacaagttgaaggtcagaaaaaagattttatccgtcttggcgtattaggtgactgggacaatccctacttaaccatgaattatcacaccgaagcgaatatcattcgcgcctttggtaaagccgtggaaaatgggcatctatacaaaggttcaaaaccggttcactggtgtttagactgcgcctcttcattggctgaagccgaagtcgaatacgaagacaaagtctccccttctatctatgtgcgttttagtgcggtggattctgacgctgttttagcgaaattcaatgcgacagataaaggtacaggtaacatttcagcggttatttggacgactacgccttggaccattccgtctaaccgcgctatcgctattcatgaaaatttggattaccaactcgttcaattcaatgatgagcgtgtgattttagccaaagacttagtggaagaagtggcaaaagcggcgggtgtagaacaagttgtcatcttaggcgaaagcaaagggaaagatcttgaatggttacgtttccaacatcctttttatgattttagcgtgccctttattttaggtgatcacgttaccactgatggcggtaccggtttagtacacaccgcaccagatcatggtcatgacgactacattattgcgcaaaaaaatggcatcgaaatggcgggcttaattggtaatgatggcttgtttaaagctgatgtgccgttctttgcgggcaaaggcgtgtttgaatcgaatgatttagtggtcgccaaattacaagaagtgggtgcaatgctgaaattcagcaaaatcaaacacagttacccacactgctggcgccataaaaccccaattatcttccgcgccacaccacaatggtttatcggcatggaaaaacaaggcttacgccaacaagccttaagtgaaatcaaaaaagtgcgttggattccagattggggtcaagcgcgaattgaaaaaatggtggaaaatcgtccagactggtgtatttctcgtcaacgtacatggggcgtgccagttgcgttatttatccacaaagaaacagaagaactgcatccacgcaccgttgaacttgtcgaagaagtagcaaaacgtgttgaacaaaaagggattcaagcatggtgggatttagatacggcagaattattaggtgcagatgccgacaactacatcaaagtaccggatacccttgatgtctggttcgattcgggatcaacctattattccgtggtgaaagatcgtcctgaatttaatggtcaagaagcggatatgtatttagaaggttctgaccaacaccgtggttggtttatgtcttccttaatgctttctaccgcaaccgacaataaagcgccttataaacaagtcttaacacatggtttcaccgttgatggtcaaggtcgtaaaatgtcaaaatctatcggtaacattgtgacgccacaagaggtaatggataaattcggtggcgatattttacgtttatgggttgcttccactgactataccggcgagatttctgtgtcagatgaaatcttaaaacgtgcagccgatgcttatcgtcgtattcgtaacaccgcacgtttcttactggcgaacttaaatggttttgatccaaaacgtgatctggttaagcctgaagagatgatggtgctcgatcgttgggcggtggattgtgcataccaagcacagaatgaaattaaagatgcctacgataactatcaattccatgcagtaattcaacgtttaatgaaattctgctcaattgaaatgggttcattctatttagatattattaaggaccgtcaatataccactaaagcagatagccttgcacgtcgtagctgtcaaacggcgttatggcatattgcagaagcgcttgttcgttggattgccccagtgttatccttcactgcggatgaaatctggcagtatattccgggtgagcgtggtgaatttgtgtttactgaagaattctacaacggtttatttgcgttagatgcaaatgaacaaatgaatgatgcttactggcaacaagtcatcactttacgtaatgaagttaaccgcgtattagagcaagcacgtaacgataaaattatcggggctgcccttgaagcggaattgaccatttatgcgaatgacacttacgctccactcttagccaaattacaaaatgaattgcgttttgtgttacttacctcaaaagcagaagtcaaaccattggcagacgctgatgtggcggaaggtgaagtgaaaggctttgcagtaaaagtggtacgttcagcgaatcacaaatgccctcgttgttggcattattctgacagcaaagatgctgaatcgctctgctctcgctgtgatgaaaacgtcaacggtcagggcgaagtcagacaattcgcataa

SEQ ID NO: 31182 - DNA, 609 bp, Pasteurella multocida
atgaaacaaaaaatcgtcttagcaacaggcaacttaggaaaagtcaaagaaatgtcagatgtcctggctgattttggttttgaagtgattgctcaaacagaactcaacattgaaagtccagaagaaactggtttgacatttgtggaaaatgcactattaaaagcacgctatgccagtaaaatgtcaggcttacccgccattgctgatgactcagggttagtcgtgcctgcccttggtggcgcaccgggtttatactctgcacgctatgcgggggtagatggtcctgatgcagatgcgaaaaaccgcgcaaaattattacacgtgctacatcatatcgcgccaacacatcgacaagcaaaatttgtcagctgtatcgtcatgttacaacacgaacacgatccttctccaattattgccgaaggagaatgttatggtgaaattggctttgcagaaaaaggcgaaaatggctttggctatgacagcctattctttagtcctgaagtaaactgcacttttgcagagttagcaacaagtgaaaagaaaaaaatttcccaccgagcaaaagcgctatctgtgttacaaactaaattagcaacaaaaggagcttag

SEQ ID NO: 31183 - DNA, 732 bp, Pasteurella multocida
atggttctggtggacataaattcagcaaaacgctggctgaacacaatcgtgccgtacaacagtatttacgctggtatcgtagtcaaaaaaatggaaattaatatgacaacaggaaaatttattgtacttgaaggcattgagggcgcaggtaaaacgacggcgcgtgatagcatagtgcgtgcattgcatgctcatggtatccatgacattgtgtttacgcgagaacctggtggaacccccttagcagagaaattacgccagctgattaaacatgaaacagaagaacccgtgaccgacaaagcagagctcctcatgttgtatgctgcacgtattcaattggttgagaatgtaatcaaacctgctttagcacaaggaaagtgggtaattggtgatcgtcatgatatgtcatcacaagcctatcaaggcggaggacgccaactcgatcaacatttgctccataccctcaaacaaactattttaggtgagtttgaacccgacttaaccctttatttagatatcgatcctgtcctcggcttaagccgcgcaaaagggcgtggggctttagatcgtatcgaacaacaaaatttggattttttccaccgcactcgccaacgctaccaagagttggtgcgccataacccgaaagccgtgaccattgatgcctcccagacgatgagcaaagtggcagaagatgtggaaagcgcgatagagacttggttgactacacgttaa

SEQ ID NO: 31184 - DNA, 984 bp, Pasteurella multocida
atgatgacattgtatccttggctgttgccttactatcaacaacgtattgatgccttccaacaaggacatgggcatcatgcgctcttgtttcaagccgagcaaggcttaggcactgaacagctattatttgccttaggtcattggctcatttgccagcaaccgcaaaaccaacaaccttgccaacaatgtcatcattgtcatttgtttcaagcccaaacccatcctgatatctataccttgaccccgattgaaaataaagatattggtgtggatcaagtgcgtgaagtgaatgagaaaattaatcaacatgcccaacaagggggcaataagatcatctatgtgctgggtgtttcgcgtttaaccgaagccgctgccaatgcgatgttaaaaacccttgaagaaccacgtccaaatacttattttctgctatacacagaagcatccgactcagtgatgccgacgatttatagtcgctgccaaacgcaaaaattggcgctcccagctgaaaccagtgcgatcgcttggttacagcaacaaacgacacaagaaattgcagcaatccagaccgcacttcgtattagctatgggcgaccattgcatgccttaacggtactacaacaagatttattggaaaaacgtcgtgagtttttgcgtcaattctggctattttatcggaaacgttctccgttagaactgttacctttttttgataaagccattctcctccaccaacttgactggttactcgcttttttaagtgatgctctcaaagcaaaattacagattaaaagcgattggttatgtcaggatctcgctgctggcgtactgcaattaagtcaacaacaaagcgcacaggcattacttcatgccacacaaatcatacagaaagtacgtaccgatttaacgcaaattaatgccgtcaaccaagaactcatcttattagacggtctcactcaattaattaccgatgtatttaaaggataa

SEQ ID NO: 31185 - DNA, 783 bp, Pasteurella multocida
atgtttattgtcgattcccactgtcatcttgatgcactggattatgaaaacttacacagcagtgttgatgacgtggttaacaaagccatggaaagagaagtgaaacatttacttgctgtaggggttaccttaactcgttttgagcaaatttatgccacattggctaaatttaagaatgtttctttagcatgtggtgtacaccccctcgatctggatgatgagccgtttgatgccgatcgtctgttgaaattagcagatgatcccaaagttgtcgcgattggtgaaaccggattagattactattacagcgcagaaaataaaacaacccaacaggcgatttttgccaaccaaattcaaattgctaaccaattgaataaaccggtaattgtgcatactcgcagtgcccgagaagataccattcgtttgctggctgaaaatcatgcggataagtgcggtggcgtattacattgttttactgaaaattgggacatggcgaaaaagggcttagatttaggactgtatatttcgctgtcgggtatcatcacgtttaaaaatgcagaagaaattcgtgatgtggcacgtcgtgtacctcttgaccgtttattaatcgaaacagattccccttatttagcgccagtcccttatcgtggcaaacaaaatcaacctgcttatgtacgcgaagtctgtgagtatgtggcgacattaaaaggcgtgtcttttgaagagtttgcccaactcactacacaaaactttgaacgtttgttcaaaattaatgtacaataa

SEQ ID NO: 31186 - DNA, 1350 bp, Pasteurella multocida
ttgtttcttcctagcctcccttaccgttcaaaacagagatattttatgagtttatttgaagcaattctaagtttaggcatactgatcattatcagtgcggtgatttcagccgctgaaatgtcactcgccggtgcgcgaaaaatcaaactacaaagtttagtcaacgacggtgatgcacgcgcgcaattagtacttgagctacaaagccaacccgggcgctttattactgttgtccaaattggcttaaatatggtcgccattttaggcggaattattggcgaaagtgcgattcgcccctacttagccctcgtcttaacccaacacgtcagtgtcgaatggctagatagcgccgcctcttggttggcattcgctttagtcacaaccttatttgtgctgcttgcggatctcgtgcctaaacgtttagcgatgattaatcctgaaaaagtggcactgcgtactgtacgtattatgtctgtctgtattttcttactcaaacccttggtgatgatttttgattctattgccaatggcttttttaagctctttagaatttcgaccatacgtgaagaaaatatgaccccagaagatatcgtcgcgattgtcggggcaggagcggaagctggggttgttaatgcacaagaacattatttgatcgaaaatatttttgagatgcaacaacgcacagtcacttcaacgatgacaacgcgtgaaaatattgtgtttttagaccgctcttttgatcgccaagccgtgctagataccctcacacacaattcgcattctaaattattaatttgtgataacggcttagatcgcattctcggttatgtagaatcgcacacattactgacaatgtatctccaagttgaaaaaggggtctcattaacagacagtcgtcttttacgtaaagccctatttattccagatacgctctcgttatttgaagtgcttgaattattcaaatcgacaggggaagattttgctgtgattgttaatgagtacgcactggtggtcgggattattactttaaatgatgtgatgagcattgttatgggtgaattagtgtcaaatgaagaagaacaaatcgtgcgccgtgatgaagactcttggttgattgatggtgcaacgcccttggaagatgttatgcgcgccctcaatttaagtcattttccgggcgaagaaaattacgaaacaatcggtggctttatgatgtatatgctgcgtaagattccgaaaaaaaccgattttgtattgtatgacaaatacaaatttgaaattattgataccgaaaatgtgaaaattgaccaactgttagtttctctcagaaaggacattgaccctaccgtttaa

SEQ ID NO: 31187 - DNA, 1950 bp, Pasteurella multocida
atgtattcaaattctgaaaaaaatcaccgcactttgctgttccccattttcttttttgtcttcgttaatctcatcgttttcacgctttcgcgtttagggctgtcactctggcaagcagagcgtgtgagcgcggtcaatggctgggtcgagctatttgtgcaagggctacgcattgatattgtgtcactgtgttatttatttggcgtccctgccttattcacagtattactttatcaccataatgcgctcggtcgcgtttggcaaaaaatattacgtgtttggttaacctttggcagtgtctttatcttattcatggaaattgccacacctgcatttattgagacctatgatttccgaccaaaccgtcttttcattgaatacctcatttatccaaaagaagtgtttactatgctatttgagggacatttgctctccatggtaattagcttagttgtcactgccactgcaacactctgttattggaaattagcgggatgggcagtgaaaaacttatcttcacccagttggaaattccgtccagttgttgctctgttagtgatcgccattgcctttatcggtgcccgatcaacttttgcgcatcgcggtattaatccggcgatggttgccttctcttccgacggtttagtcaattcattagtcctcaactcaggctattctgttatttatgctgcacaacaatttaaagatgaagacaatgctgcctctttatacggcaaaatggcagatgatgaaatgctacgtattgtaaaacaaacgcgtggtcgtccagaaagtgactatatttctagtcaatatccaaccttaaccagaaaccaagccacttaccaaggcaaacctaaaaatattgtgattattttagaagaaagtcttggcgcacaatttattggcagtttaggcggattacccctttctccagaattcgataaattagcacaagaaggctggttatttgagaacctgtatgcgacaggaacccgttctgtacgtgggattgaagccgttaccgcgggctttactccaacaccggcacgagccgtcgtcaaactcagtaacagccaacatggtttctttaccattgccgaattattagctaaacaaggttaccacacctcgtttatttacggtggtgaaaagcatttcgataatatggcaagcttcttctatggcaatggcttccaatacattattgatgaattggattacgtcaatcctaaattcaaagcgacatggggagtgagtgatgaagacttatttgataaagcccatgaaacctttaccgccttacataaagaaggtaaaccgttctttagtttagtgtttagctcaagtaaccatgatccgtttgagttccctgacggtaaaattgaactttatgaacaaccaaaacaaacccgcaataatgcggcgaaatatgcagactatgcgattggtcatttctttaaattagctaaacaagcagattactggaaagatacgctgtttttagtcattgctgaccatgattctcgtgtcggcggtgctgcgttagtaccgattaagcactttcatatccctgctttattgctaggcgatcatgtagaggtaaaacgtgatgcccgtctcgtcagccaaattgatatgcctacaacgttgctgtctttagctggcatcagtggtgattatccgatgattggttatgacttaaccaaagaagacaatccaaatcgtgcttttatgcaatatgatcaaactctcgccatgatgaaaggtaacgaggttgtcatccttgcacccaaagttgaagccaaaggttatctctatgataaacaaaccaatcgttttacagaggcgaatttatcagaagcgctaaaaaaagaagcactggcacattcactcttaggcagttatttatataaaaataggttatataaatcagaggataaaaaataa

SEQ ID NO: 31188 - DNA, 807 bp, Pasteurella multocida
atgacagatcaacacgcttttgcgaccgaacaagtgcaactcgacccgactttatctcctaccacagaagaaaccacgcattttggctttaaaaccgtggcaaaatcggaaaaacaaaaaatggttgccaatgtcttccattccgtcgcgggcaaatacgatttaatgaatgatttactttcatttggtattcatcgcgtttggaaacgctttaccattgactgcagtggagtacgtaaaggacataaggtgttagatctggcgggtggaacaggagattttacggcaaaattctcgcgccttgtaggacctagcggtgaagtgatccttgccgatataaatgattcgatgttacgggtcggtcgggaaaaactgcgtaacctcggcgttgtcggcaatgttaattatgtacaagctaatgctgaagcactgccttttcctgacaacacttttgattgtgtgatcatcagctttggtttacgtaacgtcacggacaaagacaaagcactacgttctatgtttcgcgtgttaaaacccggtggtcgcttattggtgttggagttttccaaaccgattttagatccactcagtaaaatttataatttctactctttcaatattttgcctaaaattggcgaagtggtggtcaatgatagtgaaagttatcgctatcttgctgaatctatccgtatgcaccccgcacaagatgttttaaaacaaatgatgattgacgctggctttgaacaagttaattactataatttaagtgcgggcattgtggcattacaccgaggttataagttctaa

SEQ ID NO: 31189 - DNA, 1026 bp, Pasteurella multocida
atgacacaacaaatttttgccaatttccctcaacgtcgcctacgccgtatgcggaaacaagctttcagtcgccgtttaatggcagaaaataaactcagcgtagaggatttaatttatcccgtttttattattgaaggcgaaaagcaaagggaacccgtaccttccatgcctggtgtagaacgcttaaccattgatgagctattaattgaagccgaacttttagtcaaatatggggtaccggtgattgcgcttttcccggtgattgcacaagagaaaaaatccttaatggcagaagaagcttatcatcctgatggcttagtacagcgcgcggtaaaagcgttaaaggacaaattcccaactgaacttggcatacttactgatattgccctcgatccctatactacacacggacaagacgggataattgatcaacatggctatgtgttaaatgatgtcactagcgatattttggtcaaacaagcgctttcccatgcgaaagcgggcgcagatattgtagcaccaagcgatatgatggacggtagaattggcaaaattcgccatgccctcgaggaaaaggggtttatcaatacactcattatggcgtattctgccaaatatgcttctcattattatggacctttccgcgatgccgtcggttctgccaccaatttaaaagggggcgataaaaaaacttatcaattagatccggccaatagtgatgaaggactacaagaagtggcattagatttacaagaaggggcagatatggtgatggtcaaacccggcatgccgtatttagatttagtttatcgcgtgaaaacccattttggcgtgccaactttcgcttaccaagtatcgggtgagtatgccatgcatcaagctgcgatccaaaacggctggctcaaagaaaaagaatgtattatggaatctttattgtgcttcaaacgtgctggcgccgatgggattttgacgtattacgccaaacaagtagcagaatggctatattgggaaaaacaacatcaataa

SEQ ID NO: 31190 - DNA, 948 bp, Pasteurella multocida
atgaccatttactcagataattcttattcaattggtaatacaccacttgtgcgcttgaaacactttggtcaaggcaatattgtggtcaaagtggaagggcgtaatcccagttttagtgtgaagtgccgtattggggcgaatatggtatggcaagcagaaaaagacggtatcttgacgaaagaaaaagaaattgtcgatgctaccagtgggaatactgggatcgccttagcctatgtggcagctgcacgcggttataaaatcactttaacgatgccagaaaccatgagtgcagaacgtaaacgtttattacgtggattgggcgtcaatttagttttaacggaaggtgcattgggcatgaaaggggctattgccaaagcagaagaaattgtcgcgtctgatccacaacgctatgtaatgttaaagcagtttgaaaatccggctaatccagccattcaccaacaaacaaccggaccggaaatttggcgtgatacggatggtcaaattgatgtgctggttgctggtgttggcaccggcgggacgattacagggattagccgttatattaaacaagataaaggtaaagcgattctctctgtggcagttgaacctgcggaatcaccagtgattagtcaaactttagccggtgaagagatcaagcctgccccacataaaattcaaggcattggcgcgggctttatccctaaaaatttagaccttgcattagtggatcgtgttgaaaccgtgagtagtgaggaagccatgcaaactgcacgtcgattaatggcagaagaaggcattttaggggggatttcatcaggagcggcggtggctgccgcagatcgtttggcaaaattacctgaatttgccgagaaattaatcgtagtgattttaccgtctgcgtcagaacgctatttaagtacggcattatttgaaggcattgaggcttaa

SEQ ID NO: 31191 - DNA, 972 bp, Pasteurella multocida
atggatttgaatacaattttaattattttaggcattatcgcattaattattttagtggttcatggcttatgggccaatcgccgcgaaaagtcacaatactttaaaagtgcgaatacctttacgcgagattctcgtctaagagaacctccagcgcatatccaatcagcatcagaagaaaaaaaggatgcgaacaccagtacgcctaccgctgaggtttctccggcacaacgtacctttgcttttgaagcagaaaaacaattcgcccatgaacaacaagccgttgaacaagcgattgaaaatatcaaaattactttgcctaaagaagagcaaccttatcaagctaaaattgaacccgataccccaccaacctctcccgcgttaaccaccattgcagaggttgagaattatgcaaatcaagaagaagggatcgatactcactccgaacaattacgccaacaattggctgatctcgcacaacaatcaccttccgtgacattagctgcattacaggaagaacaagccttaatggaaagtcaagctcagcaacaagcaagcgaagatgtacgccaagacacggatgccacttttattatgatgtacgtcgttgcacctgaaaattatcaattccaaggcgcaagactggctaaaattttagatgaattaggtttcttatttggtgaacataatatttatcaccgccattctgatttaagtgtcaacagcccagtcttatttagtgttgccaacatcgaacaaccaggaacatttgattacaatatgcatgactttagtaccgttgggatcgccctctttatgcagttgccatcagaaggcaatgatctgatgaatttacgcatgatgatccgtgcagcgaaaagtattgcggaagatcttggtggctttgtcttaactgatcaacaagccatttttgatgaccaagcggaaaaagcctatcttgataaagtcagataa

SEQ ID NO: 31192 - DNA, 606 bp, Pasteurella multocida
atgagcctatttgcgattttctatctgttcctggcgtatttattaggatctgtttctagtgcaattttattgtgtcgtttagcggggttgcctgatccaagagaaagtggttctcataatcccggtgcaaccaatgtcttgcgtattggtgggcgttgggtggcattgagtgtactcctgtttgatatgcttaaaggtatgttacctgtttggttaggctattatcttggtttgactcattttgaattagggatggtggcattaggtgcttgtttagggcacatttttccaatcttctttaaatttaaaggcggaaaaggggtggcaacggcatttggtgctattgcgccgatctcatggggtgtcgctggcagtatgctaggcacttggttattgattttcttcgtgagtggttattcttcgctcagtgcggtgatgaccgcgcttctggtacctttctatgtgtggtggtttaagcccgagtttactttccctgtcgctttagtgtgttgcttgttgatttatcgccatcatgacaatattcagcgtttgtggcgtgggcaagaagacaaagtgtggaataaactgaaaaacaaaaaagattaa

SEQ ID NO: 31193 - DNA, 906 bp, Pasteurella multocida
atgacgaacaaacaaggttatggctatttttgcttactgttagccaccttcttttggggcggtaactacctatttggcaaaatactcagcacggacattccacccattgtgttaaattatgctcgttggtttccggctgccttaatcttattgctattatttagtaaacgtagctgccaatttacgcccgtgatccgtcagcattggcgaattttgatcgcactttctctgctgggtattgtgattttcccagtatttttatatcaaggtttacaaactacaacgtcgctcaatgccagtatttacctcgcggtagtccctatttttgtcttatttctcaaccgccttgtctttggtgaccctattaattttacgggattgactggtgcattgtttagttttgttggggttctttggctacttagccgaggcgatatacaacgtctaactcaattagaagtgaatcaaggggatttatgggcactcggctctgcactgagttggtctatttattgttgtctgattcgtcttaaaccagcacaattacccaatacagtgctgttaactacgttagtttgtatggcaatgttactttttaccccgctcttcatttggcaatatcaacaattgccacctgcatttttctctacgttaacaccaacacaatatagcattattacttatttaatcatcggtccatcgatcctatcttatggcttttggaactatgggatttcgctagtgggtgcggataaaggcgctgcctttacaaatgccacaccgttatttgcagcattattaggggtattagtgttaaatgaagctcttgcgttctaccatatgatcagtgcgggtttaatcattactgggctattactttgtaaccgaaaatcgtgctcgtcttag

SEQ ID NO: 31194 - DNA, 711 bp, Pasteurella multocida
atgaaattctaccgcactttacgccctttcaaattaatcagttttgatttggacgacaccctgtacgataacagcgacgtgattcgcctcgcggaagaaaattttattgaaaaagtcaaacttgaaagccagttaaatatctcatcagaagaatggcgagcctggaagcaacgtatcgaacaacgtcatcctatgttgtgtgaagatgtggttgcttggcggattgaaaccttgcaccaactcttagcaaattatcagaaaagtgcggcagagattgagcgagtttgtcagcaagcgatggcgttatttgtggaatggcgtcataaaattgatgtgccggtgcaaagtcaacaggtgttgaatttactaaaacaaaaatatccactggtggcgattactaacggtaatgttgagccacaacgtataggtttatcacaatttgatctcgtactacggggcggtgaacagggcagagcgaaaccccatcaagatttattccatcaaaccgcacaacactttggcgttcagccgcacgagattttacacgtcggtgataatttaatgacagacgtacaaggcgcgattcaggctgattgtcaggcggtttggattaatctttcaggcaaagtgctacgggatttcccagaagcaagattaatgccaaccttagaaattaccgagttgaaacagttgttaatgttggtggcgtaa

SEQ ID NO: 31195 - DNA, 888 bp, Pasteurella multocida
atgcaagaacagttagacaaatattggaattatctgcgcattgaaagacaagtaagcccgcatacgttgacgaattaccagcgtcagctttatcgcattgtggacattctggcggaaaatgggatcacaagttggcaagccgtgacacccagtattgtgcgttttattttggcgcaaagtaataaagatggtttaaaagaacgcagtttagcattgcgtttgtcggtattacgccgtttttttacctatttagtccaacaacaagatattaacgtcaatcccgctactggcgtgtctgccccaaaacaaaatcgacacttaccgaagaatattgacgctgaacaagtacagcaattactgaacaacgatagcaaggaaccaattgatattcgggatcgagcgattttagagttgttatacagttccggtttacgtttatccgaattacaaagtttgaatttaaacagcattaatactcgagtacgagaagtgcgggtgatgggtaaaggtaataaagaacgtattgtgcctttcgggcgttatgcctctcatgcaattcaacagtggttgaaagtgcgtatcttgtttaacccaaaagatgaagcgctgtttgtcagccaattaggcaatcgccttactcacagagctattcaacaacggctcgaagtttggggaattaaacaaggactaagcagtcatttaaatccacataaactgcgtcattcctttgccacacatatgctcgaggcgagctctgatttacgcgcggtacaagaattattaggtcacagtaatttatccaccactcaaatttatacccatttaaattttcaacatcttgcggaggtgtatgattcagcacatccgcgtgcgaaacgcaaaaaatag

SEQ ID NO: 31196 - DNA, 2568 bp, Pasteurella multocida
atgaatatcgaaaaatttacgacaaaatttcaacaagcactgcaagaggcgcaatctttagccattggcaaagataaccaatttattgaacccgtccatttactcaccgccttgttaaatcaacaaggtggttccactgcgccaattttaacagcaagtggggcaaacttaccgctcttgcgtaatgaattaaatgccgagctcagtaaattaccacaagtgtcaggcagcggtggtgatgtacaagtttcacggagtttagtgaatctattaaacttgtgcgacaagttagcacagcaacgccaagataaatttatttcctctgaattgtttttactggcagcgttagaagacaaaacacttggtgatgtgttgaaaaagtgcggtgtgaaaaaagaaaatttacaacaggcaatagagaaagtccgtggcggacaaaatgtgaatgatccaaatgcggaagaaagtcgccaagcgttagaaaaatatacgattgatttaaccgcgcgtgcagaaagcggcaaacttgaccccgtgattgggcgtgatgaagaaattcgtcgtgccattcaagtattacaacgccgtaccaaaaacaacccagtgttaatcggtgaaccgggcgtggggaaaactgcgattgtcgaagggctggcgcaacgcattgttaatggtgaagtacccgaaggcttgaaaaataagcgcgttctgtctttagatatgggggcattgattgccggtgcaaaataccgtggtgaatttgaagaacgtttaaaagcggtgttaaatgaactgtcaaaagaagaaggacgcgtgattctctttattgatgaaattcacaccatggtgggggcagggaaaaccgatggcgcgatggatgccggtaacttgctcaaaccaagcttagcccgtggggaattacactgcgtgggggcgacaacactagatgaatatcgtcaatacatagagaaagatgccgcccttgagcgtcgtttccaaaaagtgtttgttggtgagccaacggtggaagataccattgcgatcttacgtgggttaaaagaacgttacgaaatccaccaccatgttcaaattactgaccctgcgattgtggcggcagcgaccctttctcatcgttatgtatctgatcgtcagctacctgataaagcgattgatttaattgatgaagcagcatcgagcattcgtatggaaattgactctaaacctcagccgttagatcgtttagagcgccgtatcattcaattaaaattagagcaacaagcgctacaaaaagaagatgatgatgcgagtcgtaaacgtttagcaatgcttgaaaaagaattaggtgaaaaagaacgtgaatatgcagaattagaagatgtttggaaagctgaaaaagccgccctttcaggtacacagcatattaaagcggagctagacagtgccaaaacacaaatggaacaagctcgccgtgccagtgacttcgcaaaaatgtcggaattacaatacggagtgatccccgcgctagaaaaacaattggcgcaagcagaatccgctgaaggcaaagaaatgactttactgcgctatcgtgtgaccgacgaggaaattgccgaagtgctttcgcgtgcaactggtattcctgtggcgaagatgatggaaggggaaaaagaaaaactcttacgtatggaagaagaattgcacaaacgagtgattggtcaacatgaagccattgaagcagtatcgaatgcaattcgccgtagccgtgccgggttatccgatccaaatcgtccaattggatcgttcttgttcttaggtccaaccggggtcgggaaaacagaactttgtaaaacccttgccaatttcctgtttgatgacgaaaacgcgatggtgcgtattgatatgtcagaatttatggaaaaacacagtgtttcacgcttagtgggcgcccctccgggttatgtgggttacgaagaaggaggctatttaaccgaagccgttcgtcgtcgcccttattccgtgatcttgcttgatgaagtggaaaaagcacaccatgatgtgtttaacattttattacaagtgttagatgatggacgcttaactgatggacaagggcgcactgtggatttccgcaatactgtagtaatcatgacatctaacttaggctcacacttgatccaagaaaacagtacattggattacccaagtatgaaagagttagtgatgtctgtggtgggacaacatttccgcccagaatttatcaaccgtattgatgaaaccgtcgtcttccacccattaggtaaagaaaacattcgtgagattgcgacaatccaacttgctcgcttaatcaaacgtatggaaagccatggttatcaattacacttcaccgatgcttgcttagacttcattggcgaagtaggttacgatccggtgtatggcgcacgtccgttaaaacgtgcaattcaacaagaaattgagaacccgttggcacaacaaattctgtcaggcaaattattaccgaatcaattagtcaccattgactatgttgacggaaaagtgattgccaatcagtaa

SEQ ID NO: 31197 - DNA, 867 bp, Pasteurella multocida
atgttaattagtggaaaaattttagacacgattggtgcactacatgatagtttaaccaaaacagaaaaaagaattgcagcgacaattctcgcctcacctgatttattaagtcagtcttcactgtctgatattgctaaacatcttgatgtgggcgaagccactttcattcgtttctgtcgtacattaggctttagaggcttcactgactttaaattagaacttgctattgaattagccacaagagaaaagcaatatcattctttacttgatacggacatttcaccttctgatgatcctaaaaatatcgcggcgaaattacagggtgcagtgacgaatgtcattgctgaaaccattaacttactcgattttaatgagttagaaaaagtggtgaataccatgatgaaagccaaacgcatttttctcttcggcgtgggctcatctggaataaccgcagaagatgcaaaaaataaattcatgcgcatcggtttacaagtggattccacctcaaataaccactttatgtatatgcaagctgcactcatgcaagaaggtgatgttgtagtcggtattagtcattctggttattcgaaagaagtcattcaagcactaaacatcgcgaaaaagaatagcgcaaccactatcgcgattacgcataatttgcgttcacccattacgcacgctgcggattatgtcctgattaatggtaatcgccaagggcaactacaaggtgattcaatgggaacaaaaattgctcagcttttcgttttagatttgatctacaccttaatcgtacaagcgacggaagatacagccactaaaacgaagcaaaaaaccgttaacgtcattctcgaacaacgtgttaaataa

SEQ ID NO: 31198 - DNA, 2022 bp, Pasteurella multocida
atgacagacagtattaaattagaaatagaacaattacgccaaacgctacgttatcatgaatatcaatatcatgtcttagataatccacaaattcctgatgcggaatacgatcgtttatttcatcgtttaaaaacgctggaacaacaatatccacaatggtttagcccggactctcctacacaacgagtgggcgcgaaacccctttctgcgtttgcgcaagtgcaacatgaaatgcctatgctgtctttggataatgcattttcagatgaagagttgcatgcttttgtcaaacgtattcaagaccgtctggttttttcccctaaattacttgaattttgctgcgaaccgaaattagatgggttggcggtcagtattttgtatgtagatggaaaattgacacaagcagcgacccgtggtgatgggagtacaggagaagacattacgttaaatattcgcacagtacgtaatatccctttgcaattgttaatggaaaatccaccgacgcgtttggaagtgcgtggagaagtctttatgtcgcaagcgggctttgaggtattaaatgaaaaagcgttagccagaggggagaagacctttgccaatccacgtaatgcggcagcgggatcgttgcgtcagttagatccgcgaattactagccaacgtccgttgctattaaacgcatatagcattggtgtcgcagaggggattgatttacctgatacccattttgaacgcttacaatggttaaaatccattggtattccggtgaataatgagattcagttatgtgaagggacggaaaatgtgctcaatttctaccgcgcgattatgcaaaaacggagcactttgggctatgacattgatgggacagtgattaaagtcaacgatattgctttacaagaggaattaggttttatttcgaaagcgccacgttgggcaattgcctataaattcccagcacaagaagaattgacagtattaaatgcggtggagtttcaagtggggagaaccggtgcaattacacccgtcgcgaagttacaacctgtgttcgtcgcaggcgtgacggtcagtaatgcgacactgcataatggcgatgaaattgcacgtttggatgtggcaattggtgatacggtgattattcgccgcgcgggagatgtgattccacaaattattggtgtgctacatgaaaaacgcccagccaatgcagagaagatcgtttttccgacagaatgtccagtttgcggttcggtgattgtacgtattgaaggtgaggccgttgcccgttgtacgggcggtttattctgtgcggcacaacgtaaagaagcattgaaacatttcgtctcacgtaaagccatggatattgatggtgttggggcaaaacttattgaacagttggtggacagagaacaaattcataccccagcggatttatttaaattggatctcaacacgttggctcgtttagagcgcatggggcttaaatctgcgcaaaatgccctcgacagtttacagaaagcgaaaaaaacgactttagcgcgttttatttttgcgctaggtattcgtgaagtgggcgaggccaccgcactcaacttagccaatcattttaagaccttagaggcattaaaagaagcgacgctggagcaactacaagaagtgcaagatgtgggcgaagtggtcgctaatcggatttttgtgttctggcgtgaaccgcataatgtggcagtagtcgaggatctgattgcgcaaggcatccattgggaaaccgtagaagtcaaagatgttggagataacccatttaaagagaaaacagtggtgttaactggcaccttaacgcaaatggggcggactgaagcgaaagccttactccagcagttaggagcaaaagtcagtggcagtgtttctgccaaaacggatctggtggtggcaggtgacagcgcaggttcaaaactgacaaaagccaatgagcttggtgtcaaagtgattgatgaaaacaccttcttggcgtggagcaaaccgtacttgtaa

SEQ ID NO: 31199 - DNA, 2553 bp, Pasteurella multocida
atgactcatctaaaaaagtcttctttaccactaattctcacctccctttgtctatcgtcaaatgtttggtcatccgttaatacaacatcttgtggtgagggatgcacagttacagaagaaatagacacggcaactgacacacatatcattaccatagatggcgataaaacccgatcttattcccaccacctagccgttttagaagataataaaagataccgcctgacaaatcatctacatttagagaatggagattataaagtcaatgcgcctgaaagaaataatgcgcgcagtgcggaaattattaaccatggcaaactgattagctcagcccctgctggtgccaccagtgcaattgatgcacaatggggcaatattactgagaaattgcatgttacaaattatggcgaaattcgaacagatggcttaggtagcaatgagtgtgcgatatgctctcgttattttaaacgaagccctaatggcaatactatatcaacaccgacagaagtggtttacgaagtacataatctcggtaaggaggcacaactcttagcgaatggcggaccgagtatttggttagacaatggtaaattcactcatatcaataatgaaggcactattctttctaaaagtacaaggattcccgccatcttgattcgacacagtgctcaagtagaactccaaaatcgtggcaatatcaaatcgcttggtcacagtgctgtttttatccaaaatgcgaacaagatagacttcatgaatagtggtaacctcgaaaacagtgatcccactaaaaccgtcgtatcattgggcggagaatctgtctctctcgtcaatgcaggcaagatcagttttagccagaacgacccaaccaaacaaagccgtgctattgggttaacgggcagtgaaaaagtagaactgattctcaaaaccgggtcagaaattgacgggttcgtggctacgagcgctaacggtaaaaacaatcaattaattttgacagaaacaggggaagaacagggattattgtacggtaaaaataaattccagaattttcatgcccttacgatgcgtggcgaaaaatggacattgtccgatccttttacttttaaagaaacaatgtatgccgaatcagggcaactcgtcttgaaacaaggtagcttaacggctgcaaatatcatattaggtgaaaaaagtgaattgatgtttgccagtgattatgaattaaacggtaaattcacccatcagggtaagtttacattcgcacatcatgaaccgacaccggtgtttaaaaatgtgactatcaatgaagattaccaaggacataacggtacactccatttatctgcggattttaatggtacgacaaatccaaccgacactttattcattcgaggcaatgcaacagggaaaacacgcgtcgcgattcaccatattggcgctgatgcagaaaacgcagtcaacggtgtcaaaattattgaaacaaacacctccacagacaatgcgtttgtcattgataattatctgtcaaaaggtgcgtttgtgtatcatcttgagaaacgacatgaaaccaaccaagataattggtatttgactagctacattggagggacaccaagctatcgcgcagaaatggcaagctatgctaataacctctatgctgcccaccagctttttcaactacgtcttgaagaccgtttatctcgtcatcattttttaaatcaatctgccgacaaaacattttggatacgtgctgttgaaggaacaaatcacaatcgaatgcgtgataaccaaaacacaacaaaagcccaacgttatgtcacgcaattaggcaaaactgttattaatcaagcacattatcatgccggtgtgatgttcggctacgccaaacaaagcagtaaaacacgctcatctcgtgtcgggacttcacgcggcaaagtacaaggttatgcacttggtgtttatggtacttggtatcaaaacccaaatgatgacaccggcttatacattgacagttggctacaatatcaatggttcaaaaatcaagtgatcaatccagcctcgtctagcgataattatcgtacacagggactgagtgcctcacttgagctaggctatcacttgccactcgttcaatataccgtagcagatctgaaacatagcctcaatattcagcctcaagcacaatttatttggcaaaagctaaatagcaaacagcatagagatccacaacagacgctgattcattatatagggcagcaaaatacacaaacacgtcttggtgtcagattcagtttagatagccatttcttaaacacgcaatggaatttaaaaccttactttgaggtgaattggctacatcacgcaaaagactacggcatcaccatcaatgacgtagtaaaccatattgaaggagcaaaacagctatttgagtataaggcgggtatcgcgtctcaatttggtcgtcatctgcgcttttggctagacaccacacaccaaagaggaaaacaacaatttaaagataatcagcttaatgttggtttcaatattctgttttaa

SEQ ID NO: 31200 - DNA, 573 bp, Pasteurella multocida
atgaatactgattctctgcttcgccaaaaaattcgaaatgacattcgaaaacgtcgtcaaaaactcaccgcacttgagcaacaacaagccgaacagtctattacacaacaagcattgcagctgattacacagaaaaaagcaaacacagtagcgctttatttatctttcgatggagaagtatctactcagcagctcattacgtgtttatggcagcaaggcatacaagttgctgtacctgttttgcatcctttttgtccggggcatttgttgtttttacgctatcatccagaatcggttatgtataagaattcatttggtattttagaacctcaactcaatgttcaagacgttgtgccaataagcgcgctagagataatttttacgcctcttgttgctttcgataaacaaggtaatcgtcttggaatgggcgggggattttatgatcgcacgttacaaggttggcaggaaaaatcctttatccctgtaggacttgcacatgcctgtcaatttgttgagcatttacctagccaagcttgggatatgccacttgcacagattttgattgcagaataa

SEQ ID NO: 31201 - DNA, 1170 bp, Pasteurella multocida
atgaaaacatttgatctggttattgtcggtggtggcatggttgggctcactctcgctgctcgcctcgctaacgcaccactacgcattgcgctgattgaggcatttccgccaacaaccccactagaaacagttactcatcgcgtgagtgcgttaaacctggcgagccagcatttactgactcaacttggtgtctggcaagacatcacccacatacgagcaacggaatacaatgccatgcacgtatgggaaaaagatagctttgctcatattcattttacgaccgcaggattaggcatttctcacttagggcatattgttgaaaaccacgtaattcagcaaacattatggcaaaaagtgaatcaacaaaaaaatatcgaaatactcaccgcacttccacaaacattaggcttaaccgaaagccacgccatgctctcactcaatgatggtcaaatggtcgccaccaaattactagtggctgccgatggtgcaaactcttgggtacgcaaacaagcaaacattccacttgtttttagagattatggacatcatgcattagtttgtaacgtagcaaccacagaaccgcaccaacattgcgcacgccagatattctcaaaagacagtatccttgccttcttacccttacatcaacaacacctttgttcgatagtttggtcacaacctggagaacaagcagagcaccttgcacaatgtgatgaagaagaatttaatcgcgcattatctgtcgcctttgatatgcatctgggattatgtcaagttcaaggggaaagacaagcgattaagttaacagcacgttatgcccgtgattttgctcaaaatagaattgcgctcgtaggtgatgcagcacacactattcatcctctagcaggtttaggggtcaatttaggcttacaagatgttatcgaattggcgcggacaatagaagaaaatataaaagcagatgtggatattggacaatatcgttatttacgccactatgaacgtaaacggaagaaagagaccatgaaaatgttacttgtcatgcaaggcttaaaagatcttttccatggagctcatccaatcaagaaaatgatcaggggcattggattgagtgcaactgataaatttagccttgtcaaaacagaattaatgaaacaagccttaggattataa

SEQ ID NO: 31202 - DNA, 690 bp, Pasteurella multocida
atgtttgatcaattatgggcagatttcacccaagaaatgacaccaagaatttgggagctcgttggtctttcgactcttgaaacactttacatggggtttattgccaccttatttgctatcgtgattgggttacccattggtttattagcttttctaacaggtaaaggtgaaattttagaaaatcgtcgcgccaatcaagtattaaatgtaatcatcaatattggtcgttcagtaccttttattattttactgattattttacttccttttactcgtttggtggttggaacgacattagggacaacagcggctattgtgccattaagtgtgtctgccattccctttttcgcacgtttaactgcaaatgcactattggaaattccaagtggcttaacagaagccgcaaaatccatgggagcgacaaactggcaaattgtcaccaaatactatttaccagaatcgatcccaattttaattaatggcattacgcttaccttagtcgctttaattggttactctgcgatggcgggtgctgtcggcggtggtggcttaggtaatttagccattacttatggtgaacaccgcaatatgatctatgtaaaatggatcgcaaccatcattatcgtcctgatcgttatgttaagccaaaagttgggcgaccacttagcagaacgttttgatcaccgttaa

SEQ ID NO: 31203 - DNA, 831 bp, Pasteurella multocida
atgaaattaacaaaactttttggtctagcaacactggtttctgctgtcgcactagcaggttgtaaagatgataaaccggcagccgctgctgcaccacaagaacctgctgcgcgtaaattaactgttggagtgatgacaggtgctgaagcgcaagtgacagaagttgctgccaaaattgcgaaggaaaaatataatattgatgtgaaattagttgagtttacggaatacactcaaccaaatgatgcattaacgaagggcgatttagatgctaatgccttccaacacaaaccttacatggacaaagaagttgagcaacgtggttataaattggcgatcgtaggcaatacattcgttttcccaattgcagcgtattctaaaaaaatcaaaaatgtctctgagttacaagatggggcaactgttgcggtaccaaacaatccaagtaacttaggtcgtgccttattacttttagaaaaacaaggcttaattaagttaaaagatccaagtaacttattctcaacctcaattgatgtgattgagaatccaaaaaatctccaaatcaaagaagttgaaggttcactacttccacgtatgttagatgatgtcgatttcgcgatcatcaacaataactatgctgtacaacaaggtttaaccgctgaaaaagatggtatctttgtcgaagataaagattcaccttatgttaacttagtggtgagccgtgaagataataaagacaatgaagcgatcaaagattttgtgaaagcattccaaaccgaagaagtgtatcaagaagcacttaaacacttccaaggtggtgtagttaaaggttggtaa

SEQ ID NO: 31204 - DNA, 1833 bp, Pasteurella multocida
atgtgtggtattgttggtgcaattgcacaacgtgatgtagcagaaattttagtgaatggtttacatcgtttggagtatcggggctatgattcagcagggatagccattgtcgatcaagagaaacgattgcaacgtgttcgctgtttaggaaaagtacaagtattagctgaagccgttgcggctgaaaaaataacagggggcacagggatcgctcatacccgctgggcaacacatggtgcgccttctgaagataatgcacaccctcatgtatcaggtcagtttgcggtagtgcacaatggaattattgaaaactatgaacaattacgcattgatttacaacagaaaggttatcaatttctctctcaaaccgatactgaagtgattgctcatttagtgcattgggtaatgcgtaacgaaacttcgttgttacgggctgtgcagcaggtcgtaaaacagctaaaaggggcttatgggatggttgtgatggactgtgaacaaccaaatcatcttgttgcagctcgctcaggtagcccattagtgattggtttagggataggagaaaatttcctagcctcagatcaacttgctttgttaaatgtgacacgtcgttttatttttttagaagaaggggatgttgcagaaattactcgacgcaccgtcgatatttacgatgtgaatggacatcccgttcaacgtgacagccaagactctcatcttacacacgatgcaacggaaaaaggcacatttcgtcacttcatgcaaaaagagatttttgaacaacctcgtgctatcttaaatacccttgagggcagattgcatcagcataatgtcttggtggacagcatcggtaatggcgcagaacgattattagagcaggttgaacatattcagattgtggcttgtggcacctcttacaatgcaggtatggtagcgcgttattggtttgaacatttggcaggaataagctgtgatgtggaaatcgcttcagagtttcgttatcgcaaatttgtgacgcgtcctaagagtttattgattaccctttcccaatcaggtgaaactgctgatacgttagccgcattacgtttagctaaagaaaaaggctatatgggggcgatgacgatttgtaatgtagcgggctcttcactggtacgagaatcagatcttgcctttatgactcgcgcgggagtagaaattggcgtggcatcaacaaaggcttttaccacacaattggcaaccttactgatgctagtgattgccattggtaaagtcacagggaacatttctctgtcgcaggaagaagaactggttaaggccctgcaatctttacctgctgagatagagaaagcattagcatttaatcaacaaattgaaagcctcgcgcaagattttgcggataaacaccatgccttgtttttaggacgaggagagtattatccgattgcgatggaaggcgcgttgaagttaaaagaaatctcttatattcatgcagaagcctatgccgcgggtgagctaaaacatggtccacttgcgttaattgatgcggatatgccggtgattgtggtcgcaccaactaatgatcttttagaaaaagtaaaatccaatattgaagaggtgcgttctcgtggcggacagctttacgtatttgctgataaagaagctggctttactgaaacggaaggcatgaaaattatgactatgccgaaagtcaatgaagtgattgccccgattttttataccattccaatgcaattgttggcttatcacgttgccttaattaagggaaccgacgtggatcaaccgagaaaccttgcaaaagccgttaccgtagaataa

SEQ ID NO: 31205 - DNA, 273 bp, Pasteurella multocida
atgaacaaaacggatttaattgatgcgattgcaagtgcggctgagttaaacaagaagcaagcaaaagcagcattagaagcaactctagaagcgatttctggtagtttaaaagcgggtgaaccagtgcaattaatcggctttggtacattcaaagtaaattcacgcaaagcgcgtacagggcgtaacccacaaacaggtgcagaaatcaaaattgctgcttctaaagtgcctgctttcgttgccggtaaagccttaaaagacgctgttaaataa

SEQ ID NO: 31206 - DNA, 4254 bp, Pasteurella multocida
gtgaaagacttagttaagtttttaaaagcacaatcaaaaacaagtgaagattttgatgtgatcaaaattggtttagcctcaccggacatgatccgttcttggtcatttggtgaagttaaaaaacctgaaaccattaactaccgcacctttaaaccagagcgtgacggtcttttctgtgcacgtattttcggaccagtaaaagattacgaatgtttatgtggtaaatacaaacgcttaaaacaccgtggtgtgatctgtgaaaaatgtggtgtggaagtcactcaaaccaaagtacgtcgtgagcgtatgggtcacattgaacttgcctcacccgtggcgcacatttggttcttaaaatcactgccgtcccgtatcggtttattacttgatatgccattacgtgatatcgaacgcgttttatatttcgaatcttatattgtgatcgagccgggaatgacggatctcgataaaggtcagttattaaccgaagaacaatatatcgatgcggaagatcgttggggcgatgaatttgacgcgaaaatgggggcggaagctatccaagccttattgcgcgatatggatttaccgcaagaatgtgaaaacttacgtgaagaattacaagaaacgaactcagaaaccaaacgtaagaaaatcaccaaacgtttaaaactgttagaagcctttattcaatcgggtaacaagcctgaatggatggtaatgaccgtattaccagtattaccaccagatttacgtccattagtgccactcgatggtggtcgttttgcgacctcagatttgaacgatttataccgtcgtgtgatcaaccgtaacaaccgtttaaaacgtcttttagacttaatcgcaccagatatcatcgtgcgtaacgaaaaacgtatgttacaagaatcagtagatgcgttattagataacggtcgtcgtggtcgtgctattactggctctaaccgtcgtccattaaaatcacttgcggatatgatcaaaggtaaacaaggtcgtttccgtcaaaacctattaggtaaacgtgttgactattcaggtcgttcggtaatcaccgtaggaccatatttgcacctacatcaatgtggtttaccgaaaaaaatggcattggaattattccgtccgtttatctatgcaaaattagaaagccgtggcttcgcttcaactattaaagccgcgaagaaaatggttgagcgtgaagatgcgatcgtatgggatatcttagcggacgtaattcgcgagcacccaattttattaaaccgtgcaccaacgttgcaccgtttgggtatccaagcctttgaacctttattgatcgaaggtaaagcgatccagttacacccacttgtttgtgcggcgttcaacgcggacttcgacggtgaccaaatggcggttcacgtgccattgacattagaagcacagttagaagcgcgtgcattaatgatgtcaaccaacaacattttatcacctgcaaacggtgagccgattatcgttccttcacaagacgtggtattaggtctttactatatgacccgtgataaagtgaacggtaaaggtgaaggcatgttgttacaagacccacgtgaagcggaaaaagcgtatcgcaccggtcaagtcgaattacattctcgtgtcaaagtgcgtatcacagaatacgtgaaaaatgcggtaggcgagtttgagccacaaactaacttagtggatacgaccattggtcgtgcgattctttggatgatcgcaccaaaaggaatgccatttagcttatttaaccaaaccttaggtaaaaaggcgatttctaagttaatcaacgagagctatcgtcgcttagggatgaaaccaagcgtcttgtttgcggaccaaatcatgtacaccggttttgcgtatgcggcacgttctggttcttctgtaggtatcgatgacatggtcattcctgccaagaaatacgaaattatttctgcagcagaagacgaagtagcggaaatccaagagcagttccaatcaggtttagtgacagcgggcgaacgttataacaaagtgatcgatatttgggcggcagcaaacgaacgtgttgcgaaagccatgatggaaaacctatcgactgaagaagtgatcaaccgtgaaggtcaaccagagaaacaagcctctttcaacagtatctttatgatggcggactcgggtgcgcgtggttctgcggcacagattcgtcagttagcgggtatgcgtggtttgatggcgcgtccagatggttcgatcattgaaacaccaattaccgcaaacttccgtgaaggtctaaacgtattacagtactttatttcaacccacggtgcgcgtaaaggtcttgcggatacggcattaaaaacagcgaactccggttacttaacccgtcgtttagtggacgtggcacaagatttagtgatcatcgaagatgactgtggtacacacgaaggtatcgtgatgaccccattaatcgaaggtggtgatgtgaaagaagcactacgtgatcgtgtattaggtcgtgtggtggcagaagacgtgttgaaaccaggcacagaagaagtgttgattgcacgcaataccttattagatgagaaattgtgtgatgtgatcgacagtaattctgtggatagcatcaaagtgcgctccgttgtaacctgtaacacagacttcggtgtgtgtgccaaatgttatggacgtgatcttgcacgtggtcacttaatcaaccaaggtgaagccgtgggtgttattgcggcacaatctatcggtgaaccgggtacacagttaacgatgcgtacgttccatatcggtggtgcggcgtctgcagcagcgaaagaatccagtatccaagtgaaaaacacgggtaccttacgtttagccaacgtgaaatttgtcaccaataacgaaggtaagttagtgttaacatcacgtaacaccgaattaaccattattgatgcctttggtcgtacaaaagagcactataaagtgccttacggtgcgattttaagcaaaggtgatgggcaagaggtgacagccggtgaaaccgtagcaaactgggatccacatactatgccagtggtgtctgaggtaagtggttttgtgaaattcattgaccttattgacggtttaaccgtgacacgtcaaactgatgagttgactggtttatcttctatcgtggtacaagatgtgggtgaacgtgcgacagcaggtaaagacttacgtccagctatcaaattagtggatgcgaaaggtaatgatatcttaattccagggacagacgtggtagcacagtacttcttaccaggtaaagcgatcgtgaccttagacgacaatgcggaagttcatatcggtgaaccattagcacgtattccacaagaatcggtaggaacgaaagatattaccggtggtcttccacgcgtagcagacttatttgaagcacgtaaaccgaaagagccagccattttggcggaaatttcaggtatcgtgtccttcggtaaagaaaccaaaggtaaacgtcgcttattgatcaccccggctgaaggtgaaacttacgaagaaatgattccaaaatggcgtcagctcaacgtatttgaaggcgaaatggtggagcgtggtgacttgatctcggatggtgcagaaaccccacatgatatcttacgcttacgtggcgttcacgcagtcacagaatatatcgttaacgaagtacaagaagtttaccgcttacaaggggtaaaaattaacgataaacacatcgaagtgatcgttcgccaaatgttacgtaaaggtattgtcacgaaagcttatgactctgaattcttagagggtgagcaagtcgaagtggcacgcgtgaaaattgtgaaccgtaagcgtgaagctgaaggtaaaccattagttgaatttgaacgtgaattgcttggtattactaaagcgtctcttgcaactgagtcatttatctcagcagcatcgttccaagaaaccacacgtgtgttaaccgaagccgcagtggcaggtaaacgtgatgaattacgtggcttgaaagagaacgtaattgtgggtcgtttaatcccagcgggtaccggttttgcttaccaccaaaatcgtcagaagaaagtggtgatgagtgatgaaatgccagtgaaattatctgccgcagatgaagaagaaatcgcagcagaatttacggtgactgcagaagacgccacagcaagtttagcagaaatgttaaatatggctgatgatgcagaataa

SEQ ID NO: 31207 - DNA, 4029 bp, Pasteurella multocida
atggtttactcctacacagagaaaaaacgtattcgtaaagacttcggcaaacgtccgcaagttttaaatgtaccttatttattaactatccaactcgattctttcgataaattcattcaaagagatcctgaaggtcagcaaggtttagaagcagcattccgctccgtattcccgattgtcagcaataacggcaacacagaattacaatatgtaagctatcaattgggtgagcctgtatttgacgtcagagaatgtcaaatccgtggtaccacttatgctgcaccattacgtgtgaaattacgcttagtcagctatgacaaagacgctgcaccgggcacaatcaaagatattaaagaacaagaagtttatatgggtgaaatcccattaatgaccgataatggtacctttgtgattaatggtacagagcgtgttatcgtgtcgcaattacaccgtagcccaggtgtcttctttgattctgacaaaggtaaaacacattcttcaggtaaagtcttatataacgcaagaattattccttaccgtggttcatggttagactttgaattcgatccaaaagataacttatatgcacgtatcgaccgtcgtcgtaaattaccggcaaccatcattttacgtgcgttaaattacaccaccgaacaaattttagatattttcttcgataaagtggtttttgaaatcagcaataacaaattgttgatgacattagtaccagaaagactccgtggtgaaaccgcaactttcgatattgaagcaaacggcaaagtgtatgttgaacgtggtcgtcgtattaccgcgcgccatatccgtgctttagaaaaagatcaaatcacccaagttgaagtcccaacagaatatattgtgggcaaagtggcagcaaaagactatgtggatttagagtctggtgaaattgtttgtcctgcgaatatggaaatctcattagagatgttagccaaacttgcgcaagcgggttacaaaaccatcgaaacgctgttcactaacgatttagattacggtccttacatttcggaaaccttacgcgttgatccatcaaacgatcgtttaagtgcgttagtggaaatttaccgtatgatgcgtccaggtgagcctccaacaaaagaagcggcagaaggcttatttgataacttattcttctcatcagaccgttatgatttatctgcggtaggtcgtatgaagttcaaccgctctttaggcattgatgaagagacaggtagcggcattttaagcaacgatgacatcattggtgtgatgaaaaaactgatcgagatccgtaacggtcgtggtgaagtcgatgatatcgaccacttaggtaaccgtcgtattcgttcagtgggtgaaatggcagaaaaccaattccgtatcggtttagtgcgtgtagaaagagcggtgaaagagcgcttatctttaggtgatttagatgcagtgacaccacaagatttaatcaacgcaaaaccaatttctgcggcagtgaaagaattctttggttcttcacaactttcccagttcatggatcaaaacaacccgttatcagaagtaacgcacaaacgtcgtatttctgcattaggtccgggtggtttaacacgtgaacgtgcaggctttgaagtgcgagatgttcacgctacccactatggtcgtgtctgtccaattgaaacgcctgaaggtccaaacatcggtttgatcaactcattgtctgtttatgcgcgtaccaacgactacggtttcttagaaaccccataccgtaaagtcgtgaacggtcaagtgacggaagagattgagtatttatcggcaattgaagaaggtaaatatgttatcgctcaggcgaactcgaatcttgacgaagaattacgctttaccgatgcctttgttacctgtcgtggtgaacacggtgagtctggtttatatcgtccagatgaaattcactatatggacgtttctacacaacaagtagtatctgtggcggcagcgttaattccgttccttgagcacgacgacgcgaaccgtgcgttaatgggtgcaaacatgcaacgtcaagcggtaccaacattacgtgcagataaaccattagtcggtactggtattgagaaagccgtagcagttgactctggtgtaacggtaatcgcaaaacgtggtggtatggtgcaatacgttgatgcgtcccgtatcgtagtgaaagtgaacgaagatgaaaccatcccaggtgaagcgggtattgatatttataacttagtgaaatacacccgttcaaaccaaaatacctgtatcaaccaaattccttgcgtgtctttaggtgagcctatcggccgtggtgaagtattagctgatggtccttcaacagacttaggtgaattagcgcttggtcaaaacatgcgcgtagcattcatgccttggaatggttataactttgaagactcgatgttagtgtctgaacgtgtagtacaagaagatcgtttcacgactattcacattcaagaactttcttgtgtcgcacgtgataccaaattaggttcagaagaaatcactgcggatattccaaacgtcggtgaagccgcattaagcaaactggatgagtccggtatcgtttacatcggtgcggaagtaaaaggtggtgatattcttgtgggtaaagtaacaccaaaaggtgaaacccaattaaccccagaagaaaaattattacgcgcaatcttcggtgaaaaagcctcggatgtgaaagattcttcattacgtgtgccaaacagtgtttctggtaccgttatcgacgtgcaagtctttacccgtgatggtgttgaaaaagacaaacgtgcgcttgaaattgaagaaatgcaattaaaacaagcgaaaaaagaccttgtggaagaattagaaatccttgaggcaggcttgtttacgcgtgttcgtagccttctgattgcaggtggtttcgacgcgaaaaacttagataaattagaccgtactaaatggttagaacaatcattaagcgatgaagcacaacaaaaccaattagagcaacttgctgaacaatacgaagaattacgtaaagaatttgaacgtaagttggaagtacaacgtggcaagatcatccaaggtgatgatttagcaccgggcgtattgaaagtggtgaaagtgtatcttgcggtgaaacgtcagatccaaccaggtgataaaatggcgggtcgccacggtaacaaaggggttatctcaaaaatcaacccggtggaagacatgccatacgatgaaaacggtcaaccagtggatatcgtgttgaacccgctaggtgttccatcacgtatgaacattggtcagatcttagaaacgcacttaggtttagccgcgaaagggattggtgacaagatcaatgcgatgatcaaacaacaacaagatgtggcgaaattgcgtgaatacatgcaaaaagcctacgacttgggtcacggttcacaaaaagtggatttaagcactttctctgatgaagaagtgatgcgtttagcacaaaacttacgtaaaggtttaccgcttgccaccccagtatttgacggtgcgcacgaaagcgaaatcaaaggcttattagaattaggtggcttgccaacatctggtcaaattaccttattcgacggccgtactggtgagaagtttgagcgtccagttaccgtaggttacatgtatatgctcaaattgaaccacttagttgacgataaaatgcatgcgcgttcaaccggttcttacagcttggtaacacaacaaccattgggtggtaaagcccaattcggtggtcagcgtttcggtgagatggaggtgtgggcacttgaagcatacggtgcagcttatactttacaagaaatgttgacggtgaaatctgatgacgtgaacggtcgtacgaagatgtataaaaatatcgtcggtggcacacatcaaatggatccaggcacaccagaatctttcaacgtcattatgaaagaaattcgctcgcttggtatcaatattgatttagatgaagattaa

SEQ ID NO: 31208 - DNA, 369 bp, Pasteurella multocida
atgtcattaactaacgaacaaatcattgaagcgatcgcttctaaatctgtcactgaaatcgtagaattaatcgctgcgatggaagaaaaatttggtgtttctgcagcggcagcagcagtagcagtagcagcgggtccagctgaagcagctgaagagaaaactgaattcgacgtagtacttgcaggcgcaggtgcgaacaaagttgcagtaatcaaagcggtacgtggtgcaactggtttaggcttaaaagaagcgaaagacttagttgaatctgctccagcagtattgaaagaaggtatctctaaagctgaagctgaagcacttaagaaagaattagaagaagctggtgcacaagtcgaagttaaataa

SEQ ID NO: 31209 - DNA, 492 bp, Pasteurella multocida
atggcattaaatcttcaagacaaacaagcaattgttgctgaagtaaacgaagcagccaaaggtgccctatcagctgtgatcgcggattcacgcggtgtaacagtagataaaatgactgaattacgtaaagtagctcgtgaaaacggtgtttcaatgcgtgttgtgcgtaatacattattacgtcgtgcggttgaaggtactgaatttgagtgcttaaaagatacgtttgtaggtccaacacttatcgcattctcgactgaacaccctggtgcagcagcccgtttgttcaaagactttgctaaagcaaacgataagtttgaaattaaaggtgcagcctttgaaggtaagattcaagatgttgaattcttagcaacattaccaacttacgacgaagcaattgcacgtttaatgggcacaatgaaagaagctgcggcaggcaaacttgttcgcactcttgcggcattacgcgacaaattacaagaagcagcttaa

SEQ ID NO: 31210 - DNA, 690 bp, Pasteurella multocida
atggctaaattgactaaaaaaatgaaatcaatcaaggcggcagtcgactctacaaaagcctatgaaatcaatgaagcaatcgcagtattaaaacaatttgcgacagctaaatttgttgaaagcgtggatgttgcagtgaacttaggtatcgatccgcgtaaatctgaccaaaacgtacgtggtgcaactgtattaccacacggtacaggtcgttctgtacgtgttgctgtgttcactcaaggtgcaaacgcagaagcagctaaagaagcgggtgcggatttagtcggtatggaagatttagctgaattagtgaaaaaaggtgaaatgaacttcgatgttgttatcgcttctccagatgcgatgcgtgttgtaggtcaattaggtcaaattttaggtccacgtggtttaatgccaaaccctaaagtaggtactgttacaccaaacgttgctgatgcagtgaaaaatgcgaaatctggtcaggttcgttaccgcaatgataaaaacggtatcatccacaccacaatcggtaaagttaactttagcgaagaacaattaaaagaaaacttacaagccttattagcggcattagcgaaagcgaaaccaacaacgtctaaaggtgtattcatcaagaaagtaagtctttctacaacaatgggtgcgggtgtagcgattgatcaagcttcactataa

SEQ ID NO: 31211 - DNA, 429 bp, Pasteurella multocida
atggcaaaaaaagtacaagcctatgttaagttgcaagttgcagctggtatggctaacccttcaccaccagttggtcctgcgttaggtcaacaaggtgtgaacatcatggaattctgtaaagcattcaacgctcgtactgagagtttagaaaaaggtttaccaattccagttgttattactgtgtatgcagaccgttcattcacgttcattacgaaaacaccaccagcagcagtattattgaaaaaagctgcaggtatcaagtctggttcaggtaaaccaaacaaagataaagtgggtaaagtaacattagaacaagttcgtcaaatcgctgaaaccaaagcagcagatatgacaggttcttctatcgaaacgaaaatgaaatcaatcgctggtacagctcgctcaatgggcttagtggtggaggaataa

SEQ ID NO: 31212 - DNA, 552 bp, Pasteurella multocida
atgacagaaacaacaaccaaaaaacgttggtatgtgttacaggctttttctggttttgaaggtcgtgttgcaacaacattgcgtgaatatattaagttacaccaaatggaagatcaatttggtgaagtgcttgtgccgacagaagaagtcgtagaaaacgtagccggaaaaagacgtaaaagtgagcgcaaattttttccaggttatgtgttagtgcaaatggaaatgaatgacgaaacttggcatttagtacgcagtgtaccacgtgttatgggttttattggtggtacagcagataaaccagcgccaatttcacagcgtgaagcggatcgtattttaaatcgtttacaagaaagttcagaaaaacctcgccacagaaaagaattccagcctggtgaagaagttcgcgtcactgaaggaccattcgctgactttaatggtacagtggaagaagtggattatgaaaaaggtcgcttaaaagtgtctgtttctatctttggtcgtgcaacacctgttgaacttgaattcagccaagttgagaaaacaaattaa

SEQ ID NO: 31213 - DNA, 411 bp, Pasteurella multocida
atggcgttagaaattgagaaaaagaaaaatgcgcatgaagtcgagaaccaaaagtcaaaaggcttgaatcgctttttatggttgctcgttattgttgttattgcaactgcagcattaggtaatatttattttgtagaacaattttctactccgattcgtgtggttggagtcgtggttttattgttgattgcgttaggtcttgctgcattaacaaaccaaggtgtgaaagcacgtcatttctttagtgaatcaagaattgaattaagaaaaattgtctggccaacgcgtccagaagcgatgcaaacgacattaattgtggcaggtgtaacgattgttgtgtctttaatcctgtggggattagattcagtgattgttgcgttaattactttcttaacagatttgaggttctaa

SEQ ID NO: 31214 - DNA, 1185 bp, Pasteurella multocida
atgtctaaagaaaaatttgaacgtacaaaaccgcacgtaaacgtgggtacaatcggccacgttgaccatggtaaaacaactttaaccgcagcaatcacaaccgtattagcaaaacactacggtggtgcagctcgtgcattcgaccaaatcgataacgcgccagaagaaaaagcgcgtggtatcaccatcaacacatcacacgttgaatacgatacaccaactcgtcactacgcacacgttgactgtccaggacacgcggactatgtgaaaaacatgattaccggtgcagctcaaatggacggtgctatcttagttgttgcggcaactgacggtcctatgccacaaacacgtgagcacatccttttaggtcgccaaataggtgttgcttacatcatcgtattcttaaacaaatgcgacatggtggatgatgaagaattattagaattagttgaaatggaagtgcgtgaactcttttctcaatatgatttcccaggtgatgatacaccaatcgtacgtggttcagcgttacaagcgttaaacggtgtagctgagtgggaagagaaaattcttgagttagccaaccacttagatacttacattccagagccacaacgtgcaatcgaccaaccgttccttcttccgattgaagacgtgttctcaatttctggtcgtggtacagtagtaacaggtcgtgttgagcgtggtatcatccgtacaggtgaagaggttgaaattgttggtattaaagcgacaacgaagaccacagtaacaggtgttgagatgttccgtaaattattagacgaaggtcgtgcgggtgagaacgttggtgctttattacgtggtactaaacgtgaagaaatcgaacgtggtcaagtgttagcgaaaccgggttcaatcacgccacacactgattttgaatcagaagtttacgtgttatcaaaagaggaaggtggtcgtcatacaccattcttcaaaggttaccgtccacagttctacttccgtacaacggacgtaacaggtacaatcgaattaccggaaggtgttgagatggtgatgcctggtgataacatcaagatgactgtaagtttgattcacccaatcgcgatggaccaaggtttacgctttgcgattcgtgaaggtggtcgtacagtaggtgcgggtgttgtagcgaaaattatcaaataa

SEQ ID NO: 31215 - DNA, 531 bp, Pasteurella multocida
atgacaacgattgtaagtgttcgccgtaatggtcaagttgtggtcggcggtgatggtcaagtttcattaggcaacaccgtgatgaaaggcaatgcgcgtaaagtgcgtcgtttatataatggcaaagtgttagcgggatttgctggtggtacggcggacgcgtttacgttatttgaattatttgaacgtaaattagaaatgcatcaagggcatttgttgaaaagtgcggtggaattagccaaagattggcgtactgaccgtgccttacgtaagttagaagcgatgttgatcgtggcagatgaaaaagaaagtttaattattacggggattggtgatgtggtgcaacctgaagcagaccagattttggcgattggttcaggcggtaattttgcgttatcggcagcgcgtgcgttagtggaaaatacggagttatctgcacgtgagattgtggaaaaatccttaaaaattgcaggtgatatctgcgtttataccaatactcattttaccattgaagaattacctaatagctag

SEQ ID NO: 31216 - DNA, 1353 bp, Pasteurella multocida
gtgttacaaggcattttccaaattatgtctgccgcaggcagtgtggtttttgctaatctggcgttattactttgtatcggtttaggcattggtctggctaaacgtgataaaggggtcgctgcattagcggcagtagtcggttatttaatcatgacgggcaccattaatgcgttaatcagtattttttcaccagaagtaaaagggattgatacgggggtgattggctccttagtgatgggattattaacggtgaaattacataatcgttaccacaacatccaattaccacaaattttagggttctttggcggatcgcgatttgttcctattgttaccgcgtttgcggcaatttttgttggtttcctctttttccttatttggccaacgttccaaggttggttagtatccgcgggtgagggtattgcctctatgggcgcaattgggacgtttttttacggctttttgatgcgtttgagtggagcggtgggattacatcacatgatttatccgctcttttggtatacagagttagggggaacggaaattgtaaacggtgaaaccattatcggggcacaaaaaatcttttttgcccaattagctgatccgaaccatcaagggttattcactgaagggactcgcttcttcgcggggcgtttcgataccatgatgtttggcttacccgccgcctgtttggcaatgtatcactgtgtacctaaagcacgtcgtggtttgattggtggtttgtttttaggggccgccttaacgtcgtttattacaggcatcacagaacctatcgaatttatgttcttatttgtggcaccttggttgtatgttttccatgctttcttagatggtgtttcattctttattgccgatttcttgaatatttcgattggtaatactttctcgggtggctttattgatttccttttatttggcattttacaggggaatgaaaacacaaactggatccttgtagtcgttgtcggtgtgttttgggcaatgttatattactttagcttccgctttctgattacgaaatttgatgtgatgacaccgggcagagctgaagaacaggaagaggtagttgaatcgactaactcttcgttaactgaaaatgcacatcacattattgaggcattaggcaaggctgaaaatattgaacatgtggatgcttgtattacacgtttacgtgtgaatgtcaaagacgtgaaagcagtagataaagcacgtttaaaagcattaggggcaattgatgttcttgaagttggtggaggtattcaagcgatttttggggcaaaagcggtgttatacaaaagcgaagttaaccaaattttaggtaaagaagattaa

SEQ ID NO: 31217 - DNA, 2532 bp, Pasteurella multocida
ttgatctatctcatattccctacctctttttggttgtttaatagaatagatgtttctatgtctgtttatagcataaccatcgggggatacgttatggataaattgcttgtcaattcaagattgaccagacgttctttactgcaaagaacttcaattggtgcagcgctcgctgcgaccaatctgtcattacctttcaaagccgtcgctaatgaaaaaaaagcgacatcctcatcaacagaaaatctgcaggaaaaagtggtttggagtgcttgcacagtgaactgtggtagccgttgtccactgagaatgcacgtgaaagacaataaaattatctatgtcgaaactgacaacacgggaacggatacatataacgttgaccaccaagtcagagcgtgtttacgcggacgttcaatgcgccgtcgtgtttataatccagaccgtttgaaatacccaatgaagcgtgtgggtaaacgcggtgaaggtaagtttaagcgtatcagttgggatgaagcactaaatgagattgctacttcactacgtaagaatattgcgcaatatggtaatgaatcgatttatctcaattatggtacgggtacactgggtggcacaatgactaagtcttggcctccggggtcaactatgcttgcccgttttatgaactgtttagggggttatctcaaccattatggtgattacagcaccgcacaaattgcagtcgggttggattatacctatggcggtggttgggcattaggaaatggcttagctgatatcgaaaatacgaagttggttgtcctttttggtaataatccagcagaaacacgcatgagcggtgggggattgacgtattgtattgaacaagcacgacaaaaatcgaatgcgaaaatgatcattattgatcctcgttatactgataccgcggctggacgtgaggatgaatggattccaattcgtccgggtactgatgccgccttagtttcggctttagcttatgtgatgattacagaagatttagtcgatcaagcgttcttagatacgtattgtgttggctatgatgaaaaaaccttgcctgaaggcgcaccaaaaaatgggcattataaagcctatattttgggggaaggggatgatggaattgtcaaaacaccggagtgggcggcgaaaattacgggaattcctgaacaacgtattattaaattggctcgagaaattgccggaacgaaacctgcttatatttcgcaaggttggggaccacaacgtcgcagtaatggtgagctaatttctcgtgcgattgctatgttaccgattctgaccggtaatgtgggaattaatgggggcaatactggagcaagggaaagcacttataaagtcccttttgtccgtatgccaaccttaacaaacccagtgaaagccagtattccgatgtttttatggacagatgcgatttttcgtgcgcacgaaatgactgcattaacggatggtattcgtggtgtggaaaaactcaccgcaccgattaaagtgatttggaattatgcgagtaactgtttgattaaccagcattccgacatcaatcgtacccatgaaattttgcaagatgagacacagtgtgaattgattattaccattgataatcatatgacttcaaccgcaaaatacagtgatattttgttaccagattgtactgcgtcagagcaaatggatttttgtaccgatgcctttgtcgccaatatgaactatgtgatctttgccgatcaagtgatccccccttcttttgagtgccgtaatatttatgacatgttaacggatttagccgagaaaatgggggttaagcaagcattcactgaagggcgcacacaagaagaatggctccgtcatatttatcaacaatcccgagaaaacttgccagaattgccgacctttgaagaattcagacagcaaggcatctttaaaaaagtcgatccaaatggcttttatgtggcttataaggctttccgtgaagatccgcaagcgaatcctctcaaaacaccatccggtaaaattgagatttactctgagcgcttagcggaaatcgccaaaacgtggtcgctaaaagacgatgaagtgattcacccattgcctgtacatgctgacagttttgaacactatggcgataaattaatggaaaaatatccgttacaaatgacaggttttcattataaagcgcgtacacattcaacctacggtaacgtggacgtgattaaggcggcgaccccgcaagaagtgtggattaatccgattgatgcacaagcacgcaatattaaaaatggcgatatgattcgtatctttaatgatcgtggtgaagtacagattcatgccaaagtgacacctcgtattatccccggtgtagtcgcgttaagtgagggtgcttggtatgcaccagacagtcaaggtgtggatcattcaggttgtgtgaacgtattgacaacacaacgtccatcgcctctcgcgaagggtaatccacagcattctaacttagttcaagttgcgaaagtgtaa

SEQ ID NO: 31218 - DNA, 1104 bp, Pasteurella multocida
atgatgaaatatggtgttgtgggtgtaggttactttggtgcggatttagcacgctttatgaacgaaaatgaaaatgccaaagtgaccatggtatatgatccagaaaatggagaaacgattgctaaagaacttcaatgtattgccgcgacgagcctgaaacaactggtcagtagcccagaggtagattgtgtcatcgtagctacaccaaattatctgcacaaagaacccgtcattgaagccgctaagcatggtaaacatgttttttgtgaaaaacctatcgcacttaactaccaagattgcgatgaaatggtgagaacttgtgaagaaaatggcgtcatctttatggcaggtcatgtcatgaatttctttaatggtgttcatcatgccaaagaattgatcaaacaaggagtgattggtaaagtcctctattgccattctgcacgaaacggttgggaagatgaacagccaagtatttcatggaaaaaaattcgtgcaaaatcaggtgggcatttataccaccatattcatgaactagattgtattcagttcattatgggaggtatgccgaaaactgttacgatgacggcaggtaatgtggcacatcaaagtgaaaaatttggtgacgaggacgatatgttattcctcaatttagaatttgagggcggtcgttttgccgtattagagtggggctccgctttccgttggggtgaacattatgttcttatccaaggtgaaaaaggcgcaattaaattagacatgtaccactgtaaaggcacattacgtgttgatggcaaagatagccatttcttaattcatgaaacacaagaggaggatgatgatcgtacgcgtatctataccagtaccgaaatggatggcgcgatccaatatggtaaaccaggtaagcgtaccccaatgtggctcagttctattatgaaaaaagagatgaaatacttaaatgatattttacatggtatgaaaccgactgaagaattcgagaaattactcacaggggaagctgcaagagctgccattgccaccgcagatgcctgcaccaaatctcgctatgaaaaccgcaaagttgaggttgccgaaattacaggttaa

SEQ ID NO: 31219 - DNA, 708 bp, Pasteurella multocida
atggataaattaacaaaaaaagcggcttctctggcattacaagagaagataaaaacattaattattcgacggaaaatgaagtcgggcgatctgatgccgacagaaaatgagctcattgatttatttggagtaagtcgctctagcttacgagaagcgattaagtcgttagaagcattgcatattttagatatccaccatggtataggtacatttgtcggcacttcttcgcttattcctatgatacgtggcttaacgttttatgctcagttacatttacaagataatttaaagagtattttggatattctggatgtgagggaaatcctacaatatggttttgcccctattgcactgcagaaaatcaatgctgaagaggtgttgcaattacaaagtttggttcgtttattggaagaaaacgcacaacaaggacggttttccataaaagaagagcaacaaatccatttattaatgtatcagtctgtacaaaaccatttattgactcaatatttagatgcattttggcaaatttatcagcagcttgatgcggaattgcccgcaattttaatttcaccgacggatcttgcaatgcaatatcgtgaatgggttgatgcgattgaagcacgcgatttagaacgtgtacaacgcgctgttttatattattttcaggctattagacaacgtttaacacaaggaaaagcacatgagtaa

SEQ ID NO: 31220 - DNA, 1080 bp, Pasteurella multocida
atgagtaacattaaaatcgctttgattggctgtggttttttcggacagcaattagcattaggtttcacaaaagctggcgcagacttacttggtgtgactgatctttctatggagtttgcagaacgcttggcggctaaattcaacaccaaagcatacagtgatatggaaaccctatttcatgaagtgacgcctgatcttgtgttaattgctacaccaaattatgcccataaagtccccgcattaactgcattaaaacatggttgccacatttttatcgaaacaccgttcagtattcatcaaactgattgttcagaaattcttaccctggcgaaacagaagaagaaaagtgtatttatcggtcatttgttgcgtactttgccggggttactcaaggcaaaagaattgatgatgcaaaatgtgctaggcaaaattaccgttgctcgtgctagtcgacaacgttggattgatgcttttcaagataaaaactggtggaagaatgatgttaatttaactggtggaaaactgtttaatgaaattcacgaactggatttactctgttggttattgggagatgtaagctctgtttatgcgcaagcaacgaatcgagcacacactgatacgccagataaccatgatattattcagttattactgcagtttgaaagtggggtttttgcgtcattagaaatggggacggcttatcgactgcacgaatgggggatcacgatccatggtgagttaggggcattaatggtgaatttctttacctctacaatgacgttaagttttgcggatggtactcgacagcaatttaatttatatgatgagtttgaggccgatttatctttacgcgagagtggtaaagcaacacaaaaatataatttacctacagcgttatctccgctttggttaactcgagccgtggaaattgaagcagatatggtcgtgaaacatttattaggggtaactgagcattgcattttgagtcaagcgacaacaaaagcgattgctgtggcttgtgctgccaaaaaatcaattgaaacgcaacaacgggtggagcttgatacagcatctatgtag

SEQ ID NO: 31221 - DNA, 933 bp, Pasteurella multocida
atgaaaaaaattattctagattgtgatccagggcatgatgatgccattgcgattctgttagcgcatggcaatccagaaattgatctgttagcaatcacgactgtggtaggtaatcaaacgctagaaaaagtcagtcgtaatgctttagcagtagctgaaatagccaatatccttaacgtacctattgccaaaggttgtgtgcgacctttagtgcgagaagtagaagttgcaccaagtatccatggtgaatcggggatggatggacctgttttgcccgaacccacactgagtttagattcacgtcatgccgtcgatttaattattgagttagtgatgacccacccgccaaaaacaattacgttggtgcctaccggtggtttaacgaatattgccatggcggtgagaaaagaacctcgtattgtggaacgcgtgaaggaaattgtcttaatgggaggaggctatcacacaggcaattggagtgctgttgccgaatttaatattaagattgatcctgaagctgcacatattgtgttcaatgaaaaatggtcattaactatggtgggattggatctgacgcatcaagctttagccacagaagatgtgattaaaaacattgaaaaaattcaaacaaaaccagctaagtttgttctcgaattgttggcgttttttcgcaaaatgtataagcaagcacaaaattttgattatccgccagtacatgatccttgcgctgtggcttatgtgattgatccgacggtttgtacgacgaaagtggtgcccattaatattgagttaacaggcactcacacattggggatgacagtggcagattttcgttatccgattcctgaaaattgtcacacacaggtggcaatgcaactggataaagcgaaattttggggcttgatttacgatgctttgcaacgtattggttaa

SEQ ID NO: 31222 - DNA, 1143 bp, Pasteurella multocida
atgatggaaaatcaagagtttttatctttggatgaagctgttttattatcaaataaattcaatttgaatttttcaaaagaagatattttatatttgtcctcattagatcattttaaagcttacaataatattcaatacgtatatatgggagatgttcagaaacctgtgtacaaaatacatggtttaaaaggattttttaaaacaagattagaaacaaaaagtagattactcttacaggagttggatattattagaactaatgatagttatgtcattgataagaaaaaggaacagggcttttctagagatatttggactataaaagaacgtaataatttgaagagtgttttgtaccttcacctttcgaatagatatgatgatttatattttattgattatggttttgccagtgtgacattgcctatttatgaagagagagttaaaaaacacgatattgtaaaaggaatggttgaaagtacgatgttatctaacatagcaattagaaataagcctcaaaatgctaaattgttcgtatcttttttatctaaaagtttaactaatcattatgttccaaattctagctttgatatatttgaatttaatatagctggaataatagattatccttttagtcttgaaccttatatattaagttataaagaaaaagaagatgatgatttattggagctttacaatgaatataattttgatgaaattttctattttaaacatactgatttattagaatatttccaaaaaataattgataaggaagaaaaaatacagaaatcctatcaatatcaaacagagctaattacagaattacaaggacgtatagcagaacttgaaaaagaaaatcagagcttaaaagaaaatgtaaaagagccagaaacaagcaagccaattagaccagatgagaaagaaacattactgaagttaatctatgctcttgcaatggggagaacggataaagacttttcagcatctgcgtattttaataaaaaaggagttttaaaagttagtactatgattaatgaaatcgtagcagatctagaacaggtgggaatcatgaatttttctgatggaactcttcgcaaaaggctgtctgaaatattacaaatgggcgaattaaaggcggattaa

SEQ ID NO: 31223 - DNA, 255 bp, Pasteurella multocida
atgacccaatacaacaaactgagaattgaatgggattgtcggcgaggaatgctcgaactggataacgtcattatgccattttatcgacagcactttgacgccttatctgacacacaaaaagacacctttattcgtttattagcgtgtagcgatttacagcttttttcttggttctttaatcgaggtatggcaactgatcctcaattacaacaaatggttgattacattcaaaaaacattgaaactcacagattaa

SEQ ID NO: 31224 - DNA, 1167 bp, Pasteurella multocida
atgaacatttttctcacacaaaaagaagacattggcaatgcaaaagtattcttattgcatcaagttatcacagcagccgcccatcaacaaggtcaccaaatcaccacattagatgaggcagatctggtcattgtattcggtgaagcaatacacaaccctcaatttgtaggtaaaaaatgcgttattgtcgatgcagaagaggcgttcaatgctcccgaaaatactttaactaaggctttcgcagaggcaactccctatgttttaaacgagcatgccgaaagtgtaactccctctttctctacgccttataacgtgaatcgcttgattgcgattacggcttgtccaacgggagtaacacaaacttttatggctgccgaagccattatgaactatgcgaaacaacaaggttgggatgttaaggtcgaaacccgtggacagattggcgtgaaagatattctaaccgaagcggatattgcagaggctgatcttgttcttgtggcaacggatgtggaaaccgatctgtcaaaatttgaaggaaagatgttataccgtacatcaacacgcgcagtcctcaacaatacagaaagcactttccaacaagcattaacacaggcgacagtttatcatgcgccgaaagaggatgatgtcggcattatcaccccaccaccacgtgactaccacaatgattttgcgacctgtgatgccactaaaaagattgtcgcagttactgcttgtccaacaggggtaacacaaacctttatgtctgcagaagcgatcatgttgtatgcgaaaacacaaggttggtgtgtcaaagtcgaaacacacgggcaaatgggggcagataacctgattacagctgaagaagtagcagccgctgacttagtctttgccgccacggatatagagattgatttatcgaagtttgaaggtaaaccgctttatcgtacctcaacgcatgcaactttaaaaaacattgcacaagagtttgataaagcattcatgcaagcgactccttatacgcatacgaagcaagaagcgtctaaaaatgcttgttgttcaacaagcacaaccagcgaatgttgtcagttaaaatgtggtatagcacgttggttaccgctcattttacttgccgcactcatcattgcgctcgtagcttattttaaataa

SEQ ID NO: 31225 - DNA, 936 bp, Pasteurella multocida
atgacaaaagtactgaccattacactaaattctgcctacgacttagtagggcatctccctcacctaacacgaggtgctgtaaaccaggtggattctttaggactttaccctgccggcaaagggattaatgttggcaaagttctgcatgacttaggggtaaacgtggcattaacgggctttctcgggcaagaaaatcaaacgggatttcaacaattgttttcgcgtttggggctcaccgatcattttcatcgaattaccggcgcaacacgcatcaacgtaaaactgacagagtcagatggcgtcgtcactgacctcaattttcaaggctatcatgtgagtaagacagattggcaaacgtttgtggacttttcattgcaacaatgccaaacatttgatgtgattgcagtttgtggcagccttcctcgaggaatcagcgtagatgactttacagcttggctcagccaacttaataaaaataacatcaagctcatattagacaccagccaacaagctttcgcatcaggcatacaagccaaaccttggctcgtcaaacccaatcgcgatgagcttgcaagctggtatggttcgccattagcgacacagcaagacatcatccgcgcggcaacactattacaacgacaaggtatccctcatgtcgtcgtttcaatgggggaagaaggggcaatttggctaaatgaaaatacagtgttacacgcccagcccccacaagacacgcctatcgtcagtaccgtaggcgcgggagataccatggtagcgggtctaatttatggtatgcttaatgcatattctgctgaaaaaacattggcttttgcgaccgcactttcgagcttagcagtttcacaaagtaatgtaggcatcactgacttgacgttactcaacccaattttagaaaaaataaaaatcacattcatttaa

SEQ ID NO: 31226 - DNA, 594 bp, Pasteurella multocida
atgtgcaagagattggctaatatagactttcacagtataatcaatgatcaatgcactggactgaacaaggaactcattatgttaaagtcactctctcttatcagcttaatcacgctacttagcgcgtgttcaatgtcttcttatgtgccttttatgaatgataaaaaagcggtgattgatttagataaaacacaaattgatcaaaaatcttatgcgacagcctatgaagcgacgcttgctacctataaaggacgagtgaatcaagattatgatgtgcactcatttagtagcggtgcaaatgattggtatttaaatcgtattttattgccgattgacaaaatcaaagagaacctttatcaaggtgggcatgactcgaatattcacgcttactatagtggtgtcgtgtttgcctccgctttacaaagcaactttaacaagcttaacccaaattgttggtcatatttagatgcgcctagtgtcacacaaggcatatatgatgcaatgaaagatctccaaaaaggcaaacaaagggctgaagatgacccttatattgtccaaggttctgaacaattattaaaacgttgtgcccaataa

SEQ ID NO: 31227 - DNA, 1377 bp, Pasteurella multocida
atgaaagagaaagcattaagtatcgtgattttagcggccggtaaagggacgcggatgtattctgatttaccaaaagtgctacataaaattgccggaaaaccgatggtaaaacatgtgatcgatacggtgaaatccattcatgcaaaaaatatccatttagtgtatggacatggtggggaagtgatgcaaactcgtttgcaagatgaacctgtgaattgggtcttacaagccgagcaattaggtacggggcatgctatgcagcaagcagccccgttttttgcagatgatgaaaatattttgatgctttatggtgatggaccattaattactgcagaaactttacaaacattaattgcggcaaaacctgaacatggtattgcattattgaccgtcgtattagatgacccaactggttatgggcgtattgtgcgtgaaaatggcaatgtggtggcgattgtggaacaaaaagatgccaatgcagagcaattaaaaatccaagaaattaacacaggcttgttagtggcagacggtaaaagtttgaaaaaatggttatcacagttaaccaacaacaatgcacagggagaatattatattacggatgtgatcgccttagcgaatcaagacggttgccaagtggtggcggtacaagccagtgactttatggaagtagagggcgtgaataaccgtcagcaattagcgcgtttagagcgttattatcagcgcaaacaagcagacaatttattattggctggggtggcattagcggatcctgagcgttttgatttacgcggggaactaagccatgggaaagacgtggaaattgatgtgaacgtgattatcgagggcaaagtcagcttaggtcaccgagttaaaattggagctggttgtgtgttaaaaaattgccagattggtgatgatgtagaaattaaaccttattctgtgttggaagaggcgattgttggacaagctgcgcaaattggacccttctctcgtttgcgtccggggacagcattagccgacaacactcatattggtaatttcgttgaaattaagaaagcgcatattgggacgggctcgaaagtaaaccatttaagttatgtgggagatgccgaagtcgggatgcaatgtaatattggtgccggcgtgatcacttgtaactatgatggcgcaaataaatttaagaccattattggtgataatgtgtttgtagggtctgatgtacaactcgtggcaccggttaccatcgaaacgggtgcaaccattggggcggggactacggtgaccaaagatgtggcttgtgatgagttagtgatttcacgtgttcctcaacgtcatattcaaggttggcaacgccctactaaacaaacgaaaaagtaa

SEQ ID NO: 31228 - DNA, 3903 bp, Pasteurella multocida
atgacagaacatatcgcagcacaaccagcttcacctgaacaacaaaaccagaccccaccggttaagcgcccaaaatcgttttggcacaaactgctatgtggtctaagtgcggtcattttcttatcaattttagcgttcttcatcacactcagcaccagtgcgggtcaacgctggctgattgaactcctggataaagccttacctcagctctcaattgcacaagtaaatggtggcttacaagaaggccttgtcctgaatcaagtgcgttttgatgcagaaggggtacaaacacagttagaacaagttcgtttacaactggatttaagctgtctatggcgcttacatatttgtgttaaagagatcgctttacaccaaccgcatattcaagtgaataccgcgctgctgcctccaaaagcaaaagagaaaccaacgagcgcaccaatgcaacgtatccatttgcctatttctgttgatgtcgacaacgtggtagtagagcaattacgtcttgtgattgatgataatgccgtggacttagcccacttccaaacagcagccagtttaaataatgagtcaggcttaaccattgcaccaacgacaattcaagcattattagtcaaggttgtcccaccaacggcagctgtgaaagaaccgtctcagacagaaaaagccccgattgattgggttcaaatagaaaaacagttgagtgcgcctttattagcaaaattggaaaatatcgttttgccttttgatatgcatattcaacacattcaaggacagcactggcaatatcaacaagtcaacgctcaacacacgcaagtgattgatatccccgtgtttcagttacaagcaaacgccactggcgcgcagattgaactcagccagttcaatgtagaaagtaacttggcaaatttacacggtagcggacacttacaacttaacgcagatttccccctgcatgttgcactacatgctgaaatgcacgctttaaacgaaggcgaagcaattttattgcccgccagtcaagtagatgtcaccttgtctggaaatttgaaaaaacagaccgcacttacgttacaaagccgtggagcattaaatgcaaatttgaacggacaatttgcgctgtctcaagaaaagacccccttccagatcaagttaagtagccaagacttccgttatccgtttcagccagtacaaccggctcttgttcatattcctcagttgaatttacaagtgagcggtaatttactggactatcaattacagctaaacaccgaagcagaaggcgcgaatattcccaaaacagcactccaatttgacgcaaaaggggaattattatcacttgatattactcaactccatcttgataccctaaaaggcagcgctgatctacaagggaaaattggttggcaaaatggggtgcaatggtatagcaatttacagcttgataaattaaatctgagtgactatttggcaggtttgcctaccatattatcagggcaattgttctcgacaggattaattaatcaacagcaatggctgtttgatatcccacatttaaacttagaaggtacgctatcacaacgcccattagcgctcaaaggcagtttgagtgtggggtcagaaacatggcttcatcaattattgttaaaagtgcctgatttagtgttaacttacggagaaaataagattgtcgccaccggttttcttggtgaaaaatcagatctcaaactcgatattaacgcccctgacctacgtggtttaatgccaaacttaagcgcgaatttacaaggtcatctccagctaaatggacaacttgtgcagcctactgtcgccctagacttagtcggtaatcagatcaaacttaatgacttgaatatcaataaagttaccttgaaaggtcatgtggatatggcgaaacaaaccgccggtgaactggcattacaggtaaataaattccaatctggcgatgtaaaactggatacgttagatttaaccttacatggtaatgaagcgcagcataatctgaccttagtttctcaaggtgagcctgttgcacctaaactcagtttggaagggcaatttgatcgtgcgacacaacgttggcaaggtgcattaaaacaagtgtcgattgcatcagttattggacattggcataccgataaaaatgttgttttagcctatgataattcgacgatgcaaactgagatttctgcacattgttggcaaaataacgatgtggaactttgctttccacaggcatttcgtgtcggcaaaagtggcgaagtaccatttaaaataacgaaatttgatttagcgttagtcaatgatctcctcgaacaagatctgctacaagggcaattacaaagtgaaggaaaagttgcttggtttagtgacaaaccgctccagctgaatgtccaagtcaaaggggataatttaagcttcacacaaaaaatagactaccgtacttttggcttagatatccctaaactcacgttaaacgcggatctacagaataaccatttcgtgctcaacagtaatctcttactgcaagaccaaggcaatatcagtgcgaatctcgaggtcaaagatctagcacaagcacgccaattgggcggaaacttgataattcataaactgaatttagatattttcaatcagttgttatccaataatgaggtcatcacgggggatattgttgctaacttgaaatttgcgggtaccctcaatgcccccaacttaaacggtcagttcaagctttctcgcttaaatgccaaaatgaaatcattaccttttgacattgaaggcggggagctagcgttaaactttgcaggtaaccgttcaacattaaatggtcatataaaaacaccagacagccgcttaaatttagagggtgatgccagttggcagaacttagataattggagatctcgcttacatgccaaagctgaccaatttaaagttgatattcctgcgatggcgaaacttaaaatcagtcctaatgttgaaatcaccgccagcccaaaacgcttgcagttaacgggcaatattgatatcccatgggcaagaattgaaattgaaagcttaccggaaagtgcggtctccgtcagtcctgatgaagtcatcctagacaatcagacatcacaaaaaatcaccgccaaactgccaagcaaaaccaaatccggaatggagattctgtccgacttaaaaattaatattggacaagatgtctatctgaacgcgtatggattgaaaaccaacctcaatgggttactcagtgtacgtcaagaaaaaggcaatctgggtctctttgggcaaattcatttaaccaatggtcgctatgcttcctttgggcaagatctgttgatccgcaaaggcatgatcagcttttctggtcaaccttcacaacccatgctaaacattgaagcaattcgtaatcctgaatccatggataccgctggggtcgtcgctggaattaaagtccttgggctcgccgaaagtcctgagatcaaggtcttctccgaacctggtatgtcacaagatcaagccttatcttatgtgctgacagggcgttcattagaaaacagcggtgaagctggctctggtgggtctattggcgccgctttgctcggactcgggctcgcaaaaagtggtaaagccgttggcggaattggacaagcctttggtattcaagatctaaacttaggcacccaaggcgtcggcgatagctcgaaagtggtggtcagtggcaatatcacaccacgtttacaagtcaaatatggtgtgggtctgtttgatggactggcggagtttacggtacgttatcgcttaatccctaaattatatttacaatctgtttccggtgtcacccaagcggtggatttgctatatcaatttgaattttaa

SEQ ID NO: 31229 - DNA, 939 bp, Pasteurella multocida
atggttgtgatgatgacaagaaaaagcttgagaatcgctacgcgtcagagcccgcttgcattgtggcaagcgaactatgtgaaagcctgtttagaaaaaatccatgctggattagtggtcgaacttgtcccaatggtgacaaaaggggatgtgattttagatacgccactggctaaaattggaggaaaaggactctttgtgaaagagttagaacaagctttattaaagggcgaagccgatattgccgtacattcgatgaaagatgtccctatgcagtttccagcaggattaatgcttagcaccatttgtcaacgtgaagatccgcgtgatgcatttgtatcaaattcataccgcactctcatggaattacctgctggtgcggtggtgggtacctctagcttacgtcgccaatgtcagttaaagcagttacgtcctgatctacacattcattcactacgtggcaatgttgggactcgcttagcaaaattagataacggcgattatgatgcgattattctggctgccgcggggcttattcgtttagggcaacaacaacgtatcacctctttgattgatgtcacacaatgtttacctgccgtagggcaaggtgccgttggcattgaatgtcgtcaagaagcagaaattgagctgctgttagcccctttagccgatccagaaacgactgcttgtgtattggctgaacgtgcgatgaatcggcatttacaagggggatgtcaggtgccaattgcaggttacgcgattatcgaagagggacagctctttttgcgtgctttagtgggcgaagtagacggttccagtatacttcgtgcagaaggacggagtgcggttgcggatgccgaaacattaggtattcaagtggcagaaaaacttttacagcaaggtgcggataaaatcttgcaaacactttattcaaactaa

SEQ ID NO: 31230 - DNA, 378 bp, Pasteurella multocida
atgcaagaaaaaggcttttctgaacaagaaattgatgacacacttgccttttgccaacaaaaaaactggcaaaatgatcgccgctttgctgaaaattatctcacctttcgggcacagcgaggttatggatttgccagaatcaaacaagaattacaacaattaaaagggatttcctctgcacttatcagtgaagccgaacaaacattggcgccagattggcagcaccatgctttaactgtattgagaaaaaaattcccacagtatgccgaaatcaccgacttaaaattaaaacaaaaagtctggcgttatatgctttcacatggtttcaagcctgagcaatttgcacattatgttgggcatacagagtatgaagaataa

SEQ ID NO: 31231 - DNA, 1065 bp, Pasteurella multocida
atggcaacaaaagaagaaaaaaataaagcactggcagcagcacttgggcagattgaaaaacaatttgggaaaggctctattatgaaattgggcgatacccaagccttggatgttgaagccgtgtcaacaggctccttaagcctcgacgtcgcacttggcattggcgggttaccaatgggccgtattgttgaaattttcggacctgaatcttccggtaaaaccaccttaaccctttctgtcattgcgcaagcacaaaaagaaggcaaaacctgtgcctttattgatgccgaacacgcattagatccaatttatgctgccaaactgggcgtcaatgtgaatgaactgttagtttcccaacctgataacggtgaacaagcactcgaaatttgcgatgcgttagtgcgttcaggtgcagtagatgtgatcattgtagactcagtcgcagcattaaccccgaaagcggaaattgaaggagaaatgggtgactcacacatgggcttacaagcacgtttgatgtcacaagcattacgtaaactcactggacaaatcaaaaactcaaattgcttagtggtctttattaaccaaatccgtatgaaaattggtgttatgttcggtaacccagaaaccacaacagggggtaatgcactgaaattctatgcctctgtacgtttagatattcgccgtacgggtgcgattaaagagggtgaagaagtgatcggtaacgaaacccgtgtcaaagtggtgaaaaacaaagtggcggcaccattccgtcaagtagatttccaaattctttacggtcaaggtatttctaaaacaggtgagctcatcgagttaggcgtaaaacacaaattagtggataaagcaggtgcatggtacgcttacaatggtgaaaaaatcggtcaaggtaaagctaacgcgatgaaatggttagaagagcatcctgaagaagcattggctttagaaacgaaattacgcaatgagttgctcgcgaatccagaaaaagtactcgcggcagacattgcggaaaaaaatgaaagctctacgggcttagaagcggattattaa

SEQ ID NO: 31232 - DNA, 2583 bp, Pasteurella multocida
atggataatttagacttgcacacgcccatgatgcgccaatatttggcgctcaaagccgaaaatcccgatattttgttgttttatcggatgggtgatttttatgagcttttttatgacgatgccaagaaagcggcggcgttgctagatatttccttgactaaacgtggacagtccgctgggcaacctatcccaatggcgggcgtgccttatcatgcagtagaaggttatttagccaaattggtgcaattaggggagtcggtggcgatttgtgagcaagtgggtgatccggcgacttcaaaaggtcccgttgagcgccaagtcgtgcggattgtcacccccggtaccgtgagcgatgaaagcctcttacctgaacggcaagacaacttgatcgccacggtttaccaagaaaaagatcgctttggtttggcagtgttagacatcacctcggggcgttttcaaatcagtgagcccgaggatcgcgcgagcttacaagcggagttacagcgcatttcgcctgtagagttattgtattgtgaagactttgtggacatggcattgcttgagccgtttaaagggttacgccggcgtcctatttgggaatttgaactcggtacggcaattcaattactcaatcgtcagtttcacaccaaagatctgcgtggttttggggtggaaaaagccattttgggactctgtgcggcaggctgtttgttacaatatgccaaagatactcaacgtacggcattaccgcatattcaaagcctaaccttattacaacattcagaacatatacaattagatgccgccacgcgccgtaatttagagttaacccaaaatcttgccggtggcagcgaaaataccctcgcctcggtgctcgataaatgtgtcaccccaatgggaagccgtttattgaaacgttggatgcatcagcccattcgtcagcatgaaaaactcatggtgcgccaaaatcggattactgcccttttgcaacaggatttagtggcagcgattcagccttatttacagcaaatcggcgatatggaacggattttagcccgtgtcgctttgcgctcggcacgtccccgtgatttaactcgtttgcgtactgccttggaacaaattccgtatttgcgcgatattctggcacaacaaacttcgtcagatttgaccgcacttttgcagccaatcggtgaattttcagcgcagttagatttattacagcgtgccatcattgataatcccccaatgttaattcgtgatggtggcgtgattgctgaaggctacaatgcggaactagatgaatggcgcagtttatcggatggcgccacacgctatttagaagaactcgaacagcgtgagcgagaaagtaccgggattgatacgttaaaaatcggctttaatgcggtgcatggctactatattcaaattagccaagggcaagcgcataaggcaccgatgcactatgtgcgccgccaaaccctgaaaaatgcagaacgttatattattccagagctgaaaacgtacgaagataaagtgctgaaagctaaaggtgccgcattggcgttagaaaaacagctctacgaacaattatttgatgagttactgccacatttaggggcgttacaacttgccagtttaactttagcggaactggacgtgctcaccaatttagccgaacgagcagaaaccctcaattatgtcgcgccgcaatttagcgatgatatcggggtgcatattcagcaaggtcgtcatcctgtggtggaacaggtgctcaatgcgccgtttattgccaacccggttgagcttcacccacagcgccatttattgattatcacgggaccgaatatgggcgggaaaagcacttatatgcgtcaaactgccttgattacattaatggcgtatatgggcagttttgtgcctgcggaaagtgcggtgattggtccgattgatcgtattttcacccgtattggtgcgtcagacgatttggcgtcagggcgttcgacctttatggtggagatgaccgaaatggcgaatattttgcatcaagccaccgccaacagtttggtgttaattgatgaaattggacgcggtacctccacttacgatgggctttctttagcgtgggcttgtgcggaatggttggcgaaaaaattacgctcacttaccttatttgccacccattattttgagctgacggtgttacctgaacaactggcgggtagtgccaacgtgcatttagatgccatcgagcataatgacaccattgcttttatgcacgcggtgcaagagggggccgccagcaaaagttacggtttagccgtggcggcattggcgggcgtgccacaatcggtgattaaactggcgaaacaaaaattagcgcaattagaaaaactgtcacaacaaaatgccgatcaacgtatccaagatttgcgccagctcaatcaaacacaaggtgaattggcgttaatggaagaagatgacagcaaaacagccgtttgggaaatgttagaaaaactcgatcccgacgaactcagcccaaaacaagcgctggcgtatttgtatcagttgaagaagttggtttga

SEQ ID NO: 31233 - DNA, 966 bp, Pasteurella multocida
atgaaaatttgtttagtcaaaacctcatcaatgggcgatattctgcacagtttacctgcgctcaccgatgcccaacgcgccctccccaatttacaagttgattgggtggtcgaagaaagtttcgctgaaattccccattggcatagcgccgtccgacaggttatccccattgctctgcgacgttggcgtaaaaccccgtttaccgccctaactcgaaaacagtggaaaacttaccgcactttattacaatcagaacaatatgatgcggtcattgatgcacaaggcttacttaaaagtgccctttttgccactcgattagcacgtggcacacgccatggttacgatcgtcattcgattcgtgaaccgattgccgcctgtttctacgataaaaaatacgccattagctatcaacaacatgctgtcgaacgtattcgccagctgtttgcacaaagcctaaattatcccttgccccatacacaaggcgattacggcatagcacgccatttcccacaacacgcacaaacgatgccctatgtcctctttttccatggcaccacacgccaagataaatttctaccggacagacaatggcggacattagcagaaaaactgaccgcacagggtatccaaattcacgtaccttggtcaaattctcaagaaaaacagcgtgcagagaggatcgcccaagggcttgatcttgtaacgattttgccaaaatccacattatccgagttagcacagcagattgtgaatgccagcgctgttgtttctgttgacaccggattggcacatttaagtgccgcactcgataaaaccaacttgactctctatggtgccacggatcccaaactgataggctcctacggcaaaaaccagcattatctcgttgctgagagtatggataagattgaagctgatgaaattttccaaaaattgaccgcacttttatcgttaaacacgatataa

SEQ ID NO: 31234 - DNA, 1368 bp, Pasteurella multocida
atgcaacttaatgcattaactgcactttccccgattgatggtcgttatcaagacaaagtgagttcactacgttcaatttttagtgaatttggcttgttaaaatttcgtgtgacagtggaagtgcgctggttacaaaaattagctgccaccgatcaaattcaagaagtttctttattatctcaagaggcaaacgattacttgaatcacatcgttgaaaatttcagtgtgcaagatgccgaacgtattaaagaaattgaacgcacgacgaaccacgatgtgaaagcagtggaatatttcttaaaagaaaaaagtgaagctttaccagaattagccaaaatcagtgaatttattcacttcgcttgtacctcagaagacattaacaatctttcgcatgcattaatgctaaaaacggcacgtgaagaggtgattcttccagaatggcaaaacttaattgcggatatcagcgcacttgctaatgaatataaaactattccgttactgtctcgtacacatggtcaacctgcatcaccttctactattgggaaagaaatggcaaacgtggtgtatcgcttacaacgccagtttaaacaattacagcagattgacattttaggtaaaatcaatggtgcggtaggtaactataatgcccatttatcagcgtatcctgatattgattggcatcaattcagtgaagagtttgtgacgtcattaggtttaacttggaacccatataccacacaaattgaaccacatgactacattgctgaatttttcgataatgtggcgcgctttaatactattattatcgattttgaccgtgacttatggggatatattgcgttaaatcatttcaaacaacgtaccattgccggtgaaattggatcttcaaccatgccacataaagtcaatccaatcgactttgaaaattcagagggaaatcttggtttagccaatgcagtcatggcacatttaggcgcaaaattaccggtttctcgctggcaacgtgatttaacggattccaccgtattacgtaacttaggtgtgggattaggctattgtttaattgcgtacgcggcgacacgtaaaggtatcagtaaattagaagtgaacgagcagcatttacgtgatgagttggatcaaaactgggaagtccttgccgaacctatccaaacagtgatgcgtcgttatggtattgaaaagccgtatgagaaattaaaagcgttaacccgtggtaagcgtgtggatgcagaagcgatgcgtgaatttatcgaaacattagatattccagcgcaagaaaaaatccgtttacaacaaatgacgcctgcaacctatattggtgccgcggtggaattagtggaaaaactgtaa

SEQ ID NO: 31235 - DNA, 720 bp, Pasteurella multocida
atgaatgtcaatttttatgtgacgtgcattggtgatgccttaaaatccaatgtcgctaaacagtctgttctccttttagaacaactcggatgtaaaattacctttcttgaacaacaaggttgttgtggacaacctgcgcttaacagcggttatgttttatctgctatccccggcatgaaaaaattgattgaaacttttgaagtcaatgattatcccatcgttgcccctgctggttcttgcgtgtatgccattaaaacttatgcagaatacttgaaagaggaacccgaatgggctgcgcgcgctcaaaaagtggcggatcgtttttacgacttaaccgattttattgtgaatcagttaaaggttgtcaatgtgggggcgaaactcgcgggtaacgcggtatatcacccttcttgtagcttattccgtaaacttggcgtgaaagaagagccagtgaaattattacagcaggtggaaggattaaatttattgccgatccataatcaagaaacttgttgtggttttggtggcacattctccgtcaaaatggcggaaatttcaggcgaaatggtgaaagaaaaagtacagcatattatggcggtgaagccgttgtatttaatcggtgcagatgtcagttgtttacttaatattggcggacgtctcaaacgtgaggggcatcatgtcaaagtgatgcatattgctgaagtgttaatgagtcgctaa

SEQ ID NO: 31236 - DNA, 261 bp, Pasteurella multocida
atggcgcttttaatcacagacaaatgcacaaattgcgatatgtgtgagccggaatgtccaaatcaagcaatttcaatgggagaggaaatttacgtcattgatcccgccctttgcacagaatgcgtggggcattatgacatcccaacctgtcaaaaagtctgccccattaatcactgtattattaccgatcccgaccacattgaaaccaatgagcaactgtgggaacggtttgttctgattcatcacgcagataaattatag

SEQ ID NO: 31237 - DNA, 1164 bp, Pasteurella multocida
atgtcagtaatcaaaatgacagacttggatttgagcggcaaacgtgtgtttattcgtgctgatttaaatgtgccagtcaaagatggcaaagtgacttctgatgcacgtatccgtgcgaccatccctaccttgaaacttgcgcttgaaaaaggcgcaaaagtgatggtgacttcacacttaggtcgcccaacagaaggcgaatttgatgaagcaaactcactgaaacctgtagttgattacttaaatgcaaatttagatgtgcctgttcgtttagtacgcgattatttagacggtgtggacgttaaccaaggcgaaatcgtggtattagaaaacgtgcgcattaacaaaggtgagaagaaaaacgatcctgaattaggcaaaaaatatgccgcactttgcgatgtctttgtgatggatgcctttggtactgcacaccgtgcgcaagcctcgacttacggtgtggctgaatatgcgccagtggcttgtgcaggtccattattagcggctgaattagatgctttaggcaaagccttaaaagaacctgcgcgtccaatggtggcgattgtaggggggtcgaaagtctcaaccaaattagaagtgttaaattccttatctaaaattgcggaccaaattattgtgggcgggggtatcgccaataccttcattgctgcagcaggtcataacgtcggtaaatccttatatgaagaagatttaattcctgtggcgaaaaacttagcagcaagcacagatattcctgtacccgttgatgttcgcgttgggttagaattctctgaaactgcagcagcaacagaaaaagccgtcaatgaagtgaaagatgatgaatccatttttgatattggtgataaatcagcagaacaactcgcggaaatcatcaaaaatgcgaaaacgattctttggaatggtccagtgggcgtgtttgagttcccgaatttccgtaaagggactgaaatcatttctcacgcaatcgctaatagcgaaggtttctcaattgcaggtggtggtgacacattagcggcgattgacctattcggtatcaaagataaaatttcttatatttcaacaggtggtggtgcattcttagaattcgttgaaggtaaagtattaccagcagtagaaatcttagaaaaacgtgcaaatggttaa

SEQ ID NO: 31238 - DNA, 774 bp, Pasteurella multocida
atgtctttaggtctgttttcgtttgtgattggtttgcattcgtttagtcgacagcaatatcgtcagatgttgtgggcgattattgcgacgttattcgggatacttggtagtgtgttatcgacggctcggggtggctggattggcttaccgctgctgttatgttttgcgttgtttgcttatcgtcagtatttatcgaaaaaaattctcttttttgtgagtttgttttttgtgtttctgttggcagctgttgcattcgcccctaaaacaaagttgatttctcgtgtgacagaagcatacaccgaaacacaacaatattttgacgcacaagcagaacaatcgacctcgattggcgcgcgttttgcgttatggaaaagtgcattgcttatggcaaaagaaaaaccactattaggttggggaaatgcgggagcgatggagaaacgtcaagtgcagcaacaagaagggatgataagtgaatatgccgccaattttactcatgcacacaatcaatatttggataacctgtcaaaatatggtcttgtagggttagttgcattactggcgatttttagtgtgccattttgttatttttatcgaaaacgacatgccataaagggtgaggaaaaattagtggcaacattaggtatgcttcatattatttcagtgatgtgttattccttaactcaagcctttttaaaccataattccggtaatattttttatttcttatcggtttttattttctatggctgtttaaaacacagtgaaaaggaataa

SEQ ID NO: 31239 - DNA, 357 bp, Pasteurella multocida
atgtataaaacaacaggacttactcatctgattaaagccactggttattcactcaaagggttaaaaagtgcggttaaatttgaaactgcgtttcgccatgaactgctcgccgccctttttttggtgcctttagccttttggctcggtgaaaatgggattgaaattgccttaatgcttggctctcttttgttagttcttgcctttgaactgattaatagtgcgattgaagcggtcgttgatcgcatcagcttggaccatcatgaactctctgggcgcgctaaagatttcggctccgcttccgtttttattgccatggtcaatgtggtggttgtgtgggcactggtgctcttttattga

SEQ ID NO: 31240 - DNA, 2220 bp, Pasteurella multocida
atggttgcagtgcgaggatcacacttactcaatccaaaagattttgttattgaaacctggtgtgccagtttagaggtttcaccagaagtacgagaaaatctggtcaacgcttggtattactcgcaaaagtacataccgcaacaccacgacgcctcttcttgctcattacactctggcgtagaaatggtcgaaattctacacagtctgaatatggatgcagatagcttactcacggcaatgctctatccgacgattcatcacaagcttgtcgaactcagccaaattaacgaagattttggggcaaatatctataaattggcaaaaggcgtgatggaaatggataacattcgccaattaaatgccagccaatccgccaataacgcacaagtagataatatccgccgcatgttactcgcgatggtagatgatttccgttgtgtgattatcaaactggcagaacgcattacttttttaagggatgccgaacaaacctgctctgaagaagataaagtcctagccgccaaagaatgtgccaatatttatgccccactggcaaatcgtttaggtatcgggcaactaaaatgggagttagaagattactgtttccgttatctccaccctgagcaatatcgtagcattgccaacttattgaaagaaagacgccttgatcgagaacaatacattgccgattttgtctccgaagtaagcgactatttacgccataacattgataaagtggacgtgtatggtcgtcctaaacacatctatagcatttggcgcaaaatgcagaaaaaacatcttgaatttagcgatctctacgatgttcgtgcagtgcgaattatcgtccctaaattgcaagattgttataccgcacttggcattgtgcatacccacttcaaacatattccgaaagaatttgatgattacgtggcgaacccgaaacccaatggttaccaatctatccatactgttgtcctcggcaaaggcggtaaaccggtggaagtgcaaattcgcactcaacaaatgcatgatgatgccgagcttggggtagccgcccactggaaatataaagaaggcgcgactggcggtcgttctggctatgaagaaaaaatcacctggttacgcaaattgcttgcttggcaagatgatattacggactccggcgaaattatggcagaaatgcgtagccaggtctttgacgatcgcgtttatgtgtttacccccaaaggtgaggttatcgatttaccgacaggctccaccccattagattttgcctatgctattcatagtgaaattggtcatcgctgtattggtgccaaagtcagtggtcgtattgttccgttcacctatcagctacaaatgggtgatcaaattgacatcattacacagaaaaatgccaacccaagtcgcgactggttaaatcctaacttaggctttacacataccgccaaagcacgggctaaaatccatgcttggtttaaaaaacaagatcgtgagaaaaatattccagcaggtaaagaaatgctggaaaatgaacttacacgcttaaacatcggcttaaaacaaatcgaaccacacgccttagcgcgttacaacctaaaaaatttagaggatttatacgcgggtatcggtggcggtgatattcgcctcaatcacctcatcaacttcttacaaaacaagttaattaaaacgacggctcaagaagttgatgaagaaatcttacgtcatgtagcaaataaaagtgcggcgaataatcaacaaaaagaaaagcctcggggttatgtgatcgtagagggcgtcgggaatttaatgcatcacattgcccgttgttgtcaaccgattccgggcgatcatattatgggttatatcacaatgggacgggggatttccattcaccgtagtgattgcgaacaattcctcgagctacaacaagcccatcccgaacgagtggtagagtccatttggggtgataactatgccagtggatttaaaatcagtatccgtattatcgccagtgatcgcagtggcttattacgtgatatcacgacggttttagccaacgataaaattagtgtcttaggcgtatcgagtcgtactgatactaaaaaacaattagcgacaattgatatggaaattgagctgaataatgttcaaattttgagtaaaattctagctcgtctttcaaaactcgacgatgtcattgaagcaaaacgactgtaa

SEQ ID NO: 31241 - DNA, 735 bp, Pasteurella multocida
atgagaatacctcgaatttaccaccctgtcctattacaaggcgtgaaacattgtgaattaagtgaagatgcggctaaccatgttggacgtgtgttacgtatgcaagccggggataaactcgtgcttttcgatggctcaaaccatgtgtatgacgcacagattacgcagatcagcaaaaaacatgttgaagtagatattttgcaacaccaatgggatgatcgagaaagtccattaaaaattcaccttgggcaagtgatttcacgaggagaaagaatggaattcaccattcagaaatccgttgaattgggagtacatgtgattacacctctttggtcagagcgttgtggggtgaagttagatgccgatcgtctggagaaaaaaatccagcaatggcagaaaattgccgttgccgcctgtgaacaatgtgggcgtaatgtggtgccagaaatacgtccgatgatgaaattacaagattggtgtgcggaaaaagacggggcattgaagttgaatttacatccaagggcccaatattcaatacgtaccctacctgacatcccagcagcaggggtacgtttattaattggttctgaagggggcttatccgcacaagagattgcccaaacagaacaacaagattttattgaagtattattaggaaagcgtgtattgcgtacggaaacagcttcgttagctgcaattacagcattgcagatctgtttcggtgatttaggttga

SEQ ID NO: 31242 - DNA, 1302 bp, Pasteurella multocida
atggcaaaaatcgttaaagtgatcggccgtgaaatcatcgattctcgtggtaacccaactgttgaagcagaagtccatttagaaggtggctttgtgggtctagccgccgcaccatcaggcgcatcaactggttcacgcgaagcattagaattacgtgacggtgacaaagcacgtttcttaggtaaaggtgtgttaaaagctgttgctgcagtgaacaacgaaattgcacaagctctcgttggtaaagatgcgacaaaccaagctgaaatcgaccaaattatgatcgatttagatggcacagaaaacaaatctaaattcggtgcaaacgccattttagcggtttctttagctaacgcaaaagcagcggcggcggcaaaaggtatgccattatttgcttggattgcagaacttaacggtacgccaggtcaatactctatgccattaccaatgatgaacatcatcaacggtggtgagcacgcagacaacaacgttgatatccaagaatttatgattcaaccagtgggtgcgaaaaccttaaaagaagcccttcgtatcggtgcggaagtattccacaaccttgcgaaagtattaaaaggcaaaggcttaagcacagcagtcggtgacgaaggtggttttgcacctaacttagaatctaacgcagcagcgcttgcttgtatcaaagaagccgtagaaaaagcgggttatgtgttaggtaaagatgtcacattagcaatggactgtgcatcatctgagttctataacaaagaaaatggtatgtacgaaatgaaaggtgaaggtaaatcattcacttctcaagaattcacacactacttagaagaattatgtaaagaatacccaatcgtgtctatcgaagatggtcaagatgagtcagactgggaaggtttcgcctaccaaactaaagtattaggcgacaaagttcaattagttggtgatgacttattcgtaacgaataccaaaatcttaaaagaaggtatcgaaaaaggtatcgcgaattcgatcttaatcaaattcaaccaaatcggttcattaactgaaacgttagcggcaatcaaaatggcgaaagacgcaggttacacggcggtgatttcacaccgttctggtgaaacagaagatgccactattgcagatttagccgttggtaccgcagcaggtcaaatcaaaacgggttcaatgagccgttctgaccgtatcgcgaaatacaaccaattaatccgtatcgaagaagcattaggtgataaagcaccattcttaggtttaaaagcggttaaaggtcaagcataa

SEQ ID NO: 31243 - DNA, 1629 bp, Pasteurella multocida
atggcaacaaattatatttttgtgacgggcggtgttgtatcttcgctgggtaaaggtattgctgcagcatcattagcagcaattttagaagcgcgtggtttaaaggtcaccatgttaaaactggatccttatatcaacgtggacccgggcaccatgagtccaactcaacatggtgaagtttttgtcacccaagatggcgctgaaaccgacttagacttagggcattatgagcgttttattcgcaccaaaatgaccaaacgtaacaatttcaccacaggcaaaatctattccgaagtcttacgcaaagagcgtcgtggtgattatttaggtgcaaccattcaagtcattcctcatattacaaacgaaattaaatctcgcgtcattgatggcgcagctgggcatgatgtcgcaattgtcgaagtagggggaacagtaggtgacattgaatctttacctttccttgaagccttacgtcaactggcggtgcaagtcggtcgtgaacgtaccttgtttatgcacttaaccctcgtgccttatattccaacggcaggtgaagtgaaaacgaaaccaacacaacattcagtgaaagaattattatccattgggattcaacctgatgtcttaatttgtcgttctgatcgcatggtcccaccgaatgagcgagcaaaaatcgccttattctgtaatgtgccagaaagagcggtcatttcactgaaagatgtcagctcaatttaccaaattccagccttattaaaatcacaaggtttggatgatttcatttgtcaacgtttccacttagattgcccagaagccgatctgtctgaatgggaacaagtgttataccaagaagctaatccaacaggtgaagtggtgatcggtatggtgggtaaatacacggaattaccagatgcctacaaatcggttaatgaggccttaaaacacgcaggcttaaaaaaccgtcttagcgtacaaatcaaatatattgattcacaagatgtggaaaccaaaggcacagaagtgttagaaggcgttgacggtattttagtaccgggtggatttggtaatcgtggtgtagaaggtaaaattctcaccgccaaatatgcacgtgaaaatcacattccttatttagggatctgcttaggaatgcaagtggcttacattgaatatgctcgcaatgttgccggtttaacggatgcaaattctactgaatttgaccgcacttgtgactatcctgtcgtgggcttaattaccgaatggcaagacgccgaagggaatattgaaacacgtaccgatgcctctgatttaggtggcaccatgcgtttaggtgcacaacaatgccatttaatggaaggtagcaaagcacgtgaactttatggtgctgaaaccatcgaagaacgtcatcgtcatcgttatgaagtcaataacgtcttacgtccacaagtggaaaaagcaggcttaaaagtcacgggcttatccgcagataaaaaattagtggaaattattgaagtaccaaatcacccttggtttgtggcatgtcaattccacccagaattcacctccaccccacgtgatggtcacccactctttgccggctttgtcaaagcggcaaaagacaatcaaaagaaataa

SEQ ID NO: 31244 - DNA, 885 bp, Pasteurella multocida
atgacttattcattattaacggaaacccaagcacatgtggtttgcgatctacaacaatacacgctacttgaaatccaaggcgaagatgccgaaaaatatttacaaggtcagctcacttgcgacgttaacaaattagcggtaggagaatctactcttgcagcccattgtgatgcaaaaggaaaaatcaattcgctttttcgcttaattcgtacggctccgcagacgttctacttactggtcaaaaaagggctgttgccaacggcgcttgaccaattgaaaaaatatgcggttttttctaaagtgacttttaccccatgtgattggcaaattattggcttagctggagagaaaatcatcaatgcctgcgatgaaatcgacgcacaaatacgtgtaaccttatccagtcaacaaccacgtgtcattttaatccacccaacagcattagatttgcaagccaatgctagccatgtggtatgggatttattggatattcaagatggcatccctttattaagccctgaaacgcaagcggagtttattccacaagcattaaacttacaatgtttagaacacgctatttcattccaaaaaggttgctatattggacaagaaattgtcgccagagcaaaataccgtggtgcgaataaacgcgcgatgtttacttttgtagctcaaagtcaagaaatgccaaatatcaaaagtgaagttgaaatgcaattggaaaaccattggcgtaaaacgggtaatatcattagcgcggtgaattttgagggcactttatggttacaagtggtgttaaacaatcagcttgaagaagacgtccaatttcgtttatcagaacatacagctttaacccggtttcccttgccttatacattaagttag

SEQ ID NO: 31245 - DNA, 864 bp, Pasteurella multocida
atgatttatagtatgaccgcttttgcacgcctcgaaatcaaacaggattggggtgatgccgtgtgggaaattcgctcagttaaccagcgctatttagaaacctttttccgcttgcctgagcaatttcgtggtttagaaaataccttgcgagaaaaactgcgtcaaaaactgacgcgtggcaaaattgaatgcacattgcgtattgataataaaaaacaagctgccacagaaatccatttaaacaaagcctttgcattacaagtgatacagtcattacagtggatcaaacaacaagccggggaaggcgagattcacttaaatgacgtgttgcgctatccgggcgtcgttgaagtaccagaacaagatcttgatttgattagccaacaattactcagcgcgtttgacagcttattaaccgagtttattgcaatgcgagcaagagagggcgaaaaactcaacacactccttcaacaacgtttagatgccgttgaagttgaagccaataaagtgcggtcaaaaatgccggaaattttacaatggcaacgagatcgtttattacagcgctttgacgaaatccaattacaagtggatccccaacgtgttgagcaggaaatggtgttattagcccaacgggttgatgtcgctgaagaactcgatcgtctgcaattacacgtcaaagaaaccaaagccattttacaaaaaggcggtgcggttggcagaaaattggattttatgatgcaagaacttaaccgtgaatcaaatacgctcgcgtccaaatctatcagtactgaagtcaccaattctgcggttgaactgaaagtccttatcgaacaaatgcgtgagcaaattcaaaacttagagtaa

SEQ ID NO: 31246 - DNA, 645 bp, Pasteurella multocida
atggaagcctataaatcggaatttattcaatttgcgctaagccgtcaggtgttaaaatttggtgagtttactctaaaatctggtcgtattagtccctatttttttaatgcagggttatttaatacgggagcagatctcgctcgtttaggggaattctatgctaaagcgattcaagccagtggtgttgaatatgatgtgatttttggtccggcttataaagggctgccgattgccacgacggtttctgtggcattatttaatcattttcaaattgataaacccgtttgctttaaccgtaaagaagccaaagatcacggtgaaggggggcagctcattggctatggtttaagtggaaaaattttattggtcgatgatgtgattactgcagggaccgccattcgtgaatccatgaccttaattgcacaaaatcaagcggaactcagtgccgtgatgatcgcgttaaatcgtcaagaaaaaggcaaaggtgaattgtctgcgattcaagaagtggaacgtgattatcaatgccaagtgttgtcgattgtgaattttgatgatttgatgaccttcattgagcaagcaccagaatatcaacaatatttaccagcaatgcgtgcttatcgtgagcaatatggcgtgaagtaa

SEQ ID NO: 31247 - DNA, 702 bp, Pasteurella multocida
atgcctaagattttattagttgatgatgatgttgaattaatagagcttcttgctgagttattaacattggaaggctttgagattgatatggcaaataatggcttacaagcattacaaaaattagatctaagttatgatttagttttgttggatattatgatgcctgtcctcaatggggttgagacgttaaagaaaattcgtcaggaattttctgtacccgtgatcatgttaactgcacgtggtgatgatattgatcgtattctcggtctcgaacttggggcagatgattacattccaaaaccgtttaatgatcgcgagcttgtagcgcgtattaaagcgattttacgtcgtacacagccagcagccacattaaatacagaagtgaaagaaaatcgtagcgaatttgtattttgcgatattacactttatcccggtcgacaacaggcatttcaccatgataaagatttagaattaacaggaacagaatttgcactattacaaaaattggtcttgaatcccggtcaaattctttccagagagtcgttaagtattgaaattttaggtaaacaattaaccccatttgaccgtgctattgatatgcatatgtcaaatttacgtaagaaacttccaccgcgtacggatgggtctccttggtttaaaaccttacgtggacgaggttatttgttagtgtcagaaaaataa

SEQ ID NO: 31248 - DNA, 708 bp, Pasteurella multocida
atgaaaaatacattttcgatctttaatgatcaacaaacacgtcgtgcgttaatcctcttgagcttttttcatattctgattatcgccgccagtaactatttggtacagattccctttgaaatcacgcttccactgagtcaactcggtacacgtgaagattttagttttcacagtacttggggcacattgacctttccttttattttcttagccactgatttaactgtacgtatttttggtgcaaaagaagcacgctggattatttttgtggtcatgatccctgcattagtgataagttatgtgatttctaccctgttccaagatacacaatatcaaggtctaaatgcattagcgcattttaatacttttgtcttccgtattgcggttgccagtttctttgcttatgtttttggtcaactcttagacgtgttagtctttaaccgtttacgccaattaaaaacttggtggattgccccaagtagttccatgatttttggttccatggcagacacattcctcttctttgcaatcgcattttatgccagcagtgacccgtttatggcggaacattgggcggcattaggctttgtggattatttatttaaactgtttgttggcatcatcttatttgtaccagcttacggtgtggtgctcaattttattttacgtaaaatccaagcgctcaatgcacagccacaagttgcttaa

SEQ ID NO: 31249 - DNA, 213 bp, Pasteurella multocida
atgcaaactgtgacactgaatattgaggggatgcactgtggtggttgtgtcaaaactgtagagcgcgtattgaatgggttagacggcgtaacacaagtggacgtgaacttagagcacgcttgtgccacaattcaatatgacaccaatcgcgtgtccattgctcaattaattgatgtggtggaaaatgcaggttttgatgtacaacctatttaa

SEQ ID NO: 31250 - DNA, 2175 bp, Pasteurella multocida
atgcaacaaaaaatcaccctgcacattcagggcatgacctgtcaggcttgtgctagccgtattgaaaaagtcttaaataaaaaaccttatattcaacaagccgcagtcaattttgctagtgagcaagcacaagtcagttttgataacagtgaacattctccacaagatattttgcagcttattgaaaacgtaggttttacagggagcttgcaatcagaacaagcgcctcctcttgtggaacctaacttaccttcgtggcgtttatggctgttattactgattaatcttccgtttatgtttggtatgatcggtatgttgctagggcagcaccactggatgctcgcgccagagtggcaatttgtccttgctagcattgtgcagtttggcttagcgatccctttttataaaagtgcatggggcagtttaaaaggtggcttagccaatatggatgtgttggtgagtttggggacgctcagtatctacttttattccgtatttatgctgtttacagcctatggacatactcatgagggcatgccacatgtgtattttgaagccagtgtcatggtgcttggttttgtcagtttaggcaaattcttagaagaacgcaccaaaaaacacagccttaatagtttaggattactggttaaacttactccgcaacaagtgaatgtacagcgtgatggacaatggcagacgttgcctttggatcaggttcaaatcggtgatctgttacgagtgaagcaaggggagcgaatcgcggcggatggtatcgtgcaaagtggtacaggttggagcgatgaaagccatttaaccggcgagtttaagcctgaaatgaaaaaagttggtagccaagtgctagcgggcgccatgctgagtgacgggtcattagtttaccaagcacagcaactcggtagccagacgttattgggcgatatgatgaatgcgttatctgaagcacaggggacgaaagcgccaattgcgcgttttgcggataaagtggcagcagtatttgtaccaacggtggtggttattgccttactgacctttgcgtttacttattggattaaacaagattgggtgagtgcattaatgcatgctgtcgcggtgttagtgattgcgtgtccttgtgcgttaggtttagctacgcccgctgcaattatggtgggcatgggcaatgcggtcaaacatgggatctggtttaaagatgcggcagcgatggaagaatcagctcgtgtgaatacagtggtgttagataaaacgggaacgttaacgcaaggaaaaccgcaaattgccgcttgttggttggtagaaaatagtccttataccgagcaagatgtttatcgtttggcggcctctgtcgagcaacatgccagccaccctttagccaaagcgattgttcagcacgcgcaagagaagggaattgatttgttgcatgcagagcaaattcaaaccgcacttggtgctgggatacaagccgaagtggaagggattgggcgcgtgaaagtcggcaaagctgattattgtcatttcacgttaccggctttagccgatccgatttggcagctggcaagtattgtggcagtcgcggtcaatgatcagcccattggggcatttgcgattgcggataagctaaagcctgattctattgagggaatcaaacgtctgcaatccgcgcagattgaggtatatatcatgagtggtgatcagcaaagtgctgtgcaatatcttgctgatcatcttgggattaagcatgcctatggtaacctttcaccacgagataaagcgaacaaaattgcgcaattacaagcagaaggcaacgtcgtcgccatggtcggagatggtattaatgacgccccagcattagcccgtgctaacgtgagttttgccatgaaaaatggggcagatgtggcagaacatacggcgtctgcgacattaatgcaacaatctgttaatcaaatggtggacggtttacttctcgcgcaggcaaccttaaaaaatattaaacaaaatttgttttttgcctttatttataatgtgttaggtattcctattgcagcatgggggttattaaatccgattattgcgggggctgcgatggcattgagctccgtgtcagtattaatgaatgcattacgtttgaaacaagtaaaatttaatcgtgacatgtcatga

SEQ ID NO: 31251 - DNA, 495 bp, Pasteurella multocida
atgacctttagccttatcgtcgctatgacgaaaaaccatgtcattggtaaagacaatcaaatgccttggcatctgcctgccgatttagcgtggtttcgccaaaataccacgggtaaaccggtgattatgggacgaaaaacctttgaaagcattgggcgtccattaccaaaacgcactaatttagtgctttctcgtcagccatacctacatgagggcgtgatttggcaaaacagccttgaaagtgcggtggattttgtcaaagattcacctgaaatcctgttgattggcgggggcgaattatttaagcaatatttacataaagccgacaagctctatctcactgaaatccaaacagaattagaaggcgataccttctttcctgaaattgtatggcaagactggcaaattgaatatgaagcatggcaccaagccgatgaaaaaaatccttatgactgtcgctttttaattttatcgcgtaacactaaaaatgaatga

SEQ ID NO: 31252 - DNA, 1161 bp, Pasteurella multocida
atgattaatggtaagttagcttcaattttgtgcgacaaaaataagaagatagagaagatgaaaatcgacaaaacactcgttgtgaaatttggaaccagtacgcttacgcaaggatcggcgaagttaaatttacctcatatgatggatattgtgcgtcagctcgcacagcttcatcaagcgggctttcgtttagtgattgtcacctcaggggcgattgcggcaggtcgtcattatttaaatcacccgcaattgccgccgacgattgcctcgaaacaattattggctgcggtaggacaaagtcagctcattcaaacgtgggaaaaattgtttgccatttatgatattcatattgggcagattttattgacccgtgccgacattgaagatcgtgaacgttttttaaatgccagagatactttgcgcgccttattagataatcagattattccagtgattaatgaaaatgacgctgtcgctacgtcagaaattaaagtaggcgataacgataatttatccgcgttagtggcgattttagtgcaagcagaacagttgtatttgcttactgatcagcaaggtttgtttgatcgtgatccgcgcaaacatccagacgccaaattgatcgccgacgtggacaaaattaccgatcatattcgcgcgattgcgggcggaagtggcacctcgttaggcacaggcggcatgtccaccaaaatcagtgccgcggatgtggcaacccgctccggcattgaaactattattgcaccgggtaatcgcccgaatgtgattgtggacttagcttatgggcaagccattggcaccaaatttagtgtgcaagcagatcgcttagaaagtcgtaaacaatggctatatgcggcgccgtcagccggtattattaccattgatgcgggggcggaaaacgcgatgttaatgcaacataaatcgttattgcctgctgggattgtgaacgtggaaggacgcttttcacgcggtgaagtggtaaaaattcgtactcagcaaggtaaggatgtcgccttagggatgccacgttataacagcgatgcactccatttaattcaaggcaaacattcgcaagatatcgaacaggttctcggttatgaatatggggcggttgcggtacaccgcgacgatatgattgtgttataa

SEQ ID NO: 31253 - DNA, 1407 bp, Pasteurella multocida
ttgaaaagccgaatgcttggcgattataacaagttattccgtttatgtaagtatttgcgtgaatttacgccagttgaaagggcgattcacaaccgaggtgaaacgatgaatgagcagcaacttttagaatgtgatcgacaacatatttggcacccttatgcggcgttaaatgcggattttcccttatttgtagtagaacgtgccgaaggcgtgtatatccagttaaaaaacggtcagcaattgattgatggcatgtcatcgtggtggtcagcgattcatggctataatcacccccgtttaaaccacgctgccacgcaacaactgagtcaaatgagtcatgtgatgtttggtggattaacgcaccaaccagcagtagaactggcgcagcaactggtcaacatcttgccggaaagtttggataaaattttctttgccgacagtggttcggtcgccgtggaagtggcgatgaaaatggcggtgcaatatcaacatgctaaaggtgaaacacagcgctgtaaatttgctacgattcgttcgggctatcatggtgatacctggcatgcaatgtccgtgtgtgatcccgtgaccggcatgcacagcttgtttgccaaagggctacccgtgcaatattttttaccgcaacccccggtaaaatttgggcaagcttggcaacccgaagcgatgcaaccgttacaggatttattggcacaacatggtgatgagattgcgggcttaattttagaaccggtagtgcaaggggcgggcggtatgtatttttattcccctgagtatttggtgcaagcaaaagccttgtgcgaacagtacggcattttgctgatttttgatgaaattgccacaggatttgggcgtacaggcaaattatttgcttgtgaacatgccaatgtcgtaccggatgtgatgtgtatcggtaaagctttaacaggggggtatttaaccctatccgctaccattaccaaccaaacagtagcagacgtgatttgttctggcgaggcaaaatgttttatgcacggtccgacgtttatggcaaatccactggcgtgtgcggtagcagcagaaagtatcaaattgttattggcaagcccttggcaacaacgtattcaacagattgaacagcaattacgtcaagaattgcgccaagcggaagccttagattgtgttgctgaagtgagagtacttggggcgattggggtgattgaaatgaaagcgcctgtcaatatggcaagtttacaaccacgctttgtgcaaaatggcgtttgggtgcgtccatttggaaaattagtgtatttgatgccaccgtatatcatctcatcggatcaattgtctcaattaattcatggcacaattcgcacccttcaagaagagtatgcacataaggaatctctatga

SEQ ID NO: 31254 - DNA, 1164 bp, Pasteurella multocida
atgatcaggtattatcagcagcagttagctgatttaaaggcgcagaatcaatttcgccaactgccccaactcattcaccgagggcgttttattcaacgtgaggacaatacgatgctgaatatgtcctccaatgattatttaggtttagccaataacgaagccttgcgtcaggcgtttttcacgcaataccaagatcaactccctgcattgacgtcttcttcctcccgtttattaacaggctcttttccgatttatgatgagctagaaagcttaatggcgcaggcatttggacgagaaactgccttgctatttaatagcggttatcatgctaatattgggattttgcctgctttagcggacaaaaaaacgctgattgtggcggataaactggtacatgccagtatgattgatggcattcgcttggcacaatgtgagtttgtgcgttttcgtcatcatgattacgcccaccttgaacaaattttgcaaaaaaatgaccgcacttttgagcggattatcgtggtcacggaatccgtgtttagtatggatggtgactgtgcagacctcacccagttggtcgcattaaaacagcgctatccgcaagtgatgttatatgtagatgaagcccatgcgataggcgtattgggtgagaaggggctagggttagcagaacaacaaggctgtatcaaccaaattgatattttggtcggcacgtttggcaaggcgttgggctctatgggggcttatgtgatttgcgatcaagtgatccgagattatttggttaataaaatgcgcccattgattttttccacggcacttccgccgtttaatgtggcatggacacattttgtctttcaacaattaccacatttgcaagccgagcgcgcacatcttgctcagcttagtcaacatttacgccaagcgattgtcgacatttttcaagtcccgatgccaagtgaaagttgtatcgtaccttatattttgggcgacaacgaactgacagtaagaacagcgcaacgtttgcaacaacaaggttattattgcttaccgattcgcccgccgacagtcccaaaaggtacctctcgtattcgtttttcactgactgcagatatgcaagtggcggaagtggaacaatttattgcttgtttacaggagcttgctgaatga

SEQ ID NO: 31255 - DNA, 993 bp, Pasteurella multocida
atgacaactcacaatttattactcgatgtacaagatttgcgcgtaacctttaagaccccagatggcgatgttactgccgtcaatgatctgactttttctttaaatgccggtgaaaccctcggcattgtcggcgaatctggctcaggaaaatcacaaaccgcctttgctctaatggggctattagcagataacgggcgaatttcaggatcagcaaaatttaatggacaagaaattctcaacttgcctgaaacacaacttaaccgcttgcgtgctgaacaaattgcgatgatcttccaagatccaatgacctcgctgaacccttatatgaaaatcggcgaacagctaatggaagtactgatgttgcataaaggcatggatcataaaactgcgtttgaagaatcggtacggatgttagatgcggtgaaaatgccggagtcacgtaaacgtatgaatatgtatccgcatgaattttccggcggtatgcgtcagcgtgtgatgattgcgatggcattactttgccgtccgaaactcctcatcgcggatgaacccacaactgcgctcgatgtgacggtgcaagctcaaatcatgaccttattaaacgaattaaaaagcgagtttaataccgccattatcatgattactcacgatctcggtgtggtcgcaggaatttgcgataatgtgttggtgatgtatgcaggcagaaccatggaatacggcaccgctgagcaaattttctataccccaagccacccttattctatcggcttaattggtgcagtgcctcgcgttgacggacaggaagaagaactcattactattccgggtaatccacctaacttattacgcttaccgagtggctgtcctttccaaccacgttgcgttcatgcaactaaacaatgcctcaaagcaccggcgttaaccttgttaaatgatcaacgtttacgcgcttgttttgtccctgccgagcaattaatccgaggtaacgcatcatga

SEQ ID NO: 31256 - DNA, 954 bp, Pasteurella multocida
atgtatagtaaaatcttatccaccgggagttatttacccaaacatatccgtacgaatgccgatttagaaaaaatggtggacacctctgatgaatggatttcggaacgtactggcatcaaagaacgtcgcattgctgaagcaagcgaaactgtggcaaccatgggatttgaagctgcccagaattgcttagcggtatcgcctatggatgtcaatgagattgatcttattgtcgtcgcgacgactagcgcaacacatgcttttccaagtacggcatgtcaaattcagaaaatgctcggcataaaagacgcgattgcgtttgatgtcgcagcggcctgttcgggctttgtttacgccttaaccgttgccgatcaatttatccgtaccggaaaagtaaaaaaagccctcgtgattggggcggatctcttttcccgcgcgttaaatccagaggatcgaggcacgattattttatttggtgatggtgccggtgctgtgattttagaagcaagtgagcaagcggggatcatttcaacgcatttacatgcaacaggcgaaagtgctgaagtcttaaccttagctaatcaggcgcgcggtattgaatccgatcctgcctatttagaaatgcagggtaacgcaacttttaaaattgcagtacgcgaattagcaaatgtggtggaagaaaccttagaagccaaccagttagataagaaagatattgattggttagttccacatcaggcgaacttgcggattatttccgctaccgcaaaaaaattagatatggatatgtcacaagtcgtggttacacttgatcgccatggcaatacgtctgcaggcagtattccaagtgcgcttgatgaggcagtgcgtgatggacgtattcagcgtggacaattgttgttattagaagcattcggcggtggtctgacttggggatcggcgttagttaggttttaa

SEQ ID NO: 31257 - DNA, 939 bp, Pasteurella multocida
atgaaaaaatttgcaatggtttttccaggacaaggctctcaagctgtaggaatgttagcagaattagccacagaatatcctgtggtggaagagacctttaaacaagcttcggatgtgttaggttatgacttgtggcaacttgtgcaacaaggacctgcggaagaactgaataaaacttggcaaactcaaccagcactgttagccgcatctgttgctatttatcgtgtatggcaagagaaatatcctcatttgaagccagacgtgatggctggacatagtttaggtgaatattctgctttagtatgcgcgggcgcacttgatttccaagatgcagtcaaattagtggagctgcgtggtaaattaatgcaacaagcggttcccgaagggaccggtgcgatgtatgcgattattggtttagataatgaagccatcatcagtgcctgtgccgacgcagcgcaaggcgaggtggtgtctgcggtgaattttaactcgccggggcaagtggtgatcgcgggagcaaaagcagcggttgaacgtgctgcagctgcttgtaaagacgccggggcaaaacgtgccctgcctttagcggtaagtgtgccttctcattgtgcgttaatgaaaccagcagcagatcaattagccgtgtctttagataatattgcgattagaacaccaactacagcggttatcaataatgtggatgtcgcgtgtgaaacggaaaatagtgaaattcgtcacgcacttgttcgtcaattatatagtccagtgcgttggacagaaaccgttgaacgtatggcaaaagatggcgtgcaggttttagttgaagtcggtccaaacaaagtcttgacggggttaacaaaacgtatcgtcgctgatttacaagctactgcggttaatgatctgacatcattaaatgcggttgatgaactattcgcttaa

SEQ ID NO: 31258 - DNA, 729 bp, Pasteurella multocida
atgcagggtaaaattgcattagtaacaggcgcaacgcgtggtattggtcgtgcgattgcagaagaattaagtgcaaaaggcgcatttgttatcggtacagcaacgtctgaaaaaggcgcagaaagtatttctgcctatttaggcgagaaaggtaaagggcttgtgctgaacgtgtctgatcttgcctcgattgaaacaacgctagagaaaatcaaagcagatttcggtgagattgatattttagtcaataatgcaggcattacacgtgataatctgttaatgcgtatgaaagatgaagaatggtttgatatcatgcaaactaatttaacttcggtgtatcacttatcaaaagccatgttgcgttctatgatgaaaaagcgttttggtcgcattattacgattggttcagtagtcggatcgatgggtaatcctggtcaaactaactattgtgctgcaaaagcaggcttgattggttttagtaaagcgcttgcaaaagaagtggcttcgcgtggtattactgtgaatgtagtagcgcctggttttatcgcaaccgatatgacagatgtgttaacagaagagcaaaaagccggtattttatctcaagttccagcagggcgtttaggtgatccaaaagatattgccaaagcggtcgcctttttagcttcggatgatgcgggttatattacaggtactacattacatgtgaatggtgggatgtataccaactaa

SEQ ID NO: 31259 - DNA, 231 bp, Pasteurella multocida
atgagcattgaagaacgcgtaaaaaaaatcatcgttgaacaattaggcgttaaagaagacgaagttaaacctgaagcgtctttcgttgaagatttaggtgcggattctttagatactgttgaattagtcatggctttagaagaagagttcgatatcgaaattccagacgaagaagctgagaaaattacgacagttcaatctgcgatcgattacgttcaaaacaatcaataa

SEQ ID NO: 31260 - DNA, 1263 bp, Pasteurella multocida
atgcatcttacagaacttaaaaatagacccgtttctgaattagtggaactcggtgaaggtcaaatgggcttagaaaatctagctcgcctacgcaaacaagacattgtcttcgcaatcttaaaacaacacgctaaaagcggtgaagacatctttggtggcggtgtgttagaaattctacccgatggtttcggtttcttacgctccgctgacagttcctaccttgccggtcctgatgatatctatgtttcaccaagtcaaatccgtcgtttcaacttacaaacaggtgataaaattgaaggtaaaattcgtccacctaaagaaggtgaacgttattttgcgttattaaaagtcgatcaagtcaatgacgaccgacctgaagtgtcccgtagcaagattttattcgaaaacttaacccctttacatgcgaactctcgtctcagaatggagcgaggtaacggctcaacggaagatctaactgcccgcattttggatttagcttccccgattggtaaagggcaacgtggtttgattgtggcgccacccaaagccggtaaaaccatgttgttacaaaacatcgcacaaagcattacttacaattaccctgaatgtgaattgatcgtgttattaattgacgaacgtccagaagaagtgactgaaatgcaacgttcggttaaaggtgaagtgattgcttcgacctttgatgaacccgcaactcgccatgtacaagtcgctgaaatggtgattgagaaagcaaaacgttctgttgagcataaaaaagacgtggtgatcctccttgattcaattacacgtttggcacgtgcttataacaccgtcactccggcatcaggcaaaattctttctggtggtgtggatgctaatgcgttacaccgtccaaaacgtttcttcggtgcagcacgtaatgtcgaagaaggtggtagcttaaccattatcgccacagcactcgtagatacgggctcaaaaatggacgaagttatctttgaagagttcaaaggaaccggtaatatggaattgcatctttcgcgcaaaattgccgaaaaacgcgttttcccagccattgacttcaaccgttcaggcacccgtaaagaagatttactcacaagcccagatgaactacaaaaaatgtggatcctacgtaaaatcttacatccaatgggcgaagtggaagcgatggaattcctcattgataaactcatggtcgccaaaaccaacgatgagttttttgaaatgatgaaacgttcataa

SEQ ID NO: 31261 - DNA, 468 bp, Pasteurella multocida
gtgaagattcaactgattgccgtgggtaccaaaatgccgaactgggtgacgatgggatttgaagaatatcaacgtcgttttcccaaagagatgccttttgagcttattgaaattccagccggaaaacgcggtaaaaatgcggatattaaacgtattttagaacaagaaggcaaagcgatgttagccgcgtgtggaaaaagccgtatcgtcacgttagatattcccggtaaaccttggactacggagcaattggctacgcagctagaggtctggaaaaacgatgggcgtgatctcagtttactgattggtggtccagaagggttgtctgccgaatgtaaagcagcagcagaacaaagttggtcattatcaccgcttacgctaccgcatccgctcgtgcgtgttgtggtcgccgagagtttgtatcgtgcttggtctgtgaccatgaatcatccatatcatcgtgaataa

SEQ ID NO: 31262 - DNA, 963 bp, Pasteurella multocida
atgggtacaccttttaaaatggaacgtggtgtcaaataccgtgatgctgctaaaacgtccattatcccggtaaaaaatatcgatccaaatcaggaattattaaaaaaaccggaatggatgaaaatcaaactccctgcgaattctgccaaaattgatagcattaaaaacggcatgcgtcgtcatggtttacactcagtgtgtgaagaagcatcgtgcccgaatttacatgaatgttttaatcacggaacagcaaccttcatgattttaggggcaatttgtactcgccgttgtcctttctgtgatgtggcgcatggtaagcctttaccgccagatcctgaagaaccacgtaagttagcggagacaatccaagacatgaaattgcgttatgtggtgattacttctgtggatcgtgatgacttgcctgatcgtggtgcgggtcactttgcagaatgtgtaaaagaaattcgtcagctcaatccaaatatcaaaattgagattttggttcctgattttcgtgggcgaattgagcaagcgttggataaattgaaagacaatccaccagatgtgtttaaccataatttagaaaatgtaccacgtttataccgtgaaattcgtccaggagcagattatcaatggtctttgaaattgcttaaagattttaaagcgatgtttccacatattccgaccaaatcaggtttaatggtggggttaggtgaaactaatgaagagattctgcaagtgatgcaagatctacgcgatcatggtgtgactatgttaaccttaggacaatatttacaaccaagtcgccatcatttacctgttgcacgttatgtacctccggcagagtttgatgagttccgtgataaagcacaagccatgggctttgaacacgctgcttgcggtccgtttgtgcgttcttcttatcatgcagacttgcaagccaaaggcgaaattgtgaaataa

SEQ ID NO: 31263 - DNA, 711 bp, Pasteurella multocida
atgtccttatttttattgagatggaatggcgcaatgttaaagcttgacctagggttaaggtcaagtaatctgaaaaaattctatcatttgaaaatttttctcaaaatcctactgcttgtagtagagatatgccaacgtaccattacagtgcaaaaaggcgattttgttgtattgggcggagcgaccagctcggtaggcattgccaccattcaaatcgccaaaatgcaaggggcaaacgtgattgctctgtctcgcacgcacgccaaaggcgatgtgcttttacagaaaggggcggattttgtgattgccaccaaagaagatgacgttacggctaaattactagaaattacaaacggcaaaggcgtgaatttggtgttcgaccctgtgggtggcaaagaagcagcaaaaattatcaacgcaatgacacaagacggcaaatacatcatctacggtgcattaagccacgatgatatcgccgtgcctgtgttcccaattttaggcaaacacttaaccgtgcgaggctatgaattgtttgaaatcactaccgtaccagaaaaactcgctcaagcgaaaaaattcgtgtttgacggcttagcaagcggtcaattaaaaccagaaattgacaaagtttttgcttttgatgaaatggcggaagctcaccgttatatggaaagcaatgcacagattgggaagattttggtaaaggtttga

SEQ ID NO: 31264 - DNA, 444 bp, Pasteurella multocida
ttgcttgcttgtatcgtattcataggcgtaattataacaagaaatttcaatatttcaagtatgattgaaatgttttttaattgtccgaagccacctttccaaatccaaaaacccacttcccatttttcgctattcttaagccatagcatgaaaaatttagagacacggctaaacctacgactattcaaccgtacaacacgcaatgtatcgctaaccgaagcgggacaacagttttttgaacagcttttgccgctttatcaagccataaaccaagaagtcgatgcattaaatgattttttgaatacgccatcgggattgattcgcatcaacgccccggcgatggcagcggaagccgtgttgtatccaaaattaaagccgattttgaaccaatacccgaaaacccgcttggaaatcgtggtggacgatcgttggcagatattgtga

SEQ ID NO: 31265 - DNA, 501 bp, Pasteurella multocida
atggctggagtaaataaagtaattattgtaggaaacttaggtaacgatcctgaaatccgcacaatgccaaatggtgaagccgtagccaatatcagcgtcgcgaccagtgaaagctggatcgacaaaaatactaacgaacgtcgtgaagtcaccgaatggcatcgcatcgtattctaccgtcgccaagctgaagtggctggggaatatctgcgtaaaggttcaaaagtgtatgtagagggacgcctaaaaacccgtaaatggcaagaccaaaatgggcaagatcgctacactaccgaaatccaaggcgacgtgttgcaaatgctcgacagccgtaacgaacgtcaacaaaccggcggctatgccccacaaaccgctgcgccacaatataatgccccaacaggtagctacggtgcacaaccttctcgtccagcgacaaaacccgctccacaaaacgaacctccaatggacatgggctttgaggaagataatattccgttttga

SEQ ID NO: 31266 - DNA, 2832 bp, Pasteurella multocida
atggataagattgaggtacgtggggcgagaacccataatttaaaaaatattaatttaactattcctcgtgataaattaattgtgattacgggattatcgggatcaggtaaatcttctttagcctttgataccctgtatgctgagggacaacgccgttatgtagaatccttgtcggcatatgcacgtcaattcttatccctaatggaaaagccggatgtggatcatattgaaggattatcgccggcgatttctattgaacaaaaatctacctcacataatccgcgttcaacggtgggtacggtcaccgaaattcatgattacttacgtcttctttttgctcgagtaggggaaccgcgttgtccgaatcatgatgtgcctttagcggcacaaaccattagccagatggtggataaagtattgagtttgcctgaagaaagcaaaatgatgttgctggcgccagtggtgaaagaacgtaagggtgaacatgttaaattattagagcaaattgccgcccaaggttatattcgagccagaattgacggtgaaatttgtgatttatctgatgcacctaaattagaattacataaaaaacatactattgaagtggttgtggaccgttttaaggtgcggtctgatttagccacaagattagcagaatcctttgaaacagcattggaattatctggtggcaccgctgtagttgcttccatggatgagcctgaaacggaagaattggtcttttcggctaattttgcttgtccacattgtgggtattctgtcccagaattagaacctcgtttattttcttttaataatcccgccggggcgtgtccgacttgcgatggcttaggtgtacaacaatattttgatgaaaaacgcgtggtgcaaaacccgagtatttcgttagccagtggcgcagtaaaaggctgggatcgtcgtaacttctattactaccaaatgctcacctccttagcgaagcattatgaatttgatattgaatcaccttttgaggcactgccgaaaaaaatccagcagattattttaaatggttcaggtaaggaagaaattgagtttcaatacatgaatgatcgcggcgatgtagtcgtgcgtcatcatgcatttgaaggcattctaaataatatggcgcgccgttataaagaaacggaatcgctgtctgtgcgtgaagaattagcgaaaaatatcagtacctgtccttgccatgattgtgggggttcacgtttacgtcaagaggcacgtcatgtgtatattggcaccaccactttacctgatgtggcagaaaagagtattggcgaaaccttgcatttctttagtgaattgcatttaagcgggcaaagagctcaaattgccgagaaaatcttaaaagaaattaaagagcgcttacaatttttagtcaatgtagggttggattatctttccctttctcgttcagcagaaaccttgtctggtggggaggcacagcgaattcgtttagccagtcaaattggtgcgggtttagtgggggtgatgtatgtgctagatgagccgtctattggtttgcatcaacgtgataatgagcgattactgaatacattgcttcacttacgtaacttagggaacaccgtgattgtggtagaacatgatgaagatgccattatggcggcagatcatattattgatattggtcccggggcaggagttcatggtgggcaaattgtggcagaaggttcggcaaaggcgattatggctaatccacactcaattacggggaaatttttatctggggtcgagaaaatcgaaattcccgcaaaacggaccgcacttgataagaaaaaaatgttgaaattagaaggggcaacggggaataatctgaaatcagtgaatttagccattccagtaggattgtttacctgtgtgacaggtgtttcggggtcagggaaatcgaccttgattaatgatacgttgttcccattagcacaaaatgccttgaatcgtgcggaaaatacgcaatttgcgccttatcaatccatttcgggtttggaattttttgataaagtaattgatattgaccaaagtccaattggtcgtacaccgcgttcgaatcctgccacttatactggcttatttacgccgattcgagaattatttgcgggcgtgcctgagtcgagagcccggggttataatcccggacgttttagttttaatgtacgcggtggacgctgtgaggcctgtcaaggcgatggtgtgattaaagtagagatgcactttttgcccgatgtgtatgtgccttgtgagcaatgtaagggaaaacgttataatcgagagaccttagagatccgttacaaaggtaaaacgattcatcaagtgttagaaatgacggtagaagaagcgcgcgagttttttgatgcgattccgcagatcgcccgtaaattacaaactttaatggatgttggtttatcctatattcgtttaggacaatcttcgaccacgttatcgggtggggaagcgcaacgagtgaaattagcaacggagctttcaaaacgtgatacagggaaaactttgtatgtattagatgaaccgacgacaggtttacattttgctgatattaaacagctattaacagtcttgcatcgtttacgtgatcaaggcaatacgatagtggtgattgagcacaatttagatgtgatcaaaacagccgattggattattgatttaggtcctgaaggggggaatggcggtggacaaattattgccacaggcacaccagaacaggtcgctgaagtgaaaggttcacataccgcacgcttcttaaaaacgcttttacaaaagcgctaa

SEQ ID NO: 31267 - DNA, 1056 bp, Pasteurella multocida
atgttatttaaaaaaattcgaggcttattttcaaatgatctgtccatcgatcttggcacagcgaataccttaatttatgtcaaaggacaagggattgttttagatgaaccctctgttgtggcgattcgccaagaacgttcaggtgcattaaaaagcattgctgcggttggtcgcgatgccaaattaatgttaggccgtacaccgaaaagcattgcagcgattcgtcctatgaaagatggggtgattgcagatttctttgtgacagaaaaaatgttgcaatattttattaaacaagtgcacagcagcaattttatgcgtccaagtccacgtgtcttagtctgtgtacctgcgggagctacacaagtcgaacgacgtgcaatcaaagaatctgccattggtgccggtgcacgcgaggtgtacttgattgaggaaccgatggcggcagcgattggtgctaaattacctgtttcgactgccacaggttcgatggtgattgatatcggtggtggtacgacggaagttgcggtgatttctttaaatggtattgtgtattcctcttcagtccgcatcggtggtgatcgttttgatgaggcgattatttcttatgtacgcaagacgttcggttcaattattggggaaccgacagcagagcgtatcaaacaagagattggtagtgcgtttattcaagaaggcgatgaagtccgtgaaattgaagtgcatggtcataacttagcagaaggtgcgccgcgttctttcaaactcacctcacgtgatgtgttagaagctattcaagccccgttaaatggcattgttgcggcagtgcgcacggccttggaagagtgtcaaccagaacatgctgcggatatttttgaacgtggcatggtcttaactggtggcggtgcccttattcgtaatattgatgttttactgtcaaaagaaaccggtgtaccggttatcatcgccgatgatcctttaacctgtgttgcccgtggtggtggcgaggcattagagatgatcgatatgcacggtggtgatatttttagtgacgatatctaa

SEQ ID NO: 31268 - DNA, 1407 bp, Pasteurella multocida
atgtccaaaaccctatacgaaaaactcttcgacgcacatgtcgtccacgaagccaatggcgaaacgccattgatttacatcaaccgccatttagtgcatgaagtgacctccccacaagcctttgatggtttgcgcgccatgggacgttccgttcgtcaaccgagtaaaaccgttgctaccatggatcacaatgtcccaactgatagtcgtgatctagcaggctcaggcgaaatgggacgagtgcaaatggtagagttagccaaaaatactgaacaatttggcatcacactctacgatattaaccacatcaatcaaggtattgtgcatgtcatgggaccagaacaaggtttaactctaccgggtatgaccattgtctgtggcgactcacataccgctacccatggcgcctttggggcattagcctttgggatcggcacctccgaagttgagcatgtgcttgctactcaaaccattaaacaagcacgcgcgaaaaaaatgaaaattgaagtgcgtggcaaagtacgtgacgggattagcgcgaaagatatcgtgttagccatcatcggtaaaacaaccatgggcggtggcacaggacacgttgtggaattctgtggtgaagcgatccgcgatctttccatggaaggacgcatgaccgtctgcaatatggctatcgagttaggtgcgaaatccggtattattgcgcccgatgaaacgacgtttgcttacttaaaagacaaaccttacgcgccgaaaggcaaagattgggacgaggctgttgcctattggcaaacattgcatagcgatgaaggggctgaatttgataccgttgtcacgctagaagccagtgaaatcgaaccacaagtgacttggggtaccaacccaggacaagtgattggtattaatcagccgatcccaaatccagcggaaatgtcagatccgattgagcgtcaatctgctgaaaaagccttagcctacatggatttaccgcacagcattaaattgaccgatgtcgccattgataaagtctttattggctcttgcacaaactctcgtattgaagatttgcgtgcagcagcagcgatcgccaaaggacgcaaagtggcagacggcgtacaagccttggtcgtaccgggttcaggtttagtgcgagaacaagcagagaaagaaggcttagataaaatctttattgaagccggttttgaatggcgtttaccgggttgttctatgtgtctagccatgaataacgaccgcttagccccaggtgaacgttgcgcctccaccagtaaccgtaactttgaggggcgtcaaggtcgtggtggacgcactcatttagtcagtcctgcgatggccgccgccgctgccgtttacggcaaatttgtcgacatccgtaacttggaattacattaa

SEQ ID NO: 31269 - DNA, 369 bp, Pasteurella multocida
atggataccacaacaatattgattttctttgccgcttttatgtggcttatacagattatccttggctggcaacaagtttccgcatttaatcgcgcgtttatgtcgatcagtcaaaagggcaaaattttaaccggtagaaacagtggacgttttaatccaaagtcaatcattgtactcgcaatagacgataatgaaaccgttattgatagcttacaaatgaaaggattttctgtatttgctcgcccacaaacatgtgaacaagtcattggcttaaaagtagatcaaattcaaccagaacgcatttttccaaaagataaaaaatcgcaatttgctttaaaaattgcaatttcatcgttatatagaaactaa

SEQ ID NO: 31270 - DNA, 780 bp, Pasteurella multocida
atgtcaaaagttgcagtcgttattggtggaggacaaacattaggtgccttcttatccgaagggcttgctgaagcaggataccgtgttgtcgtggctgatcttaatggcgaaaatgcgaagcaagtggctactcgtatcaatacacaacaagggataggacatgcaattgggttgcaagttgatgccgcagatgaaacgagcgtagaaactcttgtgcatgctacagatcaagcttttggaaaaattgatctcttggtttatagcgccggcaccgccaaagcttcaccaatttatgatttcgatttgaaagattttgatttatccgtaaaagtcaatttaacgggttacttcctttgcgcgaagcatttttctcgtttaatgatcagagacggtatcaaaggtcgtattattcaaatcaactcaaaatctggtaaagtcggtagtaaacataattcgggttatagtgccgcaaaatttggtggtgtaggtctaactcaatctcttgcattagatcttgcagattacggcattacagtacattcattaatgttaggtaacttactcaaatcacctatgttccaatctttaattccccaatatgcgaagaaattaggtattcctgaagaagaagtagagcaagtttacattgataaagtgccacttaaacgtggatgtgattatcaagatgtcctaaatgtcttgaaattttatgccagtgaagaagcatcttattgtactggtcagtcaattaatatcactggtggacaagtgatgttctaa

SEQ ID NO: 31271 - DNA, 444 bp, Pasteurella multocida
atgggcttatttgattttgtcagtgatattgggcgtaagcttttttctaaacaagaagacgccgcagaggcactcgctaagcatattaaagaggataatccaggaattgaagacctcaatgtgaaagtagaggatggcgttgccagcattgaagggacggcaaaatcagcaagtgcgctcgagaaggcagtcttaatggcgggaaatgtcgctgggattactaaagtaaaagtggataaagtggtgatcgtcagtggcgaaagcttaagtggtgaagatgagttctatgtgatccaaaaaggcgatactttgtggaaaattgctgagaaaacttatggcaacggcagtaaatatacggcgatcgttgaagcaaataaagaagtgattaaagacgcggataaaattttcccaggtcagaaaattcgtttaccgaaagtgctttaa

SEQ ID NO: 31272 - DNA, 1236 bp, Pasteurella multocida
atggaaaaagacactgaattacattgttctttttgtggtaaagaacagaaacacgtcagcaagttaattgcgggtacatcaggttatatttgtaatgaatgtatcgaattatgtcatgatatgttgttatcggatgccgtagaaacgccagaagtcgaaagtacagaacaacaaaaattacccacaccacatgaaattcgtgcacatttagatgattatgttatcgggcaagattatgcgaagaaagtgttgtctgtcgccgtttataatcactataaacgtttacgttctgataaacagattaccgatgtggaattaggtaaaagtaatattttgcttattggtccaactggaagcgggaaaacgttattagcggaaaccatggcacgtatgttgaatgtgccctttgctatggctgatgccactacgttgactgaagccggttacgtgggggaagacgtggagaatgtactacaaaaattagtgcaaagttgcgactatgatgtagaacgtgcagagcaagggattatttatattgatgagatcgataaaattacccgtaagtctgaaaatccgtcgattactcgcgatgtttctggcgaaggggtacaacaagcgttacttaaattaattgaagggacggttgcctcaattccaccacaaggtggacgcaaacatccacaacaagaaatgttacgtgttgatacctcgaaaattctgtttatttgtggtggtgcatttgccggcttagataaagtgatcgaaaaacgtgtgcatgtgggatcaggtattggttttagtgcagaagtgaaaagtaagcaagataaagccactctgagccaattatttgagcaagtcgaaccagatgatttaatgaaatttggtttaattccagaatttattggtcgtttacctgtggtagcaccactggctgaactcgatgaagaagcgttagttaaaattttaactgaaccaaaaaatgcgctgattaaacaatatcaagcgttatttagtttagaagatgttgccttggaatttagcccagaggcgcttactgcgatggcgaagaaagccttagcgcgtaaaaccggtgcgcgtggtttacgttcgattgtggaagccattttattggatactatgtatgacttgccttcattacagcatcttgaaaaagtgattgtagaagccagcaccattacagacaatcaaccgccaacactcgtgtataaagcataa

SEQ ID NO: 31273 - DNA, 2415 bp, Pasteurella multocida
atgagcgcaaaaaaaacacagcaacagagcattccagtattaccattgcgtgatgtcgtcgtatttccttatatggtgatgccattatttgtagggagaccgaagtcaattcgtagtctcgatgaagcaatggaaactggtaaacagctattattagtgtctcaaaaacaagctgatttagaagaaccaacggtggatgatgtgtatcgcgttggtacggtcgctaatattattcaattattaaaattgcccgatgggacagtaaaagtcctcgtcgaagggcaacaacgtgccactattgagcagttagacgataatggtgagtatttttctgcccaaattcgcttaattgaaacagaatttggtgatgataaagaacttgaagtcgtcaaaaaagcgacccttgcagaatttgaaaaatacgcaaaattaaataagaaagtgcaaccagatgtgcatgcagctcttgaacgtattgaagaatttgatcgtttaagtgataccttagctgcgcatatgcctgtggcagtcaaacacaaacaaaaagtccttgaaattgccaaagtggtcgcccgttttgaatatttgctcggtttaatggaatcagaaacggatttattgcaaattgaaaaacgcattcgtggacgtgtcaaagagcaaatggaaaaaacacagcgcgattattatttaaatgagcaaatcaaagccattcaaaaagagttaggcgaaggggatagtgcggatgaaattgagcaacttcgccaaaaaattgaagaggcgaaaatgcctgcagaggcgaaaagtaaagccgaagcagaattacaaaaattaaaaatgatgtcgccgatgtcggcggaagccacagtcgtacgtagttacattgattggatgattcaagtgccttggcataaacgcaccaaagtgaagaaagatctgaccaaagcacaacaagtgttggatgcagatcattacggacttgagcgcgtaaaagagcgtattttagagtatttagcggtacaaacccgtttgaatcaaatcaaaggacctatcctgtgtctagttggtccaccgggagtgggaaaaacctcgttaggtcagtcgattgcccaagcaacgggacgtaaatatgtgcggatggcattaggtggcgtgcgtgatgaagcggaaattcgtggtcaccgtaaaacctatattggagcattgccgggtaaattgattcagaaaatggcaaaagtaggggtaaaaaacccgttattcttgcttgatgaaatcgacaaaatgagttcagatatgcgtggagatccggcatcagcgttattagaagtgctggatcctgagcaaaatacctcatttaacgatcattatttagaagtcgactacgatctgtctgatgtgatgtttgtggccacctcaaactcaatgcgtattcctgcgccattattggatcgtatggaagtgattcgtctgtcaggttataccgaagatgaaaaactcaatattgctacacgtcatttgattgcaaaacaaatggagcgtaatggcttaaaagcgggtgagttgaccattgaagacagtgcgattttagatattatccgttactacacccgtgaagccggcgtgcgtagccttgaacgtgaaatttcgaaaatctgtcgtaaagcggtgaaaaacttattactcgataaaaaagtgaaatcgttgaaagtgaatgcgacaaatttacacgattatttaggcgtgaaacgctttgaatttgggcgtgcggatacgcaaaaccgtgttggtgaagtcacaggcttagcttggaccgaagtgggtggtgatttactaaccattgaaaccgcgtcagtcttgggtaagggcaaattaacttatacaggctctctaggtgatgtgatgaaagaatcgattcaagcggcgatgactgtagtgcgttcgcgagcagagaaattggggattgcgtctgacttccatgaaaaacgcgatatccatattcatgtgccagagggagcaacgcctaaagatggaccaagtgcggggattgcgatgtgtacagcattagtttcttgcttgacggggaaccctgttaaagcggatgtggcaatgactggtgagatcaccttgcgtggtaaagtgttgccaattggtggcttgaaagagaaattattggcggcacaccgtggtggtattaaaacggtgattattccgaaagaaaacgtgaaagatttggaagagattccagataacgcgaaaagtaatttgacgattcatgctgttgaaacgattgatgaagtcttaacgattgcgttagaaaatgcaccaacgggggttgaattcatgaaattgacaccggttagtgcggcgaaaacggtccgcaaagggcgatctacttcacgtaaaagtgcggtcaattaa

SEQ ID NO: 31274 - DNA, 1125 bp, Pasteurella multocida
atgaaacgttggataaaaaatgtttatttcttatctggtaaagaaatacgtagtttctttagcgattacactttattggtgttagtgattattatgtttacggtgatgatctattccatcgccaaaggcatcacgaccgaagtcaaaaatgctacggtagcaatcttaaatgaagatcgcagtcccctttcttaccgtattcaagatgcgatgctccctccacaattcaagtcagtggttgaaatccaacgtgcagacattgatgcggctatggacagtggtgagtttatcttcgtactcactatccctcctcatttcagtgcagatgtgttagcgcataaacaacctgaactacaattattagtagatgccaccgctatgtcacaagctgcggtaggtgcaggctatttgagtcacatcattcagcaacaactgtcggaatacttaagtcatatccccttggataaaacactgctcgaacctaaactgaatgttttatttaatcccaatttaaaaaccgagtggtatatgccaattacacaaattactggtaactcgaccttactcaccctaattttagtaggcgccgcggtgattcgagaacgagagcatggcaccattgaacacttactggtgatgcctgttagcgcgagtgaaattgttatctcaaaaattttagctaatggcttcattatcctcatcgccgccttcttatctttatattttgtagtgcatcaattcattggggtaccaatcaatggctcaatgacgttattcatcgtcacagaagccattttcctgtcctctatggcagggcttggcatttatttagcgacccatgcccctacgatgccgcagttcagcttattgtgtttacctgtctatgtggtgttatatcttctgtctggcagtttatccccattagaaaatatgcctgtggcagttcagtatctcatgcaactgtcccccttaacccaattcatttcaattggtcaagatgtgctttttcgtggggccggatttactgtgatttggccgaaagtattgatgataagcctaatgggcgcattttttattgtagtggcgattttccgttttagacacatgctcgcgcgtcaaagctaa

SEQ ID NO: 31275 - DNA, 759 bp, Pasteurella multocida
gtggaggctaaaccccaattaaaaggaaatattattatggcacaagtttcaatgcgcgatatgctacaagctggcgttcacttcggtcaccaaactcgttactggaatccaaaaatgaaaccattcatctatggtccacgcaacggtgttcacatcattaacttagaaaaaactgttcctatgttcaatgaagccttagtggaattaacacgtattgcgggtaacaacggtaaaattttattcgttgggacaaaacgtgcagctactgaagcagtgaaagcagcagcattagactgtcaacaatattatgtcaatcaccgttggttaggtggtatgttgactaactggaaaacagttcgtcaatcaattagacgtttaaaagatttagaaactcaatctcaagatggtacgttcgataaattaacgaaaaaagaagcgttaatgcgtacacgtgagatggagaaacttgaattaagtcttggtggtatcaaagagatgggtggcttaccagatgcgttattcgttatcggtgcagaccatgaacacatcgcagtgaaagaagcaaacaatcttggtattccagtgtttgctatcgttgatactaactcagatccagatggtgttgatttcgttatcccaggtaacgatgacgcagcacgtgcaatccaattatatctttcagcagcagccgcggcggttaaagaaggtcgtcaccaagacgctgtcactgaagagaactttgtagcagaagctgagtaa

SEQ ID NO: 31276 - DNA, 849 bp, Pasteurella multocida
atggctgaaatcacagcatcattagtaaaagaacttcgtgagcgtactggcgcaggtatgatggaatgtaaaaaagcgttagttgaagcaaatggtgatatcgaattagcgatcgataacatgcgtaaatcaggtcaagcaaaagcggctaagaaagcaggtcgtgtggcagcagaaggggttatccttgctcgtattggcgctggtttcggtgtgttagtggaaatgaactgtgaaactgacttcgtggcaaaagatgctggcttcttaggtttagcgaacgaagtagcagactatgcattagcgaacaaaggcgtgactatcgaagcacttcaagcacaatttgaagaaaaacgtgcaacgcttgtggcgaaaattggtgaaaacatgaatattcgtcgcgtacaatttttagatggcgatgtcgttggttcatacttacacggcgccaaaattggtgtattagttgcgggtaaaaatgcagacgaagatttattgaaaaaaatcgcgatgcatgttgcagcgagccgtcctgagtttgttaaaccagaagatgtgtcagcagatgttgtagcaaaagagcgtgaaatccaagtggcaatcgcgatggaatcaggtaaaccacgtgaaatcgcagaaaaaatggttgaaggccgtatgaagaaattcactggtgaagtgtcattgacaggtcaaccattcgtaatggatccagctaaatcagtaggcgaattcttaaaagaaagcggtgctgatgtgactaacttcgttcgtttcgaagtgggtgaaggtatcgaaaaagttgaatctgactttgcagcagaagttgcagcgatgcaaaaaatctaa

SEQ ID NO: 31277 - DNA, 729 bp, Pasteurella multocida
atgagccaaccaatttataaacgaattttattaaaactaagcggtgaagcattacaaggtgacgagggatttggtattgacccgtctatcttagacagaatggcgctcgagattaaagaattagtagcaatgggcgtcgaagttggtgttgtactgggtggtggtaatttgttccgtggtgccaaattagcaaaagcagggatgaaccgtgtagttggtgatcacatggggatgctcgcaaccgtcatgaatggtcttgccatgcgcgatgcactacatcgtgctgatgtgaatgccaaactgatgtcagcctttcaattaaatggtatttgtgatacctataactggtctgaagcaataaaaatgttgcgtgaaaaacgcgtagtgattttctctgcggggacaggaagcccattttttacaacggactctgcggcttgtttacgtggaattgaaattgaagcggatgtggtgttaaaagcgacgaaagtcgatggtgtgtataattgcgatcccgcaaaaaatgcagatgcggtgctttatcatcagctgaattatgctgatgttattgagcatgaattgcaagtgatggatttagccgcctttaccttagcacgtgatcatcatatgccaattcgggtctttaatatgggtaagccgggagcattacgtcgagtgattttgggtgaagtcgaagggacactgatttgtgaccaaaagttgtcgtga

SEQ ID NO: 31278 - DNA, 558 bp, Pasteurella multocida
gtgattaatgaaattaaaaaagatacgcaattgcgtatggaaaaaagcttagaaacctttaaaaaccacattgctaaagtgcgtacaggtcgtgctcaaccaagtttacttgatggtattcaagtggaatactatggttcaccaaccccattacgtcagttagccaacgtggttgcagaagatgcgcgtacacttgcggtcactgtgtttgatcgtagcttaattagtgcggtagaaaaagcgattttgacctcagatttagggttaaacccgtcttctgccgggacaacgattcgtgtaccgttaccgccattaacagaagaacgccgtcgtgatttaattaaaattgtgaaaggtgaagctgagcaagggaaaattgctgtacgtaatgtgcgtcgtgatgccaatgatcaaattaaagctttgctgaaagacaaagaaatcagtgaagacgaagagcgtaaagcacaagacgaaatccaaaaaatcacggatactttcgtgaaaaaagtggatgaagtattggcagataaagagaaagaattgctcgatttctaa

SEQ ID NO: 31279 - DNA, 723 bp, Pasteurella multocida
atggtagaacttgatccaaataatatcccacaacatgttgcgattattatggatggaaatgggcgttgggcacagcaaaagggcaaaatgcgcatttttggtcataaaaatggggtgaaagccgtgcgagaggcggtttcttatgcccgaaaagtgggcattaaagttttaacactctatgcgtttagtagtgaaaactggaaccgcccaaaaaaagaagtgaatgcattaatggcgttatttatgcaagcgttagatcttgaagttaaaaagttgcataaaaataatattaaattgaatatattaggggatgtaacggggtttagtgccagcttgcagaataaaattcatcaggccgagaaattaactgaaaacaatacagctttaaccttaaatattgcagcgaactatggcggttgctgggatatcgtgcaagctacaaaatcgctcgcacaacaggttaaagagggcaagttagccgttgatgagattaatgcgcaagtattacagcaagctttggttaccaaagagcagccacaagtcgatttattaattagaacgagtggtgaacaacgaattagtaactttttattatggcaaatcgcgtatgctgagctgtatttttctgatgtactttggccagattttaatgaaaaggaatttaacgaagcaattattgcttatcaacaacgccaccgacgctttggtggtgcagaagaataa

SEQ ID NO: 31280 - DNA, 870 bp, Pasteurella multocida
gtgcttaaagaacgtgttttgtcagcgatcatgttaattgcaatagtatttattgcattgtttttcttttcacccttctattttgcacttgcagtaggtgttgtcgttattctcgctgtttgggagtggacgcaatttgcgcatttcaaatggtctttctggcgtttaggtttaacgggtttatccgcagcctttctatttctttggatttatggtgaaagtgactatttaaatgcgggtcgtgtgtttgaaaatacgctctcacttcttttattctcttctgtgctttggtggtttgtcgccttaggcttagtgataagttatcccaaaggggcgacctattggggaaaaaacaaattattgcaatttgcttttgcttttttaaccttagtgcctttctttgctggcgtgttacgtttacgcttagcacattatgtaacagatccctatcacggtttaattttattactctatgttttcattcttgtttggagcgcggattcgggagcatattttgctgggcgccagttcggcaaaaataaacttgcaccaaaagtttctcccggtaaaagttgggaaggcgtgatcggtggcttagtcacagcaggaattctagccagtatttttattcacttcacgcaagaaagtttgctttctggcatctcaatacctgctttcattgccctttctgttgccactgttgctgtatcaatattaggtgatctcaccgaaagtatgtttaaacgtcaaagtggcattaaagacagtagtcagctcattccgggacatggtggtattttagatcggattgatagtttaacggcggccgttccgttctttgcttatttttactttttcgtgatttcatga

SEQ ID NO: 31281 - DNA, 1029 bp, Pasteurella multocida
atgcaagtttattccctccaagaattagcacaacagatcggcgctaccattcgtggtaacgccgatgttgttgtagaaagtattgcgcctttagataaggcgacagaaaaacagcttacttttatttctaatcctaagttccgttccttactggcacaatctcatgccgggattttggtggtgtcagaagcggatgtggcgttttgtgcagagcaaagtaatttattgattgtaaaagatccgtacgtggcttatgccgttctagcacaatatatggatagcacgccgaaagctgcgagcggtattgccgccagtgcggtggtatcggctagtgctgtgataggcaaaaatgtctcaattggtgccaatgcggtgattgaagacggggtaacgcttggtgatcatgtagtcattggtgctaactgctttgtcggcaaaaatagcaaaattggtgcttatacccagctatgggcaaatgtcagtgtttatcatgaggttgaaatagggcaacattgtttaattcaatctggtgcagtgattggtagtgatggttttggttacgccaatgatcgtgggcgttggattaaaattccacaagttggacaagtcattattggcaatcatgtcgaaattggcgcttgcacttgtattgatcgaggtgcgttagatccaacggtcattgaagataatgtgattattgataatctttgccaaattgcgcataacgtccatattgggaccgggactgcagttgctggtggggtgattatggctggtagcttgaccgtcggacgctattgcttaattggtggtgccagtgtgatcaatggacacatggaaatctgcgataaagtgacgattacaggcatggggatggtgatgcgtccaattactgaacctggcgtgtactcttcgggtatcccattacaaacgaataaagaatggcgtaaaaccgctgcattgacgttaggcattgatgcgatgaataaacggttaaaagccttagaaaagaaattcgagaagaaataa

SEQ ID NO: 31282 - DNA, 459 bp, Pasteurella multocida
gtgacaactgaaactaccacaacaaaaatcattgaagcaaatgaaattatgaaattgcttcctcaccgttatccttttttattagtggatcgtgtggtggattatgaagaaggtaaatggcttaaagctgtaaaaaatattagcgtaaatgagccttgctttacgggacatttcccagaacaaccgatttttccgggtgtgttgattttggaagccatggcacaagcgacgggggtgctcgcctgtaaaacttaccgtcaattagaaaatgaaatttattattttgctgcaattgataatgcgcgctttaaacgtcctgtgttgcctggtgatcaaatggtgttagaagttcacttcttgaaagagcgtcgcggtattacgcgtttcactggtgtggcaaccgtagatggtcaagtggtgtgcgaagcagaattaatgtgtgctcgtcgtcccgcataa

SEQ ID NO: 31283 - DNA, 1179 bp, Pasteurella multocida
atgaaagaaatacataaacagccgccgacgattgccattgttgccggcgaagtgtcgggtgatattttgggtgctgggcttatccgtagtttgaaagttcagtatcctcatgcacgctttattgggatcgcggggcctcgaatgttggcagaaggcgcggaaaccttagtagatatggaagagctttcagtcatgggattagccgaagtggtgaaacacttaccccgtttattgaaaatccgtcgtcaattaattcacaccatgttgcaagaaaagccagatattttcattggtattgatgcgccggattttaatatcgatgttgaattgaagttaaaagaaaatggcatcaaaactatacattatgtcagcccttccgtttgggcttggcgtcagaatcgtattcataaaattgccaaagcgacgcatctcgttttagcttttttaccttttgaaaaagcattttatgatcgttttgaggtgccttgccgttttatcggtcatacgatggcagatgcgatcgcattaaaaccaaatcgtcaggaagcttgtgaatatttaaatcttgatgcaagccagcgttatgtggcgatacttgttggaagtcgtggttcagaagttacctttttagcggaaccttttttgcaagcggctaaattgttaaaacaacaatatcccgatattcaattcttggttccactgattaatgctaagcgtcgtgaacaatttgaacaaattaaagcgcaagtcgcgccagaattagagctgatcttgttagacggaaaggctcgccaagccatgatagccgcagaagcaactttattagcgtcagggacggcagcgctagaagccatgttatgtaaatcgccgatggtagtgggttatcgtatgaaagcaaccacttacttcttagcaaagcgcttagtgaaaacagagtatgtttccttaccgaatttattggcgaatgaaatgttggtgccagagcttatccaagagcaatgtacagcagaaaatcttgctgaaaaactggcgctttatttaagccaagaagaaagcgcgttacaacaacgtcatacattaattcaacgctttacggatttacacaagttgatccaatgtgatgcagataaacaagcggcacaagctgtgattgcattactcgaacaagaggataaataa

SEQ ID NO: 31284 - DNA, 594 bp, Pasteurella multocida
atggtatttgaatatcccaaaggggttgaactcattgcaggtgtggatgaagtcgggcgcggacctttagtgggcgcggttgtgacggcagcggtgattttagatcctcatcaacctattttaggtctcaatgactcgaaaaaactgtctgaaaaaaaacgccttttgttagccgaagaaattaagcaaaaagccttagcttggagtttggggcgtgcagaagcagaggaaattgatcaattaaatattttgcatgccaccatgttagcgatgaaaagagcggtcgaaaatttgaaaattcaaccgcactttgtgttagtggatggcaatcgtgtgccagagcttatgatcccagcacaagcgattgtgaaaggtgatggactggtggcagaaatcagcgctgcttccattttggcgaaagtcgcacgcgatcaagaaatggctgagttagataaacgctatccggaatatgcctttgcgcaacataaaggttacccaacggcgttgcatttagccaaattagccgagttgggacctttagcccaacatagacgtagttttgcgcctgtgcgaaaattactcaatactttataa

SEQ ID NO: 31285 - DNA, 630 bp, Pasteurella multocida
atgctcgccaaactgattgattttcttttatgtcgttttacttcctttattacgggtgttcgcccacaaaaaaacgttacgcaacaatctacaggaaaaaatcgactgtattatgccaatcataatagtcacggggattttatattactttgggtgtctttaccctatgaagtacgccaaaatacacgccctgtcgcgggtgcagattattggctaaaaggcaaagtccgccgttttttagcgaaaaaggtctttaatatgctcttgattgaacgtggtagtgatgatcctaaggtggcaactaatcaaattagcgacgcactaaaagacagttcattaattattttcccagaaggcacgcgtaaaactgatgatgatcttgccttacaaccttttaaaagtgggttatttcatttagcaaaacaaaacccaacgctagaattggtccctgtttggattagtaatatgcataatgtgttaccgaaagggtttattttaccgattccactactttgtgatctgtatttaggtgaaccgttaagttaccaacaaggggaagaaaaagccgattttcttgctcgtgcgcaaaacgccttattacgtttaaatccaaaatatcaaggagaataa

SEQ ID NO: 31286 - DNA, 579 bp, Pasteurella multocida
atgaccgcagttttaaaaattggtttagtttcagtctctgatcgtgcttcacaaggcgtgtatgctgatcaagggattcctgaattacaagcttggttagaaaaggcattatgtgagccctttgagatagaaactcgcttaattcctgatgagcaagatcgtatcgaacaaaccttatgtgaactcgttgatgattaccattgccacttggtgttaaccacaggcggaactggaccggcaaaacgcgatgtcacacctgatgcgactctcgcggtggcagatcgtgaaatgccgggatttggtgaacaaatgcgccaagtcagtttgcatttcgtcccaacggcgattttatcgcgtcaagtaggcgtcattcgcaaaaacagtttaatcctcaatctgccggggcaacctaaagcgattaaagaaacgctagaaggggtgaaagatgaaaacggtcaggttattgtgaaagggatttttagtgcggtgccctattgtttacaactgatcaacgggatttatattgatactcatcccgacgtgattgaaagttttcgccctaaatccgcccgtcgttag

SEQ ID NO: 31287 - DNA, 957 bp, Pasteurella multocida
atgaatactgcgacaaataatattgaggaaaaagtactcactctcggcgaacaattccgccaagcacgcgaggcgcttaacctttccattgaagatgtttctaaaaaaatctctcttagaccctctattttacaattgattgaaacgaatcaattggctcaaaagtcaattccagccacttttatgagaggttatgttcgcagttacgctaaatttctcaaattacctgaatccgtatgggtacatgcaagttttggtgaagatcataagaatgatctaggtaaaaatgcacgtgcaaccagagcggttaaccattattcctcgcataaccactggattggttggttaagtttacttgttgttctcattgtggcggggatgacgggtctgtggtggtgggaaaactatactcagtctaatgccgagcgcgagagtttagtgcaacattacgttgacacaacaccgcaaagtagcgtcgtacaaagcacaccaatagcgagttctactgcattgacggatactacacaaaatgcgacagtgctcagtgcctcaagtgtagtgataccgacgacacaaaccacctcttccactgatcttcctgtgacgatcagcccagtaagtgaccagccgatcacgtctgcagatgtgttaaaagcggaaatggaaaaattagatgaaaaaagcgagaaaaatcttctttcacatgagacggtggtgaccccttctcatgaattgcacattgaagtcactggtggttgttggattagtgtgcaaaatgagagtggaaagattcttgcacaaaaagaatacaaacaaggtgatgtgttgacgtttaatgaaggtgtgacttattcactgattataggtgcgccagcaaatgttaagatcacatataaaggcgaagactatccgctaaaagtagatggtcgtgtcgctcgatttaaattaccacagtaa

SEQ ID NO: 31288 - DNA, 1104 bp, Pasteurella multocida
atgttagccaaaccaacgattaagcgtagagaatcaaccaaaatctatgtggggaacgtgccgattggtggggatgcacctattgcagtgcaatccatgaccaatactagaacaactgatgtagaagccactgtggcgcaaattaaagcgctggaacgtgttggtgcggatattgttcgtgtttcagtcccgacaatggatgcagctgaggcatttaagctcatcaagcagcaagtgaatgtgcctttagtagcggatattcattttgattatcgtattgcgttaaaagtggcggagtacggagtggactgcttgcgaattaacccgggtaatattggtcgtgaagatcgtatccgtgcagttgtcgattgcgccagagataacaatattccgatccgtatcggggtgaatgcgggatctttggaaaaagatctgcaagaaaaatacggtgaaccgacgcccgaagcgttattggaatcggcgttacgtcatgtggaaattctagatcgccttaatttcgaccagtttaaggtcagtgtgaaggcatctgatgtgtttttagcggtcgaatcctatcgtttattggcgaaagccatcaaacaacccttgcatttaggcatcaccgaagccggcggttttcgtgctggggcagtaaaaagtgcggtggggttgggcatgcttttagcggaaggcattggcgatacattacgcatttcgcttgcggccgatcctgttgaagaaatcaaagtgggctttgatattctcaaatcattacggatccgctctcgtggtattaactttattgcttgcccaacttgttcacgtcaagagtttgatgtgattggcacggttaacgcccttgagcaacgcttagaagatattattacaccaatggatgtgtcgattatcggctgtgtcgttaacggaccgggtgaagcactcgtctctgatttaggtgtcacgggtggtaataagaaaagcggttattatttagatggggaacgccaaaaagagcgctttgataatgatgatctaatcaatcaattagaagccaaaatccgtgccaaagtggcggcgcaagatcccaaaaatcgaattatttaa

SEQ ID NO: 31289 - DNA, 1272 bp, Pasteurella multocida
gtggcaaaaacaattcaagcaattcgtggtatgaatgattgttccccaacggaaagcccattatggcaatgggtcgaaggaaaagtgcggtcagttttacaaaattatggttattctgaagtgcgtatgccaattgtcgaaagtacgccattatttgctcgtgcgatcggtgaagtaaccgatgtagtatccaaagaaatgtacactttttgggataacgatgagcaattaactttgcgtccagaagggacagcaggttgtgtacgtgcagcgattgaacacggttggatttataaccaagaacaacgtttatggtatatgggaccgatgttccgtcacgaacgtccacaaaaaggacgctatcgccagttccaccaagcaggtgttgaagtgttcggtattcctaatccggaaattgatgctgagttaattatgcttacggcacgtttatggaaagaattaggcattgctgagcatgtcaccttgcaactgaattcaattggttcattagaggcgcgtaagaactatcgttctgctttagtcgcttttttacagcaacatgttgatttattaagtgaagaagaaaaagaacgtttagagaaaaatccactgcgtattttggatacaaaaaatcaagcgttacaagaagtgctaaatgatgcgccaaaactgttagcgtatttagatgacgatagccgtgaacactttgcccaactttgtgctttactggatgcggtggggattcaatatgaagtgaatccaaaactggtgcgcggtttagattattacaacaaaactgtttttgagtgggtgacttctgcgttaggagcacagggcactgtttgtggtggtggtcgctacgacggtcttgttgagcaattaggtggtcatgcgacgacaggtgtgggctttgcgatggggctagaacgcttagtgttattggtgcaagaagtgaatcaaagtatccgcttgccaagtgcggttgatatttacgtggtttaccaaggcgaagggacaacattagcggcatttcagttagctgaaactctccgtactgaattgccacaattacgtgtgatgacccactgcagtggtggtaacttcaaaaaacaatttaaacgcgcagataaaagtggtgcgacattggcgttagtgattggtgaaagtgaagtgcaaaatcaacaagttgtggttaaacacttacttggtggagccgagcaacaaacacttgcattagatgatattgttgattacattaagaacaatttttaa

SEQ ID NO: 31290 - DNA, 1392 bp, Pseudomonas putida
atgagcaccgagaagaccaatcagtcctggggcggccgcttcagtgagcccgtcgacgccttcgtcgcccgtttcaccgcctcggtagatttcgacaagcgcctgtaccgtcacgacatcatgggttcgattgcccatgccaccatgctggcgcaggtcggcgtgctcagtgatgccgagcgcgacaccatcatcgatggcctgaaaaccatccagggcgagattgaagccggcaacttcgactggcgtgtcgacctcgaagacgtgcacatgaacatcgaagcacgcctgaccgaccgcatcggcatcaccggcaagaagctgcatactgggcgtagccgcaacgaccaggtggccaccgacatccgcctttggctgcgcgacgaaatcgacctgatcctgggcgaaatcacccgcctgcagcagggcctgctggagcaggcagagcgtgaagccgaaaccatcatgcctggtttcacccacctgcagacggcgcagccggtcacctttggccaccacctgctggcgtggttcgaaatgctcagccgcgactatgagcgcctggtcgactgccgcaagcgcaccaaccgcatgccactgggcagcgccgcgctggccggcaccacctacccgatcgaccgtgaactgacctgcaagctgctgggctttgaagccgtggccggcaactcgctggatggcgtgtcggaccgtgatttcgccatcgaattctgcgccgctgccagcgtggcgatgatgcacctttcgcgcttctccgaagagctggtgctgtggaccagcgcgcagttccagttcatcgaccttccggaccgcttctgcactggcagctcgatcatgccgcagaaaaagaacccggacgtgccagagctggtacgtggcaagagcggccgcgtgttcggcgccctgaccggcctgctgaccctgatgaaaggccaaccgctggcctacaacaaggacaaccaggaagacaaggaaccgctgttcgacgccgccgataccctgcgcgactcgctgcgggccttcgctgacatgatcccggcgatcaagcccaagcacgccatcatgcgtgaagcggccctgcgcggtttctccaccgctaccgacctggctgactatctggttcgccgtggcctgccgttccgtgactgccacgagatcgttggccacgcggtgaagtatggtgtggacactggcaaggacctggccgagatgagcctggacgaactgcgccaattcagcgaccagatcgagcaggacgtgtttgccgtgctgacgctggaaggctcggtgaatgcgcgtgaccacattggtggtacggcgccggcgcaggtgcgtgctgccgtcgttcgtggcaaggccctgttggcgtctcgc

SEQ ID NO: 31291 - DNA, 891 bp, Pseudomonas putida
atggctaaaatcggtttcatcggcaccggcatcatgggcaagcccatggctcagaacctgcaaaaggcaggtcacagcctgttcatttccacccaccacgacgccgcgccagccgacctgatcgctgccggtgccgtggccctggccaacccgaaagaggttgcccaggaagccgaattcatcatcgtcatggtccccgacaccccgcaggtcgaaagcgtcctgttcggtgaaaacggcgtggccgagggcgttggcccgaacaaggtggtgatcgacatgagctcgatctcgccaaccgccaccaaagccttcgccgagaagatcaaggctaccggtgccgcctacctggacgccccggtgtccggtggtgaagtcggcgccaaggcggcgaccctgagcatcatggttggtggctgcccgaacgccttcgagcgcaccctgccgctgttcgaagccatgggcaagaacatcacccgcgtcggtggcaacggtgacggccagaccgccaaggtcgccaaccagatcattgtcgccctgaacatccaggccgtggccgaagccctgctgttcgccgccaagaacggcgccgaccctgccaaggtgcgcgaagcactgatgggcggctttgcttcgtcgaaaatcctcgaagtgcacgccgagcgcatgatcaagggcaccttcgacccaggcttccgcatcaacctgcaccagaaggacctgaacctggccctgcaaggcgccaaggaactgggcatcaacctgcccaacacctccaatgcccagcaagtgttcaacacctgccaggccctgggcggcggcaactgggaccactcggcgctgatcaaaggcctggagcacatggccaacttctcgatccgcgacgacaaa

SEQ ID NO: 31292 - DNA, 1023 bp, Pseudomonas putida
atgactgaacagcaacctgttgcggttctgggcggcggcagcttcggcaccgccgtggcaaacctgctggcggaaaacggtgtgccggtgcgccaatggatgcgcgacccggcgcaggccgaggccatgcgtgtgaatcgcgagaatccgcgctatctcaagggtatccgcctgcacgatggggttgagccggtcaacgacttgctggccaccctgcaggccagcgagctgatcttcgttgccctgccatcgagtgccttgcgcagcgtgctggcaccgcatgccgagctgctgcgcggcaagggcctggtcagcctgaccaagggcatcgaagcgcaaagcttcaagctgatgagccagatcctcgaagagatcgcccccgaggcgcgcatcggcgttttgtcggggcccaacctggcgcgcgaaatcgccgaacatgcgctgactgccacagtggtggccagtgagcacgaagacctgtgccagcaggtacaggccgtactgcacgggcgcaccttccgcgtctacgccagtgccgaccgtttcggcgtcgaactgggcggtgcactgaagaacgtctacgcgatcatcgccggcatggcggtggccttggggatgggcgagaacaccaagagcatgctgattacccgggccttggccgagatgacccgtttcgccgtcagccagggcgccaaccccatgacgttcctcggcctggccggtgtcggtgacctgatcgtcacctgctcctcgcccaagagccgcaactatcaggttggctacgcactggggcagggccaaagcctggaagaggcggtcaaccgcctgggcgaagtggccgagggggtcaacacgctcaaggtgctcaagaccaaggcccagcaagtgcaggtgtacatgccgctggtggctggcctgcatgccatcctgttcgaagggcgcacgctgaaccaggtgatcgagcacctgatgcgcgccgagcccaagaccgatgtcgatttcatttccatcagcggtttcaac

SEQ ID NO: 31293 - DNA, 591 bp, Pseudomonas putida
atgcgttacccctggtttcgcttggccatcttcatcgtaggctgcctgttcccggtgtggtggctatatgaagcggcgatgaacctgctggggcctgatcccgggaagatcatgatggatcgccttgggcttggggcgcttaccttcttgttggtgaccttgagcatgaccccactgcagaagctgacgggctggtctggctggatcgtggttcgccggcagctggggttgtgggtgttcgcttatatagtgctgcacatcctctgttacctgttctttattcttgggctggattgggggcagttggcggtggagctgcgcaagcggccgtacattatcgtgggggcgctggggttcctgggtttgctggtgctggcggtcacctcgaaccggtacagccaacggcggcttggggcgcggtggaagaagctgcacaggttggtgtatgcggtgcttgggttgggcttgttgcatttcctgtggatcgtgcgctcggaccttcgtgagtgggcgatctatgcgtttattggggctgtgttgatggtattgcggatacctgctgttgcgcgggcgcttcccaaggttgccagg

SEQ ID NO: 31294 - DNA, 1014 bp, Pseudomonas putida
atgaaagttttctacgataaagactgcgacctttccatcatccagggtaagaaagtcgccatcatcggttacggctcccagggccacgctcaggcgtgcaacctgaaagactccggtgtagacgttaccgtcggtctgcgtaaaggttcggctaccgttgccaaggctgaagcccacggcctgaaagttgccgacgttgctaccgctgtcgctgcggctgacctggtcatgatcctgaccccggacgagttccagggcgctctgtacaagaacgaaatcgagccgaacatcaagaagggcgctaccctggccttctctcacggcttctcgatccactacaaccaggttgttccgcgtgccgacctcgacgtgatcatgatcgcgccgaaagccccgggccacaccgttcgctccgagttcgtcaaaggcggcggcatccctgacctgatcgctatctaccaggacgcttccggcaacgccaagaacgtcgcactgtcctatgcttcgggcgtaggtggtggccgtaccggtatcatcgaaaccaccttcaaggacgaaaccgaaaccgacctgttcggtgagcaggctgttctgtgtggcggtaccgtcgagctggtcaaagccggtttcgaaaccctggtcgaagctggctacgcgccggaaatggcctacttcgagtgcctgcacgagctgaagctgatcgtagacctcatgtacgaaggcggcatcgccaacatgaactactcgatctccaacaacgccgaatacggtgagtacgtcactggcccggaagtcatcaacgaagaatcccgcaaggccatgcgcaatgctctgaagcgcatccaggacggcgagtacgcgaagatgttcatctccgaaggtgctaccaactacccatcgatgaccgccaagcgccgcaacaacgccgctcacggcatcgagatcatcggcgagcagctgcgctcgatgatgccgtggatctcggctaacaaaatcgtcgacaagaccaagaac

SEQ ID NO: 31295 - DNA, 489 bp, Pseudomonas putida
atgcggcacatcatttccctgctgctggaaaacgaaccaggtgcgttgtcccgcgtggtcggcctgttctcccagcgcaactacaacattgaaagcctgactgtagcgccaaccgaagacccgaccctgtcgcgtctgacgctgaccaccgttggccatgacgaagtgatcgaacagatcaccaagaacctgaacaagctggtcgaagtggtcaagcttgtcgacctgtcggaaagcgctcacatcgagcgtgaactgatgttggtcaaggtcaaggccaccggtgcccagcgtgccgagatcaagcgcaccacggatatcttccgtggccagatcgtcgacgtgaccgccagcgtgtacaccgtgcagctgagcggtaccagcgacaaactggacagcttcatccaggcgatcggcactgcatcgattctggaaaccgtgcgcagcggcgttaccggcattgcccgtggcgacaaagtgctcagcatc

SEQ ID NO: 31296 - DNA, 1923 bp, Pseudomonas putida
atgggtaaaatcatcggtatcgacctggggaccaccaactcgtgcgtctccattctggaaaacggtaacgtcaaagtcatcgaaaacgccgaaggtgcgcgtactaccccttcgatcgtggcctacgccaacgatggcgaaatcctggtcggccagtcggccaagcgccaggcagtcaccaacccgcacaacaccctgttcgcagtgaagcgcctgattggccgccgcttcgaagaagatgtcgtgcagaaagacatcaagctggtgccgtacaagatcgtcaaggcgaacaacggtgacgcctgggtcgaggctgctggcaaggaaatggctccgccgcagatcagtgccgaagtcctgaagaaaatgaagaagaccgccgaagactacctcggcgagccagtcaccgaagcggtcatcaccgttccggcctacttcaacgacagccagcgtcaggcgaccaaagacgccggccgcatcgctggcctggacgtaaaacgcatcatcaacgagccgactgccgctgcactggcttacggcatggacaaggccaagggcgaccacaccgtcatcgtttatgacctgggtggtggtaccttcgacgtttcggtcatcgaaatcgccgaagtcgacggtgagcaccagttcgaagtactggctaccaacggcgacaccttcctgggtggcgaagacttcgacatgcgcctgatcgactaccttgtcgacgagttcaagaaagagtcgggcatggacctgaagaacgatcctctggccctgcagcgtctgaaagaagccgcagaaaaagccaagatcgagctgtcgtccgctcagtcgaccgacgtcaacctgccgtacatcactgcagatgccaccggtcctaagcacctgaacgtgaagatctcccgcgccaagctggagtcgctggtcgaagacctggtcaagcgtaccatcgagccttgccgcatcgccctgaaagacgccggcatcgacgccagcaagatcgacgacgtgatcctggtcggtggtcagacccgcatgccgctggtgcagaaagaagtggccgacttcttcggtaaagaagcgcgcaaggacgtcaacccggacgaagccgttgccatgggtgctgccatccagggtgcggtactggccggtgacgtgaaagacgtcctgctgctggacgtcagcccgctgaccctgggtatcgaaaccatgggcggcgtgatgaccgcgctgatcgagaagaacaccaccatcccgaccaagaagtcgcaggtgttctcgactgccgacgacaaccagagcgccgtgaccattcacgtgctgcaaggtgagcgtaagcaggctgcgcagaacaagtcgctgggcaagttcgacctggctgacattccgccagcaccgcgcggcgtgccgcaaatcgaagtgaccttcgacatcgacgccaacggcatcctgcacgtaggtgcgaaagacaaggccaccggcaagactcagtcgatcgtgatcaaggccaactccggcctgtcggacgaagagatcgagcgtatggtgcgtgacgccgaggccaacgccgaggaagaccgcaagttcgaagagctggctgctgcccgtaaccagggtgacgcgctggtacactcgacccgcaagatggtcgctgacgcaggtgacaaggttaccgctgaagagaaaaccgccatcgaggccgccgttgttgccctggaagccgctgtcaaaggcgacgacaaggctgccatcgacgccaaggttgaagagctgtccaaggtctctgccccggttgcccagaagatgtacgccgagcagtcggctgaacagcctcagggtggcgcgcagcaggccgagccggaagccaagcacgatgacgtggttgacgccgagttcgaagaagtgaaagacaacaacaagcag

SEQ ID NO: 31297 - DNA, 765 bp, Pseudomonas putida
atggtttttgatcaggtacgccaacggcgcctgtccgacgacattgtcgatcggctggaagggatgattctggaaggcacgctgacctcggggcagcggctgccggccgagcgcgtcctggccgagcagtttggtgtgtcccgcccgtcactgcgtgaggcgatccagaagctggtggccaaggggctgctggtcagccgtcagggcgggggcaattttgtggcggagtcgttggggtccaccttcagcgacccgttgctgcagctgctcgagcacagtgccgaagcgcagcgtgacctgctcgagttccgccataccctggaggcgtcctgcgcctattacgctgcccagcgtgccaccgagccggaccgggcacggttgaaggcggccttcgatgcgctgcaggactgctatgccagggtcgatgaggtgacccgtgcggaagagggcgcggctgatgcgcgcttccacctggcgatcgccgaggccagtcataacgcggtgttgctgcacaccatccgggggctgttcgacctgctcaagcgcaacgtggtgaccaacatcggcggcatgtaccagcagcgcaccgaaacccgggacatgctgatcagccagcaccgggaactgtacctggcgattgtcgagggcagggcggaggatgcgcgggaggtgtccagccggcacattttgtatgtgcaggaggtgctgcatgaggcgcacgaagaagcccagcgggtggcgcgggcagagcggcgcagcgggcgc

SEQ ID NO: 31298 - DNA, 1728 bp, Pseudomonas putida
atgacggcgctactcatcgacaacctgccgctgctggccggtgcacccaatggcatcagaaagttgcgcgagctgattctggaactggcggtgcgcggtaagttggtaccgcaagagcctaatgatgagccggccagtgagttgctagcgcgaattgccttagagagtgcacagctagtggcggggggtaaggcaaagaaaggaaatgttaaagctggcgtagtagcgcaaggtctagacagcgctgaactacccacaacttggatatggacatcgttcgatgatctaataaatccagaatacccaatcgcttatggggtccttgtaccggggcctgatgtagcagatggagttccttttgttcgaattgctgatcttgatttggtggcaccgccacataagcccgaaaagtcaataagcccagaagttgaccgccaatatgaacggactcgcattcgcggcggcgaaattcttatgggggtagttggcagcatcgggaaactgggtattgctcctgaaagctgggccggcgccaacattgccagagctatttgccgtgtagtccccagtgtgcatgtctcgaaggactacataatttggttgctacaaagtgaccttatgcgaaagcagttcttgggagatactcgaaccctcgcccagccaacattaaatgttggcctgattcgtagtgccgcggcacctctgcctcccctcgccgaacaacaccgcatcgttgccaaagtcgaagaactaatggccctatgcgaccgcttggaagcccagcaggccgacgccgagtccgcccacgtccaactggtgcaggcgatgctcgacagcctgacccaagccatcgacgccgccgacttcgcgaccagttggcagcgcctagccgagcactttcacaccctgttcacaaacgagtttgccatcgacgccctcaagaaaaccctcttgcaacttgccgtgatgggaaagcttgtcccgcaagacgttactgacgaatccgccagcgaactgttaaaacgcatcgagggagaaaaacagcggttggtgaacgaaggattgatgaaaaaacaaaagccattggtggaaagtacaagcgggcaaatcaaacccgcactgccttcttcgtggaaatgggtacctcttttagacataacaacgggtatggattctggatggagccctgcatgtcttggtaatagttcgccttctgatgatgtgtggggggtcctcaaaacaacagcagttcaggtaatgagctatctacaacacgaaaataaagagctacctagccaccttgaacctcgccctgaggcagagactaaggtcggtgatatactattcactcgggctggccctatgaaccgcgtgggaatttcttgcctcgttgaaagtacgcgcccgaaattaatgatttccgacaagatcatcaggtttcatcctgttgagctgggtgtttatggaaggtttgtcgctctttgcttgaacgctggagaaactgccaaatatctcgaacaggccaagtccggcatggctgcaagtcaggtcaatatctcgcaagaaaagctgagattggctccgatcccgttagcaccgctccgcgagcaacaccgcattgtcacaaaggtcgatcagcttatgaaactatgcgatacgctaaagcaacagataaatgtagctcgcagcaagcaaacagagctattagatacccttatggctcaggtg

SEQ ID NO: 31299 - DNA, 3522 bp, Pseudomonas putida
atgtcggttcccttcgttcacctgcgcgtccactccgaattctcgctggtcgacggcctggtgcggatcaaaccgctggccaaggcgctgaccgggatgaacatgccggcggtcgcgatcaccgatcagagcaacatgtgctcgctggtgaagttctacaagactgccatgggcgccggcatcaaaccgatctgcggtgccgacctgtggctggccggtgccgacccggaagccccgctgtcgcgcatctgcttcctggccatggaccccaagggctatcgcaacctcaccgaactgatctcgcgcggctggaccgatggccagcgcaatggcctggtcatcctccagcgtgaatggatcgccccggccagcgagggcctgattgccctgtccgcgggcaaggaaggcgacattggcatggcgctgctggcggggcggcaagacgaagccgaagcgcttcttcaagactggatgggcatgttccccgagcgcttctacgttgaagtgcagcgcaccaatcgggcacgcgacgaagaatacgtgcacgcggcggtggcattggccgacaagcttggcgccccgctggtggctaccaacgacgtacgtttcatcaagcaggcggacttcgacgcccacgagacccgcgtatgcattggcgagggatggacccttgacgacccgcgccgtccgcgttgctacagcgaccagcagtacctgaagtcggccgaggaaatggccgagctcttcagcgacctgcccgacgccatcgccaacaccgtcgagattgccaagcgctgcaacatccaggtgcaactgggcaagtacttcctgcctgacttccccacgcccaacggcatgggcatcgacgactacctgcggcatgtggcccacgaaggcctggaagagcgcctggccgtgctgtggccgaaagagaccacgcccaattatgaagaaaagcgtcaggtttacctggaccgcctgaagttcgagctggacatcatcatccagatgggcttccccggttacttcctgattgttatggacttcatcaaatgggccaagaacaacgacgtaccggtgggcccgggtcgtggttcgggtgccggctcgctggtggcctatgtcctgaagatcaccgatctcgacccgctggcctacgacctgctgttcgagcgcttcctcaaccctgaacgtgtttccatgcccgacttcgacgtcgacttctgcatggacggccgtgaccgggtgatcgactacgtggctgaggcctacggccgtaacgcggtgagccagatcatcaccttcggtaccatggccgccaaggcggtggtgcgtgacgtggcgcgggtgcaaggcaaatcctatggcctggccgaccgcctgtcgaagatgatccccttcgaagtgggcatgaccctggagaaggcctacgagcaggaagaaatcctgcgtgacttcctcaagggcgacgaagacgcccgtgaaatctgggacatggccctgaagctggagggtgtgacccggggtaccggcaagcacgccggtggtgtggttatcgcaccgaccaagctcaccgacttttcgccgatcgcctgtgatgaagagggtggtggcctggtaacccagttcgacaaggatgacgtcgaggccgccggcctggtgaagttcgacttcctcggcctgcgtaccttgaccatcatcaagtgggcgatggagatcatcaaccgcgagcaggccaagaagaacctgcccgacctcaacatcgacttcatcccgctggacgaccgcaagacctacgagctgctgcagaaggccgaaaccacggcggtgttccagcttgaatcgcgcggcatgaaggagctgatcaagaagctcaagcccgactgcctggaagacctgatcgcactggttgcgttgttccgcccgggcccgctgcaatcgggcatggtggacgacttcatcaaccgcaagcacggccgcgccgagctggcctacccgcactccgactaccagtacgaaggcctcaagccggtactggcgccaacctacggcatcatcctgtaccaggaacaggtgatgcagatcgcccaggtgatggcaggttataccctgggtggcgccgacatgctgcgccgggccatgggtaagaaaaagcccgaggaaatggccaagcagcgcggtggtttcatcgaaggttgcgtggccaacaatattgatgcggacctcgccggtaacatcttcgacctggtagagaagttcgcgggctacggcttcaacaaatcccactccgccgcctatggcctggtgtcgtaccagaccgcctggctgaaaacccactacccggcgccattcatggccgcggtcctgtcggcggatatgcataacaccgacaaggtggtggtgctggtggaggaggtgcgcagcatgaagctgcgcctcgacgcgccggacgtgaacttctcggacttcaagttcaccgtcaacaacgacggccgtatcgtctacggccttggtgccatcaagggtgtcggcgaaggcccggtggaggcgattgtcgaggctcgtgcccaaggcggtcccttcaaggacctgttcgatttctgtgaacgcatcgacctcaaacgggtcaacaagcgtacccttgatgcgctggtgcgcagtggcgcgctggaccgccttggcccgcacttccatgacgagatcaaggcctaccacgccaacatcgacatcaaccgggcaaccttgctgtcggcgctgggcgaggccatcaaggcagccgagcaggctgcgcataccgctgacagtggccatgtcgacctgttcggcagcatgttcgacgcggcagatgtcgacgtctatgccaaccatcgcaaggtgcgcgagctcaccctcaaggagcgtctgaagggggagaaggacacccttggcctgtacctcaccggccacccgatcgacgagtacgagaccgagatccgccgcttcgcacgccagcgcatcgtcgatctcaagccgtcgcgcgaaacccagaccatcgcgggcatgatcattgccctgcgggtgatgaagaacaagaagggcgacaagatgggcttcgtcaccctggatgaccgttccgggcggatcgaggcatcgctgtttgccgatgccttcatggcggcacagtccttgctgcagaccgatgcgatggtggtggtggaaggcgaggtcagcaatgacgacttctccgggggcttgcgcctgcgggtgaagcaggtgatgaccatggaagacgcgcgcaccaagctggccgagagcctgcgcctgaaggtggcgcacgacgcactgaagggcgaccggctgaagtggctgggcgagctgatcacccgccatcgcggtgcctgcccgatcacgctggagtacaccggcagtgacgccaaggccatgctgcagtttggcgagcagtgggcgatcgacccggccgatgggctgattcaggcgctgcgtgaccagttcgggcgtgagaacgtcttcctgcaatatcgt

SEQ ID NO: 31300 - DNA, 939 bp, Pseudomonas putida
atgcgtgttgcatgcctcatcctgttcctggtgttgtgcgcggcctcactggctgtcggcgttcgtgagctggcctggtctcagttgcttaccctgcaaggcgacgcctggctgaccctgaccgcaagccgcctgccacggctggccgccttgatactggtgggtgtcgggctggcggtatgcggtgtgatcctgcagcagatcgtgcgcaaccgtttcgttgaacccggcaccaccggcgggctcgatgccgcgcgcctgggcatcctgctgtcgctgggcctggcgcccgcggccggggcactgctgcgcatgctgttcgcactggccgtgtgctttgccgccagcctgctgtttgtcgccctcatccgccgcatacgcgcccgcaacgcggtgctggtgccggtcatcggcctgatgtacggcggcgtgctgagtgcgctggccgagttctacgcctaccgcttcaacctgctgcaaagcatgcagggctggttactgggtgatttttccaaggtggtgcagggccgctacgaaattctctacctgattgtaccgatcgtgttgctcacctacctgtacgcacagcgcttcaccgtgctgggcatgggcgaaggcatggccaccagcctgggcctgaactacaccgccaacgtgacggtgggcctgctgctggtagctgtgacggtgtcggccagcgtgatcatcgtcggcgccatccccttcgtcggcctggtggtgtccaacctggtcgccctgcgccatggcgacaacctgcgccgcaccctgccactggtggcgctgggcggtgcggccttgctgctggtctgcgacctgctcgggcggttgctgatctacccgttcgaagtgcccatcggcctgactgcaggcggcctgggcgggctgatcttcctcgggctgatcatctggaggcagcga

SEQ ID NO: 31301 - DNA, 774 bp, Pseudomonas putida
atgattactgtccacgacctgcacaaaacctatggcagcaaagaggtgttgagcggggtaagcgccagcttcccacgcgggcagctgacctcgctgatcggccccaatggcgccggcaagtccaccttgctgatgatgctggcccggctgctggcgcctgccagcggtgacatacgcctggacgggcaaagcatcgacagcatcgccatcggcgactatgcccggcgcgtggccaccctgcgccagtcggtcgacttcaacctgcgcctgaccgtcgacgaactggtcgcgttcggccgcttcccctacagccgtggtgcgctcaccgctgcagaccgtcgggccatcgaccaggccattgcctttctgtccctggagccgctgcgccaggcctacctcaatgaactcagcggcggccagcggcaaatggcctttctggccatgaccatcgcccaacagaccgactatctgctgctggacgagccgttgaacaacctcgacatgcgccacgccgtgcagatcatgcgcgccctgcgtcggctgtgcgacgagttcggccgcacggtgattttggtggtgcacgacatcaactttgcagccgcctactccgactgcatcgtcgccatgcagggtggccgtgtgcattgcagcggcagcgtcgagcaggttgtgaccgagcgacagctgcacgcgctgtacgggctggatttcgacatcacccacagcgcgcgcggccgcctgtgcaactacttcaacccacccggagaacagcaa

SEQ ID NO: 31302 - DNA, 2244 bp, Pseudomonas putida
atgaaagcgttcggcaaaatcctgggactggggcttctcgggttactgctgatcatcgtggcgctgggcttcgccctgacccacctctttgatcccaacgactacaaagacgagattcgccagctggcacgcgacaaggcgcacgtcgaactgaccctcaacggtgacatcggctggagcctgttcccgtggctgggcctggagctgcacgaagccagcatcgccaccttgaacaaacccaaggaaccgttcgccgacctgcagatgcttggcctttcggttcgtgtgctgccgctgctgcgccgcgaagtgcaaatgagcgacgtacgtgtcgagggcctgaacctgaccctggcgcgtgacgaacagggccatggcaactgggaggacatcggcaagccgctgcccgcgcagaatggcgcaagcaccgatgcatccgcacaggcacctgccgagcagacgcctgcgaccaccaacagcaacgaccgcgccatcaagctggacatcgacagcctgaccgtgaacaacgcccgcgtgcagtacaccgatgccaagaccggccacagctacagcgccgaaagcatccagctgagcaccggcccgatccacgaaggcgcaaacattgcgctcaaggccagcgcctttatcagcgccagccagccgagcatcaaggcccgtaccgagctggccggcgaattgcgtttcgaccgcaagctcaaacgctacaacttcgaagacatgcgcctgtcgggcgagacctcgggtgagcctaccggcggcaagaccgtgaccttcgccgcccaaggccaactgctggtcgacctggccgccaatgtcgcctcatggaacggcctgaaagtctcggccaaccaactgcgcgccctcggtgagctgaacctgcgtgatctggacaaggcaccccagctgagcggcggcctgtccatcgcccagttcaacctgcgcgccttccttgaaagcattggccacccgctgccggccaccaacgacccggccgccttcgccaagctggagctggtgactcgcctgctgggcacacccagcagcctggccctggaagacctggcggtgaagctggacgacagcaccttcagcggccgcgtggccgtcgaagatttcgccaaacaagccctgcgcctgcaacttaagggcgacaccttcgacgccgaccgctacctgccggccaagagcgaagaagccaagggcgccaccgctgcgcgccaggccgaggtcaagcaacaagaggccagcgccgtagccggtgccggcaccacaccactgcccaacgccccaacacaagtggcatggagcgacgacaagctgctgccggtcgaccgtctgcgcgccctcgacctgcaggccgacctggccttcggctcgttgaccctggataagctgccgatcgagagcgcccagctcaaggccgttggccaaggcggcctgctgaccctgcaaaccctgcgcggagagctgtacaacggcaccttcgaagccaagggcacggtcgacgtgcgccctgccgtgccacagctgggtgtgaacaccaatatccagcgggtgccggtggaacacttcatcaagaccgaaggcaaggaacagacgccgccggtcaagggcctgctgaccctgaccagtgatctgacagccaccggtaacagccagaaagcactggtcgacaccctgaacggcagcgcaaacttcgccatcaacgatggcgtgctggtcaatgccaacctggaacagcagttgtgccaagccatcgccacgctcaatcgcaagacgctgagcagcgaaccacgcggcaaggacacccccttccaggagctgcgcggcagcctggtggtacgcaatggcgtcgccagcaacccggacctcaaggcgcgcatcccgggcctgaccgtcaatggccatggtgacctcgacctgcgcgtgctgggcatggactacaacatcggcatagtcgtcgaaggcgaccagcgtgccatgccggacccggcctgccaggtcaacgaacgttatgtgggtgttgaagtccccctgcgctgccgtggtccgctggaactcggcgcaaaggcctgccgcctcgaccagaacggcctgggcaaggttgccgccaagctggccggcaaccgcctgaaagacaagatcgatgaaaaacttgacgaaaaacttggagacaaagtgagcccggaactgaaagacgcgctcaaggggctgttcaaccga

SEQ ID NO: 31303 - DNA, 942 bp, Pseudomonas putida
atgcacagcttgatccgccgcagcctgttgccccttgccctgagcagcatcgtcgccaccccgcttttcgccgccgagcccgccgcctgcaaaaacgtgcgcctgggcgtggtcaactggaccgacgtcattgccaccagcgccatggcccaggtactgctcgacggcctggggtaccagaccaaacagaccagtgcctcgcaacagatcatcttcgccggcatccgcgacaaacgcctggacatgttcctgggttactggaacccgatcatgacccagaccattaccccgttcgtcgatgccaaccagttcaaggtgctggacaagccaagcctggaggacgcgcgcgccaccttggccgtgccgaaatacctctacgacaagggcctgaagactttcgccgacatccacaagttcgagaaagagctgggcggcaagatctatggcatcgaaccgggttccggcgccaacacccagatcaaggcaatgatcaccaagaaccagttcgacctgggcaagttccagctggtcgagtccagcgaggccggcatgctcgccgccgtcgaccgcgccgtgcggcgcaaggaggccgtggtgttcttcggctgggcgccacacccgatgaacgtgaacatcgacatggcctacctgggtgacagccaggatgcactcggccctgacgaaggccgcgcgacggtgtggacggtgacggctccggactatgccgaacgctgccccaatgccctccgcctgctggccaacctgaagttcagcgccgaggacgagagccgcatgatgcagccactgctcgaccacaaggacgcgctggaatcagcccgccagtggctcaaggaccaccccgaggacaaggcccgctggcttgagggtgtgaccaccttcgatggcaagccggctgcggacaacctcaagcttaccgccaac

SEQ ID NO: 31304 - DNA, 477 bp, Pseudomonas putida
atgaaaaagtcgtctgcacaaggttccgaagatccgatcctgcagtgggttaccttccgtctggacaacgagtcctacggcatcaatgtgatgcaggtgcaggaagtcctgcgctacaccgagattgccccggtaccgggtgcgccgagctacgtgctgggcatcatcaacttgcgcggcaacgtggtgacggtgatcgacacgcgtcagcgttttggcctgatgccgaccgaagtgaccgacaacacccgtatcgtcatcatcgaagccgacaagcaagtggtcggcattctggtcgacagcgtggccgaagtggtttacctgcgccagtccgaaatcgaaaccgcgccgaacgtgggtaacgaagagtcggccaagttcattcaaggcgtgtgcaacaagaatggcgaactgctgatcctggtcgaactggacaagatgatgaccgaggaagagtggtccgagctggagaacatc

SEQ ID NO: 31305 - DNA, 778 bp, Pseudomonas putida
tgggcgttggccattcaaaaaggtggtgtcggcaagaccaccactaccattgccctggccggcctgctggccgaggccggcaagcgcgtggtcgtcgtcgacctcgacccgcacggctcgatgaccagctacttcgggcacaacccggatgccctggagcacagctgctacgacctgttcctgcacaagggccggtgcccgaaggcttgcccgggcaactgctgctgcccaccagcgatgagcgcatttcgctgttgccgtcgagtaccgccctggcggtgctggagcgccagtcgccagggcagaatggcctgggcctggtaatcgccaagagtctggcgcagctgtggcaggatttcgactatgccctgatcgacagcccacccttgctgggtgtgctgatggtcaatgccctggccgccagccagcagctggtgatcccggtgcaaaccgaattccttgcggtgaagggcctggaacgcatggtcggcaccttggccatggtcaaccgttcgcgcaagcaggcgctgccgtaccagatcgtaccgaccctgttcgaccgtcgtacccaggcgtcgctgggcaccctcaagctgctgcgtgacacctacgggcagcatgtatggcagggctacattccggtggatacgcgcctgcgcgatgccagtcgcaagggcgtcacgccttcgcagttcgacagcaagagccgtgggttgatcgcctacagggcgctgctcaagcacctgctcacctacaagaacgcagtgcaggtagcctg

SEQ ID NO: 31306 - DNA, 1056 bp, Pseudomonas putida
atgaaacaaaatgtgatcgcactggtttttggggggcggagctcagagcattcagtggcgctacgctccgccgctacaatccacgcggcgctgatggctctcggtcacagggtgcactgtgtagggatagatcgtgagggcaactggaggtatcaaggagagccgtgccagttccctggtgcggttgatcggtcggctccgttgatttcaattcgtccaggccatcgctcgctctcatacacaactcaagagagcggcacggtggagattgggatcgatttgcttttcccggcactgcatggtcggtggggggaggatggaacaattcaaggattggcagcgatgtgcggtttgccgtgtgtgggctccggggtgctaggttcggcaatggccatggataaagatgtcacaaagagaatggtccagtctgccgggcttgttgtggtgccttggctggccatgaactccatgcgtccttgggaggaactggttgagtgcctgggtagcagcacgctcttcgtaaagcccgctacttcgggctcatcgattggtgtgtctagggtctccaacgccttggaatatgctgcggcatttgctattgcagcacgagaggacacaaaggtgctggtggaggctgctgtctgtggaagagagatagagtgtggtgtgctcgaacttgaggagggtttgatggcctcggtggtgggtgaaataatcaaaaaggaagggcacgcctattacgattatcaggcgaaatacgattccaacagtgtgacaggtcttcgtgtgccaagcttgttgccacctgacattgtcgcgcgcatccaggctttatctgtccaggcgtttagatgccttgaactgaaggggtacgccagggtggattttttcttgacagaagagggtgaaattattctcaatgagatcaataccttacccggatttacgagtgccagtatgtacccgaagatgtttgagtgctccggttaccctccgccgaagttggtaggagcgctagtcgaatatgggctctcatcagcatctaaagaacgttta

SEQ ID NO: 31307 - DNA, 666 bp, Pseudomonas putida
atgagcgtattcattttgctgctgcgccgcgaagcgcgcctgctgttccgtcgcccggccgaactggccaacccgttggtgttcttcgccattgtcgtggccatgttcccgctggcggtcggcccggaaagccaattgttgcaaaccttgtcgccgggcctggtctgggtggcagcgttgctggccgtgttgttgtcgctggacggcctgttccgcagcgatttcgaggacggctcgctggagcaatgggtgctgtcgccgcacccactgccgctgctggtgctggccaaggtgctggcgcactggatcttttccgggctggcgctggtattgttggcgccactgctggcactgatgctggggctgccaagccattgcctgccggtgctgctcggttcgctgctgctgggtacgccggtattgagcttgctgggcgcggtaggtgcggcactgacagtcggccttaaacgcggaggtttgttactggcgttgctgattctgccgttgtatatccctgtattgatcctgggcagtggtgcgttgcaagcggcgttgcaaaatatgccggcaaccggccatctgctctggctcgccagcctgacggccctggccgttaccctggcaccctttgcgatagcggccggcctgaagatcagcgtcggcgaa

SEQ ID NO: 31308 - DNA, 1035 bp, Pseudomonas putida
atgaaacggcgggtctcgccacgtacgttgttcattagcctgagcctgctgtgcctgttggcgatctggctgtcactggcgctggggccagtcagcctgccaatgttcgataccctgcgcgctggcctgcgcctgttggggctgcccgtttccgaagatggcctgcagcaggccgagatgatccttggtcagatccgcctgccgcgcaccctgttggggttggcggtgggcgcggtgctggcgctgtccggggtggccatgcaggggctgttccgcaacccgctggccgaccccgggctggtaggggttgccgccggcgccgcagtgggggcagcggttgccattgtcggcggcgcctggtttggcggcatgccggatgctttcgcgccttatctgctgtcgttctgcgcgtttgtcggcgggcttggggtaactgcgctggtctaccgcctggggcgccgcgatggccagaccaacgtcgccacgatgctattggctggcgtggccatgaccgcgctggggggcgcggccgtggggctgttctcttacctggctgatgacgccaccttgcgcacgctgacgttctggaaccttggcagcctcaatggcgccagctatgagcggctgtggccattattgctggtggcgacaggcgtagcggtgtggctgccgcgccgggccaaggcgctgaatgccctgttgctgggtgagtcggaggcgcgccacctgggcgttgacgtggagcggctcaagcgtgaattggtgttctgcacggcgctgggggtgggggcggcagtggcagcagccgggttgatcggcttcattggcctggtagtgccgcacttggttcgcctgctggccgggcccgatcaccgtgtggtgctgccagcctcgctgctggccggcggtgtgctgatgttgttcgccgacctggcggcgcggctgctgctggcgcctgccgagctgccgattggtattgtcacggccttcatcggtgcgccgttcttcctgttcctgctgatgcgagggcgcggc

SEQ ID NO: 31309 - DNA, 123 bp, Pseudomonas putida
gtgatcggaacgcctttactatcagacatcctgtgcgccttgattaggcaaggcaatgaaatcccgcagcgctgctgcgagattaacctaccgagcgtccaggccccgttggcactagggcaa

SEQ ID NO: 31310 - DNA, 1209 bp, Pseudomonas putida
atggccgaacagatgggcatcgaaaacatggcccgttcgcgcaaacaggacgtgattttcgccctgctgaagaagcatgcgaaaagcggcgaagagatctcgggtgacggcgtgctggagattctccaggatggtttcggtttcctgcgttcggctgatgcgtcctacctggccggcccagacgatatctatgtctcgcccagccagatccgccgtttcaacctgcgtaccggcgacaccatcgtcggcaagatccgcccaccgaaggaaggggagcgttacttcgccctgctgaaggtcgataccatcaacttcgaccgcccggaaaacgcgaagaacaagatcctgttcgaaaacctgacgccgctgttcccgaacaagcgcctgaagatggaggccggtaacggctccaccgaggacttgaccggtcgcgtcatcgacctgtgcgccccgatcggcaaaggccagcgcggcctgatcgttgccccgccgaaagccggtaagacgatcatgctgcagaacattgcggccaacatcacccgtaacaaccctgagtgccacctgatcgtcctgctgatcgacgagcgcccggaagaagtgaccgaaatgcagcgcaccgtgcgtggcgaagtggttgcttccaccttcgacgagccgccaacccgccacgtgcaggttgccgagatggtgatcgagaaggccaagcgcctggtcgagcacaagaaagatgtggttatcctgctggactcgatcactcgactggcgcgtgcctacaacaccgtgatcccgagctccggcaaggtgctgaccggtggtgtcgacgcccacgccctcgagaagcccaagcgcttcttcggtgctgcgcgtaacatcgaggaaggcggttcgctgaccattatcgccactgcgctggttgaaaccggctcgaagatggacgaagtgatctacgaagagttcaagggtaccggcaacatggagctgccgctggaccgccgcatcgctgagaagcgtgtgttcccggccatcaacatcaaccgctccggcactcgccgcgaagagttgctgaccgctgacgacgagctgcagcgtatgtggattctgcgcaagctgctgcacccgatggacgaaatcgctgccatcgagttcctggtcgacaagctcaagcagaccaagaccaacgatgagttcttcctgtcgatgaagcgcaag

SEQ ID NO: 31311 - DNA, 777 bp, Pseudomonas putida
ttgttcacctgcattgccgaaccgctggaggactgcgtgttgctctgggacggtgtgcttgccttgggcgaactgccagtgcgcaagctggcgtgcagcgtcagtgagtgcgtcgacgtcggcggcgacgtctggcgggtgcgcctgcgtgcgcctgccggcaagcctctgcgctaccacgcggggcaatacctgatgatcgaacgtgagggcggcaagcaggcagccttctcgctggcgtccgcgccacatgccgggcgtgaactggagctgcatgtgctggcgcgtgagcccagtgcggtgcaactgatcgaccagctcaggcgagatggcctggcgcgcatcgaaatgccgtttggcgacacccacctggccgagctgcctgacgggccgctggtgctgattgccgctggcaccggaatgggccagatgcacagcctggtcgagcactgccgggctcagggcttcaagcacccggttcacctgtattggggggtgcgccggcctgaggatttctatcagatagagcactgggacgaatggcagcgtctgcctaacctgttcctgcatcaagtggtcagcgacctgtgcggctgggaaggccgctgcggcatgctgcatgaagcggtctgcgaagacattgccgacctcaatagtgtgcatgtgtatgccagcggctcaccgaacatgatctatgccacgctcgacgccctggtcgaagccggtatggatgcgcaccgcatgcgtgccgatgtgtttgcctacgcgccgcgcggt

SEQ ID NO: 31312 - DNA, 699 bp, Pseudomonas putida
atggaacccgaacacgcgcgcaaacgcggccacagccgtgcccacgacctggtttccagcctgacccagcagattttactgggcaccttcaaaccaggcgacaaactgccttcggaaaacaccttggtgcgcgagcacggggtcagccgcacggtggttcgcgaagccttgtcgaagctgcaggcctctgggctggtggagccgcgccacgggatcggtacgttcgtgatggaacgccaggcccaggccggcctgcgcgttgcggcggagagcgcggcgaatgtgcgcgatctgctggagctgcgtattggccttgagggccaggctgccgcgctggccgcactgcgtcgtgacgaggggcatctggcgcgcatgcgccaggcgctggatgactatcaggacctggccgctgccggcgacagctgcatcgaagccgaccggcgctttcacctgctgattgccgaggccaccggcaatctgtatttcaccgagatgctgctgcaactgggtaacggcctgatcccgcgcaaccgcatggcccaggccgagcgcgcgggggccaagctggcgcggcaagcgtacctggccaacctggagcatgaggcgatcctcaatgccatccgccgacaagacccggatgccgcgcgggcggcagtgtgcctgcacctgtccaacagccgagaccggctactgccggac

SEQ ID NO: 31313 - DNA, 402 bp, Pseudomonas putida
ggaatattaacctgttttccatcgactacgcttttcagcctcgccttagggaccgactaaccctgcgtcgattaacgttgcgcaggaaaccttggtctttcggcgtgcgagtttttcactcgcattgtcgttactcatgtcagcattcgcacttctgatacctccagcaagcttctcaactcaccttcacaggcttacagaacgctcctctaccgcatcatcataagatgatacccgtagcttcggtgcatggtttgagccccgttacatcttccgcgcaggccgactcgactagtgagctattacgctttctttaaagggtggctgcttctaagccaacctcctagctgtctaagccttcccacatcgtttcccacttaaccatgactttgggaccttagc

SEQ ID NO: 31314 - DNA, 458 bp, Pseudomonas putida
atttcactgagtctcgggtggagacagcgccgccatcgttacgccattcgtgcaggtcggaacttacccgacaaggaatttcgctaccttaggaccgttatagttacggccgccgtttaccggggcttcgatcaagagcttcgcttgcgctaaccccatcaattaaccttccggcaccgggcaggcgtcacaccctatacgtccactttcgtgtttgcagagtgctgtgtttttaataaacagtcgcagcggcctggtatcttcgaccggcatgggcttacggagcaagtccttcaccctcgccggcgcaccttctcccgaagttacggtgccattttgcctagttccttcacccgagttctctcaagcgccttggtattctctacctaaccacctgtgtcggtttggggtacggttcccagttatctgaagcttaggagcttttcttggaagcatgg

SEQ ID NO: 31315 - DNA, 366 bp, Pseudomonas putida
atgctttcagcggttatctcttccgaacatagctacccggcaatgccactggcgtgacaaccggaacaccagaggttcgtccactccggtcctctcgtactaggagcagcccctctcaaatctcaaacgtccacggcagatagggaccgaactgtctcacgacgttctaaacccagctcgcgtaccactttaaatggcgaacagccatacccttgggaccggcttcagccccaggatgtgatgagccgacatcgaggtgccaaacaccgccgtcgatatgaactcttgggcggtatcagcctgttatccccggagtaccttttatccgttgagcgatggcccttccatacagaaccaccggatcac

SEQ ID NO: 31316 - DNA, 186 bp, Pseudomonas putida
atgttgattctgactcgtcggtgcgccgagagcctgatcattggagacggcgagatcaccgtgacggtgcttggcgtcaaaggcaaccaggtgcgtattggcgtgagcgccccgaaagaagtggcagttcaccgcgaggaaatctacctgcggatcaagaaggagaaggatgaagagccaagcctt

SEQ ID NO: 31317 - DNA, 1069 bp, Pseudomonas putida
ccatccggcgaaaagctgcagaaagtgctggcgcgcattggcgtgggctcgcggcgtgacgtcgaggcctggatcagccagggtcgcatcaaggtcaacggcgtcgaggccacccttggccagcgcgtcgacctgcacgacgccatcgccgtcgacggcaagctgatcaagcgcgaggaggccgccgaggccacccgccgggtgatcatgtacaacaaacccgacggcgaaatctgcacccgtgacgacccggaagggcgcccgaccgtgttcgaccgcttgccacggccaaaagaaggccgctggatcaacatcggccgcctcgacatcaacaccactggcttgctgctgttcaccaccgacggtgaactggccaaccgcctgatgcacccatcctacgagatggaccgtgagtacgcggtacgtgtgcgtggtgaagtcgacgacgagatgatcgagcgcctgaaagccggcgtaatgctggaggacggcccggccaagttcaccgatatccagaaggcaccgggtggcgaaggcttcaaccactggtaccactgcgtggtgatggagggtcgtaaccgtgaggtgcgtcgcctgtgggaatcccagggcatggtggtcagccgcctgaagcgtgtgcgtttcggcccggtgttcctcaattctgacctgccgatgggccgctggcgcgaaatgacccagggcgaaatcgacatcctcgccgccgaagtgggcctgcagccggtcgcgctgccagccatgaagctcaaggccaaggacaagatggagcgcctgcagcgcaagtcgacccgcccgctgggccgtggcgagcgcgtgcgcaacctgcgcccggcccacgaaggtgccgctactggcgaacgcccggcgcgtcagccgcgtgaagaagcgccgcgcaaacccacccgtggcagcacggtggctgagcgcccgagcgagatgcgcaagcgtccgggcaaacctgatggcgacaagccggcaggccgtggtcgcggcaagccgcgtggctaataagccagtgtggtcatcaaggaaccagccttcgggctgg

SEQ ID NO: 31318 - DNA, 3423 bp, Pseudomonas putida
atgtcggccacggccggcaaacaaacctggggcaacctgcccggtgccgccctcagccttgccatcgccgaagccgccagcagcgctggccgcttcaccctgctgctgacggccgacagccaggccgccgaccgtctggagcaggagctgcgcttctttgccccagacctgcccgtgctgccgttccccgattgggaaaccctgccctacgacctgttctcgccgcaccaggacatcatctcccagcgcatcgccagcctgtaccgtctgccggagctgagccacggcatcctcgtggtgccgatcaccaccgccctgcaccgcctggcacccacgcgttttctgctgggcagcagcctggtgctggatgtgggccagaccatcgacgtggaacagatgcgcctgcgcctggaggccagcggttatcgttgtgtcgacaccgtctacgagcatggcgagttcgccgtgcgcggcgcgctgatcgacctgttcccgatgggcagcaaactgccctaccgcatcgacctgttcgataacgagatcgagacgctgcgcaccttcgaccccgagacccagcgctcgatcgacaaggtggattcggtgcgcctgctgccagcacgcgaattcccgatgcagaaggaagaagtgacccgcttcaaggcacgctttcgcgagcgcttcgacgtcgacttccgccgcagtgcaatcttccaggacctggccagcggcatcatccccgccggtatcgagtactacctgccactgttcttcgaagaaacctcgaccctgttcgactacctgccgaccgacacccaggtgttctcgctacccggtgtggaacaggccgccgagcacttctggaacgacgtgcgcgggcgttatgaagaccgccgcggcgacctcagccggccgctgttgccgccggccgagctgttcctgccggtggaagattgcttcgcccggctcaagcagtggccccgggtggtggtcagcagcgaagagctggagcctggcgtgggccgcgagcgcttcccggcgcgcgccctgcccaacctggccatcgaggccaaggccaaccagccgctggccgagctggccaacttcctcgaccagttccccggccgcgtgctcttcactgccgaatcagcgggccgccgggaagtgctgctggagctgctcgaacggctgaagctgcgcccgcataccgtcgaaggctgggacgacttcattaccggtgccgagcgcctggcgatcaccatcgccccactggacgacggcctgctgctggacgatccagggctggcgctgattgccgaaagcccactgttcggccagcgggtgatgcagcgccggcgccgtgacaagcgcggcgaaaccgccaacgacgcggtcatcaagaacctcaccgagctgcgcgaaggtgcgccggtggtgcacatcgaccatggcgtcggccgctacctgggcctggccacgctggaaatcgacggccaggccgccgaattcctgacgctggaatacgccgagaacgccaagctgtatgtgccggtggccaacctgcacctgatcgcccgctacaccggcagcgacgacgccctggcaccgctgcaccggctgggttcggaggcctggcagaaagccaagcgcaaggccgccgaacaggtccgcgacgtggccgccgaactgctcgacatctatgctcgccgcgccgcgcgcaagggctacgcgtttgccgacccgtcggctgactacgccaccttcagcgccggcttcccgttcgaggagaccccggaccagcaggccgccatcgaggccgtgcgcgccgacatgctggcacccaagccaatggaccgcctggtctgtggcgacgtgggcttcggcaagaccgaagtggccatgcgcgcggcgttcatcgccgtgcacagtggccgccaggtggccgtgctggtgcccaccaccctgcttgcccagcagcattacaacagcttccgcgaccgctttgccgactggcccgtgaccgtggaagtgatgagccgcttcaagtcggccaaagaagtggccgccgccgccgcggaccttgccgaaggcaagatcgacatcctcatcggcacccacaagctgctgcaggacgacgtacgcttcaaggacctgggcctggccatcatcgatgaagagcaccgctttggcgtgcgccagaaagaacagctgaaggcgctgcgcagcgaggtcgatatcctcaccctgaccgccacgccgattccgcgcacgctgaacatggcggtggcgggcatgcgcgacctgtcgatcatcgccacgccgccagcacgccgcctgtctgtgcgcaccttcgtcatggaacagaacaagagcacggtcaaggaggcgctgctgcgcgaactgttgcgcggtggccaggtgtactacctgcacaacgatgtgaaaaccatcgaaaaatgcgccgccgaccttgccgagctggtgcccgaggcacgcatcggcatcggccacgggcaaatgcgcgaacgcgagctggaacaggtgatgagcgatttctaccacaagcgtttcaacgtgctggtggcctcgaccattatcgaaaccggtatcgacgtgcccagcgccaacaccatcgtcatcgagcgcgccgacaagttcggcctggcccagctgcaccagctgcgtggccgggttggccgtagtcaccaccaggcctacgcctacctgctcacacctacccgtcagaaggtgagcgccgacgccgaaaagcgcctggaggcgatcgccaacacgcaagaccttggcgcaggctttgtgctggccaccaacgacctggaaatccgcggtgccggcgagctgctgggcgaaggccagagcgggcagatccaggcagtgggcttcaccctgtacatggaaatgctcgaacgtgcggtcaaggcaatccgaaaaggtacccagccgaaccttgagcaacccctgggtggcggcccggagatcaacctgcgcctgccggcactgatcccagaggactacctgcctgacgtgcatgcgcgcctgatcctgtacaaacgcattgcctcggctgccgacgaagagggtctcaaggacttgcaggtcgagatgatcgaccgcttcggcttgttgccagagccgaccaagaacctgatgcgcctgacgtcactcaagctgcacgcggaaaagctcggcatcaagaaagtcgatgcggggcccaacggtggcaagctcgagttcgaagccgaaacaccggtcgacccactgaccctgatcaagctgatccagggtcagcccaaacgttacaagttcgaaggggccacccagttccgcttcctggtaccgatggaacgccccgacgaacgtttcaataccctggaggcgctgttcgagcgcctgaccccacagcctgcc

SEQ ID NO: 31319 - DNA, 1269 bp, Pseudomonas putida
atgtctgacgtatccccggcccgcgccctgggcatcgactttggcacctccaactccacagtcggttggcatcggcctggcgtcgagtcgctgattgccctggaagacggcaagatcaccttgccctcggtggtgttcttcaatatcgaagagcggcgcccggtgtatggccgcctggcgctgcacgagtacctggaaggctacgaaggccgcctgatgcgctcgctgaaaagcctgctgggctcgaagctgatcaagcacgacaccagcgtgctgggcagcgccttgccgttcaaggacctgctgggcatgttcatcggcgagctcaagaagcgcgctgaggcggccgctggccgtgaattcgaccaggtggtgctgggccgcccggtgttcttcgtcgacgaagacccggctgccgaccaggaggccgaggacaccttggccgaagtggcgcgcaaaatcggcttcaaggacgtgtcgttccagtacgagccgattgccgcggccttcgactatgagtcgagcatcagccgcgaagagctggtactgatcgtcgacatcggcggtggtacctcggacttcaccctgatccgcctgtcgcccgagcgccatctggtcgccgagcgccaaagcgacatcctcgccaccggcggtgtgcacattggcggtaccgacttcgacaagcaactgagccttcagggcgtgatgccgttgtttggctatggcagccgcatgaagagcggtgcgctgatgccgaccagctaccacctcaacctggccacctggcacaccatcaacgccttgtattcgcagaagtcacagttggcgctgggcagcatgcgctatgacatcgaggacagcttcggcatcgatcgcctgttcaaattgatcgaacagcgcgccgggcactggctggcgatggaagtggaagccagcaagatcgagctgaccgagcatgacagccgccacatcgacctgcgccgcgtcgagcccgagctgactgcggaactgacccgcacgctgttcgaagaggcgatcgaaggcctgctggagcgcgtgcgcggtagcgtgaccgaactgctggccaaagctggggtaagcgaaggccaggtcgatacggtgttcttcaccggtggctccagcggcattccggcgctgcgcaacagtgtttcggcgatgctgccgaatgcacggcatgtggaaggcaatatctttggcagcattggtagcgggctggccatcgaggcgcgcaagcgttacggcgcggcc

SEQ ID NO: 31320 - DNA, 879 bp, Pseudomonas putida
atgaactacctgttccccctcaccgccatcctcatctgggccggcaacaccgtggtcaccaagatgtccgccggtgccatccaccctgcggagatcggcttctaccgctggttgctggccgccttgctgttcacgccgttcctgctgcccgccgtgtggcgcaaccgtgcagccatccgcccgcacctggccaaggtgttcgtgctcggcgtgctgggcatggcgatgtaccagagcctggcctacttcgccgccggcatcaccagtgccaccaacatgggcatcatcctctcgctgatgccgctgatgtcactggcgctgtccatcgcctggcttggccagcgcctgagctacggtgccctgctgggcgcggtggtgtcattcttcggcgtgcttgaagtggtcagtgccggccaccccgccagcctgctgcagcaagggctgaacagcggcgacctgttgatgctggtggcaaccttggcctatgcgctgtacagcttcctgctgaagaaatggcagctgcgcctgccgccaatgcagctgctgtacctgcaggtgctggtggccatcgtcgtgttgctgccgctgttcctgctgtcagacaagaccggcctgaacagccacaacatcggcctggtcctgtatgcctgcgtactggcttcgatgatcgcgccgctggtgtggatgcaggccgtgcaccgcctggggcccagccgcaccacactgttcttcaacttgctgccgctggtcaccgcgctgatcgccgccgtggtgctcgacgaacaactggccagttaccacctggtcggcggcttgctgaccttggccggcgtagtgctggccgaacgctggaccacgccgatccgccgccaaggcact

SEQ ID NO: 31321 - DNA, 1350 bp, Pseudomonas putida
atgtgggctgatgtactagcgcgattcgagaaaaaagcacccgccagcgtaatggccaaacttgccttggagcaggccattgcgccggagtgggtcgatcaggttttcgaggagcaccgccaacggcagtattctcgcgagctgctgttctcgaccattatcaagttgatgtcgcttgtttcattgggcttgaagccatcgctgcatgctgcggcaagacaactggacgaccttcccgtcagcctggcagctctgtacgacaagatcagtcgaaccgaacctgccctgttgcgtgctctggtgacaggctgcgcgcagcgcttggcgccgacaatccatgagttgggctgctcagccatgcttcctgattggcaagttcgggtggtcgatggcagccacttggcctctaccgaaaagcgtcttggcgcgttgcgccaagagcgcggagcggctcgccccgggttttcggtggtggtttacgaccccgacctggatcaggtaattgacctccagccgtgcgaggacgcctacgcaagcgaacgagtttgtgttttgccgttgctggctgaagcaaagaccaatcaggtttggatcgctgaccgtctctactgcacgctgcctgtaatggaggcgtgcgaacaggtgaagacatcatttgtcattcgccagcaggccaagcatccacgcttgatccaggaaggtgagtggcaagcaccgatgcccgtcgccacaggcactgtgcgcgagcaatccatcgaagtaaaaggcgggcaccgctggcgacgtgtcgagttaacgcttcattcaccaaacgactcaggtgataacagcttgatgttctggagcaacctgcccgagagcatcagtgcgcaacagatcgcagacttctatcggcgccgctggagcattgaagggatgttccagcggttggaagcaattctggaaagtgaaattgaaaccctcggcagtccgcgagccgccttgcttggattcaccactgccgtgctggcatacaacgttctggccttgctcaagcgaagtgttgaacaggctcaccgcgatgccttgcccgagaattgggaagcctcgatctatcacttggcggtgcagatcagagggggttacgaaggcatgcagattgccctgccatccgagtacatgcccgttgttccgatggaaaacctggctcagcgcctgctggagctggccagaaacatccagcccagacaggttgcgaaaagcccacgaggccccaaggtgctcaaagctaaggcctgggtgcaagggacggctgtacatgctcatgtttcgacggatcgggtcatcaaagccgccaaaaccaaaagacct

SEQ ID NO: 31322 - DNA, 1011 bp, Pseudomonas putida
gtgcctatgaaagcgatcagtttcatccacaaaggcttgcctatcgaagaccctgcgtctctccaggacatcttcatgcccaagcccagccctgggcccagggaccttctggtcgaggtcaaagccgtgtcggtcaaccccgtagacaccaaggtacgcgcgggaactttcacgggagagccgaaaatactcggctgggacgcggccggtgtcgaccgcgaagtcgggcgccaggtgaccctgttcaagcccggagaccaggtgtactacgccggctccatcgccaggcccggcagctacagcgaatatcacctggttgacgaacgcatcgtcgggcatcaaccgcgtagcctgggtgcagcacaggcagccgcgctgccgctgacggccatcaccgcctgggaactgctgttcgatcgcctggggatcgcggagggcggcggggagggcgatgccctgctgatcgttggcgctgccggtggcgtcggttcgatgctggtgcagttggcccggcaactgacccgcttgacggttatcggcacggcctcccgcgccgagaccagcaactgggtacgcgaactgggcgcccatcacgtcatcgatcacagtgcgccgctgcaagggcagctgcaggccttggggatcgagtcggtcagccatgtcgccagccttacccatactgatcaacactttgcgcaactggttgaagtgctgcgaccacaaggtcgcctgggcgtgatcgacgacccgcagaccctggacgtcatgccgctcaagcgcaagtcgctgtcgctgcactgggagctgatgttcacccgctcgctttacgaaaccgacgacatggtgcgccagcacgagctgctcgagcgcgtggccgggctgatcgatcaaggcaccctgcgtaccaccttgggcgagcatttcggcgccatcaatgccgccaacatgcgccgtgcccatgcgctggtcgagagtggcaaggcgcgcggcaagatcgtcctggaaggcttc

SEQ ID NO: 31323 - DNA, 591 bp, Pseudomonas putida
atgaaactacgttacgacgatacgcgtcagcatctactcgataccggccaccgcatgatggtggttaagggcttcactggtgtgggccttaacgagattttgcaggccgctaacgtgccgaaaggctcgttttaccattattttaagtccaaagagcagtacggccagtcgttgcttgaggattactttcgcaattatttggcgagcatggatgagcgttttgccgtcacgggcaacacggctcgcgagcgcctgatggggtattggcagaagtggctagacagctactgcgagccctgcgacgaccagaagtgcctggtggtgaagctgagcgcagaggtagctgatctttcggagcccatgcgcctcacgctgcgcgatggtgcagatcaaatcattgcgcggatttctgaatgtattgagcaggggcagcgagacggttctctggcaatgggcgatgctttccacactgcgacggccctttaccagttgtggctcggtgcgagtctgctgagcaagctacaccgtaatagtcggccgctggaaaacgccatggccacaactcagaccattctgacctctgacaacatc

SEQ ID NO: 31324 - DNA, 2001 bp, Pseudomonas putida
gtgccacctcctcaccattaccctcgtgagtcagtgcgagcgatcaggaggaaccgaaaggaatctcatcacatgaagctttgcagtctacggatcagcggttttcagtcgtttggacaggacatcactgacataaccttcgacggcgttacatatctcctagggccaaacggtgccgggaagactgcgacgttgcaggcattggcacgcatgtttggtttcgagcctggccttcgtcgcctgcgtcgatcagatttccatgtccctttgaacgagcaggaggtacccgctcagcgctcgctctggattgaggcggacttcacattcgacgaaacgctcgatgatgccgaagacgacacagtgccgccgttcttcacgcaaatgaccttgcaaacggctgacggggttccccgtattcgatatcgcttggaaggtattctccaccctgatggcgaggtagaggagcgtttacattacgtgacccggatggacgagcatgggcaacctacgacgctcaagcccgtggcgaagcgtgaacgagacgagatacatgttcattacctacctgctcgccgggatcccgctgatcatattgcctttggtgccagcgcccttctaggccgcctccttcgagccgtcaactggagtgatgaccgggactcaatcaagcagctcactgagcaaatcactgagtgcttgtcggagaacgagtcaatcaagaccttgagcgctggcctcagcggcgcatggcaacgtcttcacaaaggcgatttcttcgcgaatccatcccttaccttcgcgaactctgaaattgaggcaatcctgcggcacctctcgatttccttcacgcctggccatggtgaaagcaacgtggactacgcgaggttgagcgatggtcagaaatcaatgctgtacctctcgctcgttcttacatccctgaccataggccgcgaggtcagatcaggacagaacacttcgttcgaccccctcaaactgaagcctgctgcctatacgattctggcagtcgaagaacccgagaacagcctgtctccccattacctggggcgtatcgtgagctctctgaaatcatccgtgggcgtggacgcgcaagcattgatcgccacgcaggccccgtcgatgctcagacgagttgagcctgaccagatcaggtatctgcgtctgaattcaaagcgagaaacggatgtgtcgaccatcgtgcttccagacaagcacagcgacgcctacaagttcgttcgagaagccgtccaggcatttcccgagctctacttcgcacgcttggtggtacttggtgagggggatagtgaagaaatcgtgctacctcgaatccttcaagctaagggagctcccgttgacgaatacgcagtggcgatcgctccactaggggggcgccatgtcaatcacttctggcggctgctgaacgcgctgggtacacctcatatgaccctgctcgacctagacgtggggcgccatcaaggtggctgggggcgtgtgaactatgttcgtactcagcttgatgtattcgaccctacacgtagcatcccggatcactggacgcgccactcttgggatgatgctgagcgacctattcgaacacaccactggttcgacaatggcaacgaaacccagagcagcttgttccaggagttagaaagcagagatgtatttttctcggatccactggatctggatttcgcgatgctcaaagcgtttcccgatgcttttggtgccgagctttcagcccctacaccgcacgatcacgtaaccgtccttggcaagagccatttcaacccggggcagtacaatgctgaggaacagcaactcttcgcggcctaccacaagctgttcaagctcagcagtaaacctgcagctcacctggatgccttgggcaatctcactgacacggagctgctggcctcactaccaccatccctcaatcggctagcagaccgggtcaaagccaagcttgaggaatctcccgag

SEQ ID NO: 31325 - DNA, 2133 bp, Pseudomonas putida
atgcccagcaagaaaacggatgcgcccaagcacagcgaggccgccggtacccagacccccgacagggccaacaccaatgccaagctgcagagcctggaggccgaccgcagcgatgcgaccgggcaggcgctgcggaccaaccaaggcgtgcgcattgctgacaaccagaactccctcaaggcgggtgatcgcggaccttcgctgcttgaagacttcatcatgcgcgagaaaatcacccacttcgaccatgagcgtatccccgagcgcatcgtgcacgcccgcggtaccggggcacacgggttcttccagagctatggcaaccacgccgagctgaccaaggccggcttcctgcaagatccggaaaagatcaccccggtttttgtccgcttctcgacggttcagggcccacgcggttctggcgatacggtgcgagatgtgcggggctttgccgtcaagttctatacagatgaaggcaatttcgacttggtcggcaacaatatgccggtgtttttcatccaggatgccatcaagttccccgattttgtccacgcggtgaagccagagccacacaacgagataccgaccggcggttcggctcatgacaccttctgggatttcgtctcgctggtgccggagtcggctcatatggtcatgtgggccatgtctgaccgcgccatcccgcgcagccttcgaatgatggaaggctttggcgtgcataccttccgcctgatcaatgccgagggcgtggccagcttcgtcaagtttcattggaaaccacgtcagggcgtgcattccctgctgtgggacgaagcccagaagctggcgggcaaggacaccgacttccagcgccgtgacctatgggaagccatcgaaaccggtgactacccggaatgggaactgggcgtgcagattgtgcctgaggcagacgaacacaaattcgacttcgacctgttggacccgaccaagataatcccggaggaactggtacccgtcacgccgctgggcaagatggtgctcaaccgcaacccggacaatttctttgccgaggtcgaacaggtggcgttctgcccgggccatatcgtacagggtatcgactttaccaacgacccgctgctgcagggccggctgttctcgtacaccgatacccagatcagccgcctgggtgggccgaacttccaccagatcccgatcaaccggccggtagcgccgaaccacaacaaccagcgtgatgcgctgcaccagcacgtcgtgcacaagggccgggcttcctacgagcccaactcgattgacggcggctggccgaaggaaaccccgcctgcggcgcaagacggcggcttcgagagctatcaggagcgtatcgatgcgcacaagattcgccagcgcagtgagtcgttcggcgatcacttctcgcaggctcggctgttcttccatagcatgagtccgaccgagcaacagcacatcatcaaggcttacagcttcgaattgggcaaagtggagcgtgaacatatccgcgcccgggaagtgaatgaaattctcgccaacatcgacctgaagctggcggcggcagttgcggccaacctgggcctccctgcgccgaaagcgggtacggtgaaggtgaagggtagccagttggcgcaatcgcctgcgctgagccagatgaaccacccaggttcggtgggtatcaaggggcgcaagattgctgtgctggtggccgatggcgtggacgctgccagcgtggacaaactggtcaaggccctggaagcgcacagtgcccggccgatgctgctggggccgacctcggcgccggtgaaggcggcggatggcaagcaactgccagtagcggcgtcgatggaggggatgccttcgatcatgttcgacgggattgtcgtgccagcgggcaaggcctctacggatgcgctggcggctagcggattggccaagcacttcgtactggagggttacaagcacttgaaggcgctggtgctgaccaaggaattggcgaaagcgttggggctaaaggaggacaaggggctgttgctcggggatgagcagaaggcagtggatgcctttgtcaaagcggtagaaggccaccgggtgtgggagcgggaggcggcggctgaagctgttcctgcc

SEQ ID NO: 31326 - DNA, 645 bp, Pseudomonas putida
atggctaccgaacgtcactactcgccgctcgaccgcttgttgctgcaggccgataccgccatgcgcaccttgctgcccttcagcggccaacccacccggccatcgccggccatcgtccagccagacgctgacctggacgagcagcaggcccgtcatattgccgggctgatgcgcatcaaccataccggtgaagtctgcgcccaggcgttgtaccaaggccaggccctgaccgccaagctgcccgaagtgcgcaaggccatggagcatgccgccgaggaagaagtggatcacctggcctggtgcgaacagcgcattcgccagctgaacagccacccgagcgtgctcaaccctctgttctacggcatgtcgttcggcattggcgcactggccgggctggtcagcgacaaggtcagcctgggcttcgtcgccgctaccgaacatcaggtgtgcaagcacctcgacgagcacctggagcagctcccgcacgaagatgaaaaatcccgggccattctcgagcagatgcgcatcgacgaagaacagcacgccgagtctgcactggaagccggtggttatcgcttcccggcccccgtccgctttggcatgagcttgctggccaaggtcatgaccaagagcacataccgcatc

SEQ ID NO: 31327 - DNA, 801 bp, Pseudomonas putida
atgaacgagcaataccaacaccgggcgcgcaagcgcttcggccagaacttcctgcacgacgccggtatcatcgaccgcatcctgcgtgccatcaacgccaaggccggcgaacacctgctggaaatcggcccgggccagggcgccctgaccgaaggcctgctgggcagtggcgcacagctggacgtggtggagctggacaaagacctggtgccgatcctgcagcacaagttcgccgatcgcagcaacttccgcctgcaccagggtgacgccctgaagttcgacttcaaccagttgggtgtgccgccacgcagcctcaaggtggttggcaacctgccctacaacatctccaccccgctgatcttccacctgctcagccacgccgggctgatccgcgacatgcatttcatgctgcagaaggaagtggtcgagcgcatggccgccggccctggcggcggtgactgggggcgcttgtcaatcatggtgcagtaccactgccgcgtggagcacctgttcaatgtcggccctggtgccttcaacccacctccgaaagtggattcggcaatcgtccgcctggtgccgcacgaagtgctgccgttcccggccaaggaccacctgctgctggagcgtgtcgttcgcgaagcgttcaaccagcgccgcaagaccctgcgcaacaccatgaaaggcctgctggacagcgccgccatcgaggctgctggcgttgatggcagcctgcgccctgaacagctcgacctggcagccttcgtgcgcctggctgaccaactggcggatcagcaacaagcc

SEQ ID NO: 31328 - DNA, 1269 bp, Pseudomonas putida
atgagctacgttatagaccgacgcctgaacggcaagaacaagagcacggtcaaccgccagcgcttcctgcggcggtaccgcgaacatatcaagaaggccgtcgaagaggcggtgagccgccgttccatcatggatatggaacatggcgagcagatcagtattcccgggcgcgacatcgacgaaccggtcttgcatcatggtcgtgggggcaaacagaccatcgtgcatcctggcaacaaagaattcactgccggtgaacacatcccacggccgcaaggcggtggaggcggtggcggtcgcggcaaggccggcaattccggcgagggcatggacgagttcgtcttccagatcacccaggaagaatttctcgaattcatgttcgaagaccttgagctacccaacctggtcaaacgtcacctgactggcgccgacaccttcaagactgttcgcgccggcatcgccaacgaaggcaacccgtcacgcatcaatatcgtgcgcaccctgcgctcggcccatgcccggcgtatcgccctgaccggcagcagccgcgccctgctgcgcgaagcacaaaaggaactcgatcgcctgcgggtcgaagagccggacaatttcaccgatatccaggaagtcgaacaggaaatcgagcgcctgaaggcacgtatcaaccgcctgcccttcctcgacaccttcgacctcaagtacaacctgctggtcaagcaacccaaccccagctcgaaggcagtgatgttctgcctgatggacgtatccggttcgatgacccaagccaccaaggacatcgcaaagcgcttcttcatcctgctgtacctgttcctcaagcgtaactacgagcgcatcgaagtcgtgttcattcgccaccacaccagtgcccgggaagtcgatgaagaagagttcttctactcgcgggaaaccggcggcaccatcgtctccagtgccctaaagctgatgcaggagatcatggccgagcgttacccggccagcgactggaacatctatgccgcgcaggcttctgatggcgacaactggaacgacgactcacccatctgccgcgacatcctctccaaacagatcatgccgcatgtgcagtactacacttacgttgagatcaccccccgtgaacaccaggcgctgtggtatgaatacgagcgtatcggagatgctttccccgacacgttcgcccagcagcagttggtatcggccggcgatatctacccggtcttccgtgaactcttccagcgcaggttagccaca

SEQ ID NO: 31329 - DNA, 1473 bp, Pseudomonas putida
ttggccgagcgttacgccctggacacctaccccaaccagatcgaggtcatcactgccgaacagatgatggacgcctacgcctcggtcggcatgccgctgggctaccaccactggtcctacggcaagcagttcctcagtacggaaaagtcctacagccgcggccagatgggcctggcctacgagatcgtgatcaactccgacccttgtatcgcctacctgatggaagaaaacaccatgtgcatgcaggcactggtgattgcgcacgcctgctacggccataacagttttttcaaaggcaattacctgttccgtacctggactgacgccagttcgatcatcgactacctggtgttcgccaagcagtacatcgcccagtgcgaagagcgccacggcatcgatgctgtggaggacttgatcgactcctgccatgccctgatgaactacggtgtcgaccgctacaagcggccttaccctatttctgcggaagaagagcggcgccggcaacaggagcgcgaagagcatcttcagcgtcagatcaacgacctttggcggacaattccgaaaaacgccgaaaagggtaacgaccgcgatgaggggcgcttccccgccgaaccgcaggaaaacatcctgtatttcatcgagaagaacgccccactgctcgaaccctggcagcgtgaagtagtgcgcatcgtgcgcaagatcgcccagtacttctacccgcagcgccagacccaggtcatgaacgagggttgggcaaccttctggcactacaccctgatgaacgacctgtacgacgaagggctgattaccgaaggcttcatgatggagttcttgcagtcgcacaccagcgtggtgttccagcccggcttcgacagcccgtactacagcggcatcaacccctacgcactgggctttgcgatgtacaccgacatccgccgcatgtgcgaaaaccccaccgaggaagatcgccactggttccccgaaattgccggcagcgactggctttctaccatcaagttcgccatgagcagcttcaaggacgagagcttcatcctgcagtacctgtcgcccaaggtgatgcgcgacctcaagctgttcagcatcctcgatgacgaccagcgcgacgacctgctggtgcccgccatccatgatgaggccggctaccgggtgattcgggagcagctggcagcgcagtacaacctgggcaaccgtgaaccgaacgttcagatctggagcgtcgaccgccgcggagaccgctcgctgaccctgcgacaccagcaacacaaccgcaaaccgctgggcgactcgaccgacgaagtgctaaagcacctgcatcgcctgtggggcttcgatatccacctggagaccgtgcaaggcgagcaagtgatgagtactcaccacatgccgccgcgcggcgagcatagcgaaagcgccgactatggccgcatggacctggctgttatccaccacctc

SEQ ID NO: 31330 - DNA, 1104 bp, Pseudomonas putida
atgcacatctacaaagttggcggcgccgtgcgcgaccgtttgctcggccgccctgtcagcgatatcgactggctggtggtgggcgccaccgtcgaagaaatgctagcaaatggctatcggccggtgggagccgatttcccggtgttcctgcacccgaaaaccggtgaggaatacgccctggcgcgcaccgagcgcaagagtgggcgaggctacggcgggttcacttttcacgccagccccgacgtaaccctggaagaagacctgatccgccgcgacctcaccatcaatgcgatggccgaggatgaggcgggcacagtctacgacccctaccaaggcaagaacgatctggatcaacgcctgctacgccatgtttccccggcattcgccgaagatcctttgcgggtgctgcgcgttgcacgctttgctgcccgttacgcaccactggggttccgggttgccgatgaaaccttggcgctgatgcgccagatcagcgcctcaggcgaactgcaggcactcactgccgagcgcagctggaaggaaatcgagcgcgcgctgatggaagtgcaaccgcaggtattcttcaaggtgctgagcgcgtgtggggccctgcaggagctgctgcctgagctcgatgacggctcccggacattggcggcgctggagcaggcggcggcgcacgaacaaccgctgaacgtgcgctgggcctgcctgttgcgggggttgccaccgacatcgatcaaagccgtcaaccagcgcctgaaggcaccgcgagagtgccaggaactggccatgctgaccggggaatgcctggcgcagggtaatcaggcgctcgaactgcctgccacggcactgctggagctgttgcagaaattcgatgtttaccgacggccgcagcgatttgaggattttttgaccgtttgcgagatggcggcgcggggcgatggcgagcagggttacccacaggccgattacctgcgaggcgcagcagcggcggcgcgagcggtggatgtgaagccgttggtgcaagccgggctgaccggtcaggcactgggcgaagcactcaaaggtgaacggctgaaagcgctcgaggcttaccagcgcggt

SEQ ID NO: 31331 - DNA, 567 bp, Pseudomonas putida
atgttttggttactggcgttgctcgcctacctgctcggctcgctgtccttcgccattgttctcagccgcctctcgggcagcccggacccgcgttccagcggctcaggcaatgccggcgccaccaacatgctacgcctggcaggccgtaaactggcgatcctgaccctgctaggcgacctgtgcaagggccttttgcctgtattgctcgcccgcgctgccgggctggacctgcacgcgcaggcctgggtgggcatatgcgcagtgctgggccacctgttccccctgtacttccgtttcaagggcggcaagggcgtggcgacggctgccggcatgctcatggccctgtactttccggccgcgctgctggccatcggcgcctggctgctgaccttctacctcacgcgcaccagctcactggccgcgctgattgccacgccactcaccttgccattgctggcctggcgcgagcccgaagccctgctgccgatcagcgtactgacagtgatgatcgtgtggcgccaccgcaacaacctgcgcgacttgtttgcagggcgcgaacggcacttc

SEQ ID NO: 31332 - DNA, 1980 bp, Pseudomonas putida
atggccgggctgattccccagagtttcattgacgacctgatcaaccgcctcgacatcgtcgacgtggtgagttcgcgcgtccagctgaaaaaaaccggcaagaactactcggcctgctgcccgttccacaaagaaaaaaccccgtccttcacggtcagccccgacaagcagttctactactgcttcggctgtggcgccggtggcaacgccttgggctttgtcatggaccacgacaacctggacttcccccaggccgtcgaggaactggcccgcgccgccggcatggaagtgccccgcgagcaaggccgccgcgaccagaagccgcgccagcccactgactcgccactgtacccgctactggacgccgcctcggagttctaccgccaggccctgcgcagccacccgtcccgcaaggcagcggtggactacctcaagggccgcggcctgtccggggaaattgcccgcgacttcggcctgggctttgccccgcccggctgggacaacctgctcaagcacctgggtgccgacaccctgcagcagaaggtgatgatcgatgccggcctgctgatcgagaacgccgagagcggcaagcgctacgaccgcttccgcgaccgggtgatgttcccgatacgtgacagccgcgggcgcatcatcgccttcggtggccgggtgctcggcgacgacaagcccaagtacctgaactccccggaaaccccggttttccacaaggggcaggagctgtacgggctgtacgaggcgcgcaagcacaaccgcaacctcgacgagatcatcgtcgtcgagggctacatggacgtcattgccctggcccagcaaggcctgcgcaatgccgtggccacccttggcaccgccaccagcgaagagcacctcaagcgcctgttccgcgtggtgcccagcgtgctgttctgttttgacggcgaccaggccgggcgcaaggccgcctggcgcgcactggaatcgacattgtcgaacctgcaggacggccgtcgcgcgcgcttcctgttcctgcccgaaggcgaagacccggacagcctggtgcgcgccgaaggtaccgacgccttcatggcccgtatcaaccagcattcccaaccgctggccgactacttcttcgagcaacttggcgtagaagccgacccgcgctcgctggaaggcaaggcgcatatggcgaccttggccgcaccgttgatcgaaaagatccccggcgccaacctgcgtcagctgatgcgcaaccgcctgaaggaaatcaccggcctcgacccgcagcaggtcgagcagctggcgcaacaagcgccggcgaccagcagcatgccggactacgaccctggctacgattacgacgccatggccagctacacccccgactacggcgacatgccgcagcacgactatgcccccgttcatcaggagcaggcatggaagcccaacaaggggggcagcaagaagccgtggagcgacaaaccctgggacaagaaccgcaagggcggcaagccctggcagcaacgcgacgaagcgcctccccgcgtgccagcgccggtcgagccgcccacgctggccgccctgcgcaccctgctgcaccacccactgctggccggcaaggtggaagatgccagccacttcgccgacgaagaacacctgtacagccagctgctggtggcattgatcgaagccgcgcagaaaaatcctgggctaagctcaatgcagttgatcgcacgttggcatggcaccgaacagggccgcctgctacgcgccctggcggaaaaggaatggcttatcgtggccgacaaccttgaacaacagtttttcgacactataactagcttgtccgcccgccaacgcgagcgcagcctggaacaactgctcaggaaatcacgtcaaagcgaattgaccagcgaggaaaaaacccagctcctcgccctgctgagccgaaatgttcccgcacaaacgccgacctcatctggcgcg

SEQ ID NO: 31333 - DNA, 1845 bp, Pseudomonas putida
aaagcgcaacagcagtctcgtatcaaagagttgatcacccgcggtcgtgagcagggctacctgacttacgcggaggtcaacgaccacctgcctgaggatatttcagatccggaacaggtggaagacatcatccgcatgatcaacgacatggggatcaacgtattcgagagtgctccggatgcggatgcccttctgttggcggaagccgacaccgatgaagccgcggccgaagaagccgctgctgcattggcggcagttgaaaccgatatcggccgcacgaccgacccggtgcgcatgtatatgcgcgaaatgggtactgtcgagctgctgacccgcgaaggcgagatcgaaatcgccaagcgtatcgaggaaggcattcgtgaagtcatgggcgccatcgcccacttcccgggcactgtcgactacattctcggcgaatatgaccgcgtcaccaccgagggtggccgcctgtcggacgttctcagcggttacatcgaccctgacgacaacattgccgcgccaaccgaagaagtgccgatcccaggtgccaaggccgctgcggcgaaggaagagtccgacgacgacgaagaagaatccgaaagcggtgacgacgaggaagaggccgagagcggcccggatccggtcgtcgcagcccaacgcttcggtgcggtatccgatcagcttcaggcaacctccaaggtcctgaagaaaaatggtcgcaaccacaaggaaagcatcgaggccctgcaggccctggctgacctgttcatgccgatcaagctggtaccgaagcagttcgaggtactggtcgagcgtgtccgtgacgccctgaaccgtctgcgacagcaagaacgcgccatcatgcagctgtgcgtacgtgacgcccgcatgccgcgagccgacttcctgcgcatgttcccaagcaacgaaaccgaccagacctggagcggtgacctggccaagcgcaacaccaagtgggctgccgccctgggtgaaaagaacgctgccatcgtcgcttgccaacagaagctgatcgaccttgagaccgaaaccggcctgaccgttgccgagatcaaggaaatcaaccgtcgcatgtcgatcggtgaagccaaggcccgccgcgccaagaaagaaatggtcgaggcgaacctgcgtctggtgatttccatcgccaagaagtacaccaaccgtggcctgcagttcctcgacctgatccaggaaggcaacatcggtctgatgaaagcggtggacaagttcgaataccgtcgcggctacaagttctcgacctatgccacctggtggatccgtcaggcgatcacccgttcgatcgccgaccaggcacgcaccatccgcattccggtgcacatgatcgagacgatcaacaagctcaaccgtatttcccgccagatgctgcaggaaatgggtcgcgaaccgactccggaagagctgggcgagcgcatggaaatgcctgaggacaaaatccgcaaggtattgaagatcgccaaagagccgatctccatggaaaccccgatcggtgacgacgaagattcgcacctgggcgacttcatcgaggactcgaccatgcagtccccgatcgacgtggccacggtcgaaagcctcaaggaagccacccgtgacgtgctctcgggcctgaccgcacgtgaagccaaggtgctgcgcatgcgtttcggtatcgacatgaacaccgaccacaccctcgaagaggtgggcaagcagtttgacgtaacgcgtgagcggatccgtcagatcgaagcgaaggcgttgcgcaagctgcgccacccgactcgcagcgagcacctgcgctccttcctcgacgagtgatga

SEQ ID NO: 31334 - DNA, 699 bp, Pseudomonas putida
atgaccaccaccaattccactacagacgtcggcagcgcatacctgacctcgctgcagaagcagacgtccaagactgacagctctaccggcgccgccggcagcgcgctgggcaaggacgcgttcctgcagttgctggtcacccagatgcagaaccagaacccgctcgacccgcaggaaaacggcgagttcgtggcccagttggcgcagttcagcagcctggaaagcatgcagtcgctgaacgacgctgtgacctacatcgcggccgggctgcaatcttcccaggccttgcaggcctcctcgctggtcgggcgcaatgtcattgtccagaccgacaaggctgtggtcgataccagcaaggacatgaagggctcggtcaacctgacgtcgtccagtacctccacctcggtggggatctacgacaaggacgacaagctggtgcgcaccatcgaactcggtacccagaagtctggcagcatcgactttacctgggatggcctgaacgatgacggtgaagtcgcggccgccgggacctacaccttcaaggccaccgcctcgatcgatggcaaggccacggccatgaccaccaacctgccggcctcggttaccagtgtgaccatgggtagcaacggttcggagatgacgctcaacctggccgggctgggcagtgttgcgctttccaaaatccaaagcatcggcatc

SEQ ID NO: 31335 - DNA, 1383 bp, Pseudomonas putida
gtgagcatgcaacagattatccagactaccctgttgatcatcggcggcggccctggcggctatgtagcagccatccgcgccgggcaactgggcattcctaccgtactggtggaaggccaggcactgggcggcacctgcctgaacatcggctgcatcccgtccaaggcgctgatccacgtggccgagcagtttcaccaggcctcgcgctttaccgaaccctcgccgctgggcatcagcgtggcttcgccgcgcctggacatcggccagagcgtcacctggaaggacggcattgtcgaccgcctgaccacaggtgttgccgccctgctgaaaaagcacggggtgaaagtggtgcatggttgggccaaggtactggacggcaagcaggtcgaggtcgatggccagcgtatccagtgcgagcatctgttgctggcgaccggttccagcagtgtcgaactgcctatgctgccgctgggtggcccggtgatttcctcgaccgaagccctggcgccgaaaaccctgccgcaacacctggtggtggtcggcggtggctatatcggcctggagctgggcattgcctatcgcaagctgggtgcacaggtgagtgtggtggaagcgcgggagcgcatcctgccgacctacgacagcgaattgaccgccccggtggccgagtcgctgaagaaactgggcatagcgttgcacctgggccacagcgtcgagggctacgaaaatggctgcctgctggccagcgacggcaagggtgggcaactgcgccttgaggccgaccaggtactggtggccgtgggacgccggccacgcaccaagggcttcaacctggaatgcctggacctgaagatgaacggcgccgccattgccatcgacgagcgctgtcacaccagcatgcacaacgtctgggccatcggcgacgtcgctggcgaaccgatgctggcgcaccgggccatggcccagggcgagatggtcgccgaaatcatcgccggcaaggcccgacgctttgaaccgacagcgattgccgccgtgtgctttaccgacccggaagtggtggtggtcggcaagaccccggaacaagccagccagcagggcctggactgcatcgtcgcgcagttcccgtttgccgccaatggccgggccatgagcctggaatcgaaaagcggtttcgtgcgggtggtggcgcgccgtgacaaccacctgatcgtgggttggcaggcggttggcgtggcggtctccgagctatccaccgcgtttgcccaatcgctggagatgggcgcgtgcctggaagatgtggccggtaccattcatgcccacccaacgctcggtgaagcggtacaggaagccgcactgcgcgccctgggccacgccttgcatatc

SEQ ID NO: 31336 - DNA, 1269 bp, Pseudomonas putida
atgggcacgcacgtcatcaagatgccggacattggcgaaggcatcgcgcaggtcgagttggtggaatggttcgtcaaggtcggcgacatcatcgccgaggaccaggtggtggccgacgtcatgaccgacaaggccaccgtggaaatcccctcgccggtcagcggcaaggtgttggccctgggtggccagcccggggaagtgatggcggtcggtagcgaactgatccgcatcgaagtggaaggcagcggcaaccatgtggatgtgcctcagccaaaaccggtagaggccccggctgcccccattgcagccaagccggaaccgcagaaagacgtaaaacccgccgtgtaccaggcgcccgccaaccacgaagctgcgcccatcgtgccgcgccagccgggcgacaagccgctggcctcgcctgccgtgcgcaaacgcgccctggacgccggtatcgaactgcgttatgtgcatggtagcggcccggccgggcgtattctgcacgaagacctcgatgccttcatgagcaagccgcaaagcaatgccgggcaagcacctgatggttatgccaagcgcaccgacagcgagcaggtgccagtgatcggcctgcgccgcaagattgcccagcgcatgcaggacgccaaacgccgggtcgcgcacttcagttatgtcgaggaaatcgacgtcaccgccctggaggccctgcgccagcaactcaacagcaagcacggcgacagccggggcaagctgaccttgctgccattcctggtacgcgccctggtcgtggcgctgcgtgacttcccgcagatcaacgcgacctacgatgacgaagcgcagatcatcacccgccatggcgcggtgcatgtgggcattgccacccaaggtgacaacggcctgatggtgcccgtgctgcgccacgccgaagcgggcagcctgtgggccaatgccggcgagatttcgcgcctggccaacgctgcacgtaacaacaaggccagccgtgaagagctgtccggctcgaccatcaccctgaccagccttggcgccctgggtggcattgtcagcacgccggtggtcaacaccccggaagtggcaatcgtcggggtcaaccgcatggtcgaacggccagtggtgatcgacggccagatcgtcgtgcgcaagatgatgaacctgtccagctcgttcgaccaccgcgtggtcgatggcatggatgccgccctgttcatccaggccgtacgtggcctgctcgaacaacccgcctgcctgttcgtggag

SEQ ID NO: 31337 - DNA, 2145 bp, Pseudomonas putida
atgctcgaacaggctcagcgcgttctcaaggacatcttcggctacgacagtttccgtgggcgccaggcagcgatcatcgaatgcgtggccaatggcggcgatgccttggtactgatgcccaccggtggcggcaaatcgctgtgtttccaggtgccggggctgctgcgcccgggcttgacggtggtggtatcgccactgatcgcgctgatggacgaccaggtcgccacccttgacgagctgggtgtgtctgcggccgccctgaactctaccctgacggcggagcagcagcgtgaactggccgggcgcctgcgccgtggtgaggtcaagatgctgtacctggcgccggaacgcctggtgcagccgcgcatgctcgacttcctgcgcgatctggacatctcgctgttcgccattgacgaggcccactgcgtttcgcaatgggggcacgatttccgcccagagtacctgcagctgggccagctggccgaactgtttccgcatgtgccgcgcattgcgcttaccgctacggccgacatgcgaacccgcgaggagatcgttcagcgcctgcacctgcaaggcgccgagcgcttcctgtcgagtttcgaccggcccaacatcttttaccgcatcgtgcccaaggaggcaccgcgcaagcagttgatggccttcctcggcgaacgtcgtggcaacgctggcatcgtctactgcctgtcgcgcaagaaggtcgacgaaaccgccgccttcctctgtagtcaggggttccccgcgctgccgtatcacgccggcctggccgccgagacgcgggcggccaaccagcatcgcttcctgaacgaggaagggctgatcatggtcgctaccattgctttcggcatgggtatcgacaagcccaacgtgcgcttcgttgctcacctcgacctgcccaaatcgcttgaagcctactatcaggaaaccggccgggccggccgtgacggcctgccctccgatgcctggatggcctacgggctgcaggacatggtgatgctcaagcagatgctgcagaactccgaaggcgacgagcgccacaagcgcatcgagcagcacaagctggacgccatgctggcgctgtgcgaagaaacccgctgccgccgccagtcgctgctggcgtacttcgacgagatcctcgaacaaccgtgcgggcactgcgacaactgtgtcgacaacatccagacctgggacgctaccgagccggcccgccaggcgctgtcggcggtgttccgcaccggccagcgctatggtgttggccacctggtcgatgtgctgttgggcaaggacaccgagaaggtgcgcaatttcggccacgagaagctgtcggtattcggcgttggcaaaggcttggccgaggtcgagtggcgctcactgttccgtcagttggtggcgcgcggcctggtcgatatcgacctggaaggctacggcggcctgcgcctgtccgacagctgccggccgctgctgcgcggcgaggtgaccttgcaactgcgccgtgatctcaaaccgcagaccacggccaaaacctcgtcgtccagcggcggcagcccggccagccagctggtgcgtgccgaagagcgcgatctgtgggaagcgctgcgtaccctgcgccgcaagctggccgaagaacacagtgtgccgccctacgtcatcttccccgactcgacactgctggagatgctgcgcagccagccggtcagcctcagcgacatggcccaggtcagcggtgtgggggcgcgcaagctggagcgctacggccaggcgttcctcgaagtgctgaacaacagcggtggcaccgacgaggctccgaaagtggtgctcgacctgcgccacgaactggtcagcctggcccgtgccggcatgaccccggcgcagatcgccgggcagctcaactgcagcgagaagaacgtgtatagcctgctggccgaggcgttgggccgccaggagctgagtctggaccaggccatcgacctgccggaagacctgatgatggaggtgcaggacgcctttcttgatggcgagggtgagctgccaccggtgtcggccattgccccgcagttcggggcgcgggtgccggagggcgtactctattgcgtgcgcgcagcactggcggcggaattcgaattg

SEQ ID NO: 31338 - DNA, 1093 bp, Pseudomonas putida
gaaatccaaccgatcctgaacaccatcaaggacctcaccgagcgttcccagtcaattcgggggtatctttgactacgatcacaagcatgaccgcctgatcgaagtcaaccgcgagctggaagaccccaacgtctggaacaaacctgagtacgcccaggcactgggccgcgagcgtgccatgctggcccaggtcgtcgagaccctggacaagctgtccaacggcctgggtgactgccaggacctgctcgacatggccgtcgaagagaatgacgaaggcgctgtcggcgacgtcgtgaccgagctggaaagcctggaagaaaacctggcccagcttgagttccgtcgcatgttcagcggcgagatggacatgaacaacgcctacctggacatccaggccggttccggtggtaccgaagcgcaggactgggccaacatcctgctgcgcatgtacctgcgctgggccgacaagcgtggtttcgatgccaccatcatcgagctttccgaaggtgaagtggccggtatcaaaggtgcaaccgtgcacatcaagggtgaatacgccttcggctggctgcgcaccgaaatcggcgtgcaccgcctggtgcgcaagagcccgttcgactccggtgcccgtcgccacacgtcgttctcggcggtgttcgtatcgcccgagatcgacgacaaggtcgaaatcgagatcaacccgtccgacctgcgcatcgacacctaccgctcctccggtgccggtggtcagcacgtgaacaccaccgactcggcggtccgtatcacccacgtaccgaccaataccgtggtggcttgccagaacgaacgttcccagcacgccaacaaggacaccgccatgaaaatgctgcgggccaagttgtacgaactggaaatgcagaagcgcaatgccgcctcgcaggcgctggaagacagcaagtcggacatcggctggggccaccagatccgctcttacgtactggatgactcgcgtatcaaggacttgcgtaccggcgtcgagcgtagcgactgccagaaagtcctggacggcgaccttgaccagtacctggaagcgagcctcaagcagggcctgtaa

SEQ ID NO: 31339 - DNA, 1674 bp, Pseudomonas putida
atgagcgaaagctttgcagaactctttgaagaaagcctgaaaaccctcaatcttcagccgggtgcgatcatcaccggtatcgttgtcgacatcgacggcgactgggttaccgtacacgctggcctgaagtccgagggcgtcatcccgctcgagcagttctacaacgaagctggcgagctgaccatcaaggtcggtgacgaagttcacgttgcgctggacgcggtcgaagacggctttggcgaaaccaagctgtcccgtgaaaaagccaagcgcgccgagtgctggattgttctggaagcagctttcgccgccgaagaagtggtcaagggcgttatcaacggtaaggttaagggcggcttcactgtcgacgttaacggcatccgtgcgttcctgccgggctccctggttgatgtccgcccagtgcgcgacaccacccacctggaaggcaaagagctggaattcaaggtcatcaagctggaccagaagcgcaacaacgttgtcgtttcccgtcgcagcgtgctggaagccgagaacagcgccgagcgcgaagccctgctggaaaccctgcaggaaggccagcaagtcaaaggtatcgtcaagaacctcaccgactacggcgcattcgtggacctgggcggtatcgacggcctgctgcacatcaccgacatggcctggaagcgcatcaagcacccatcggaaatcgttaacgttggcgacgaagtcgacgtacgcgttctgaagttcgaccgtgagcgcaatcgcgtttcgctgggtctgaagcagatgggcgaagatccgtgggtagctatcactgcccgttacccagaaggtactcgcgtacaggctcgcgttaccaacctgaccgactacggctgcttcgctgagctggaagaaggcgttgaaggtctggtacacgtttccgaaatggactggaccaacaagaacatccacccgtcgaaagtcgttcaggttggcgacgaagtggaagtcatggttctggacatcgacgaagagcgtcgtcgtatctccctgggcatcaagcagtgcaagtccaacccatgggaagacttctccggccagttcaacaagggtgacaagatcaccggtaccatcaagtcgatcaccgacttcggtatcttcattggtctggacggcggcatcgacggtctggttcacctgtccgacatctcctggaacgaaaccggcgaagaagccgtgcgtcgtttcaagaagggcgatgagctggaaaccgtcatcctgtcggttgacccagagcgcgagcgcatctccctgggcatcaagcagctggaagacgatccgttctccaacttcgttgctgtcaatgacaagggcgctatcgtcaagggcatcgtgaaagaagttgacgccaaaggcgccatcgtcaccctggccgacgacatcgaagccactctgaaagcttccgaaatcagccgtgaccgcgttgaagacgcgcgtaacgttctgaaggaaggcgaagagatcgaagccaagatcatcagcgttgaccgcaagtcccgcgttatcagcctgtcgatcaaatcgaaagacgacgctgaagagcgcgaagctatccagagcctgaaaaacgctccggaagctgctgccgacaccaccatggctgcgctgctgcgcgaagcaatggccaagcagaac

SEQ ID NO: 31340 - DNA, 2418 bp, Pseudomonas putida
ttgatcgctgtcggcgctctgtgcctgtacctgtggatggcgctgctgacctacgatacgtcggacccgggcttcagccacaccagcaacgtcgaccaggtgcagaatgcggccgggcgtgccggtgcctatttcgccgacatcctgttcatggtgctgggttacttcgcctatattttcccgctgctgctggcggtcaaaacctggcagattttccgcgaacgccaccagccgtgggactggagcggctggctgttctcctggcggctgattggcctggtgttcctggtgctgtcgggggcggcactggcgcatatccacttccacccgcccgccagcctgccgttctccgccggtggagcactgggcgaaagcctgggcgacctggcgcgcaacctgctgaacgtgcagggcagcacgctgatgttcattgccctgttcctgttcggcctgaccgtcttcaccgacctgtcgtggttcaaggtgatggacctgaccggcaagatcaccctcgacctgttcgaactggtgcaaggggctgccacccgctggtgggaagcgcgcaacgagcgcaagcgccttgaggcacagctgcgcgaggacgaaccggtgttcaaggccgcgccgatggctgccgagaagcgcgagccggccaagccgtcactgcgcgagcgcatcctcaagcgtgaagagccacccgctcagccggtcgagccacgtgagccaacccttgcgcgcgaaccgattgtgccgccacgtgaaacggcgcctgaggcattggcgccgcgtgaaaccgtggtgccccgccagcagcacgcagcgcccaccattgtgccgccgtccgccgccagcagagcgccggagccgagcaagcgggcgatgaaggaaaagcaggcgccgctgttcgtcgacagcgccgtggaaggcaccttgccctcgatttccatcctcgacccggccgaacagaagaagatcgagtattcgccagaatccttggccggcgtcggccagctgctggaaatcaagctcaaggagttcggtgtggaagtggcggtggattcgatccaccccggcccggtgattacccgttacgaaatccagccggccgctggcgtgaaggtcagccgcatcgccaacctggccaaggacctggcgcgttcgctggccgtgaccagtgtgcgagtggtcgaggtcatccctggcaagaccacggtaggtatcgagatacccaacgaaaaccgccagatggtgcgcttctccgaagtgctggccacgccgcagtacgacgagcagaaatcgcccgtcacgctggcgctgggccacgacattggcggcaagccggtgatcaccgacctggccaagatgccgcacctgttggtggccggtactaccggctccggtaagtcggtgggtgtgaacgcgatgattttgtcgatcctgttcaagtccagcccggaagacgcgcggctgatcatgatcgacccgaaaatgcttgaactgtcgatctacgaaggcatcccgcacctgctgtgcccggtggtcaccgacatgaaggacgccgccaatgccctgcgctggagcgtggccgaaatggagcggcgctacaaactgatggcggccatgggcgtgcgtaacctggctggtttcaaccgcaagatcaaggacgcccaggaagccggcgaagttatccatgacccgctgtatcgccgtgagagcatggacgatgagccgcctgcgctgaaaaccctgccgaccatcgtggtggtggtggacgaattcgccgacatgatgatgatcgtcggcaagaaggtcgaagagctgatcgcccgtatcgcgcagaaggcacgggcggccggtattcacctgatcctcgccacccagcgcccgtcggtggacgtgatcaccggcctgatcaaggccaacatcccgactcgtatggcgttccaggtgtcgagcaagatcgactcgcgtaccatcatcgaccagggcggtgccgaacagctgctgggccatggcgacatgctgtacatgccgccgggcaccagtctgccgatccgggtgcacggcgcattcgtgtccgacgacgaagtgcaccgcacggtcgaggcgtggaagctgcgtggcgccccggactacaacgacgacatcctcaacggcgtcgaagaggccggtagcggctttgacggcggcggcggcggtggcgagggtgacgatgccgaaaccgacgccctgtatgatgaggcggtgcaattcgtgctcgagagccgtcgcgcctccatttctgccgtgcaacgcaagctgaagatcggctacaaccgtgccgcgcgcatgatcgagtcgatggagatggccggcgttgtcaccccgatgaacagcaacggctcgcgggaagtgatagccccgggcggcccgcgcgac

SEQ ID NO: 31341 - DNA, 1323 bp, Pseudomonas putida
atggacctgtttcgaagcgaacccgtcgcccagcccctggccgcccgtctgcgcccgtccagcctggatgagtacgtcggccaggagcacctgctggcgcgcggtaaaccgctgcgcgaagcgctggaacaaggtgcgctgcactcgatgatcttctgggggccgcccggggtcggcaagaccacgctggcgcggttgctggcgcagttctgcgatgcgcacttcgaaacggtgtcggcggtgctggccggggtgaaagagatccgccaggccgtggaggtggccaaacagcaggctggccaatatggccgtcgcaccatcctgttcgttgacgaggtgcaccgcttcaacaagtcgcagcaggacgcctttttgccctatgtcgaggacggcaccctgctgttcatcggtgccaccaccgaaaacccgtcgttcgagctgaacaacgcgctgctgtcacgggcgcgggtgtatgtgctcaagagcctggacgaagccgccctgcgcaagctggtcaaccgtgcgctgacggaagagcgtggcctgggcaagcgcaacctgcgggtgggcgacgacgccttcaagatgctgatggccgcagccgacggcgatggccggcgcatgctcaacttcctcgagaacgcctcggacctggctgaagacggcagcgagatcgacgtcgagatgctacagagcctgctgggtgacagtcgccgccgcttcgacaaaggcggcgaggcgttctacgaccagatatccgcgctgcacaagtcggtgcgtggctccaatcccgatggcgccctgtactggtttgcacggatgctcgacggcggctgtgacccgctgtacatcgcccgccgcgtggtgcgcatggccagcgaggacatcggcaatgccgacccgcgtgcgcttagcctgtgcctggctgcctgggatgtgcaggagcgccttggcagccccgagggcgagttggcggtggcccaggccatcacctacctggcctgcgcacccaagagcaacgcggtgtacgtgggtttcaagaccgccctgcgtgaagcggccgagcacggttcgctggaggtgccgttgcacctgcgcaatgccccgaccaagctgatgaagcagttgggctatggcgacgagtaccgttatgcccatgatgaacccgacgcctacgccgccggtgaggattacttccccgacgaactggagccgcgccagtactatcagccggtgccccgtggcctggaactgaaaattggcgagaagctgcgccacctggctgacctcgaccgcaacagcccccgccagcggagaaaacca

SEQ ID NO: 31342 - DNA, 1278 bp, Pseudomonas putida
atgctcgattccaaactgttacgcggccaacttcaggaagtggcggaccgcctggcctcccgtggcttcagcctggatgtcgcgcgcatcgaatcactggaagagcgccgcaaggcggtgcagacccgcaccgaacaactgcaggctgagcgtaacgcccgttccaagtccatcggccaggccaaggccaagggcgaagacatcgccccgctgatggctgacgtcgagcgcatggccaacgaactggctgccggcaaggctgagctggacgccattcaggccgagctggatggcatcctgctgaccattcccaacctgccggacgccagcgtgccggtcggcgccagtgaagacgacaacgtcgaagtgcgccgttggggcacgccgaaggcgttcgacttcgaaatcaaggaccatgtggccctcggtgaaatcagcggtggcctggacttcgaagcggctgccaagctgtccggtgcccgttttgctgtgctgcgtggtccggttgcccgtctgcaccgcgccctggcgcagttcatgatcaacctgcacaccggcgaacatggctacgaggaacactacaccccgtacatggtgcaggcgcccgcgctgcagggcactggccagttgccgaagttcgaggaagacctgttcaagatcacccgcgaaggcgaggctgacttctacctgatcccgaccgccgaagtgtcgctgaccaacctggtggcgggtgaaatcctcgacgccaagcagctgccgctcaaactggttgcccacaccccttgcttccgcagcgaagccggcgcttctggccgtgacacccgcggcatgatccgccagcaccaattcgacaaagtcgagatggtgcaggtggtagagccgtccaagtcgatggaagccctggaaggcctgactgccaatgccgagcgcgtgctgcagctgctggagctgccataccgcgtgctggccctgtgcactggcgacatgggctttggtgcggtgaaaacctacgatctggaagtgtgggtgccgagccaggacaagtaccgcgaaatcagctcgtgctccaactgtggtgacttccaggcgcgccgcatgcaggctcgctggcgcaacccggaaaccggcaagccagagctggtgcacacgctcaacggctccggtctggccgtaggccgtaccctggttgctgtgctggaaaactaccagcaggccgacggttcgatcctagtgccggaagtgctgaagccttacatgggcggcgtcgaggtcatccgc

SEQ ID NO: 31343 - DNA, 1389 bp, Pseudomonas putida
atggattacctgccgctgttccacaagctgcagggcggccgcgtgctggtcgtcggtggcggtgagatcgccttgcgcaaggcgcgcctgctggccgatgccggcggcgtgctgcgcgtggtggcgccggacgtcgacggccagttggccgcgttggcccgggaaggtggcggtgaggtgctggtgcgtggctatcaggcagccgacctggtcggttgccggctggtgatcgcggcgactgacgaccctgggctgaatgcccaggtgtcggccgatgcgcaggcccttagcctgccggtcaatgtggtggatgcgccggccctgtgtacggtgatcttcccggcgatcgtggaccgttcgccgctggtaatcgctgtttccagcggcggtgacgccccggtactggcacgcctgattcgagccaagctcgaggcgtggatcccttcggcctatggtgagctggccgggctggctgcacgcttccggcacaaggtcaaatccctgtacccggacgtcaaccagcgtcgcggcttttgggaaaccgtgttccaggggccgatcgccgagcgtcagctggccgggcagggggctgaagccgaacgtctgttgcaggcgatggtggacggcgcaccggtgcagcagggtggtgaggtgtacttggttggtgcaggcccgggtgatccggacttgctgaccttccgtgccttgcgcctgatgcagcaggccgacgtggtgctgtacgaccgcctggtcgcacccgccatcatcgatatgtgtcgtcgtgatgccgagcgcatctatgtaggcaagcgccgcgctgatcattcagtgccgcaggaccagatcaaccgcctgttggtcgatctggctcggcagggcaagcgggtgctgcgcctgaagggtggcgacccgttcatcttcggccggggcggcgaagagatcgaagagctggccgagcatggcattccgttccaggtggtgccaggcattacggcggccagcggctgctccgcgtatggcggcattccgctgactcaccgcgactatgcccagtcggtgcgcttcgtcaccgggcacctcaaggacggcaccagcaacctgccttggaatgacctggtggcgccggcgcagaccttggtgttctacatgggcttggtgggcttgccgaccatctgtgccgagctgattcgccacgggcgcgccgcgagtaccccggcggcgttggtgcagcaggggaccacgcgtaatcagcgcgtgttcaccggcaccttggcggacttgccagacctggtggcccagcatgaggtgcatgcgccgaccctggtgattgtgggggaagtggtgcagttgcgtgacaagctggcctggttcgaaggttcgcagaacagc

SEQ ID NO: 31344 - DNA, 2271 bp, Pseudomonas putida
gtgcgtggccggggtttgtgctgttacttcaagcgaaccttacagggcagcgatggcgctgttcagggtctggcttgggcgcatcaccttggcggtcagctcggcatccggggcgtagtagccgccgatgtcggctggcttgccctgaacggcgttgagctcggcgacgatggtcgcttcgttctcggccagggtttttgccagtggtgcgaagcgtgcctgcagggcagcgtcgtccgtctgagcggccagggcctcggcccagtacagggtcaggtagaagtggctaccgcggttgtcgataccgccgactttgcgcgatggcgacttgttggtgtcgaggaacttgccggtagcctggtccagggtgttggccagaaccttggcgcgcgggttgtcgtaggtgttgcccaggtgctccagggaagcggccagggccaggaattcacccagcgagtcccaacgcaggaagttctcttcaaccagctgttgcacgtgcttcggagccgaaccgccggcgccggtttcgaacaggccaccgccgttcatcagcggcacgatcgacagcatcttggcgcttgtgcccagttccatgatcgggaacaggtcggtcaggtagtcgcgcagcacgttgccggtcaccgagatggtgtccttgccttcgcggatgcgggccagggagaacttgatggcgtcgaccggtgccaggatacggatgtccaggccggtggtgtcgtgatctttcaggtacttctgcaccttctcgatcatgacgccgtcgtgggcacgagccgggtccagccagaacaccgccggggtgttgctcaggcgggcacggttgacggccagcttgacccaatcctggatcggcgcgtccttggtctggcacatgcggaagatgtcaccggcttcgacgttctgctccagcacgacgttgcccttgccatcgactacgcgaaccacgccgtcagccttgatctggaaggtcttgtcgtgggagccatactcttcggctttctgcgccatcaggccaacgttcggcacgctgcccatggtggtcgggtcgaaggcaccgttgaccttgcagtcttcgatggtggcctggtagatgccggcgtagcagcggtccgggatcacggccttggcgtcttgcagttcgcctgcggcgttccacatcttgcccgagtcacggatcatggccggcatcgaggcgtcgacgatcacgtcgctcggcacgtgcaggttggtgatgcctttgtcggagttgaccatggccagggctgggcgctctgcgtacagggcctggatgtcggcttcgatctcggcctgcttgtcggctggcaggtccttgatgcgggcgtacaggtcgccgataccgttgttggcgttgaagcctacttcggccagggcagcggcgtgcttggtcagcacgtcgttgtagaattcttcgacgatgacgccgaacatgatcgggtcggagaccttcatcatggtggctttcaggtgcaccgacagcagcacgccagcggccttggcatcggcgatctgctcggcgatgaaggctttcagggccttgcggctcatggtggcgcagtcgatgacttcggcggctttgacggcggtcttttctttcagcacggtggtgctgccgtctttgccgaccagctcgatgcgcaggctgtcgtcagcttcgatcagtgcggctttttcgctgccgtagaagtcgccctgggtcatgtgggcaacgtgcgacttggagtcagcggcccaggcgcccatcttgtgtgggtgcttgcgggcgtagttcttgaccgacagcggcgcgcggcggtcggagttgccttcgcgcagcaccgggttcacggcggagcccttgatgcggtcgtagcgggcgcgggattctttttcttccgcggtggccggctcgtcggcgtagtcagggatgttgaagcccttgccttgcagttccttgatcgcggctttgagctgcggtaccgaggcgctgatgttcggcagcttgatgatgttggcttcaggggtggtagccagctggcccagttccgccaggtgatcgcctacttgcttctctgcgcccagttgctccgggaaggcggcaaggatacggccagccagggaaatgtcgcgagtttcgacagcgatgtcagccgaagcggtgaacgcttcgatgatcggcagcagcgagtaagtggcgagggcgggggcttcgtcggtgaaggtatagatgatcttggaacgggtgggcatgcgggt

SEQ ID NO: 31345 - DNA, 1140 bp, Pseudomonas putida
atgctgatagttgccgacgagaacatcccgctgctcgatgccttcttccagggtttcggtgaaattcgccgctaccccggccgaagcctcgatgctgccagcgtcaaggacgccgatatcctgctggtgcgctcggtgaccaaggtcgaccgtcagttgctcgaaggcagccgtgtacgctttgtcggcacctgcaccatcggcactgatcacctggacctggactactttgcagaagctggcatccactggagcagcgcacctggctgcaatgcccgcggcgtggtcgattacgtgctgggcagcctgctgaccctggccgaactggatggcgtggcattgcccgagcgcgtgtatggcgtagtgggcgcgggtgaagtgggtggccgcctcgtgcgggtgctgcatggcctgggctggaaggtgctggtgtgcgacccgttgcgtcaggccgccgagggcggcgactacgtcagcctcgaaaccatcctgcagcagtgcgatgtgatcagcttgcataccccgttgcaacgcggcggccagcacccgacctggcacctgctggggcaggcgcagctggcacagttgcgcccgggtgcctggctggtaaacgccagccgtggcccggtggtggacaacgtggccctgcgcgagctgctgctggaccgcgaagacgtgcacgcggtgctggatgtgtgggaaggggagccgcaggtcgacctgcagttggccgacctgtgcaccctggctacgccgcacattgccggctatagcctcgatggccgccagcgtggcacggcgcggatctaccaggcgctgtgccgcttcctcggtgtgaacgagcaggtgcggctggccgagctgctgcccaaaccaccgctggcacagattgagctggatgccagcaccgacctgtcctgggccttggccaccctgtgtcgcgccgtgtatgacccgcgccgtgatgatgccgatttccgccgtagcctcagcgatgatccgcagcaacagcgagcggcgttcgaccagttgcgcaagcaatacccgccaaggcgcgagatcgaggggctggccgtgcgcttgcacggggaggcgccgcagttggcgcagttggtcagtgccctgggtggggtgttggtc

SEQ ID NO: 31346 - DNA, 1254 bp, Pseudomonas putida
atgggataccagaaaatcaaggttccgaccgacggcaccaaaattaccgtcaatgcagaccattcgcttaacgtgcctgaccatccgatcattccttacatcgaaggcgacgggatcggcgtcgatgtttcgccggtaatgatcaaggtggtcgatgccgccgtgcagaaggcctacggcggcaagcgcaagattgcctggatggaggtgtacgctggcgagaaagccacccaggtgtatgaccaggatacctggctaccgcaggaaaccctcgatgccgtgcgtgattatgtggtatcgatcaagggcccgctgaccacgcccgtcggtggcggcatccgctccctcaacgtggccctgcgccagcaactggacctgtatgtatgcctgcggccggtgctgtggttccagggtgtgccaagcccggtgaaaaagccgggcgacgtcgacatggtgatcttccgcgagaactccgaagacatctatgccggcatcgagtggaaggccgggtcgcccgaggcgaacaaggtgatcaagtttctcaaggaggaaatgggggtcaccaagatccgcttcgaccaggactgcggtatcggcgtcaagccggtgtcgaaggagggtaccaagcgtctggtgcgcaaggccctgcaatacgtggtggataacgaccgcgaatcactgaccctggtgcacaagggcaacatcatgaagttcaccgagggtgccttcaaggactgggggtacgaggtggcgcgtgacgagttcggcgctgaactgcttgatggcggcccttggatgaagttcaagaaccccaagaccggtcgcgaggtcatcgtcaaggacgccatcgccgacgccatgctgcagcagatcctgctacgcccggccgagtacgacgtgatcgccaccctcaacctcaacggtgactacctgtccgatgccctggccgcagaagtgggcggtatcggcattgccccgggcgccaacctgtccgacaccgtggccatgttcgaggccactcacggcactgcgcccaagtatgccgggcaggacaaggtcaacccgggctcggtgatcctctcggcagagatgatgctgcgccacatggggtggaccgaggccgccgacctgatcatcaagggcaccaatggcgccattgcggccaagaccgtgacctacgatttcgagcgattgatggagggcgccaagctggtaagcagctcaggctttggcgatgaaatgatcaaacacatg

SEQ ID NO: 31347 - DNA, 3318 bp, Pseudomonas putida
atggccaagcgttcccgcccggcagccttcatcgacgacccgctgtggtacaaggacgccgtcatctaccagctgcacatcaagtcgttcttcgactcgaacaatgacggcatcggcgatttcgccgggctgatcagcaagctcgactatatcgccgagctgggtgtcaacaccttgtggctgctgccgttctatccctcgccacgccgtgacgacggctacgacatcgccgaatacaaggccgtgcaccctgactacggcagcatggccgacgcccgccgtttcatcgccgaggcccacaagcgcggcctgcgggtgatcaccgagctggtcatcaaccacaccagcgaccagcacccgtggttccagcgcgcccgccacgccaagcgcggcagcaaggcgcgcgagttctacgtgtggtcggacgacgaccagaagtacgacggcacgcgcatcatcttcctcgacaccgagaagtccaactggacctgggacccggtcgccggccagtacttctggcaccggttctactcccaccagccggacctcaacttcgacaacccgcaggtgctcaaggcggtgatcggcgtcatgcgcttctggctggacctgggtgtagatggcttgcggctggacgcgatcccttacctgatcgagcgcgacggcaccaacaacgaaaacctcgccgaaacccacgatgtgctcaaggcgatccgcgccgagatcgacgccaactaccccgatcgcatgctgctggccgaagccaaccagtggcctgaagacacgcgcccgtacttcggcgaaggcgacggcgacgaatgccatatggctttccactttccgttgatgccgcgcatgtacatggccttggccatggaagaccgcttccctatcaccgacatcctgcgccagaccccggaaatcccggccaactgccagtgggcgatctttttgcgcaaccatgatgaactgaccctggaaatggtcaccgaccgcgagcgcgactacctgtggaactactacgccgaagaccgccgcgcgcgcatcaacctgggcattcgccggcgcctggcgcccctgctgcagcgtgaccgtcggcgcatagagctgctgaccagcctgctgttgtcgatgcccggcacgccaaccctgtattacggcgacgaactaggcatgggcgacaatatctatctgggtgaccgcgatggcgttcgcacacccatgcagtggtcgccagaccgcaacggcggtttttcccgcgccgacccgcagcgcctggtgctgccgccgatcatggacccgctctacggttaccagactgtcaacgtcgaggcgcaaagccacgacccgcattcactgctgaactggacccggcgcatgctggcggtgcgcaagcagcaaaaggcctttggccgcggcagcctgcgtaccctcacgcccagcaaccgccgcatccttgcctatatccgcgagtataccgacgccgacggcaataccgaggtcatcctctgcgtggccaacgtgtcccgtgccgcccaggctgccgaactcgaattgtcacaatacgccgacaaagtaccggtggagatgctgggtggcagcgcgttcccgccaataggccaactgccgtttctgctgaccttgccaccttatgcgttctactggttcctgctggccagccgcgatcgcatgcccagctggcacatccagcccaccgaggggttacccgaattgaccacattggtactgcgcaagcgcatggaagaactgctgcaagcccccgcaagcgatacgctgcaaagcaccatcctgccgcagtacctgcccaagcgccgctggttcgccggcaaggaagggccgatcgatgccgtgcgcctgtgctacggcgtgcgtttcggcaccgccaccacgccggtgttgctcagcgaaatcgaggtgctcagcgacggcacggccacccgctaccagctgccgttcggcctgctgcgtgaggaacagatccataccgcgctgccgcagcagctggcgttgtcgcgggtgcgccgtgcccaccaggttggcttgatcacagacgccttcgtcctcgagccgttcattcacgccgtgatgcaagcctgccaggatggcctgcgtctgccgtgtggcgacgctgagggtgaattgcgcttcgaatgcacagaacagctggccggcctggcgctcgacgaggagagcgaagtgcgctacctcagcgccgagcagtccaacagttcggtggtcatcggcgaccgcgtggtgctcaagctgatccgccgggtcaacccgggcatccatccagagctggaaatgagtgcctacctgaccgccgccggctttgccaacatctcgccgctgctggcctgggtcagccgggtggacgaacaacacgcgccgcacctgctgatgattgcccagggttacctgagcaaccagggcgatgcctggggttggacccagaacacgctggaaagggccatccgcgaccagatggagcccacccgcaacgacgccgaagcgcacactgacgcattggccgaactcagcggctttgccgccttgcttggccagcgcctgggcgagatgcacctgctgctggccgcacccaccgaagacccggccttccagccgcgccccagcgatgcgcaggacagcgagcgctggtgtgcacagatcagcactgaactgacccacgccctcgacctgctggcccagcatcgcgacacactggacagcgatagccagtccttggtcgacgacctgcagcaacagcgtgacggcctggcccagcacatcgacaccctgagcaagcaggctcagggtggcctgcttatgcgtgtacacggcgacctgcacctgggccaggtgctcgtggtgcagggtgatgcctacctcatcgattttgaaggtgaacccgcccggccccttgaagagcgccgggcaaaacacagcccttacaaggatgtcagcggcgtgctgcgatccttcgactatgctgctgcgatgatcttgcgcagcgcgtctgcggtggacctttccgagccggcgcggcaagcccggcagcgggttgcccggcagtacctgcaccagtcccggcatgcctttgtcgaagcctatggcctggccactgccgccatgccccatgcctggcagcacgccgagggcgagcgcgcggcgctggagctgttctgcctggaaaaagccgcctacgagattacatacgaagccgaaaaccgtccgagctggctggccgtgcctttgcatggtctgcatggactgatcagtacctggggagagtcagaa

SEQ ID NO: 31348 - DNA, 117 bp, Pseudomonas putida
atgctgcaggtcaaaatgttcatcgttgccggtctgctcgacgccgtaaccatgatcggtgttggtatcgctctgttcttcaccttcgcgaatccgttcgttggtcagatcgccggc

SEQ ID NO: 31349 - DNA, 1021 bp, Pseudomonas putida
atgagtgataaccgagccgttaccgccaagctgagccgcgtcgacaaggcggcgatcctcctgctctcgctgggcgagaccgatgcggcccaggtgctgcggcacatgggcccgaaggaagtgcagcgggtgggtgtggccatggcgcagatgggcaatgtgcaccgtgaccaggtcgaacaggtgatgagcgagttcgtcgacatcgtcggcgaccagaccagcctgggcgtcggttctgatgcgtacatccgcaagatgctcaaccaggccctgggcgaggacaaggccaacggcctggtcgaccgcatcctgctcggcggcaataccagcggcctggacagcctcaagtggatggagccgcgtgccgtggccgacgtgatccgctatgagcacccgcagatccaggccatcgtggtcgcctacctcgaccccgaccaggccggtgaagtgctgagcaacttcgaccacaaggtgcgcctggacatcgtcctgcgcgtgtcatcgctgaacaccgtgcagccggcggcgctgaaggagctgaaccagatcctcgagaagcagttctcgggcaactccaacgccgcgcgcaccaccctgggtggtatcaaacgtgctgccgacatcatgaacttcctcgacagctcggtggaaggcgcactgatggacgcgatccgtgaaatcgacagcgacctgtcggagcagatcgaagaccctgatgtttgtcttcaacaacctggccgacgtcgacgaccggggcatccaggcgctgttgcgcgaagtgtcctccgacgtgttggtggtgtcgctcaagggcgccgacgagcgggtcaaggacaagatcttcaagaacatgtccaaacgtgcttcggaactgctgcgtgacgatctggaggccaaagggccggtacgggtcagcgacgtggaaaccgcgcagaaagaaatcctcaccattgcccggcgcatggccgaggccggcgagatcgtgctcggcggcaagggcgccgaggaaatgatctaa

SEQ ID NO: 31350 - DNA, 1056 bp, Pseudomonas putida
atgaacgaccacaacaacagcatcaacccggaaaccgccatggccaccactaccatgaccatgatccaggccctgcgctcggccatggatgtcatgcttgagcgcgacgacaatgtggtggtgtacggccaggacgtcggttacttcggcggcgtgttccgctgcaccgaaggcctgcagaacaagtacggcaaatcgcgcgtgttcgacgcgcccatctccgagagcggcatcgtcggtaccgccgtgggcatgggtgcctatggcctgcgcccggtggtggagatccagttcgccgactacttctacccggcctccgaccagatcgtctccgagctggcccgcctgcgttaccgttcggccggcgagttcattgccccgctgaccctgcgcatgccttgcggcggcggcatctatggcggccagactcacagccagagcccggaagcgatgttcacccaggtgtgcggcctgcgcaccgtgatgccgtccaacccttatgacgccaaaggcctgttgattgcctcgatcgaatgcgacgacccggtaatcttcctggagcccaaacgcctgtacaacggcccgttcgatggccaccacgaccgccctgtaaccccgtggtcgaagcacccgcacagcgccgtgcccgacggttattacaccgtaccgctggacaaggccgccattacccgccctggcaatgacgtgaccgtgctgacctacggcaccacggtgtacgtggcccaggtggccgccgaagaaagcggcgtcgatgccgaagtgatcgacctgcgcagcctgtggccgctggacctggacactatcgtcgagtcggtgaaaaagaccggccgttgcgtggtggtgcacgaggccacccgcacctgcggcttcggtgccgagctggtgtcgctggtgcaggagcactgcttccaccacctggaggcgccgatcgaacgcgtcaccggctgggacaccccctaccctcacgcacaggaatgggcttacttcccaggcccttcgcgggtaggtgcggcactgaaaaaggtcatggaggtc

SEQ ID NO: 31351 - DNA, 1140 bp, Pseudomonas putida
atggcagaaagcgagagcggtcaggacaagacagaagaccccaccgaaaagcgcaagcgcgacgcccgcgagaagggcgaggtcgcccgctccaaggagctgaacacggtggcggtgaccctggcgggtgccggtggcctcctggcgttcggcggccacgtggccgagacattgcttgcgttgatgcgcatgaacttcagtttgacccgcgacatcatcgtcgatgaacgggccatgggtgccttcctgctggcctcgggcaagatggccatatgggcggtgcagccggtgctgatcctgctgttcgtggtttccttcgtggcgcccatcgcgcttagcggcttcctgttctcgggcagcttgctgcagccaaaattcagccgcatgaacccgctgtcggggatcaagcgcatgttctcgatgcaggccctgactgaattgctcaaggcgctggccaagttcttcgtgattctggtggtggcggtggtggtgctctccggtgaccgccaggccttgctgtcgattgccaatgagccgctggagcaggcgatcatccatagcttgcaggtggtgggctggagtgccttgtggatgtcagccgggctgttgctgattgccgcggcagatgtgccgttccagctgtaccagacgcacaagaaaatgaagatgaccaagcaggaagtgcgcgacgagtacaaggacagcgagggcaagcccgaagtcaagcaacgtattcgccaactgcagcgcgaggtgtcgcagcggcgcatgatggcggcggtaccggatgcagatgtgatcatcaccaacccgacgcattatgcggtggctttgcaatacgacccggagaaaggcggtgcggcgccgttgctgctggccaagggtagcgatttcatggcgttgaagattcgtgaaattggcgtggagcacaacatccagatcctcgaatcgccggcgctggcgcgggcgatctattactccaccgaacttgagcaggagatcccggcggggctgtacctggcggtggcgcaggtgctggcgtatgtgttccagattcgccaataccgcgccggcaagggcaagcgcccagagccactgaaggacgacctgccgatcccgccggacctgcgccgcgacagt

SEQ ID NO: 31352 - DNA, 897 bp, Pseudomonas putida
gtgcccaccgctggcctggacaactacgttcagggtgcgaagttcggcaaggacgaagagttcatgttcggcaagatcggtgcgtcgttcctgccgcgcaaggccgaagagcaagaaacctccgacttgtgcgtagaggccgcccaggcactgttcgccagcaaccccgaccttgatccgcaatcgatcgatgcgttgatcgtggtcacccagaacggcgacgaagaaggtctgccgcacaccgcagccatcgtccagagcaaacttggcctgtctacccgcgtggcggcgttcgacgtgtcgcttggctgctccggctatgtgtatggcctgtatgcgatcaaaggcttcatggaggcggcaggcctgaagaacggcctgctgatcaccgccgacccgtattcgaagatcgtcgacccggaagaccgcaacaccaccatgctgttcggcgacgccgccacggcaacctggatgggtgaaaacgcggtttggaacctgggccaggcgcgtttcggcactgacggttccggtgccgagcacctgaaagtcagtgacggcaagttcttcatgaacggccgccaggtattcaacttcgccctgatcaaggtgccagcgcacctgcacgagctgctggatgccagcggcctgaagtcgtcggatatcgacgccttctgcatccaccagggcagtgcggcgattgtcgacgccgtggcgcgacgctttgaagagcaacacccggagaagttcgtcaaggacatgctggaaaccggcaatacggtgtcctccagtgttccgctgctgctgcagaagcacatgctcgatggcagctggaagcgcgtggcgatcagtggctttggcgtgggcctgtcgtggggctcggccatcctgtaccgcgac

SEQ ID NO: 31353 - DNA, 1749 bp, Pseudomonas putida
atggccatcagcggctcggtcggtgccgaccaggtattgcccacgccaccggaactggcctccggctaccgcagcggtttgcagccggtgcacgccagccggcacatggtcgccgcagccaacccgctggccagtgaagcggggcgggcgatgttgcgtgccggcggcagtgcgattgacgccgccatcgccatgcagatggtgctgacactggtcgagccacagtccagtgggatcggcggcggggcgttcatcctgtactgggatggcaagcgcgtgcaggcattcgacgggcgtgaggcagcacctgcggcggtgacggaaaagctgttcctgcaagccgatggcacacccatgccgttccgggtggcgcagatcggtgggcggtcggtgggcgtgcccggggtgctgcgtgccctgaagcaggcccacgagcagcacggcaagttgccctggcacgccctgttcgccccggccatcgccttggcacgcaacggcttcgcggtttccgagcgcctgcacacactactggccggggacccctacattgcccgctcacccgcaatggcccgttacttcctggatgaacagggcaggccgctggccgtgggtacaatcctgcgcaaccctgagttggcacagaccttggagcagatcgccgcacaggggcccgaggtgttctacagcggtgaaattgccgaagccattgtcgccaaggtgcgtggccatgccaatgccgggtatctgtcgttgcaggacttgcagcagtaccaggccaaggagcgcgagccgttgtgcggcccctacaaggcctggcagatctgcggcatgccgccaccttcatcgggtggggtgaccgtgctacagaccttgggcctgctcgacgccgtgcagcgcaccgcgccgcaacgcgacctggcagcgctgcgaccgctggccacctcgtccccggcccgcctggaagccccgccgttggccgtgcacctgatcgccgaggccgagcgcctggcctacgccgatcgcgctcagtacctggccgacaacgactacgtgcccgtcccggtcaaggccctgaccgattctgcttacctggccagccgcgcggcgctgatcggcgagcacagcatgaagcgcgcccgtccgggccagccgcaaggagcggacctggcgcttgcgcccgaccgctcgccactgcgcatctccacctctcacctcagtgcggtggatgacaacggccaggccctggccatgaccacctcggtggaggccgcatttggctcgcacctgatggtcaagggcttcctgctcaacaatcagctgaccgacttctcgttcatcccccacgagcacggcaagcctgtggccaatcgggtgcagccgggcaaacggccgctgtcggccatggcgccgacgttggtgttctcgcgtgccacgggcgagtttgtcgcgagcctcggttcgccgggtggttcgcagatcatcggttacgtgaacaaggcactggtcggcctgctggattggcggctcgacccgcagcaggccgccgacctgcccaacttcggcagccgcaatgccggcaccgaagtggaagcagggctgagcagcccggcgctgatccgccagttggcagcctggggccatgaggtgacaccgatgaccatgaccagcggcatgcagatcatccagcgcagcggcgagggttggtcaggcggtgccgatccccggcgggaaggagtggccctcggtgac

SEQ ID NO: 31354 - DNA, 1347 bp, Pseudomonas putida
atgtctaccatgatcgaatctgtcgacaatttccttgcacgcctgaagcagcgtgacccaggccagccggaattccaccaggcggtggaagaggtgctgcgcaccctgtggccattccttgaagccaacccccactatctgcagtccggcatcctcgagcgcatggtcgagcccgagcgcgccgtacttttccgcgtttcttgggtcgatgaccagggcaaggtgcaggtcaaccgcggctaccgcattcagatgagcagtgccattggcccgtacaagggcgggctgcgcttccacccgtcggtgaacctcagcgtgctgaagttcctggcgttcgagcaggtgttcaagaactcgctgacctcgctgcccatgggcggcggcaagggcggctcggactttgacccgaaaggcaagagcgacgccgaagtgatgcgcttctgccaggcgttcatgagcgagctgtatcgccacatcggtgctgactgcgacgtaccggccggtgacatcggtgtgggggcccgcgaaatcggcttcatgttcggccagtacaagcgcctggccaaccagttcacctcggtgttgaccggtaagggcatgacctatggcggcagcctgatccgcccggaagccaccggctatggctgcgtttacttcgccgaagaaatgctcaagcgtcaggacaagcgtatcgacggccgccgcgtggcggtgtccggttcgggcaacgtcgcccagtatgctgcgcgtaaggtgatggacctgggcggcaaggtgatctcgctgtctgactctgaaggtaccttgtatgcagaagccgggctgaccgacgcccagtgggacgccttgatggagctgaaaaacgtcaagcgcggacgtatcagcgagctggccgggcaattcggcctggagttccgcaagggccagaccccgtggagcctgccgtgcgacatcgccctgccatgcgccacccagaacgagctgggcgccgaagatgcccgcaccttgctgcgtaacggctgtatctgtgtggccgaaggcgccaacatgccgactaccctcgaggctgtggatatcttcctggacgccggcattctgtacgccccgggcaaggcctccaatgcgggcggcgtagccgtgtcgggcctggaaatgtcgcagaacgccatgcgcctgctgtggacggccggtgaagtggacagcaagctgcacaacatcatgcagtcgattcaccatgcatgcgtgcactacggtgaagaggctgatggccggatcaactacgtcaagggggcgaacatcgcgggcttcgtgaaagtggccgatgcgatgctggctcagggcgtggtc

SEQ ID NO: 31355 - DNA, 3105 bp, Pseudomonas putida
atgaacctgtccgggcctttcattcgtcgcccggtggcgaccatgctgttgagcctggcgatcatgctgctgggcggggtcagctttggcttgctgccggtggcgcctctgccgcaaatggacttcccggtgatcgtggtgtcggcgaacctgtctggtgccagccccgaggtcatggcgtccaccgtggccacaccgctggagcgcaagctgggcagcatcgccggcgtcaccacgctcaccagcagctccaaccagggttcgacacgggtagtcatcggcttcgagttgggccgtgacatcgatggcgcagcccgtgaggttcaagcggcgatcaacgctacccgcaacctgctgcccagtggcatgcgcagcatgcccacctacaagaagatcaacccgtcgcaggcgccgatcatggtgctgtcgctgacttcggatgtgttgcagaaaggccagctgtatgacctggccgacaccatcctttcacagagcctggctcaggtgtcgggggtaggggaggtgcagatcggtggcagttcgctgccggccgtgcgcattgccgtcgagccgcaactgctcaaccagtacaacctgtcgctggacgaagtgcgcaccgcagtatccaacgccaaccagcgccggcccatgggctttgtcgaagacgccgagcgcaactggcaggtgcgggccaacgaccagttggaaagcgccaaggattacgagccggtggtgattcgccaacagaacggcaccattctgcgcctgtctgacgtggcgaccgtcaccgacggcgttgaaaaccgttacaacagcggcttcttcaacgaccaggcagcggtgctgctggtggtcaaccgccagaccggcgccaacatcatcgaaacggtcgaccagatcaaggcgcagctaccggcactgcagtcgttgctgcctgccagcgtgcaactgaacgtggccatggaccgctcgcccgtgatcaaggccaccctcaaagaggccgagcacaccctgctgatcgccgtggtgctggtgatcctggtggtctacctgttcctcggcagcctgcgcgcctcgctgatccccagcctggcggtgccggtatcgctggtgggcacgttcgcagtcatgtacgtgtgcggtttctcgctcaacaacctgtcgctgatggcgctgatccttgccaccgggctggtggtggacgatgccatcgtggtgctggaaaacatctccaggcatatcgagaacggccagccaccgatgaaggcggccttcctgggcgccaaggaggtgggtttcaccttgctgtcgatgaacgtgtcgctggtggcggtgttcgtctccatcctgttcatgggcggcatcgtgcgcaacctgttccaggagttttccatcaccctggcggcggcgatcatcgtctcgctggtggtgtcgctcacccttacaccgatgctctgcgcccgctggctcaagccgcaacaggccgagcagacacgcctgcagcgctggagcgacacgctgcatcagcgcatggttgctgcctatgaccacagcctgggctgggccctgcgccacaagcggctgaccctgctcagcctgctggccaccatcggcatcaacatcgccctgtacgtggtggtgcccaagacgctgatgccccagcaggataccggccagttgatgggcttcatccggggtgacgacggcctgtcgttcacggtgatgcagccgaagatggaaatctaccgccgcgccttgctggccgacccggcagtacagagcgtcgccggtttcatcggtggcaacagcggtaccaacaacgcctttgtgctggtgcgcctgaaaccgatcagcgagcgcaagatcgacgcgcagaaggtgatcgagcgcctgcgcaaggaactgcccaaagtgcccggcgggcgcctgttcctgatggccgaccaggacctgcaactggggggcggtgggcgtgaccagacctcttctcagtacctgtataccctgcaaagcggcgacctggcggcgttgcgcgaatggtttcccaaggtggtcgcggcgctgcgtgcactgcctgagctgaccgccatcgacgcccgcgatggtgccggtacccaacaggtgacgctggtggtcgaccgtgaccaggccaagcgcctgggcatcgacatggacatggtcaccgcagtactgaacaacgcctacagccagcggcagatctccaccatctatgacagcctcaaccagtaccaggtggtgctcgagatcaacccgaaatacgcctgggacccgagcacgctggagcaagtgcaggtgatcaccgccgacggcgcccgggtgccgctgtcgaccatcgcccactacgagaacagcctggccaacgaccgggtcagccacgaaggccagttcgcctcggaagacatcgccttcgacgtcgccgagggctacagccccgaccaggccatggcggcactggagcgcgcggtggccaaactgggcctgcccgaggaggtgattgccaagctcggcggcactgccgatgcctttgcccagacccagcagggccagcccttcatgattcttggcgcactgctgctggtgtacctggtgctgggcattctgtatgaaagctacattcacccgctgaccattctatcgacactgccttcggcgggcgtcggtgccttgctggcgctgtacgtcaccggtggcgagttcagcctgatctcgttgctggggctgttcctgttgatcggggtggtgaaaaagaatgccatcctgatgatcgacctggccttgcagctggagcgccatcagggcttttcgccggaagagtcgatccgccgggcctgcctgctgcgcctgcggccgatcctgatgaccaccctggcggcaatccttggcgcattgccgttgctgctgagccaggctgaaggcgcagaaatgcgtcagccgctgggcctgaccatcatcggtggcctggtgttcagccagatcctcaccctttatacgacgccggtggtttacctgtacctggaccgcctgcgccaccgtttcaaccgttggcgcggcgtgcgtaccgacgccgctctggaaaccccgcta

SEQ ID NO: 31356 - DNA, 1179 bp, Pseudomonas putida
gtgcgcggtggcaagggcatgggcatgatcggtggccgcccaggttttggcggctccagcgacccggtacccgtacgcgtcgtgccggtgcggataggcgacttccccctctactacaaagccttgggcacggttaccgcgaccaatacggtcaatgtgcgcagccgcgtggctggcgaactggtgaaaatccacttcaaggaaggccagcgcgtcaaggctggcgacctgctggccgaaatcgacccgcgcccttatcgcatcgccctgcagcaggccgaaggcaccttggcgcagaaccaggcacagttgaagaacgctcaggtcgacctggcccgctataaaggcctgtacgctgaagacagcatcgccaagcaaacactggacaccgccgaagcccaggttgcgcagttccaggggctggtcaagaccaatcaggcacaggtcaacgacgcccgcctgaacctcgatttcacccagatccgtgcgcccatcagtggccgtgtgggcctgcgccagctcgatctgggcaacctggtggccgccaacgacaccaccgcgctggtggtgatcacccagaccgagccgatcaacgtcgccttcaccctgccggaaaccgaactgagcactgtgctggagcgctaccgcagtggcgccagcctgccggtcgaggcctgggaccgcggtgacagcaagctgcaatccaccggtgtgctgggcagcatcgacaaccagatcgacaccaccaccggcacgctgaagttcaaaggccgtttcgagaacaaggacctggccctgttccccaaccagttcgtcaacgtgcgcttgctggccgacaccctcaaacaggtggtcatggccccggccgcggccatccagtttggcaacgatggcaccttcgcctatgtggtcaatgagcagagcaccgtcaatgtccgcaagctgaaggtgggtgccagcgatggcgagaacagcgtcattctcgacggcttgaaggccggcgaccgtctggtgctggaaggcaccgaccgcctgcgcgaaggcaccaaggtggaagtggtcgaagacagctcgcaagtgccgactagcccgggccagcacctgcaagggcaggaagccaagggcgcggcgcaaacaggtgaagcacaacccggcaacgcagcaggcaaggcgggcgca

SEQ ID NO: 31357 - DNA, 555 bp, Pseudomonas putida
atggaggctctcgacgcattgctcaaccgtgtttccgtgccacgcctgaccgacccggcgcccaatgccgcccagcgcgaggcgctgttccaggctgccctgcgcgccccggatcacggccagctgcggccgtggcgttttcttaccatcgaaggccagggccgcgagaagctgggtgagctgttcgccgaagccgtgcagcacaagggcgatgccagccaggctgcactggacaaggcccgtgcgatgccgctgcgggcgccgttgctgatcgtggtggtggccaggttgcaggaccacttcaaggtgcccaagtccgagcagcgcctggcggcgggctgtgcggcgcacggtattctgattgctgcgcacgcgcaggggatcggcgcggtgtggcgtaccggtgacatggccttcgatgcccatgtgcacaaggggttggggttggccgagaacgaggagctgatcggctacctgtatgtcggtacgccgctgaccgaaccgcggacggcgccggtgctggaaacggctgatttcgttagtagctggggtgag

SEQ ID NO: 31358 - DNA, 1440 bp, Pseudomonas putida
atgaccgaagtagaagttaaaaaagcgcaagaaagcctgcaggatcgcctggcccaggtggtcgaactgctgcagcgtcagcgcatggtcgaagacctgacccatcgccaggaaggcgcgcacaacgacctggtggaaaacctggtccaccgccagaacctcgtcgagctgcagcgcaagctcgatgacctgcaccccgccgacatcgcctacatcctcgaagccttgcccctggaagatcgcctgacggtctggcaactggtgcgctcggagcgcgatggcgacatcctgctggaagtttccgattcggttcgccaatcgctgatcgccgacatggacgatcacgagctgctggctgccgccaaggagatggacgccgacgaactggccgacctcgccccagagctgccgcgtgacgttgttcacgagctgatggaaaccctcgatgcccagcaacgcgagcgggtgcgttcggcgctgagctacgacgaggagcaggtcggtgcgctgatggacttcgagatggtcaccatccgcgaagacgtcagcctggaagtggtgctgcgctacctgcgccgcctgaaagaactgccgaaccacaccgacaaattgttcgtggtcgattacgacggcatcctcaagggggtattgccgatcaagcgcctgctggtcaacgacccggagaagaaggtggcggaggtcatggcgaccgaccctgtctccttccagcccgaggaagatgcctacgatgcagcgcaggctttcgaacgttatgacctggtatccgccccggtggtggacaagagcgaacgcctgatcggccgtctgaccatcgacgaaatggttgacctgatccgtgaggaaagcgagagcgaagtcctcaacatggcgggtctgcgtgaagaggaagatattttcgcctcggtctggcgttcgttccgcaaccgttgggcgtggctggcaatcaacctgattaccgcctttgttgcttcgcgagtgatcgggttgttcgaaggttcgattgaaaagctggtggcgttggctgcgttgatgccgatcgttgcgggtattggtggcaactctggtaaccagaccatcaccatgatcgtccgcgccatggccctggaccaagtgtcgccaggcaataccagccgcttgatgcgcaaggagttggcggtgtcgctgatcaacggcctggtttggggcggagtcattggtgcagtggctttctggctgtatggcagctggtcgctgggggtggtgatgaccgcagcgatgaccttgaacttgttattggcggcgctgatgggcgtgctgatcccgatgaccttggcccgcttggggcgcgaccctgcgatgggggcgagtgtgatgatcactgctgtgaccgacagcggtggtttcttcatcttccttgggctggccacgctgttcctgttg

SEQ ID NO: 31359 - DNA, 1452 bp, Pseudomonas putida
atggcgttgccgaccttaaggatcattggtttcatcatcggcatcttcctgattacgctggccgtgagcatggccgtgcccatggcgaccctggtgatcttcgagcgcaccggtgacatgccgtcgtttctctggtcgagcctgatcaccttcatcgccggcctggccctggtggtgcaggggcgcccggagcatgtacacctgcgcccgcgcgacatgtacctgctgaccgtcagcagctggctggtggtgtgcgtgttcgccgcgctaccgttcctgctgacccagcacatcagctacaccgacgccttcttcgaaagcatgtcaggcatcaccgccactggcgccaccgtgctcagcgggctcgataacatgtcgccgggcatcctcatgtggcgctcgatgctgcactggctcggcggtatcggctttatcgccatggcggtggcgatcctgccgctgctgcgcatcggtggcatgcgcctgttccagaccgaatcgtccgaccgctcggaaaaggtcatgccgcgttcgcacatggtcgccaagtccatcgtgggggtttacgtcggtttctcgatactcggcgcgctggccttctggtgggcgggcatgagcccgttcgatgcaatcaaccatgccatgtcggctatctctaccggcggtttctccacctccgaccagtcgttggcgaaatgggatatcccggccgtgcactgggttgcagtagtggtgatgatcatgggcagcctgccgttcaccctctacgtagccaccctgcgcggcaaccgcaaggcgctgatccgcgaccagcaggtgcaaggcttgctgggcatgctggtggtcacctggctggtgctgggcacctggtactggtacagcaccaacctgcactggctcgatgccctgcgccatgtggcgctgaacgtgacctcggtggtcaccaccaccggcttctccttgggtgactacagcctgtggggtaacttctcgctgatgctgttcttctacctgggcttcgttggcggctgctccggctcgaccgcaggcggcatcaagattttccgcttccaggtggcatacatcctgttgaaggccagcctcaaccagctgattcacccgcgcgcggtgatcaagcagaaatacaacggccatcgcctcgacgaagacatcgtgcgctcgatcctgacgttctcgttcttcttcgcgatcaccatctgtgtcatggcgctgctgttgtcgctgctgggcgtggactggatgaccgcgctgaccggcgccgccggcacggtttcgggtgtaggcccgggcctgggtgaagtgatcggcccgtcgggcaactacgccacgctgcctgacgcggccaaatggattctggcggccggcatgctgctgggtcgcctggaaatcatcacggtgttggtgttgtgcatgccggcgttctggcgtcac

SEQ ID NO: 31360 - DNA, 516 bp, Pseudomonas putida
gtgcgcgtccaacttgatgcggtcttcgtaccgctgaacatcgccgtgctgactgtcagcgacacccgtacctacgacaacgatacttccggcgcgctgctggccaaccgctcggtcgaggtcggtcaccggctggtggcgcgagcgctgctcaaggacgacctgtacaagatccgcgctcaggtggccagctggattgccgatgaacaggtgcaggtggtgctgatcaccggaggtaccggctttaccgggcgcgacagcacacccgaagcggtcgagtgcctgctggacaagcgtatcgatgggttcggcgagttgttccgggcattgtcgattctcgatattggcagctcgaccgtgcagagccgggcgttggccgggttgtccaaccgcacgttggtatgttgcctgccgggctcgaccggagcctgccgcaccgcctgggaaggcattctggccgagcagctggatgcacggcaccggccatgcaacttcgtcaaacacctgttgccgatg

SEQ ID NO: 31361 - DNA, 1059 bp, Pseudomonas putida
atgagcgaaagaacaacgtcagccagttgggcatcagggatcgtgaaggcacttgaactggaagggctggattgcagagccatgttcaagcaattggggttggactttgccgccctcgacgatcccgacgcacgttttccgcaagactccatgacccgcctatggcaactggcggtggagctgtcaggcaatgaggccatcggcctgaacatggcacgggtggtccgcccggcgtcgttccatgtggtgggctatgcgttgatgtccagccgcaccctggccgagggcttcgagcgcctggtgcgctaccagcgcatcatcgccgaaagctccgacctcagtttcgtcctcggccccgagggctattcgctgattctgaccgtgcacggcgaccacctgccgccaacccggcacagcgccgaagcgtcgctggcctgtgcgctggcgctttgcaaatggctcagtggccggccggtccagccgcggcgggtcctggtgcaggggccgcagccgaagaatgtcgagccttacaaggtggcgttccattcgccgctggtgttcggcgccccacatgatgcgctggtgttcgagcgggccgacatggaggcgccgctgccgaccgccaacgaggccatggcggtgctgcacgaccggtttgccggcgagtacctggcacgcttctccgaaagccgggtcagccaccgcgtgcgccaggtgttgtgccgcatcctgccgcagggtgagcccaagcgcgaaaccctggcccaggccctgcacctgtcgcagcgcaccttgcaacggcggctgcaggaggaaggcaccagcttccagaccttgcttgacgacacccgtcgcgaactggccgaacaatacctggcccagccgggcatgaccttgctggaaaccgcctacctgctgggctttgccgaccccagcaacttctatcgggcgttccgtcgctggttcgatgccacgcccagcgagtaccgcgcccgcctgggcgcggaaggcgaagtgctcagtgacgccagaacgccggcatgcacaacaccaacaccg

SEQ ID NO: 31362 - DNA, 780 bp, Pseudomonas putida
atgaccgacacccccctggcaaccctctaccagtccctcgaccagcaccgccccgccaccctcgaggccctgctcgccggcgtatcgctgttgctgccgatgctcgacgccatccccaacgccgcaatcttcatcaaggattctgccgcccgctatgcgttggccaacaacacactggtccagcgctgtggcctcaagcgcctgcaaccgctgctgggcaagaccagcgccgaagtgtttccggcacagtttggccccggctataccgagcaggatcgacgtgttctcaaggaaggcctggtgctggaggaccagttggagctgcacctctacggcagccgtgagcccggctggtgcctgacccacaagcgcccgctgtacaaccctgccggcgaaatcatcggcctggtcggcatctcggtcgacttgcagtcagccgctgacagccaccccgcctaccagcgcctggccgcagtggacgagcacattcgccagcattttcaccagccgatcagcatgagcgagctgacccgcattgccggtatttccgtggcccagctggagcgctattgcaagcgggtgttccacctcacgccccggcagatgatccacaaggcgcgcctggagcatgcccatcgcctgctgcattcggagctgccgatcactgaagtggcgatgcgctgcggctacaccgaccacagcgccttcagccgccagttcaagcagctgaccggctttacgccgcgccagtaccgccaggctaccgccgatcagctggcc

SEQ ID NO: 31363 - DNA, 1005 bp, Pseudomonas putida
atgctcgcccttggcaaattgcttgagctgaccctcaccgatcacgaaccggccgagaagacccaagtgacacccaagggcgcgcgtttgcgatggctgggggagggcgcgctcgaagtgcgcccggccgaaagcgacgattgcgggctggacttgctgttgtccgccggcattcatggcaatgaaacagcgccgatcgaattgctcgagcggctgctgcacggcgtggccaacggcaagatcaggcccagggcgcgggtgctgttcctgttcggcaacccggcggcgatccgcaagggcgagcgctttatcgaacaggacatcaaccgcctgttcaatggccgccatgagctgtccagcggtttcgaagcattgcgtgctgccgagctggaacagttcgcccgggtgttcttcagcaaaccggggcgcaaccgcctgcattacgacttgcatactgccatccgcggttcgaagatcgagcaattcgccttgtacccttataaagaggggcgcaagcactcccgtcgcgaactggcgcgcctggcggcggcaggtatggaggcggtgttgctgcaaagcaagtcgtccatcaccttcagcgctttcacctacgagcaacttgaggctgaagctttcaccctggagttgggcaaggcccgtccgttcggccagaacgagcaggtcaacctcgacaagctcgaagagcggctgatccgcatcatcgaggctaccgagccagaggacgaaagttcgctggatggcctgcagctgttcagtgtttcccgcgaaatcatcaagcacagcgacagcttccacctgcacctgccggcggacatcgaaaacttctccgagctgagcaagggttacctgctggctgaagacctggccgagatgcgctgggtggtcgaggaggagggtgcgcgcatcatcttccccaaccccaaggtcaagaacggcttgcgcgccggcattctgatcgtgccggattcggggcagcgcctgggg

SEQ ID NO: 31364 - DNA, 1218 bp, Pseudomonas putida
atgtccgttgagcaagccccggtgcaacgtgccgatttcgaccaggtgatggtccccaactattctccggcggccttcattcctgtgcgaggcgagggttcccgtgtctgggaccagtcgggtcgcgagctgatcgactttgccggcggcatcgcggtcaatgccctgggccattgccacccggcactggtcaaggccctgactgaacaggccaacaccctctggcacgtctccaacgtgttcaccaacgagccggccctgcgcctggcccacaagctggtggacgccacctttgccgaccgcgcgtttttctgcaactccggcgccgagtccaacgaggccgctttcaagctggcccgtcgtgtggcgcatgaccgcttcggtccgcaaaagcacgaaatcatcgccaccgtgaacagcttccacggtcgcaccctgtttaccgtcagcgtgggtggccagccgaagtactccgatggctttggcccgaagatcaccggtatcagccatgtgccgtacaacgacctggaagcgttgaaggcacagatttccgacaagacctgtgccgtggtgatcgagccgatccagggcgagagcggcgtggtgccggccgacaaggcctacctggaaggcgcgcgcaagctgtgtgacgagcacaacgctctgctgatcttcgacgaagtgcagacgggcgtgggccgtaccggctcgctgtatgcctaccagcactacggcgtgatcccggacattctgaccagtgccaagagcctgggcggcggtttcccgattggcgccatgctgaccaccaccgagctggccaagcacctggccgttggcacccacggcaccacctatggcggcaacccgctgggttgcgccgttgcctgcgcggtgctggacgtggtcaacaccccggaaaccctggccggtatcaaggctaagcacgagcgcttcaaaacccgcctggaacagatcggccagcagtacaacctgttcagccaggtgcgtggtgtcggcttgctgctgggctgtgtcttgaccgaggcctggaaaggcaaggccaaggacgtgctcaatgctgccgagaaagaaggcgtgatggtgctgcaggccggcccggacgtggtccgcttcgcgccaagcctggtggttgaagacgccgacatcgacgaaggcctggaccgcttcgaacgcgctgtggccacactgaccaaaggc

SEQ ID NO: 31365 - DNA, 2073 bp, Pseudomonas putida
atgagccgaagccttgtcgacctgttgcccaccccgttgcacgcagagcacctgctggcgctggcaccgcagcacaacagcgctgacctgctgcaattactcgaccgttgggttgagcggggctggctacgtgccctggaccgcgcattcgtgtcgttcctggaagagcgcgcccccggcagtgatcccttgctattgctggcggcagcgctggccagccaccaactggggcacggacatgtctgcctcgacctgcaacaaaccttggccgagcctgatttcgccctgtcgttgccgccggaaggtgacgcccttatcggccctttgctactgccatcgcaactgctggccaaccttgacttaaatgcctggcttcagcgcatcagcgccagcccgctggtggccgcaggtgatacgcctggccagcaagcgcggccgcttgtacgcagtggcgagcgcctttacctgcgccgttactggagttacgagcggcgcatcgaccaggccctgcgccagcgcctgagtcaggccgaagcaccgcctgcggacctgccagagcgtctggcgcaactgttcgagggcggcgcgccagctggccaggtggactggcagaagctcgcctgtgccttggccacccgtgccggtttcagcatcatcactggcggccccggtactggcaagacgaccaccgtggtgcgcctgctggcgttgctgcaggcgccggcagtggagcagggcaggccactgcgcatccgcctggctgcaccgaccggcaaagccgctgcgcgcctgaccgaatccattggtcagcaagtcgagcgcctgcaagtcagcgccgaagtacgtgggcaaatccccactgaagtcagcaccgtgcatcgcctgctcggcagccgcccgggctcgcggcactttcgccatcatgctggcaacccgttgccgttggatgtgctggtggtcgacgaagcgtcgatgatcgacctggaaatgatggccaacctgctcgatgccttgccgccgcgggcgcgtctggtgctgctgggcgacaaggaccagttggcctcggtcgaggccggcgcggtgctgggtgacctgtgccgggatgctgaggagggcttttactcgccggcgactgcagcgtggcttcagcaggtcagtggcgagtcgctggccggcagtggccttaaggccggcgatgagcagcgtcacccgctggcccagcaggtggtgatgctgcgtttttcacggcgtttcggtgaaggcagcggtattggccagctggccagactggtcaatcgtcaggacgctcacgcggcgcgcaacctgctggccgcgccgcctgccgacgtgcacagcctttcgctcaagcacgaacaggatcgtgcgttcgaccgcctgttactcgacggcctgaaccgcggtaccgatggaccgcaaggctaccgcagctacctgcgcacccttggccgttaccggccggcacttgataccgcctttgacgaccccgcctgggagcaatgggcgggcaaggtgttgcgcagttttgaggatttccagttgctgtgcgcggtgcgccggggcgcctggggtgtcgaaggcctcaacgagcgggtggcgcgagtgctgcacaatgccggtctgatcgacagccagcagccctggtacgaagggcgcccggtgctggtgacccgcaacgactacggccttggcctgatgaacggtgacatcggtattgccctgcgcctgccggatgagcatggccagccgctgctgcgcgtggccttcccgcgcaacgacggcagtggtggtgtgcgattcgttctgccgagccggctcaacgaagtggagacggtattcgccatgaccgtgcacaagtcccagggctcggagttcagccacactgccctggtgctgccggaggcgctcaacccggtgctgaccaaggaactggtgtacaccggcatcacccgggccaagcactgcttcagcctggtcgagccacgccaaggcattttcgaagaagcggtggcgcgcaaagtacggcgtatttccgggttgatgctcgagcaggtc

SEQ ID NO: 31366 - DNA, 3672 bp, Pseudomonas putida
atgacccaggaccgtcctctggcactgagtttccccctgcacggtagccagctgatcgaggccagcgccggtacgggcaagaccttcaccatttcggcgctgtacctgcgcctgatcctcggtcacggtggcgaacagggcttcgaacgcgagctgctgccaccgcagatcctcgtggtgaccttcaccgacgccgccaccaaagagctgcgcgagcgtatccgcgcccgcctggctgaagccgcaaggttcttccgtggcgaactggaaggcgccgatccactgttgcaccaactgcgtgacgattacccacaagaaaactggccgcgttgcgccggccggttggaaatcgccgtgcagtggatggacgaggctgcggtatcgaccatccatggctggtgccagcgcatgctgcgcgagcatgccttcgacagcggcagcctgttcacccagaccctggaaaccgaccacagcgagttgttgggccaggtcatgcgcgattactggcggcgcttctgctatgggatgcaaggtgacgcactggcctgggtgcgcggcaactgggggagcccagatgccttgctgccgcgcattcgcccactgttcggccgtgtgcgcgcccagcagaatgggccagagcccgccgcattgatccaggcatcgctgcagcaacgtggcgcacagttggcccgcatcaaggcgccatgggcacagtgggccgaggaactgcggcaaatctgccgcgatgcgctggccgccaaacaggtcgacggccgcaagatgcaagcccgttacttcgagccctggttcgacaagctctgcgcttgggccagcgatgagcaactggtagagctcgacttgggcaccggctttacccggctgaccccggcgggcatggccgaggcctggaagggagaacctcccgagcacccagccctcaacgccatgcagcacttgcagcagcaactgcaggccctggacagcccggatgccccgctgctcgagcacgccgccagttgggtatcggcgcgtttcgaagtggagaagcgccggcgtgcagaaatgggcttcgacgacatgctcgtgcgcttgcagcacgcgctcgccagcgaggccggcgagcgcctggccagcctgatccgtgagcagttcccggtagcgctgatcgacgaattccaggacaccgacccggttcagtacggcattttcgagcgcatctaccagatcagcgaaaatcgcgcagaaaccggtctgttcatgatcggcgaccccaagcaggcgatctacgcctttcgtggtgccgacatctacacctacctagccgcgcgacgcgctaccagcggccgcctgcacagcctggacaccaactaccgctccagcaaagccatggtggcggcggtcaatcaggtgttcctgcaggccgaggcgcgtgaagcggggcggggtgcattcctgttccgcgaggccgatgacaacccgctgccattcatcgaggtgcgcgccaaggggcgtggcgaacagctgctgattgacggtgaagtcagtgcagccctgcaatgctggcagctggaaagtgaagagccagtctccagcagcgtttaccgccagcaaatggccgccagttgcgccagccatattgtggccttgctcaatggcggccagcagggcacgtcggggttccggaatgccgaaggcgaattgcgcgcctgcttgccctcggacattgccatcctggtgcgcgatggccatgaggcgcagatggtccgcgccgaactggccgcacgcgaggtgcgcagcgtctacctgtccgacaaggactcggtgtttgccgcccaggaagcccacgacctgctggcctggctcaaggcctgcgccgagcctgactcggagcgcctgctcaaggctgctctggcaagccttacactgggcctgtcgctggctgcgctggaccggcttaaccaggacgagcgggtctgggagagctgggtgatgcgttttcgcctgtaccgcgacacctggcagcgccagggggtgttgccgatgttgcgccacctgctgcatgacttccagctaccgcgcacactgatccgccgcagtgatggcgagcgggtgctgaccaacctgctgcacctggccgagctgctgcagcaggccgccggcgaactggacggcgaacaggcgcttatccgccacctggccgagcatctggccagttccggtcaggccggtgaagagcagatcctgcgcctggagagcgacgaacagttggtcaaggtggtgaccatccacaagtccaagggcctggaatatcccttggtctacctgccattcatctgcaccagcaaaccggtggatggtagccgtctgccgctggcctggcatgacagcgaaggtaacgctcacctcaccctcacacccgaccaggagcagatcgagcgcgctgacgacgagcgcctggccgaagacctgcgcctgctctacgtggccctgacccgcgcccagcatgcttgctggctgggtgtcgccgacctcaagcgcggtaatctgaagagctcgcagctgcaccgctcggcgtttggctacctgctggggggcggccttgccttggctggctcggcgcagctgacggactggttgcaggctttggcggcaagttgcccgcacatcacttgcccaggcctgccgcaggcggatgagcagatgtatcgcatgccacacgccgaacgtgagctgctgccagcacgcagaccacgccatgcggctgccgagcactggtggatcgcttcctacagtgcccttcgtgtcggcgatcagaccctcggcgccgacagctcgcaggcacagcaactgctggacgacgaggtgcccgatgcccaggtgttgcgcgaggtcccggccgacagcggcgatatccatcgcttcccgcgggggcctaaccccggcaccttcctccatggtttgctggagtgggcaggccgtgagggcttcagcgaggtcagcgctaaccctcaactgatagagcgtaccgttggccagcgctgcaatcgccgcgactgggccggctggatccccaccctgagccactggatgcagcgtttgctgagcgaggcgttgccgctgccgggcagcgaccagagcgtaacgctgggccagctgcgtcattaccagattgaaatggagttctggttcgccagccaccgggtcgacgcagaacaactcgatcgcctggtggcacgccacacccaccccggtctggcgcgcccagctgcgcagccgaccgtgctaaacggcatgttcaaagggttcatcgacctggcgttcgagctggacgggcgttactacgtgaccgactacaagtccaactggctgggtgcggacatccaggcctacgatgccatggccatggaaaaggcgattcttgagcaccgctacgacctgcagtatgtgctgtacctgctggccctgcaccgccagttgcgcgcgcggctggcggactacgattatgaccgccatgttggcggcgccctgttcatcttcctgcgcggtgccagcagcagcggccacggcgtgtaccacgccaagccaccgcgtgagctgatcgaaagcctcgatgcgctgttccgtggcgagcacgcgccggtacagcaggacctgtttgccggagttgcgcca

SEQ ID NO: 31367 - DNA, 366 bp, Pseudomonas putida; identical to SEQ ID NO: 31315

SEQ ID NO: 31368 - DNA, 1350 bp, Pseudomonas putida
atgagcaaccaactgttcgacgcctatttcaccgcgccggccatgcgcgagattttctccgaccgaggccgcctgcagggcatgctggatttcgaagccgcgcttgcccgagccgaagcctctgccggtttggtcccgcacagcgcggtagcggccatcgaggcggcatgccaggccgagcgctatgacgttggcgcgctggccaatgccatcgccaccgcgggcaactcggccattccgctggtgaaagcgttgggcaaggtgatcgccaccggcgtgccagaggctgagcgctatgtgcaccttggggccaccagccaggatgcgatggataccggtctggttctgcagctgcgcgatgccctcgatttgatcgaggccgacctcggcaagctggccgataccctgtcgcagcaggccttgaagcacgccgatacgcccttggtgggtcgtacctggttgcaacacgccaccccggtgaccctgggcatgaaactggccggtgtactgggtgctttgacccgccaccgtcagcgcctgcaggaactgcgcccgcgccttctggtcctgcagttcggcggtgcctcgggcagcctggcggcgctgggcagcaaggcgatgccggtggccgaagcgctggccgaacagctcaagctgaccctgcccgagcagccctggcacacccagcgcgaccgcctggtggagtttgcctcggtattgggcctggttgccggcagcctgggcaagttcggccgtgatatcagcttgctgatgcaaaccgaggcgggggaggtgtttgagccttctgcgccgggcaagggtggttcttcgaccatgccacacaagcgcaacccggtgggtgccgccgtgttgatcggtgccgcgacccgcgtgccgggcctgctgtcgacgctgttcgcagccatgcctcaggagcacgaacgcagcctgggcctatggcatgccgagtgggaaaccctgccggatatctgctgcctggtctctggcgccctgcgccaggctcaagtgattgccgagggcatggaggtggatgccgcgcgcatgcgccgtaacctcgacctgacccaaggcctggtgctggccgaagcggtgagcatcgtcctcgcccagcgtctgggtcgcgaccgtgcccaccacctgctggaacaatgctgccaacgcgcggtggccgaacagcggcacctgcgtgccgtgctgggtgacgagccgcaggtcagcgccgagctgtctggcgaagaactcgatcgcctgctcgaccctgcccattacctgggccaggcccgcgtctgggtggcgcgcgccgtgtccgaacatcaacgtttcactgcc

SEQ ID NO: 31369 - DNA, 427 bp, Pseudomonas putida
atgtctgccgtactcgacacccccgtcgccatccggcggacagccatggacctgctcgcacgacgtgagcacggtcgagtcgagctgacgcgcaagttgcgtcagcgcggcgcttcggacgagctgatcgagcctgaactcgatcggctcgccgaagaagggctgcttagtgaagcccgctacctcgagagtttcattcgttatcgttccggctctggctatggccctgcgcgtattcgcgaagagctgtgtcagcgtggtttggcgcgtgcagatatcgaccaggccctgcgtgaaagcgaggtgaattggagcgagcgtatgcgcgacgtgtggcagcgcaagtttgccgggcagcgcccgcaagatccgcgcagccgcgcccagcagacccggttcctggcttaccgtgggttccctatggaca

SEQ ID NO: 31370 - DNA, 3150 bp, Pseudomonas putida
atgtcgaagttctttatcgatcgcccgatcttcgcctgggtgatcgccttggtgatcatgctggtcggggccttgtccatcctgaagctgccgatcaaccagtaccccagtatcgcgccgccagccatcgccatcgccgtgacctacccgggcgcctcggcgcaaaccgtgcaggacaccgtggtgcaggtgatcgagcagcagctcaacggtatcgacaacctgcgttatgtgtcgtcggaaagtaactccgacggcagcatgaccattaccgccaccttcgaacagggcaccaaccccgacaccgcgcaggtacaggtacagaacaagctgaacctggccaccccgctgctgccgcaggaagtgcagcagcaaggtatccgcgtcaccaaagcagtgaagaacttcctgctggtgatcggcctggtctccgaagacggcagcatgaccaaggacgacctggccaactatatcgtctcgaacatgcaggacccgatctcgcgtaccgcgggtgtaggtgacttccaggtgttcggtgcgcagtacgccatgcgtatctggctcgatccggccaagctgaataagttccagctgaccccggtcgacgtcaagaccgctgtggccgcacagaacgtgcaggtgtcttccggccagctcggcggcctgccagccctgccgggcacccagctgaacgccaccatcatcggcaagacccgcctgcaaaccgccgagcagttcgagagtatcctgctcaaggtcaacaaagacggttcacaggtgcgcctgggcgatgtcgcccaagtaggcctggggggtgaaaactacgccgtcagcgcccagttcaacggcaagccggcttccggcctggcggtaaaactggcaaccggcgccaacgcgctggacaccgccaaggcactgcgcgagaccatcaaaggcctggaaccgttcttcccgccgggagtcaaggcggtattcccgtatgacaccaccccagtggtcaccgaatcgatcagcggcgtgatccacaccctgatcgaagccgtggtgctggtgttcctggtgatgtacctgttcctgcagaacttccgcgccaccatcatcaccaccatgaccgtaccggtggtattgctgggtaccttcggcatccttgccgccgcgggcttcagcatcaacaccctgaccatgttcgccatggttctggccatcggcttgctggtggacgacgccatcgtcgtggtggagaacgtcgagcgggtcatgtccgaggaaggcttgccgcccaaggaagcgaccaaacgctcgatggaacagatccagggcgccctggtgggtatcgccctggtgctctcggccgtactgctgcccatggcgttctttggcggctccacgggtgtgatctaccggcagttctccatcaccatcgtctcggccatgggcctgtcggtgctggttgcgctgatcttcaccccggcgctctgcgcaaccatgctcaaaccgctgaagaagggcgagcaccacaccgccaaaggtggcttcttcggctggttcaaccgcaacttcgaccgcagcgtcaacggctacgagcgcagtgtaggcgccatcttgcgcaacaaggtgccattcctgctggcctatgcgctgatcgtggtcggcatgatctggctgttcgcccgcatccctaccgcgttcctgccagaagaagaccagggcgtactgttcgctcaggtgcagaccccggccggctccagtgccgaacgcacgcaggtcgtggtcgaccagatgcgtgaatacctgctcaaggacgaagccgataccgtatcgtcggtgttcacggtcaacggtttcaacttcgcaggccgcggccagagctcgggcatggccttcatcatgctcaaaccctgggatgaacgctcgaaggaaaacagcgtgttcgccctggcccagcgtgcccagcagcacttctttaccttccgtgatgcgatggtgttcgccttcgccccgccagcggtgcttgaactgggtaacgccaccggcttcgacgtgttccttcaggaccgcggcggtgtcggccacgagaagttgatggaggcgcgcaaccagttcctggccaaagctgcgcagagcaagatcctcagcgccgtgcgcccgaacggcctgaacgatgaaccgcagtaccagctgaccattgatgacgaacgtgccagcgccctgggcgtgaccattgccgacatcaacaacaccctgtcgattgccttgggtgccagctacgtcaacgacttcatcgaccgtggccgggtcaagaaggtgtacatccagggcgaacccagcgcgcggatgagcccggaagacctgcaaaaatggtacgtgcgcaacggcgcaggggagatggtgccgttctcctccttcgccaaaggcgaatggacctacggttcgccgaagctgtcgcgttacaacggtgtcgaagcgatggaaatcctcggtgcaccggcgcctggctacagtaccggtgaagccatggccgaggtcgagcgcattgcaggcgagctgccaagcggtatcggcttctcctggaccggcatgtcctacgaggaaaaactctccggctcgcagatgccggcgctgttcgccctctcggtgctgttcgtgttcctgtgcctggcggccctgtacgaaagctggtcgatcccgatcgctgtggtgctggtagtaccgctgggtatcatcggtgcgctgatcgccaccagcctgcgcggcctgtccaacgacgtgtacttcctggttggcctgttgaccaccatcggtcttgcggcgaaaaacgccattctgatcgtggaattcgccaaggagctgcacgaacaaggccgcagcctgtacgacgcagcgatcgaggcgtgccgcatgcgtctgcgcccgatcatcatgacctcgctggcgttcatcctgggcgtggtaccgttgaccatcgccagcggcgccggcgccggcagccagcacgccatcggtactggcgtgatcggcggcatgatcagtgcgaccgtgctggctatcttctgggtaccactgttcttcgtcgcagtgtcgtcgctgttcggcagcaaagagccggaaaaagacgtcacccctgaaaatccacgttatgaggctgggcaa

SEQ ID NO: 31371 - DNA, 555 bp, Pseudomonas putida
atgatcaacgacatcaagaaagacgcgcaggagcgcatgggcaagtccatcgaagccctgtcccgcaacctggctgcaatccgcaccggtcgcgctcacccaagcattctggacagcgtcaaggttaccgcctggggcagcgaaatgccgctgaaccaggtcgccgcgatcaccgtcgaagatgcccgcaccctgaagatcgtcgctcacgacaagaacctcagcgctgccatcgaaaaggccatcctcacctccgatctgggccttaacccgtccagcgccggtaccaccatccgtgtgccgatgccggccctgaccgaggaaacccgcaagggctacaccaagcaggccagcggtgttgccgaggatgccaaggtagccgtgcgcaacgtgcgccgcgacgccctggctgacctgaaaaagctgaccaaggacaaggaaatcagcgaagacgaagagcgtcgcgccgcggacgagatccagaagctgaccgacaagttcgtcgccgaagtggatgctgccttcaaagccaaggaaaaggacctgatggccgtc

SEQ ID NO: 31372 - DNA, 753 bp, Pseudomonas putida
atggaaaagaccaagccagcggcgccgtcctcggtgccgcgtcatgtcgcgatcatcatggatggcaacaaccgctgggcgaaaaaacgcctgctgcccggcgtggccgggcacaaggcgggtgtggatgccgttcgcgcggtcatcgaagtctgtgccaagtccggggtcgaggtactgaccctgttcgccttctccagcgagaactggcagcgccctgccgaagaggtcggtgcgctgatggagctgttcttctcggcgctgcgccgtgaggccaagcgccttgacgagaacaacatcagcctgcgcatcatcggcgaccgttcgcgtttccatcctgagctgcaggccgccatgcgcgaggccgaggcagtgaccgctggcaacaaccgtttcattctgcagatagcagccaactacggtggccagtgggacatcgcccaggctgcccagcggctggcgcgggaagtgcaagccgggcacctgcgcccggaagacatcaccccgggtctgctgcagacctgcctggcaaccggcgacctgccgttaccggacctgtgcattcgcaccggtggcgagcaccgcatcagcaatttcctgttgtggcagctggcctatgccgagttgtacttctccgacctctactggccggacttcaaacacgaggccatgcgcaatgccctggccgatttcgcttcgcgccagcgccgcttcggtaagaccagcgagcaggtcgaggctggagctcgtgct

SEQ ID NO: 31373 - DNA, 813 bp, Pseudomonas putida
atgcttaaacaacgcatcattactgcgctgatcctgctgccggtcgcgctgggtggtttcttcctgctcaatggcggggatttcgccctgttcatcggcttcgtagtgaccctcggtgcctgggagtgggcgcgccttgccgggctgatggcccagccgctgcgcattgcctatgcagcggtggtcgcgggggcgctgatgctgctgcacatccttccggaactggcgccctgggtgctgggcgctgccgtgatctggtgggggctggccacctggctggtgcttacctacccgcgcagcagcgacctgtgggccagtgcggcctgtcggttgttgatcggcctgctggtgttgctgccggcctggcaagggctggtgctgctcaagcactggcccttgggcaactggctgatcctgtcggtcatggtgctggtgtgggccgccgacatcggtgcgtacttctctggccgggcattcggcaagcgcaagctggctccgcaggtcagcccaggcaagagctgggaaggcgtgtacggtggtctggcggtcagcctgttgattaccctgggtgtcggcatcagccgcgactggggctttggtcagatcctgctgggcctgttgggcgctgcgttgctggtgatgtcctcggtggtcggtgacctgaccgagagcatgttcaagcgtcgctccggcatcaaggacagcagcaatctgctgcccgggcatgggggtgtgctcgatcgcattgacagcctgactgccgcaatcccgatcttcgccgtgctgttgtgggctgccgaatggggtgtgatg

SEQ ID NO: 31374 - DNA, 363 bp, Pseudomonas putida
atgacatcgccattcaagggccagaccggcctcaaacgcatcttcaacgccgctggctactcgctggacggcctgcgtgccgccttcaagggcgaggccgcattccgccagctggtgctgctcaacgtgctgctgatcccgatcgccttctggctgccggtcagccgcgccgagcgggcaatcatgatcgccgtttgcctgctggggctgatcgtcgagctgttcaactcggcggtggaggcggccatcgatcgcatttcgctcgagcgccacccgctgtcgaaaaatgccaaggacatgggcagcgccgcacagctggtggccctgaccatggtggcgctggtgtggggtgtgatcctgctt

SEQ ID NO: 31375 - DNA, 1053 bp, Pseudomonas putida
atgagtgtgaccatgacgctaggccagctggccgaggtactcggagctaccctcaaggggcccgaggcgctgcagattaccgggttggccaccttgcaggaggctggcccgacgcagttgagcttcctcgccaacccgcagtaccgcaagtacctggataacagccaggccggcgcggtgctgctcaaggctgcggatgccgaaagctttgccggcaataccctggtcgtggcggacccgtacctggcttacgcgcgaatttcccacctgttcgatcccaaacccaaggctgaggcgggtatacatcccagcgccgtggtggcggaagatgcccaggtggacgccagcgccagcatcgggccgttcgcggtcatcgaaagtggtgcgcgcatcggcgccaacgtcagcatcggcgcacactgcttcatcggtgcccgctgtgtggtcggtgaaggtggttggctggcaccgcgggtcacgctgtatcacgacgtgaccatcggtaagcgtgtggtcatccagtcgggtgccgtgatcggcggcgagggcttcggctttgccaacgaaaagggcatctggcgcaagattgcgcagatcggcggcgtcaccattggtgatgacgtggagatcggcgtcaatactgctgtcgaccgtggcgcgctgtccgacacccggatcggcgacggggtcaagctggataaccagatccagatcgctcacaacgtacagatcggtgatcacactgccatggccgcttgcgtcggaatctccggcagcacgcgcatcggcaagcactgcatgctggccgggggtgtggggctggttgggcacatcgatatttgcgataacgttttcgtttccggaatgaccatggttacccgttcgatcactgaaccgggttcctattcttccggcactgccatgcagccgctggctgactggcgcaagagcgccgcgcgtatccgccacctggacgacatggccaagcgtctccagcagctggaaaaacgcgtcgataccgtgacctcaggtggcctgccgacatcagaaggc

SEQ ID NO: 31376 - DNA, 2028 bp, Pseudomonas putida
atgaccttgcgccaacgcctggaaaacctcccggtcgggcagaagctgctggcggccctgctggtattgctggtgaccatcttgctgatggccaacctcaccttcatcagcgccgcctactggatcacccaggaaagcatggcgccccaggccatgcagaccatcggccggctggtggccaatcctcagcttgcagcccgcgccggcgacaccccggaaacggcccgtgccctgctcaaggaactggaaagttacacaccgctacgcgccgccgcggtctacggtggcgatggccgaatgctggcgcagttgcagcatggcgagccgctggccctgcccaagcgttttcgcaacatcgacggctggcgcctgatggagtttcgcagcactcagttgatccgcatcccccgcgatgccaacccaccggcacatttgctgttggtagccagcagcgaactgcccacggccttctacaccggcacactcagtgccagcctgggcatcctggtgttcagtgtcctgctatggatcgtcatcgcccggcagatcaaacgcctgatcacccagccgatcaaccagcttgaggagctcagccgccaggttacccgcgaagagagctacgccttgcgcgcccagcgcggcaacgacgatgaaatcggcagcctggccgaggccttcaacaccatgctgtcgcgcatcgaggcccgcgagcagcagctcaagagcgcccgcgacgagttccagagtgcctacgaccaggctcagggccttgccgaagaaacccgccacaccaaccgcaagctggaactggaagtacaggtacgcagcaagatcgagaaaaagctcaccggtttccagaactatctcaacagcatcatcgactcgatgccctcggcactgatcgccctcgacgaacagctttacgtgacccaatggaaccacgaagccacggtgctttccggcacgccactggacgaggcacttaaccagccggtgttcattgcgttcgagccgttgaagccgttcctcccgcaactgaaggaaaccgtggaaaaacatcgagtggcgaagatcgagcgggtaacctggcccaagggcgacgacctgcgccactacgccctgaccttctacccactgaccggcggcggcgggcgcggcgtggtcattcgtatcgacgacatcacccagcgtctgtcattggaagaaatgatggtgcaatcggagaaaatgctctcggtcggtggtctggctgccggcatggcgcacgaaatcaacaacccgctgggcgctatcctgcacaacgtgcagaacattcgccgacgcctgtcgtccgacctgccgcgcaaccaggaacaggccgaagagctgggcatcgacctggccacgatcaaccgctacctggacagccgcgaggtgccgcaactgctcgacggcattcagcaggccggcgcccgggcggcgaagatcgtcacccacatgctcagcttcagccgccgcagcaaccgccagctggtgccatgcgagctgccggcactgatcgatcaggcgcttgaaattgccggcaatgacttcgatctggccatcggcttcgacttcaaggggcaagccatcgtgcgccagttcgaccccgacctggggccggtgccatgtaccgccaacgagctggaacaagtactgctcaacttgctgaagaacgcagcccaggccatccaccaacgcccgcaacccagcgagcccggacgcatcacactgcgcacccggctaaacccgccatgggcggaagtccaggtcgaagacaacggcgtcggcatgcccgaggcagtgcgcaagcgcaccttcgagccgttcttcaccaccaaggaaatcggccagggtaccgggctgggcctgtcggtctcctacttcatcatcaccaacaaccacaaggggcagatggaagtgcaatccacgccaggccaaggcacctgctttaccctacgcctgcccctcacccagccggcagcggcggtgccggccagaacggagcaa

SEQ ID NO: 31377 - DNA, 438 bp, Pseudomonas putida
atgatggacatcaacgagattcgcgaatacctgcctcaccgctacccgttcctgctggtagaccgtgtgacggatctggacttcgaggcccagagcattcgtgcctacaagaatgtcagcatcaatgagccgtttttcaatggccacttcccggcacacccgatcatgccgggtgtcctgatcatcgaagccatggcccaggcggccggcatccttggtttcaagatgctcgatgccaagccggccgatggcaccctgtactactttgtcggttccgacaaactgcgtttccgtcagccggttctgccgggtgaccagcttgtgctggaagccaagttcctcagccgtaaaagcatgatctggaagttcgagtgccgcgcccttgtcgatggcaagccggtctgctcggcagaaatcacctgcgcggaacgctcccta

SEQ ID NO: 31378 - DNA, 1125 bp, Pseudomonas putida
atggcccagctttgcgtagcgctggtcgccggtgaggccagtggcgatatccttggttcaggcttgatgcgtgccctcaaggcgcgccaccccgacgtgcgtttcatcggggttggcggccccttgatggaggccgagggcctgcaatcctatttccccatggagcgcctggccgtcatggggctagtcgaggtactggggcgcctgcgcgaactgctcaagcgccgcaagctgctgatccagaccctgatcgaagaaaagcccgacgtattcatcggcatcgacgcccctgacttcaccctcaacatcgagctcaagctgcgccaggccgggatcaagaccgtgcactatgtcagcccgtcagtgtgggcctggcggcagaagcgcgtgctgaagatccgcgaaggctgcgacctgatgctgacgctgctgccgttcgaggcgcggttctacgaagagcagggtgtgccagtgcgttttgtcggccacccgctggcagacaccataccgcttgaagccgaccgcccggccgcgcgtgccgcgctgggcctgggcgaggggccggtggtggcgttgatgccgggcagccggggtggcgaagtagggcgcttgggcgcgctgttcctcgacgccgccgagcgcctcagccaacaagtgccgggtgtgcgcttcgtgttgccctgcgccaacgccacgcggcgcgcccagatcgaacagatgcttgaagggcgccaactgccgctgaccctgctcgatggccagtcgcaccaggccctggcggcctgtgacgcggtgctgatcgcctcgggcaccgccaccctcgaggcgttgctgtacaagcggccgatggtagtggcgtaccgcctggcgcccttgaccttctggattctcaagcgtctggtgaaaagcccttacgtgtcattgccgaacctgctggcccagcgagagctggtgcccgagttgctgcaggacgacgctaccagcgaagcgctggccaacaccctggcgccgctggtgcgcgatggaagccagcagaccgaacgtttcgacgaaattcaccgcaccctgcgccgtgacgcctccaatcaggcggccgaggcggtactggccctgctcaaggaccgc

SEQ ID NO: 31379 - DNA, 621 bp, Pseudomonas putida
atgcaaattggactggacttcaacttggtagaagacctggttgccggcgttgatgaagtgggccgtggcccgctgtgcggcgcggtggtaacggcggcggtgattcttgatcctgcacggccgattctcggtctgaacgattctaagaaactcaccgaagccaggcgtgaggcgctgttcgacgagatctgcgaaaaggccttgagcttctgcatcgcccgcgccgaagtcgaggaaatcgacagcctgaacatcctgcaagccaccatgctggccatgcagcgggcagtggaggggttgcacattacgccaaagctggccctgatcgatggcaatcgctgcccgaagctggcggtgccggcagcaccggtggtcaagggggatagccaggtgccggccattgcggcggcatcgatcctggccaaggtgacccgtgatcgggagatgagtgcgttcgaactgatctacccgggttatggcattggcgggcacaagggctacccgaccccggtgcatctcgaggcgttggcacgtcttgggcctacgcccattcatcggcgttccttcgccccggtgcgggcggcttgggaagcgcgcgaaggcgtcaccgattccctgatc

SEQ ID NO: 31380 - DNA, 945 bp, Pseudomonas putida
atgaacccgaatttcctcgacttcgaacagccgattgccgacctgcaagccaagatcgaaggcctgcgcctggtgggcaacgacaactcgctgaacatcagcgatgaaattgcccgtctgcaagacaagagcaacaccctgaccgaaagcatcttcggcaacctgaccagctggcagatcgcccgcctggcccgtcacccgcgtcgtccttacaccctggactacctggagcacatcttcaccgagttcgaagagctgcacggggaccgtcacttctctgacgacgccgccatcgtgggtggtactgcgcgtctggacggcaagccggtcatggtcattggccaccagaagggccgtgaagtgcgcgagaaagtgcgtcgcaacttcggcatgccgcgcccggaaggctaccgcaaggcctgtcgcctgatggaaatggccgaacgcttcaagatgccgatcctgaccttcatcgacacgccgggcgcctacccgggcatcgacgccgaagagcgcaaccagagtgaagccatcgcctggaacctgcgggtcatggcacgcctgaaaaccccgatcatcgctaccgtgatcggtgagggtggttccggtggggcactggccattggcgtgtgcgaccaactgaacatgctgcagtactccacctactcggtgatctcgccggaaggctgtgcttcgattctgtggaaaactgccgataaagcagcagacgcggccgaggccatgggcatcaccgccgagcgtctgaagagcctgaacattgtcgacaaggtcatccaggagccgctgggcggcgcccaccgtgatccggccaagatgtccgaaagcatccgtgccgatctggtgcagcagctggacatgctcggcaagttcgacaacgatgcgctactggcccgtcgttacgagcgcctgatgagctacggcctc

SEQ ID NO: 31381 - DNA, 1281 bp, Pseudomonas putida
atgatcaacctcactccttggctcaacgcccccacctggtacgtcgccttctccggcggcctcgattccaccgtcctcctgcacctgctggccgaatacgcccgcaaccacgcatcccccccgctgcgcgccatccatatccaccacggcctgcaagctgctgccgacgcctggcccgcccactgccaggccatctgcgacaatttcgacgttgaacttcaggtcatccacgtccaggtctccccaggcgccagccttgaacaggccgctcgcgatgcccgctatgccgccttcaggcaagtgctcggcccgggcgatatcctgttcaccggccagcaccgcgacgaccaggccgagaccctgctgttccgcctgttgcgcggtgccggcctgcggggcctggcggcaatgccggggcagcgggcgctggggcagggcagcctggtcaggccgttactggcctgttcccggcaacatttgcaggagtatgctcaagcccaagggctgacctggatcgaagacccgtcaaacgtcgacacacaattcgcccgcaactacctgcgcggcgaagtgatgccgcacttgcagcaacgttggccacaggccagccagaacttcgcccgtgcagcagagcatctgggcgaggcgctgggtttgctggacgaactggcccaggaggatctggcgcttgcgggtaagggggcgcccctcgcctggccggggctggattccctcgacctggccgccctgctggcgttatcgccggcccgtcagcgcaatgccttgcagtactggctgagccagcgcacccgtttgcccgatacccggcactgggccggctgggcagacctgcgcgatgccggtgccgatgcccggccagtctggcggcttgccgatggacggttggtgcgtagccacgggcgcatctggtggttgagcggtgattggctacagcaaccggctggctcgctggcctggcccgaccctgatgggccgttgcggttgccgggcaatggttgcgtgcgtcttgttggcgcagccgtgccgagcgggttgcgcattgcctaccgtcaggggggtgaaatgctggaggttcccggccgtggtcggcgggacctcaagcgcctgctcaacgaacagcaggtgccgcatttcctgcgctcgcgcctgccgttgctgtatcacggcgaatgcctgctggcggtggccaacctgcccgggctggtgcaggcggattgccaactgcactggcagttaccgacgaacgcgcaaggtttgagc

SEQ ID NO: 31382 - DNA, 1626 bp, Pseudomonas putida
atgacgcgctacatattcgtcacgggcggtgttgtttcttcattggggaaaggcattgcctcggcttccctggcggccatcctggaagcgcggggcctgaaggtcaccatgctcaagctggatccgtacatcaacgtcgacccgggtaccatgagcccgttccagcacggtgaagtttttgtcacccacgatggcgccgagaccgacctcgacctggggcactacgagcggttcatccgcaccaccatgacccagaacaacaacttcaccaccggccgtatctacgagcacgtgctgcgcaaagagcgtcgtggtgattatctgggcgcgaccatccaggtcatcccgcacatcaccgacgaaatcaagcgtcgcatcatcaagggtgccggcgatgccgacgtggccctggtggagatcggcggtaccgtgggtgatatcgagtcgcagccgttcctcgaggcgattcgccagctgcgtgtcgaagtgggctccaagcgtgccatgctgatgcacctgaccctggtcccgtacatcgccaccgctggcgaaaccaagaccaagccgacccagcactcggtcaaggagctgcgctccatcggcctgcagcctgacgtgctgatctgccgctccgaccacccggtggatgcttcgtcgcgtcgcaagatcgcgctgttcaccaacgttgaagagcgtgcggtgatttcgctggaagacgtcgacaccatctacaagatcccgggcgtgctgcatgctcagggcctggacgacttcgtcgtcgagcgcttcggcctgcagtgcaatggcgccgacctgtccgagtgggacaaggtggtcgatgccaagctcaacccggagcacgaagtgaccatcgccatggtcggcaagtacatggagctgctggatgcgtacaagtcgctgatcgaagcgatgagccacgccggcatcaccaaccggaccaaggtcaacctgcgctacatcgattcggaagacatcgagaaccagggcaccagcctgctcgaaggcgccgatgccatcctggtaccgggcggtttcggcctgcgcggtgtggaaggcaagatcactgcggtgcaatacgcccgtgagaacaaggtgccgtacctgggtatctgcctgggcatgcaggtggccgtcatcgaattcgcccgtaacgtgatgggctggaaagacgccaactccaccgagttcgaccgtaacagcggccacccagtggtcggcctgatcaccgagtgggccgatgccaccggtgccgtcgagacccgcgacgaggcttccgacctgggcggcaccatgcgcctgggcgcacaggattgccagctggctgccggttccaaggtgcacgactgctacggcaaggacgtgatcaccgagcgtcaccgtcaccgctacgaagtgaacaacaacctgctgccacaactggtggaagctggtctggtggtttccggccgttccgaagacggcgcgctggtggaagtggtcgagtccaaggatcacccatggttcgtcgcttgccagttccacccggagttcacctctaccccgcgtgacggccacccgctgttcagtggtttcgtcaaggcagccctggctcagaagaacaaggcc

SEQ ID NO: 31383 - DNA, 705 bp, Pseudomonas putida
atgatcgatatcttgccggccttctgggccgtgatccctgcggcgggtgtaggtgcccgcatggctgccgaccgccccaagcaatacctggagctggctgggcagacccttctcgagcacagcctcgactgttttcttggccacccggcgctcaagggcgtggtggtcagcattgccgaagatgacccgtactggcctggcctgcgctgcgccagcgacccacgcatccactgcgcggcgggcgggcgtgaacgcgctgactcggtgcttaacgccttgctggtgctgcatgcccagggggcggcggacagcgactgggtgctggtgcacgatgctgcgcggccgaacctggcgcgcagcgacctggacaagctgttgtcggagctggcggacgacccggtgggtggcctgctggcggtgccggcgcgcgacaccctcaagcgtgccgacagccatggccgggtgagtgctaccgtggaccgcagcaccatctggcaggcgtacacaccgcagatgttccgccttggagcgttgcatcgggcgctggctgagtgcctggtgtcggatgtggtggtgaccgacgaagcctcggccatcgaatggtccggtcaggcgccgcggctggtggaagggcgcagtgacaacataaaggtgacccggcccgaagatctcgaatggttgcgccagcgctgggcgggtaaacgc

SEQ ID NO: 31384 - DNA, 471 bp, Pseudomonas putida
atgcgtattggccacggctacgatgtgcaccgtttctgcgacggtgatttcattaccctgggcggggtgcgtatcccccacaaatacggcctgctggcccactccgacggtgacgtgctgctgcacgccctgagcgatgccttgcttggcgctgcggcgctgggcgacatcggcaagcacttccctgacactgacccgcagttcaagggggctgacagccgcgcgctgctgcgccatgtggtcggcatcgtcaaggccaagggctggaaggtcggcaacgttgacgccaccatcgtcgcccaggcaccgaaaatggccccacacatcgaaaccatgcgccagctgatcgccgaagacctgcaggtcgagctcgaccaggtcaatgtcaaggccaccaccacagagaagcttggctttaccggccgcgaggagggcattgccgtgcattcggtcgccctgctgctgccagca

SEQ ID NO: 31385 - DNA, 1860 bp, Pseudomonas putida
gtggatcaagacttcggagaaagcccaatgacgccaacgcaccgtctgcgccggctggcaggcagcctgttgctcgcctgcctgagccttcccgcgctggccgcaccgcagcacgcgctcaccctttacgatgagccacccaagtatcccgccgacttcaagcacttcgactacgtcaacccggatgcgcccaagggcggcaccttccgccagtccagctttggcggcttcgacagcctcaacccgttcatcaacaaaggcgtggcggccgagaacatcggcattatctacgacaccctgatgcgccagagccaggatgaaccgttcaccgaatacggcctggttgccggcaagatcgaaaaggccccggataacagctgggtgcgcttctacctgcgccccgaagcgcgcttccatgacggccatccgatgcgcgccgacgacgtggtgttcaccttcaacgccctgatcaaggacggcgccccactgtaccgccagtactacgccgacgttgccgaagtggtcgccgaagaaccgctgaaggtgctgttcaagttcaagcacaagaacaaccgcgagctgccactgattctcggccagctgccggtactgcccaagcactggtacgaaaaccgcgagttcaaccgcggcaatctggaaatcccgttgggcagcggcccgtacaaggtcgccaaggtcaaggccgggcgctcggtgcgctacgaacgggtcaaggactactgggccaaggacctgcccatcaaccgcggcttctacaacttcgatgccatgacgttcgacgcctaccgcgacaccaccgtcgccctggaggccctcaaggccggggcattcgactatggcctggaagtcagtgccaagaactgggccaccgcttacaacgtgcccgccgtgcgcgaaggtcgcctgatcaaggaagagctgcccaacggcaaccccaccggtatgcagggcttcattttcaacatccgccgcccggttttccaggatgtgcgtgtgcgccaggccctgagcctgctgctggactacgagtggaccaacaagcagctgttcaacggcgcctacacccgtaccggcagctacttcgagaactcggaaatggccgcccgcggcctgcccagccccaacgagctgaaaatcctcgaaccactgcgcggcaaagtgcccgagcaagtatttaccgaggtcttccacaacccggtcagtgacggcagcggcatgatccgcgagcaacagcgccaggcttacaagttgttgcaggaagccggctggaaaatcgtcgacgacaagatggtcgacgcccaaggcaagccggcaagcatcgagttcctgctggcgcagaccgagttcgaacgcattctgctgccgttcaagcgcaaccttgccgacctcggtatcgagctgaacattcgccgcgtcgacgtttcgcagtacataacccgcctgcgctcgcgtgactacgacatgatcgttggcggctacccgcaatccaactcgccaggcaacgagcagcgcgagttctggtccagcgccgccgccgacaaccccggtagccgcaacttcatcggcctgcgcgacccggccatcgaccaactggtggaccagctgatcaacgccgactctcggcagagcctgatcgaccactgccgcgccctcgaccgcgtgctgctgtggggctattacgtgatccccaactggcacatcaagacctggcgtgtggcctactggaaccacatcggccacccgaacgtgtcgcccaagtacgacatcggcatcgacacctggtggatcaagcccgatgtaaccccggcggtcagcgaagcgcctgcggacgaggccaac

SEQ ID NO: 31386 - DNA, 882 bp, Pseudomonas putida
atgagcgtcctgatcaataaagataccaaagtcatctgccagggcttcaccggctcgcagggtactttccactccgaacaggccattgcctacggcaccaagatggtcggcggcgtaaccccaggcaagggtggcaccacccacctgggcctgccggtgttcaacaccgtcaaggaagccgtggaagcgaccggcgctgacgcttcggtcatctacgtaccggctccgttctgcaaagactcgatcctggaagctgcctttggcggcatcaagctgatcgtctgcatcaccgaaggcattcctaccctggacatgctggatgccaaggtcaagtgcgacgagctgggcgtgaccctgatcggccctaactgcccaggtgtcatcaccccgggcgagtgcaagatcggcatcatgccaggccacatccacttgccaggcaaggtcggtatcgtttcgcgttccggcactctgacctacgaagctgtgaagcagactaccgacgccggcttcggccagtcgacctgcgtcggcatcggcggtgacccaatcccgggctccaacttcatcgacatcctgaagctgttccaggaagacccgaagaccgaagcgatcgtcatgatcggtgagatcggcggttcggctgaagaagaagctgcggcctacatcaaggcccacgtcaccaagcctgtcgtttcctacatcgccggtgttactgcacctgcgggcaagcgcatgggccacgctggcgccatcatctccggcggcaagggcactgcggacgagaagttcgccgccctgcaggacgcgggtgtgaaaaccgtgcgttccctggctgacatcggcaaggccctggccgagctgactggctgggaagccaagaag

SEQ ID NO: 31387 - DNA, 1896 bp, Pseudomonas putida
gtggaaacacaaaaggaaacgctgggcttccagaccgaggtgaagcaactgctgcacctcatgattcactcgctgtactcgaacaaggaaatcttcctgcgggagctgatttccaacgcttccgacgccgccgacaagctgcgtttcgaagccctggccaagccagagctgttcgagggcgatgctgacctgaagattcgcctgagcttcgacaaggacgccggtaccgtgaccctcgaggacaacggcatcggcatgagccgcgaagacgtcattgcccacctgggcaccatcgccaagtccggtactgccgacttcatgaagaacctcaccggtgaccagaagaaggactcgcacctgatcggtcagttcggcgtgggcttctactccgcgttcatcgttgccgacaaggtcgacgtgtacagccgccgtgccggccagccagcggccgaaggtgtgcactggtcgtcgaaaggcgagggcgaattcgaagtcgccaccatcgacaaaccacagcgcggtacccgtatcgtcctgcacctgaagaaggacgagcaggagttcgccgatggctggcgcctgcgcaacgtggtcaagaaatactccgaccacatcgccctgccgattcaactgccgaaagagcaggccgccaccgaaggtgaagagcagccggccgaagagtgggaaaccgtcaaccgcgccagcgccctgtggacccgttcgcgcaccgaagtgaaggacgaggagtaccaggagttctacaagcacatcggccatgacttcgaaaacccgctggcctggagccacaacaaggtcgaaggcaagctcgaatacaactcgctgctgtacgtgccggcccgtgcgccgttcgacctgtaccagcgcgaagcgccgcgcggcctgaagctgtacgtgcagcgtgtgttcatcatggaccaggccgagtcgttcctgccgctgtacctgcgcttcatcaagggtgtggttgattccaatgacctgtcgctgaacgtgtcgcgtgaaatcctgcagaaagacccgatcatcgattcgatgaagaccgcgctgaccaagcgtgtgctggacatgctggagaagctggcgaagaacgaacccgagaaatacaagggcttctggaaaaacttcggtcaggtgctgaaagagggcccggccgaagacttcgccaacaaggagaaaatcgccggtctgctgcgctttgcgtccacccaggacgacagcggcgagcagagcgtcgccctggccgactacctggcccgcgccaaggaaggtcaggacaagatctactatctcaccggcgagtcgtacgcgcaggtcaagaacagcccgcacctggaagtcttccgcaagaaaggcatcgaagtgctgctgctcactgatcgcatcgacgagtggctgatgagctacctcaacgaattcgacggcaaggcctttgtcgatattgcccgtggcgacctggacctgggcaagctggattcggaagaagacaagaaagcccaggaagaagtcgccaaggacaaggaaggtttggtcgagcgactgaaaggtgcgctgggtgacagcgtggccgaagtgcgcgtctcgcaccgcctgaccgactcgccggcgatcctggccattggcgagcaggacctgggcctgcagatgcgccagatcctggaagccagcgggcagaaagtgccggagtccaagccgatcttcgagttcaacccgagccacccgctgatcgagaagctggatcacgagcagagcgaagaccgtttcgccgagctgtcgcacatcctgttcgatcaggcggccctggcggccggtgacagcctgaaggacccggcggcttacgttcgtcgcctgaacaagctactggtcgagctgtctgct

SEQ ID NO: 31388 - DNA, 9748 bp, Pseudomonas putida
gatatcgaagacatctatccgttgtcgccgatgcaggaagggctgctgatgcacaccttgctcgaaccgggttcgggcatctatctgatgcagtattgctaccgcgtcgaccacgccattgatgtcggcgcgttcagcgaagcctggaaagcggtcattgcgcgccatgacgtgctgcgcacctcgttttgctgggacctgggtgagcgcatggtgcagatcgtccatcgccgcaccgagccggcattgcgcctgctggactggcgtcacctggctgaagatcagtacgaacaggcccttcaggccgaactggaagcggagctgcgccagggcttcgatatggccaaggaagtgccgttccgcctgcgcctgatcctgctggatgccgaccagttcggcttcgtcttcagcaaccaccatgtgctgctcgatgcctggtgtcggatgggcgtggtcgatgagttcttcaaggtctaccagagcctgaccaccggtgtgccggtacaactgccgacgccgccgcgctaccgcgacttcatcgccttgctgcagcgatgggaccgtgaggcttcgcgtgatttctggcgcaatgagctgcaaggtttcgagcggccgaccgcgctgccgttcgaccgcagcgccagcgccgagcacaaccatgcagcagtggccgatgagctggtgtacctgacccgcgagcaaagcgcgcaggtggcgcagcgcgcccaggcggcacagttgacggtcaacaccctggtgcaaggcgcctgggcactgttactgcaacgctacagcggcgaccgtgacgtggtgttcggggtgaccgtggccggtcggccggtggaattccccgagatgcaggctaccgtcgggctgttcatcaacagcatcccgctgcgggtccggttgccgggcgccgaagccggcgtcacggccaaggcgtggctcaagtcactgcttgaccacaacctcaacctgcgcgagcacgagcacttgcctttggtggatatccaggcgtgcagcgaggtcggtagcggtcaggccctgttcgacagcctgttcgtgttcgagaacgcgcccgtggagtccagcgttggcgcccaggcttcgaccatgaaggtcaaggctgggagttcgcgcacgcacaccaactacccgctcaccgtggtggtgtacccgggtgaggtgctgggcctgcacctgtcgtatgaccaacgcctgttcgacagcgcgaccatcagcgtgctgctggctgacttccgggctttgttgctggccttgagcgagcagctggacgcggacttccatgctgtggccgccgcccttcctggcagtgccccggaggtgccgaccgcgctgcccgaggcctacgagcagggctatgcgcggctgttcgacgccactgtgcagcgtgccgggcaactgcctgcggccgcttgccagggccgtgaatggagctacgccgagctggatcaacgggcgcgacgcctggcgggtgtactgcagggcaatggtgtgagcgtcgaccacctggtcgctgtgctcggtgagcgtgacctgtcgttgctgggcatggtggtcggggtgttccaggcgggtgccggttatctctcgctggatccgtccttgccggtggcgcgcctggccgatgtgctgcgcttgagccaggcgcgggtgctggtgtgcgatgagcattgcctgggcttggcccaagcgatgctcgaaggcttccaagcgccgccgaccttgttggtctgggagcaggtgcaggcacacgccgcgccggcacagatgctgcacctgcccatcaatgccgccaagctgctggcctacgtgatcttcacttctggttcgaccggtgtgcctaaaggcgtcatggtcgaacaggccggcatgctcaacaaccagctgagcaagctaccgtacttgggcctgcggggcagcgacgtgatcgcccagacggcctcgcagagctttgatatcagcgtctggcaattgctgacggcggccctgtgtggttgccgcgtggaaatcttccccgacgccgtggcgcaggatccgcaggcgctgctgcaacaggtcgaggccacgggcgtgaccatcctcgaatgcgtaccggcgatgatccaggccatgctggaactgccagcccggcaattgccacgcctgcgttacctgctcaccaccggcgaagccatgtcaccggcactggcccgccgctggcgcgagcgctacccacaggtcgaactggtcaacgcctacggcccggcggagtgttccgacgacgtggcgctgtaccgcgtgcgtgatgacgcaagctccgtgcacctgccgatcggtgccgcgaccgagcacaaccgcctgcatgtgctcaacgacctgctcgaaccgatgccggcccgggccaccggcgagttgcatgtggccggcgtaggtgtcgggcgcggttaccttggggatccggtgcgcacggcattgagctttgtccccgatccgttcgccagccgcccgggtgagcgcctgtaccgcagtggcgacctggcgcacgtgtgcgccgatgggcagaccctggagtatgtggggcgcgccgacttccaggtgaagatccgcggctaccgcatagaactgggcgaaatcgaatcgcgcctgctggcccatgaaggtgtgcacagcgccgtggtggtggatgcgcaggtggccggtggcaagcagttggtggcctactgggtcgcccgcgatgcctcggtcgccgcagccgagatgcgcagcgtgctggccgactatctgcgtgccagccttccgggctacatggtgccggcactgtgggtgaggctcgacagcctgccgctgactgccaatggcaagctcgaccgcaaagcattgccggcaccggacccgagcaccgctcagcagcgctaccaggcaccggaaacgtcgttgcagcagcaattggcgcaggtctggagcgaggtgctgggcgtcgagcggatcagtctgggcgatgacttcttcgagctgggtgggcactcgctgctggtggtgcaggtggtggcgcgtgtgggccgcgaactgggcatcgaagtcagcctgcgatcgttgttcgagcacccgaccttgggagcgttcagcgaggccgtcgcagtgttgcaagggcagggcgcgtcgattcaggacgagttggctaaatccttggccgccttgaaacgtcttactgcagaggagatcgacgagttgacccagtagcgctctgcgggcccggtatgaccgggcccggctcgtcaacttcagtacacccagagccggcagccgtccggctctttcatttgttcggcagcatcatgagcctgtcgcgggctggcacgttccgcaggcaaagaccggtgccctggtaggagatgttcaagtgcaagcattgctcgattccgtggagtcactgtcgtcccgggagcgcaaggccctggccgccttgctcaagcagcagggtgtcaacctctacggggtgacgcgcatcttcgcccgcgacccggccgacccgaccccggtgtcctacgcccaggagcggcagtggtttctctggcaactggaccccgccagcggagcctacaacatcggtgcggcgctgcagctgcaggggcggctggatatcgagggcttgcgcggtgcctgccaggcgctgatccagcgccacgaagtgctgcgcaccacgttgcgacaagacagcgaccgcgtggtgcagatcatccacccgcagatgccgttcgagttgctcatcgagccgctcatcggcatgagcgcgaccagcgacgccttgcgcgagcacgtcgaggcgtgcatcgccaagccgttcgatcttgaacaagggccgctgttgcggctgaacctgctgccgcttggcgaagacgaccacgtgctggtgctgaccgtgcaccatattgccgctgacggctggtcgatgccgatcttgatcaacgatttggtacagtgctacgaacgcctcagccaggggcaggcaccgaatctgccggccctgccggtgcaatacgccgactatgccatctggcagcgcaactggatggaagcgggtgagcaggcgcggcagctggcttactggaaggacaccctcggcggggagcaaccggtgctcagcctgccgaccaatcgctcccggccggtggcgcccagcgggcgcggcgcgcgggtgggcatcgagatcgatgccgtgttgctgcagtcgctcaaggcgttggccaatgcccagggtgtaaccttgttcatgctgttgctggcatcgttccagaccttgctgcaccgctacagcggccagccccaggtgcgcgtgggcgtaccgatcgccaaccgtaaccgcagtgaagtgcaagggttgatcggtttcttcgtcaacacccaggtactcaaggccgacttcgcgctgcacagccgcttcatcgatgtgctgcaacaggtcaaggaaaccgcgttgcaggcccaggcgcaccaggacttaccgttcgaacagctggtggaggcgcttcaaccggagcgcagcatgagccacagtccgctgttccaggtgatgttcaaccaccaggcgcaagctgccagcgacgcccatgcccagctcagtggcttgcaggtgcgtgggctggagtgggacagccgcaccactcagttcgacctgactttggacacccgtgagcacgccgatggactgttcgcgtcattgacctatgccactgacctcttcgatgtctcgcgcatcgaacagatggcgcggcactggcgtaacctgctgattcaggcctgccaggacccgcgcaagcgtgtgctggagctggcgttgctggagcacgacgagcgcgagcgcatcctcggccagtggaatcagacgcagatggcctatcccaccaagctcggcgtctatcgcctgttcgaacagcaggtgtgtcgcacgcccgatgccgtggcgctgcgttttggcgagcagaccttgagctacgccgaactcaaccgccaggccaaccagttggcccacgccctgcgcgagcgtggcgtcggccctgaagtgctggtgggtgtggcgatgccgcgcgggccgcgcatgctggtgggcctgctggcgatcttcaaggcagggggcgcttacgtgccgctcgacccggactacccggccgagcgcctggcctacatgatcgaggacagcggcctggggttgctgctgaccgagcaggctgtgctggcaaggctgcaggtgccggccacggtcgccagcctgtgcctggacactgataccgcgtgctacgcctcggctgccgcagaagacttgccgcttgacgtcgatgccgatcatcccgcctatgtcatctacacctcaggctccaccggccggcccaaaggcgtcacggtgcgccacggtgccctggtcaacttcctcaccagcatggccgtccaaccgggtatcgcggccagcgaccgggtactggcgctgacctctctgtccttcgatatcgccggcctggagctgtaccttccgttgctgcacggggccagcgtggtgctactggccgaccagcagaacaaagaccccttcgccttgctgcgggtgatcgagcaacaggcggtgagcgtgatccaggcgacaccgtcgacctggcgcatgctgctggacaacgccccgccccaggccctgcgtggcaagcgggtaatcagcggcggcgaggccttgagcagcgagctggcccagcgcctgatcgaccaggcagggcatgtttggaacctctacggaccgaccgaaaccaccatctggtcgggtatcgagaaggtcaccgacagccgccaggtgtggttgggcaagccgatcggcaataccactttccacgtcctcgacgcccagttcgacgcggtgccggtgggcgtgagcggcgaactgttcattggcggcgatggcctggcgcgcggttacctgaagcgcccagggctgaccgccgagcgcttcatccccaacccgcacggccacggccggctgtatcgcaccggcgacctggtgcgctaccgcgacgatggtgtgctggagtacatggggcgcatcgaccaccagttgaagattcgcggtttccgcatcgagttgggcgagatcgaggccagcctgcagggcttcggtgcggtgcgcgaagtggccgtgatcgacgtcgacgggccgctgggcaagcagctggcaggctatatcgtgccgtacgatgccagcctgctgcaggctgatgccgaggttcaggaaaccctgcgcctggcactcaaggcccacgcattgaagtcgatgccggactacatggtgccgacccacctggtgttcattccacgcatgccgctgacccccaacggcaagctcgaccgcaaggcgctgccggcgcctgaccttgccgccgcccagcgcccgtaccaggcgccgaccagcccgctgcagcaagcgctggcggcgatctgggccgatgtgctgaaggtcgggcaggttggcttgagcgacagcttcttcgaactgggtggccattccttgctcgcgtcgcagatgattggccgcgtgcgccagcaactggcgctggaagtgccgctgcgcagtgtcttcgaggcccaggacctggcgggcttcgccgagcgggtggcggctgccacgacgggtgcgcagctgccggccatcgctgtggtgccacggggagagcccctggcgctgtcgtatgcccagcaacgtcaatgggtactgtggcaactggagccgcacagcgccgcctacaacatcgcgtcggccctgcacttgcgcggggcgctggatgtggcggcgctgcagcaggccttccaggccttggtggcacgccacgaaagcctgcgcaccactttcgtccaggtcgacggcgaagcgcgccaggtgattcacgcccccgaggcgcagggtgcatgcctgcgccaggcggatgtcgatgctgtcgaattgcaggccacggtcgagcagttggcccgtgaacccttcgacctggtcaacggcccactgatccgcgttgaccttttgcgccttgaggcccaggcgcatgtgctggtgatgaacctgcaccacatcatcaccgatggctggtcgatggcggtgctggtcaacgagctcgtggcgctgtaccagggctatcgtcatgggcaggccgtcgaactgcccgcgctggcggtgcaatacgccgactacgcggcttggcagcgccaatggctggaggcgagcgagcaagcgcggcagctggcctactgggaagcacagttgggcggtgaacagccggtgctggaattgccgaccgactacccgcgcccggcgcagccaagccgcgctggcggccagttgagcctggcgctggacgcgccgctggtgcaggcactcaggcggcaggcccaggcccagggcgtcaccctgttcatgttgctgctggccagcttccagaccctgcttcatcgttactcgactcagccggacatccgcgtgggcgtgccggtggccaatcgcacgcgcggcgaaaccgaaggggtggtgggcttcttcgtcaatacccaggtgcacaaggccgagtttcacctgcgcctgcgtttcgtcgagctgctgcgccaggtgcgccagaccgcgctggatgcccaggcccatcaggacctgccgttcgaacagttggtcgccgccttgaaaccggaccgcatcctcaaccaaaacccgctgttccaggtgatgttcaaccaccaggccgaggccaaaggcgcgccacgggaagtgccggggctgcagatcgaggccgtcgactggcaggtgcacagcacccagttcgacctggcgctggataccgccgagcacgctgacggcatgacggcagcttttaccttcgccaccgaactgtacgaccgccagaccatcgagcaaatggcccggcactggcgcaatctgctccaggccatcagtcgcgacgccaaccaggtggtcgcgcaactgccgatgctggatgatctcgagcagcagtgcatgctgcatgactggaacgcgaccgcagtggcctacccgcaggcgcgcctggtgcatcaattgttcgaggatcaggcccagcgtcatccgcaggcgccggcgttgattttcgccgatgccacccttagctacaccgaactggatcagcgtgccaaccgcctggcgaacaaactgcgtgagcaaggtgtcggcccggaagtgctggttggcgtggcggtggaaagaagcctggaactggtgataggcctgatggccgtgctcaaggccgggggcgcctatgtaccgctggacccggattacccgagcgaccgcctggcctacatgatcgaggacagcggcatcggcctgctgctcagccagcaagcattggccgagcgcctgccggtgccggcagcggtacgtatcctgtgcctggaccaggacgcgcagtggctggccggctatgccgacaccgcccctgaggtggacgttcgcctcgccaacctggcctatgtgatctacacctccggttccacagggcggcccaagggcgcgggcaacacccacgaggcgctgctcaaccgcctgcagtggatgcaaggcgcctatggcctggatgccagcgacacggtgctgcagaaaaccccgttcagcttcgatgtgtcggtgtgggagttcttctggccgctgatgaccggcgcgcgcctggccgtggccttgcccggcgatcaccgcgacccgcagcgcctgtgccagaccatcatcgaccaccaggtcagcaccctgcacttcgtgccttcgatgctgcaggccttcatggccagcgccgaggtcgagcagtgccgcagcgttcgccgcgtggtgtgcagtggcgaagcgctgccggccgtattggcccaacagtgccgcgagcgcttgcctcatgccgggttgtacaacctgtacggcccgaccgaggccgccatcgacgtgacccactggacctgcggcgacaagcagggcttcagcgtgccgatcggccaaccgatcgacaacctgcgcacccacatcctcgaacccgacctgctgcccgctgcgcgcggcgtcaatggggagctgtacctggccggcattggcctggcgcggggctaccacggtcgcccggcactgacggctgaacgcttcgtgcccgatccgttcgatgagcagggcggtcgtctgtaccgcactggcgacctggcgcgctatcgcccggacggtgtgatcgattacgccgggcgtatcgaccaccaggtaaaaattcgcggcctgcgtatcgagctgggtgagatcgaagcacgactggccgagcacgcccaagtgcgcgaggcagtggtgctggcccaggacggcccgagcggcaagcaactggtgggctatgtggtgccgatggctgccgagcaggccgagccgggcagcgaggcgggccagcgactgcgtgagcaactggcgcatttcctcggtcagggcttgcccgattacatggtgccggcgcacctgatgctgctcgccaacttgccggtcaccgccaacggcaagttggcgcgcaacctcttgccggcaccggatttcaacgccgccaggcaggtgtatgtcgctccgcgcacggcgctggagcagcaactggcgtcgatctgggagacggtgctgaacctgccccaagtcggtatgcaggacaacttctttgccctgggaggcgattcgatcatcgccatccaggtg

SEQ ID NO: 31389 - DNA, 1437 bp, Pseudomonas putida
atgccattgtttgctttcctgtcggcactgctttgcctgagcgctgcccctggcctggtgcaggccgcagacgtgcccgcgccggatccggcgccttccgctgccacgctcgtagccaaggacccggtgttctcccaggagcaactggaccagatgctggcccccattgccttgtaccctgatcagttgctggctcaggtgctgatggcgtcaacctacccggggcaggtcaatgaagccgtgacctggtccaaggccaaccccaaggccaccggcgacgatgcagtcaggcaagtggccaagcagccctgggaccctagcgtacaggcactggtggccttcccgcaggtgctggcaacgcttggccaggacccggtctgggtgcagcgcctgggcgatgctttcctcgcccagcccgatgatgtcatgggcagcgtgcagcgtttgcgccaccaggcgcaggccgccggcaatctgcagagcagccagtaccagaatgtaaccgtgcagaccgcacctgcacctgcgccagccgccagcggcagcagcacccaaggggcagcggccagcagcccgcccaccaccatcgtcatcgagccggccgacccgcaagtggtgtatgtgcccagctataacccgaccaccacctatggcacctgggcctacccggcctcgccgcccatgtactaccccggttccgcgctggtggccggcctggccttcggtaccggcgtggcgattgtcgcctcgttgtggggcgattgcgactgggacaacaatgacatcgacattgacgtcaaccgctacaacaacctcaacgtcaacaaccgcatcaccaacaaccagaacaaatggcagcacaattccgccaaccgagacggtgtgccataccgcgactctcgcagccgtcagcagtatggccgccaactggacggtgccactcagcgcaccgcgttccgcggcgacgacgcccaacgggcccaggcccgagacaaagccagggcatcgatggaccgcgcaggtatcgaacggccggctaccagtaaccgtcaggcccgcgagcaaatgcgcgaggccaaggcaggcagtcccgacggcaaccgcatgctgtcccgggatgatggcgcgcgggctactgaccgtcggcaggatacccgcaatgaccaaggccgccagcagaacggcaacctggccaatcaacgccggcagggcgacggccaggtgcggcagccggcgcagagccgtcctgccaatacggcaggccgtgcccgcaacaatgccttcgacggtgtgcgctcgccgtcgcgcaccagcgtgcaggccaaccgcggccgtaccagccagtcgttcgctcagcggcccggtgcgtcgcgtgccgccgggcacccgatctcccggcccagtgcgcccgcgcgtcgcggcgcaggaggccgtcga

SEQ ID NO: 31390 - DNA, 1005 bp, Pseudomonas putida
atgaacgccgcgcatcccgaagtagcagtagcgcctggccagaaccccggtgagcttttgcgcctggcccgtgagaaacgggactggtctcaagccgaggtggcccgtaagctcaacctcactgtcagttcgttgaaccacgtggaaaccggcgccttcgacaagctgcccgggcatactttcgctcgtggctacattcgcgcctacgccaagctgatggacctcgaccaggccgccctggtagatgccttcgaccgctacaccggtacccacgccaaaggcagcgacgtgcattcgctgggccgtatcgaagagcctgtgcggttgtcgcacaatatcctgcgcggcgtcagcctgctgttgctggtggctgtggtcggtggtggctttttctggtggcaggaccagggcagcctgcggggcaaggagctggcgaagattgccctggagcacgtcgaggtcgaaagcgccgacggcaccacacagattcacccgctcgatgagcctgaagaccaggccgtttccgctggacagcaacctgaaagcgcgccgctggcgctggagcagggcgctgccgagcagcctgctgccgctgaacaggcgccggtaagctctgaggcaaccattgccacagcgcctgtgcaacccgcacctgctgcttcgcctgcaccggttactcctccggtacaggccactgctgcgccggcaccagcacctgcacctgcaccggccgtggcggccgtcgagcctgccgcggtgccagcaggcagcgccaaggtcgccatccagttcaccgccgattgctggacccaggtcagcgacggcaacggcaaggtgctgttcagcgccatcaagcgcaagggggacaacctcgagctgaccggcaagccgccattcgcggtacgcctgggctttgcccggggcgcccaggtcagctacaacggccaggccgtcgatgttgccccgttcaccagtggcgagactgctcgcctgaagttgggacag

SEQ ID NO: 31391 - DNA, 1107 bp, Pseudomonas putida
atgcacggcgaatctccgatcaaacgtcgcgaatcccgcaaaatctgggttggcaatgtgccggtgggtggtgatgcgcccatcgcggtgcagagcatgaccaacaccgacaccaacgatgtcgctgctaccgtggcgcaaatccagcgtctggtcgacgccggcgtggacatcgtgcgggtctcggtgccggacatggacgcggccgaagcgtttggcaagatcaagcaacgggtcagcgtgccgctggtcgccgacatccatttcgactacaagatcgccctgcgtgttgccgaactgggcgttgattgcctgcggatcaacccgggcaacatcggccgtgaagaccgcgtgcgcgccgtggtggatgccgcccgcgaccgcggcattccgattcgtatcggggtcaacgccggttcgctggaaaaagacctgcagaagaagtacggcgaaccgaccccggccgcactggtcgagtcggccctgcgccacgtcgagcatctcgaccgcctggatttccaggacttcaaggtcagcgtcaaggcctcggacgtgttcatggctgtcgaagcctaccgtctgctggccaagcagatcgtgcaaccgctgcacctgggcatcactgaagccggtggcctgcgttcgggcaccgtgaagtccgccgtcggcctcggtatgctgctggccgaaggtattggcgatacgatccgcatctcgctggcggccgacccggtcgaagaagtgaaagtcggctacgacatcctcaagtcgctgcatctgcgctcgcgtggcatcaacttcatcgcctgcccgagctgctcgcggcagaatttcgatgtggtcaagaccatgaacgagctggaagggcgtctggaagacctgctggtaccgctggatgtggcggtgatcggttgcgtggtcaacggcccgggtgaagccaaggaagcccatgtaggcctgaccggcggtacgccgaacctgatctacatcgacggcaagccggcgcagaagctgaccaatgacaacctggtcgatgagcttgaaaaactcatccgccagaaagcggccgaaaaggccgaggccgacgcggcgttgatcgctcgtggc

SEQ ID NO: 31392 - DNA, 1449 bp, Pseudomonas putida
atgcatcaattgaccctggccgagatcgcccgcggactcgccgacaaatcgttttcttccgaagagctgaccggcgccctgctggcgcgcatcaagcagctcgacccacagatcaacagcttcatcagcgtcaccgaagacctggccctgggccaggcgcgtgccgccgatgcccgtcgcgccgcgggcgaaaccagcgcgctgctgggtgcaccgatcgcccacaaagacctgttctgcaccaacggcgtacgcaccagctgcggctcgaagatgctcgacaacttcaaggcgccctatgacgccaccgtggtcgccaagctggcggaagccggcatggtcaccctgggcaagaccaacatggacgagttcgccatgggttcggccaacgaatccagccattacggcgcggtgaagaacccgtggaacctcgagcacgttccgggcgggtcgtccggtggttcggccgctgccgtggccgcgcgtctgctgcccgccaccacgggcaccgacaccggcggctcgatccgccagccagcggcactgaccaacctcaccggcctcaagccgacgtacggtcgtgtgtcgcgctggggcatgatcgcctacgcctccagcctcgaccagggcggcccactggcccgcaccgccgaggactgcgcgctgctgctgcaaggtatggccggtttcgacgccaaggactccaccagcatcgaagaaccggtgccggactacagcgccagcctgaacgcttcgctgcagggcctgcgcatcggcctgccgaaagagtacttcggtgccggtctagacccacgcatcgccgacctggtccaggccagcgtcaaagagctggaaaagctcggcgcagtggtcaaggaaatcagcctgccgaacatgcagcatgccattccggcctactacgtgatcgctccggctgaagcctcttccaacctgtcgcgtttcgacggcgtacgcttcggctaccgctgtgaagagcccaaagacctcaccgacctgtacaagcgctcccgcggcgaagggttcggcgttgaagtacagcggcgcatcatggtcggtacctacgccctgtcggccggctactacgacgcctattacgtgaaggcgcagcaaatccgccgcctgatcaagaacgacttcatggccgccttcaacgatgtcgacctgattctcggcccgaccacgccaaacccggcctggaagcttggcgccaagagcagcgacccggttgccgcctatctcgaagacgtctacaccatcaccgccaacctggcgggcctgccaggcctgtcgatgcctgcgggcttcgtcgacggcctgccggtcggcgtgcaactgctggcgccgtacttccaggaaggccgcctgctcaacgtcgcgcaccgctaccaacaggtgaccgactggcatacccgcgcccccaacggcttc

SEQ ID NO: 31393 - DNA, 825 bp, Pseudomonas putida
atgccccgcgtgctcgcgcccctgcttgccctttccctgctgctgctggccggcggcgcccaggccagctacatcacccgcacactgaacaaaccggtacccggcggtgtggcagtcgtcgacctgggccccgccgccaatgcacccagcgcccgtttcgacggcaagccggtgctggtggtgaaggagcaggacaactggctggccatcgtcggcatcccgctgacccagaagcccggcaccgcagtgctgaaccagggcgggcgcaccctgcctttcagcgtacgcagcaagaagtaccctgagcagcgcatcaccctgaagaacacgcgccaggtcaacccgaacccggccgacctcaaacgcatcgagcgcgagctggccgagcagatcaaggcctaccgcagcttcagcccgaacctgccgagcaacctggttctcgacaagccggtcaacggcccgctgtcgagcaagttcggcgtgcgccgcttcttcaacggcgaagaacgcaacccgcatgcggggctggattttgcggtgccggcaggcacgccgatcaagacacccgccaatggcaaagtgattctggtgggggattatttcttcaacggccgcacggtgttcgtcgaccatgggcagggctttatcagcatgttctgccacatgtcgaaaatcgatgtgcaggtcggccagcaactgcgtcgtggcgaggtggtcgggcgcgtgggctcgaccgggcgggcaaccgggccgcacatgcactggaacgtcagcctgaacgatgcgcgggtggacccggcgattttcattggcgcgttccagccc

SEQ ID NO: 31394 - DNA, 1377 bp, Pseudomonas putida
atgatcaaagaccctttcgaacgactcgggctggaccgcgaggtccttaccgtcagccaactcaacggccgcgcccgcgtgctgctggaagacgttttccgcagcgtgtgggtggaaggcgaaatctccaacctcgcccgcccggcgtccggccacatgtacttcaccctcaaggacagcggcgcccaggtgcgttgtgcgttgttccggcagaacgccacgcgggtacgccaggcgctgcgcgacggcctggcggtgcgggtgcgtggcaaggtttcgctgttcgaggggcgtggcgactaccagcttattctcgacaccgtcgagccagccggtgatggcgcgctgcgcctggctttcgaggccctgaaggaaaagctcggggccgaggggctgttcagcgccgaacgaaagaagccactgccggctcacccgcagcgcatcggcatcatcacctcgcccactggcgcggtgatccgcgacatcatcagcgtgttcggccgccgtgccccgcaggtggagctgaacctgatacctacggcggtacagggccgcgaagccatcgcgcagatcgtacgcgccatccgcctggccgacagcctcggcttcgatgcgctgatcctggcgcggggtgggggttcgctggaagacctgtggtgtttcaacgaggaagccgtggcgcgtgccgtggccgcctgcgtcacgccgattgtcagcgccgtgggccatgaaaccgacgtgtcgatcagcgacttcgtggctgacgtgcgcgcgcccaccccgtctgcggccgccgagctgctggcccctgacaacagcggccttcggcaacgcctggatggcctgcaacggcgcctgctgctgcgcatgcagaaccgcctgacccacgaccgcctgcgcctggagtcactcacccggcgcctgcgccacccaggcgagcgtttgcgccagcgggctcaacgcctggacgacctggacatgcgcctgcgtcgcgcgttcatgctcaacctcaaccagcgccgcgaacgcctggcacgcctggacgcccgcctggccgcgcagcatccggggcgtaacctgaaactgctgaaccagcgcctggacagcctggccgagcgcctgccacgggccatgcgcgaggtgctcaaggaccgtcgccagcggttccaggcccagttgcagacactgcaggtggtcagtccgctggccactctggcccgtggatacagcattttgctggatgagcaaggccaggccattcgcagcgccgaacagacccgcaatggccaacgcctgaccgcccgcctgaacgaaggcgagttgctggtgcgggtcgaagacaaccacctgaccccggtcaccctctcactactggac

SEQ ID NO: 31395 - DNA, 1740 bp, Pseudomonas putida
atgaacattgccatagtcaccgcctgccccaatggccaggtatcgagtgtactgagtgcacgcttgctgtccgccgccgcccagcgtcgcggctggagcaccagcgtcgaagtgcagaatactgaacaccccgagcggcaactgagcgccgcacagatcgccgaggctgactgggtgcttgtggtcagcaccgggccggtggacctggcccgcttcgtcggcaagcgcctgtaccaaagcacaccgtcccaggcgctggctgatcgcgaaggctttctcgacgaagcggcggccaacgccgagctgctggccgcagtgacaggcgcccctgccgcagctagcagtgctggcgctcgcatcgttgccgtcactgcatgcccgaccggcgtagcccataccttcatggccgcagaagccttgcagcaagccgcacagcaactgggctaccagttgaccgtcgagacccagggctcggtcggtgcgcgcaatcccttgtctgctgaagccatcgcagcggcggacgtggtgctgctggccgccgacattgaagtacccactgcacgtttcgccggcaaacgtatttaccgttgtggtactggcattgccctcaagcaggcccgcgctaccctggacaaagccctggcgcaggccacggtggaaaacggtgccgacgctgcagcggcgaccacgccgaccaagagcgagaaaaccggcgtgtacaagcacttgctgaccggcgtctcgttcatgcttccgatggtggtggccggcggcctgctgattgcgttgtcgttcgtgttcggtatcgaggcctacaaagaggcgggcaccttgccggcggcgttgatgcagattggcggtgaggctgccttcaaactgatggttccgctactggcaggctatatcgcctggtctatcgccgaccgccccgggctggccccgggcatgatcggcggcctgttggccagcaccttgggggccggcttcatcggtggcattgtcgccggtttcctcgccggttacagcgccaaggccattgcccgatgggcgcgcttgcccagcagcctggaggcgctcaagccgatccttatcattccattgctggccagtctgttcaccgggctggtgatgatctacgtggttggccagccggtagcggcgatgctcgaaggcctgacgcattttctcgacagcatgggcaccaccaatgccatcctgctggggctgttgctgggcggcatgatgtgcgtcgaccttggcgggccgatcaacaaggccgcctatgcgttctcggtggggctgctggcctcgtcgagctacgcgccaatggcggcgaccatggccgccggcatggtgccgccgattggcttgggtattgccaccttcctggcccggcgcaagttcgcccagagcgagcgcgaggcgggcaaggcggcgctggcgctggggctgtgcttcatctccgagggggcgattccgtttgccgccaaggacccgttacgggtgatcccggccagtatcgccggtggtgcgttgaccggggcattgtcgatgtattttggctgcaagctgatggcgccgcatggcggcttgttcgtgttgttgatccccaacgcgatcaaccatgcgttgctttatctgctggcgattgtggcgggtagcctggtgacagcggtggtgtatgcggttatcaagaagagcgagcgtgtggagttggccgtggcgcctgctaaaagtgta

SEQ ID NO: 31396 - DNA, 1332 bp, Pseudomonas putida
gtgctgcgcgtgatcacacgcaacagcccggcaacctacttccaggaccgtaacggcgaaaccggctttgagtacgaactggtccagcatttcgccgacgatctcggcgtaaagctgcagatcgagaccgccgacaacctggacgagctgtacgacgccctcggcaagccctccggcccggtactggctgccgccggcctggtcagcagtgagcggcgcaaaacccaggtgagatactcccatccctatctggaggtgaccccgcaggtcatctaccgcaacggccgcccgcgccccaccggcgccaagggtttggtcggcaagaagatcatggtgctcaagggcagcagccatgctgaccagctggccgagctgaaaaagcagtacccggccttgcaatacgaggaatccgacgccgtcgaagtggtcgacctgctgcgcatggtggacgaaggtcagatcgacttgaccctggtggactccaacgaactggcgatgaaccaggtgtatttccccaacgtgcgggtcgccttcgatctgggcgaaacccgcgaccagcgctgggcagtggccgcaggcgaagacaacagcctgctcaacgaaatcaacgagtatctcgacaaggcacagaaaaacggcacccttcagcgattgaaggaccgctactacggccatgtcgacgtacttggctatgtcggcgcctacaccttcgcccagcacctgcaacagcgcctgcccaagtacgagaagcacttcaagagctacgccaaggtcgagcaggtcgactggcgcctgctggcagccattggctaccaggaatcgatgtggcagccggaagtcacctccaagaccggcgtgcgcggcctgatgatgctgacccagcgcaccgcccaggccatgggcgtgtcgaaccgactggacccgaggcagagcatccagggcggcgccaagtacttcatgaagatcaaggaagagcttgacgacagcatcaaggagccggaccgcacctggttcgcccttgccgcctacaatgtcggtggcggccacctggaagacgcccgcaccctggccaagcgcgagaagctgaacccgaacaagtggctggacgtgaagaagatgctgccgcggctggctcagaagcagtggtaccggcagaccaagtacggctatgcccgtgggggcgaaccggtgcatttcgtggccaacatccgccgttactacgacatcctcacctgggtgacccagccgcagctggaaggccaggtggccgagggcaacctgcatgtgcccggggtcaacaaggacaagccagcggataagtcgtcgccgatg

SEQ ID NO: 31397 - DNA, 1809 bp, Pseudomonas putida
gtgataaagcgattgcctgttgggtttgttttgtttgtgccggcctcttcgcgggtaaactcgctcctacgaagactgcaccgcatccgaaccctgtgtcgtacctgtaggcgcgggtttacccgcgaaggggccggcacaggcgccattcattcggcagattttggtccaggcccaacttcaggtatgatactgcccctttcaaatcccccagtcaggcgatttcccatgaccaaccaggccgccgaagtcgcgaagcgccgcactttcgcaatcatttcccaccccgacgccggtaagaccaccatcaccgagaagctgctgctgatgggcaaggccattgccgtcgccggtaccgtgaagtcgcgcaagtccgaccgccacgccacctccgactggatggaaatggagaagcagcgcggcatctccatcaccacctcggtgatgcagttcccgtaccgcgagcacatgatcaacctgctcgacacccccggccacgaagacttctcggaagacacctaccgcaccctgaccgcggtggactcggcgctgatggtgctcgacggcggtaaaggtgtagagccgcgtaccatcgccctgatggacgtgtgccgcctgcgcgacacgcccatcgtcagcttcatcaacaaactcgaccgagacatccgcgacccgatcgaactgctcgacgagatcgaagccgttttgaagatcaaggccgcgccaatcacctggccgatcggttgctaccgcgacttcaagggcgtgtaccacctgaccggtgactacatcgtggtgtacaccccgggccacggccacgagcgcaccgaagccaagatcatccagaagctggactcggacgaagcccgcgcgcacctgggcgaccagtacgattcgttcgtcgagcaactggagctggtgcagggcgcttgccacgagttcaaccaggaagagttcatcaacggtcagctgacccctgtgttcttcggtactgcactgggcaacttcggtgtcgaccacgtgctcgacgccgtggtcgactgggcgccgcgtccgcttggccgtgtggcccacgagcgcaccgtggagcctgtggaagagaagttcacaggcttcgtgttcaagatccaggcgaacatggacccgaaacaccgtgaccgtatcgccttcatgcgcatctgctcgggcaagtacgagaaaggcatgaaaatgcgccacgtgcgcctgaacaaagacctgcgtatcggcgatgcgctgacgttcttctcctccgagcgtgagcagctggaagaagcctttgccggtgacatcatcggcctgcacaaccacggcaccatccagatcggcgacaccttcaccgaaggcgaagcgctgggcttcaccggtatcccgcacttcgcgccggagctgttccgccgcgtacgcctgaaagacccgctgaaatccaagcaactgcgtcaaggcctgcagcagctggccgaagaaggtgctactcaggtgttcttccctgagcgcagcaacgacatcatcctgggtgcggtcggtgtgctgcagtttgacgtggtcgccagccgcttgaaggaagagtacaaggtggagtgtgcctacgagcctatcaccgtctggtcggcgcgctggatcagttgcgatgacaagaagaagctcgaggaattccagaccaaggccatggaaaacttggccatcgacggcggcggtcacctgacctacctggcgccgacccgggtcaacctggcgctgatggaagagcgctggccggacatcaagttccgcgctacccgcgagcaccat

SEQ ID NO: 31398 - DNA, 966 bp, Pseudomonas putida
atggccgtcgttctatccgcccgggagctgacccggcattacgaagtctcccgcgggctgttcaagggccatgcgctggtgcgcgcgctcaatggcgtgtcgttcgaactggaggccggcaagaccctggccgtggtcggcgagtcgggctgcggcaagtcgaccctggcccgcgccctgaccctgatcgaagagccgtcgtccggatcgctgcaaattgccggcaccgaggtgaagggcgccagcaaggcagagcgcaaacaactgcgccgcgatgtgcagatggtgttccagagcccctacgcctcgctcaacccacggcagaagatcggtgaccaactggccgaaccgctgctgatcaacacctcgctgagcaaggccgagcgccgcgacaaagtgcagaagatgatggagcaggtcggcctgcgccccgagcactaccagcgctacccacacatgttctccggcggccagcgccagcgtatcgccttggcccgggcgatgatgctgcaacccaaggtgctggtggccgacgaaccgacctctgcgctggacgtgtcgattcaggcgcaggtgctgaacctgttcatggatctgcagaaggagttcaacaccgcctacgtgttcatctcgcacaacctggcggtggtgcggcatgtggcggatcaggtactggtgatgtacctggggcggccggcggagatggggccgaaggaggacatctacgcgaagccgctgcacccgtatacccaggcgctgctgtcggcgacacccgcgattcatccagacccgttgaagccgaaaattcgtatcgtcggggagctgcccaacccgctgaacccgccggatgggtgtgcgtttcacaaacgctgcccgtatgcgaccgagcggtgtgccaaggaggtgccggcactgaggcaggtgagtacgcggcaggttgcgtgccactatgcggagcagtttctt

SEQ ID NO: 31399 - DNA, 1008 bp, Pseudomonas putida
atgttgagttttattgcccggcgccttggcctgctgataccgacctttttcggcatcaccttgctgaccttcgcgctcatacgcctgatccccggcgacccggtggaagtgatgatgggcgagcgcagggtcgaccccgaaatgcatgcccaggccatggaacgcctgggcctgaacaagccactgccggtccagtacctggactacgtcggcaaacttgcccagggtgaccttggcgaatcgctgcgcacccgcgaaagcgtgtggcgcgagttcctcaccctgttcccggccaccctggaactggccttcgccgccctgctgttcgccggcgtcgtcggcctgctggccggtgtaatcgccgcactcaagcgcggttcgctgttcgaccacggggtcatgggcatatcactggccggctactcgatgccgattttctggtggggcctgatcctgatcatgttcttctccgtgagcctgggctggaccccggtttccgggcgcatcgacctgctctacgacatcgagccgaagaccggcttcatgcttatcgacaccctgctcagcgatgaagaaggcgcgttcaaggacgctgtgatgcacctgatcctgccggccatcgtgctcggcaccatcccgctggcagtgatcgcccgcatgacccgctcgtcgatgcttgaagtactgcgcgaagactacatccgcaccgcccgcgccaaaggcctgtcgccggcccgtgtggtgttcgtccatggcctgcgcaatgcgctgatcccggtgctgaccgtgttcggcctgcaggtcggcacgctgctggccggtgcggtgctgaccgaaaccatcttttcctggccgggcatcggcaaatggctgatcgaagccatcggtgcccgtgactaccccgtggtccagaacggcatcctgttgatcgcctgcctggtgattctggtcaacttcgtcgtggacatcctctacggcctggccaacccacgcatccgtcatcagcgc

SEQ ID NO: 31400 - DNA, 1134 bp, Pseudomonas putida
gtgagcgcgggcttgcccgcgaagggctgcaaagcagtcccaatcaaggcgagctcgatgaaggtactgttggtcatccttgcgctggttgcaggtagcgccaaagctgaagactggcctgacccgcagtggcagaacgaccctgccaccctcgactggcaggccgtcgatgcctacgcctttcctgcacgctccccctcggagcgcaacggcatccgcacggacgctctgctgatcatccgcgacgggcgtatcctccacgagcgctacaccgcgcccacccgcgccgccaccgcgcacctgacctggtcggtaagcaagagcgtactggccacggtaatgggcgtagcccagggcgaaggccgcttccagctgcaagacccggtcagccgcttctatccacccatgcgcgcccacccaggcgtgcgcgttgccgacctgctgcactgggccagtggccttgagtggcaggaagactacgaatacgcgccgctgaagtcctcggtggtggccatgctgtatacccgtggccgcgcagacatggccgcctacgcggcggcccggggtgccgccgccagccccggtcagcggttcctctactccagcggcgacagcaacctgctggccgccgcgctgcgtggcatgctcgatgccgggcagtaccccgactacccctggcacgcactgttcaccccgttgggtatcggcagtgcggtgtgggagcgtgaccgggcaggcacctatgtaggctcttcctatctctacctcagtgcccgcgatttggcccgtattggcctgctgatgcagcgcgacgggcgctggcagggccgacaattgctgcccaaagcctgggtagctttcaaccgcaccccgtttgtccaggcccaggcgctgcctggcgaggccatcccgggcggccactggtggctcaaccagccgctggctggcgccgaacggccttggcccagtgcaccggcagacaccttcgccgcccttggccactgggggcaggctttatatgtgctgcctgagcaaaagctggtgatcgtgcgctacgccgatgaccgcgacagcagctatcgacacgacgaattgctcaagcgggtgctggcggtactggccggggagggggca

SEQ ID NO: 31401 - DNA, 3018 bp, Pseudomonas putida
gtggcgctggttgccatcggtgttgccgcgtatgacgaattccgtacctctgaactgcaatcgcgcgagttcagcaaactggccagtacactgacctattcgctgcaacccggtcccagcgatgccatcatctaccccggtgacgggccgttcgacaaacgcctgggctatagcgccctgggtgaattcctgccacgcctgctcaagcgcgactacctcatcagcgaacaggtgaagttctcacccgcattgatgaactacgtcgatcatgggctgttcgccccctatatcgagaaaatccaggccggcctgtcgatcaccgactgccgcggcgacacgctgtaccagtacaactacccccagcacctgtacccggactttgcagcgatccctcccgtgatggtcaacagcttgctgttcatcgaaaaccgcgacctgctggatacccaggacccacgtaacaacccggcagtggactggccacgctttgccaaggccgcctacagccaggtcgccaagtacctggccctgcccggccagtctgccggcggcagcaccctggccacacagctggagaaatatcgccactcacccgacggcctgacggtgtcgggcgcggagaagatccggcagatgatttctgccagcgtgcgtgcctaccagggcggccccgacaccaccgaggcacgccagcgcatcgtgcgcgactacctcaacagcgtaccgctgtcggctgtgcctgggcatggcgaggtgcatggcatggccgagggcctgcgggtgtggtacggcgccgacttcgaccaagtcaaccaggccctgaacgccaccgccaccgacccccagagcatggccgcacgtggcctggccctacgccaggtgctgtcgctgatgattgcccagcgccgcccctcgcattacttgtccaagggccgggtcgagctggccgagctcaccgattcgcacattcggctgcttgccgccaacaaggtcatcgatcagccgctggccgatgccgcgctggccagcaaggcggtgtaccgcgactgggtcgcgcagccgaccatcgtaccgatcattaccaacaagggcatcagcctggcgcgcaaccgcctgtcggccatgctcaatcgcccgctgtacgacctcgaccgcctcgacctgtcagccaccagtaccttgcaggccgacctgcaactgcaggttagccagtacctgaaaaaccttgccgacccggagtttgccgcacagatcggcctgatcggcgagcggctgctcactgccaagaccaccgaccaggtgagctacagcttcaccttgttcgaacgcaccgccgatggctcgcgggtccgggtgcagaccgacagcaccaaccagcccttcgacatcaacgaaggcagcaagctggagctgggctcaaccgccaagctgcgggtactgaccacctaccttgaaattatcgccgagctgcacgacaagtacgccggcaaacctgccgccgagctgaagaaggtcgaagtggccgaactcgaccgcatcacgcaatggtcgctggaatggctggcgctgaacagcaagaaccagagccttgacgccatgctcgacgccgcgctcgagcgcaagtattcggccaacaccggtgaagcgtttttcaccggtggcgggatgcatgtgttcaacaacttccgcaaggaagacaacaaccgcaacccgacactcaaggatgcactgcgcgagtcgatcaacctgccgttcatccggctgatgcgcgacctggtgcgctacgtgacttaccagcagccgtacaaccgcgtgccgctgctcaaggacgatgccgacccgcgccgccaggagtaccttgcgcgctttgccgacaaggaaggcaccaactacctgatgcgcttctggaagaagtaccagcgtaaaacctcgcaacaacgcctggacaccttcctcgacagcatgcgcgtgaccccacagcggttggcggcggtacaccgctacctgttccccgaggcaagccaggaaaccttcaacgcgttcgtgcgtgcccacctcaagggtgacaaggtcgtgctgggcaaactgaccgatggccgtctgtccgagatgtacgtagcttacggccccggcaagtacgacctgcccgaccagggttacatcgccaaggtccacccgctggacctgtggctgcttggctacctgctgaagaacccgagctcgacactgaccgagatgatcaacgccagtcgtttcgaacgccaggaggtatacggctggctgttcaagagccgccaccagggcgcccgtgacagccgcatccgcaccatggtcgaaatcgaagccttcctcgatatccaccaacgctggaaacgcgtgggctatccattcgaccacctggtgccctcattggccaccgccatcggcagctccggcgaccgccccgctgccctctccgaactggtcgggatcatccagaacgacggtgttcgcctgcctaccctgcgcatcgacaccctgcatttcgcagccaacacaccctacgagaccaagttgatcacagaccctgaccggggcgtgcgaattctgccagtcgaagtggcgcgtgcactcaaaggcgccatgtcgcaagtggtcgatgcaggtaccgcgcggcgtatttccggcagtttcaagctgcaggacggcacgccgctggtgatgggcggcaagaccggtaccggtgacaaccgaatcgagagctttggcgccggcggccggctgatcggctcgcgctcgctgaaccgcaccgccaccttcgtgttcttccttggcgacaaccatttcggcacgctgaccgccttcgtgccgggtcgcacggcagaagcgttcaaatttacctcggcgctgccggtgcaggtgctcaagggcatggcaccgatcctcatgccttacctgcagccgggcaatccgaatgagtgcaagccgccacaggttgccctgcacacaccgtcaccggcagggaacacatcgacgcag

SEQ ID NO: 31402 - DNA, 4302 bp, Pseudomonas putida
atgaacctgcccgccaaacaccacccggtgctcgagctgttccatcctgccgtcagcacctggttccgccgccacttcgccacggtcaccgatgcccaggcacaggcctggccgttgatccacgccgggcaatccatgctgctggccgcgccgaccggctcaggcaagaccctgagcgcttttctggccgtgcttgatgagctgctgcgtgaaggcatgaagcaccagggcgaactgcccgcacagaccctggtgatctacgtttcacctctgaaggccctgtccaatgacattcgtctgaacctgcaggccccgctcgaaggcatcagccaagccattgcagagcaaggcctgaacgccccacgcatcaccacggcggtacgcaccggcgatacgccgcagaaggaacgcgccgccatgcgcaagctggccccgcacattctggtgacgacccccgaatcgctttacgtgctgatgggctcggcttctggccgtgaaggcctggcccatgtgcacacggtaatcgtcgacgaaatccatgccttggccggtaacaagcgtggcgcccatctggccctgaccttggaacgcctgcaagccttgtgcaaaaagccactgcggcgtatcggcctgtccgctacccaacgcccggtcgaacgggtggcacagtttctggtgggtagcgggcgtccctgcgccattgtcgatatcggccatgcccgcaagcgtgacctggccatcgaagtgccgccggtaccgctgggggcggtgatggccattgatgtctggggcctggtgtatgaccgcttggccacccttgcccgtgaacaccgcaccacgctggtattcgtcaacacccggcgcctggccgaacgtatcacccgccacctcagcgaccggctgggcaaggaggcggttgccgcacaccatggcagcctgtccaaagcgctgcgcctggatgcggagcagcggctcaagagcggccagctccaggtgctggtagcgaccgcatcgctggagcttggcattgatatcggcgatatcgacctggtctgccaggtcgcctcgccgggctcgattgccgccttcctgcaacgggttggccgcgctggacaccaggtcgatggtgtgccgaaggggcgcctgttccctacctcacgcgatgacctgatcgaatgcgttgccttgcttgactgcgttcgacagggcgaactggacgcactgcacatcccccgggcaccgctggatgtgctggcccagcagatcgtcgcagaagccagcaaccaggcctggcacgaacaggaactgctggattgcctgcgccaggccacaccttacgccgagcttgaccagcaccactaccaggccctgctgcgcatgctcgccgagggctacaacggccgccagggtgtgcgcagtgcctacttgcaccgtgacgcagtgagcggcacgctgcgtggccgacgtggcagccaactgaccgcgctgaccagcggcggcaccatccccgacaacgccgactacgccgtgttgctggaaccgcaggcgctgaacatcggcagcgtcaatgaagactttgccgtggaaagcattgccggcgatattttccagctgggcaacgcctcctatcgcattctgcgcgtcgagccgggccgggtgcgggtagaggatgctcatggcctgccaccgaccattccgttctggctgggtgaagcgccggggcgcagtgacgagctgtctgccgccgtggcccggctgcaggcgcgaatcgaccagcaactggcgctggcaggcggcgacacggtggaggtactggcctggttgcaggcgaccttcgaactggacgaagcttgtgcgggccagttgctcgactacctggcccgcacccgtgaagtgcttggcgccctgccctcgcaggatacgctggtgatggaacgttttttcgatgagtccggcgggacccaactgatcattcattcaccctacggtagccgcatcaaccgcgcctggggcctggccctgcgcaagcgcttctgccgcaccttcaacttcgaactgcaggctgccgccagcgaggacgccatcgtgctgtcactgtcgaccagccacagtttcgagctggacgaagtgtggcgctacctgaacagccgcagcgccgagccgattctcatccaggccctgctcgatgcaccgctgtttggcgtgcgctggcgctggaatgcaggcgtggccatggcactgccgcgctttgtgggcggacgcaaggtggcgccacaaatccagcgcatgaagagtgaggacctggttgccgccgtgttccctgaccagatcgcctgcctggagaacatcgccggcgagcggcagattcccgaccatccgctggtcgagcaaaccctcgacgattgcctgcacgaggcgatggacagcgaaggctggctggccctgctgcggcgtatggaaagcggtgcagtgcgcttgctgtgccgggatctgcccgccccctcgccgctggcatcagcgattctcaacgcccggccttatgcctttctggacgatgcgccactggaagaacgacgtacccaggcggtgctcaaccggcgctggaacgacgtgcacagtagcgacgacctgggcgcgctggacgctgatgccattgctgccgtcgcggccgaggcctggccacagccggccaatcccgacgaaatgcacgaggcattgatgagcctgggtgccatcggtcaggtcgaggtagatgccaacccctgctgggatttgctgctaaggcagctggccaaggctgggcgtgccttgcgcctgcccgatgacaagctctggttggcccgcgaacgcctgaacctgctgctggcactgtaccccacagcgcacagggagccagcgctcgaacggctcgctggcttcgaccagcccatcgagcccgaccacgcactgagcgaactgctgcgcgcccgcctgagcggccatggcccccagaccctggcgcagatcgctgcgccattgggcaaaccggtaaccgatatcgagcaggctctggcccgcctggaagccgaaggctatgtgctgcgcgggcatttcagcccaggtgcaactgacctgcaatggtgcgaacgccacttgctggcacgcatccaccgctacacggtcaaacgcctgcgccgcgagatcgaaccggtcagcctgcaagacttcatgcgctttctgttcgattggcagcacctggcgcctgacgagcgcctgcgtggtccgcaggcggtggccgaagtgctcggccagttacaagggttccccagcgccgcagcggcctgggaggcggaactgctgccggcgcgtatcaaagactacagtccgcactggctcgacgaagcctgccgaagcggccagtttgcctggagccggctggcggcaacagtggcgagcagcacgttgaccagtaccccgctggtgttgctgccgcgggaccagttgaacacgtggcgcagcctggcgcccgcacctgctgtcgacgcccttggcctacgtgcgcaacgtgtgcacgaagcgctgaaaacccagggtgcgctgttcttcgatgaactggcacatgaggcacacctgctgcccagtgaactggaaactgcactgcaggagctggtgggctcgggcctggccagggcggacagtttcactggcttgcgcagcctgatcacgcctgcaaccaagcgcagctcacgtaacagccgccgaggccacccgccgctttccagcagcatggcgcatgccggacgttgggccctgctgcgccgcagcgatgcgcccccggatcacgaccagcgcctggagcacattgcccgcacgctgctgcgccgctatggcgtgatctgctggcggctgttggcgcgcgagagtgatgtactgccgccctggcgtgagctgctgcgctgctatcaccgattggaagcgcgtggcgagatccggggcgggcgcttcattgccgggctggccggtgaacagttcgccttgcctgaggcggtagtattgctgcggcaagtgagacgacgtgaaccggacggaacgctgcaggtggtgagcgccggtgacccgctgaacctgatcggctcgttgctgcctggggcgaaagtgccggcagtgattggcaaccggcttctgtatcgcgacgggataccggtggcggtgcggatggccgggcgttacgcgtatctggtcgaggcgtccgcacaggagcaggaaagctggcggcaaaaactgctgcgcgacaccctggagcgggtttacccgcgaatacgg

SEQ ID NO: 31403 - DNA, 1326 bp, Pseudomonas putida
atgaaccaagcgcctcttaccgtcctgatcgtcgaagacgacccgcatgtgctgctcggctgccagcaggcgctggccctggaggatatcgcctgcgagggcgtaggcagcgccgaacaggcgctggaacgcatcggcgacgattttgccggcattgtcgtcagcgatatccgcctgccgggtattgatggcctggagctgctcaatcgcctcaaggcccgtgaccgcagcctgccggtggtgctgatcactggccatggcgatatcgacatggccgttggcgccatgcgtaacggcgcctacgacttcatggaaaaaccgttctcccccgagcgcctggtcgacgtggtacgccgcgcgctggaacagcgcgggctgtcacgcgaagtggtggccctgcgccgccagctggccgaacagagcagcctggagggacgcatcattggtcgctcaccggccatggagcacttgcgcgaactgatcgccaacgtcgccgacacctcagccaacgtgcttatcgaaggcgagaccggcaccggcaaagagctggtcgcacgctgcctgcacgacttcagccgtcgccagagccacccgttcgtggcgctgaactgtggcggcctgccggaaaacctgtttgaaagcgagatattcggccacgaggccaacgccttcaccggtgccggcaaacgccgcatcggcaagatcgaacatgccaacggcggcacgctgttcctcgatgaagtggagagcatgccgatcaacctgcagatcaagctgctgcgcgtgctgcaggagcgcaccctggaacgattgggctcgaaccagagcatcccggtggattgccgggtgatcgccgcgacaaaggcggaccttgatgccctgggccagagcggccagttccgcagcgacctgtattaccggctgaacgtggtcaccctggagctgccgccgctgcgtgagcgccgtgaagacatcctgcagttgttcgaacatttcctgcagcagtcggccctgcgcttcgatcgggaaacaccgacactggacagccagaccctgtcgcgcctgatggcccacgactggccaggcaacgtgcgcgagttgcgcaacgtggccgaacgctatgccctcggcctgccagcgttcaagaaaggccccagcggtggtgccaaccaaggcctgctttttgccgaggcggtggaagcattcgaacgcaacctgctcactgatgccctgcaacgcacgggtggcaacctgagccaggccagccaggagctgggcatggccaagaccacgctgttcgacaaagtgaaaaaatacggcctcgcc

SEQ ID NO: 31404 - DNA, 915 bp, Pseudomonas putida
atgcgtatcgttcgtcaattgctgggcgcagccatcgcggctgcagtcatcgcttcgccggccatggccgaggagctcaccggcaccctgaagaagatcaaggaatcgggcaccatcacgctggggcaccgcgactcctccattccattttcctacctggccggcaaacccgagcccgtcggttactcgcatgacatccagctggccgtcgtcgacgcgctgaaaaagcaactgggcacggacatcaaggtccgttacaacctggtcacctcgcaaacccgtattccgctggtgcagaacggcaccgtcgacctggagtgtggctccaccaccaacaacgtcgagcgccagcaacaggttggcttctcggtcggcatcttcgaagtcggtacccgcctgttgaccaaggtcaaggacggtcagccggcatacaaagacttcccggacctggccggcaagaacgtggtgaccaccgccggtaccacctccgagcgcatcctcaaggcgatgaacgccgacaagcagatgaagatgaacgtgatttccgccaaggaccacggtgaagccttcaacatgctcgaaagcggccgcgccgtggccttcatgatggacgacgccctgctcgccggtgaaatggccaaggcgcgcaagccagcggactgggtcatcaccggtacccctcagtcgtacgaaatctacggctgcatggtgcgcaaggatgacgctgcgttcaaaaaagcggtcgacgacgccatcgttgcctacttcaagtcgggcgaagtcaacaagagctacgagaagtggttcatgcagccgatcccgcctaaaggtctgaacctcaacttccagatgagcgaagagctgaaaaaactgatcgccgagccgaccgacaaggctgcggacgagaagaagtcc

SEQ ID NO: 31405 - DNA, 939 bp, Pseudomonas putida
atgagtaaaaagcgttaccccagactgtttggcatattgccctttttaggcatgcttttactcagtgggtgcaactggaccctgctcgacccgaagggccaggtcggcattgagcaaaagaacctgatcctgatcgctaccggcctgatgctgctggtggtaatccctgtgatcatcatgaccctggcgttcgcctggaagtaccgtgcttccaacaaggcagccacctacacccctgactggtcgcactcgaccaagatcgaggccgcggtatggatcatcccgatcctgatcatcatcgccctgggttacgtcacctaccactccacccacaagctggacccttatcgtccgctggattcggacgttaagccgattcagatcgacgtggtcgcgctggactggaagtggctgttcatctacccggaacagggcattgccacggtcaacaagatcgtcttcccggctaacactccggtcaacttccgcgtcacttccgacgccgtgatgaactcgttcttcatcccgggcctgggcggccagatctacgccatggccggcatgaccaccaagctgcacctgatcgccaacgaaaatggcgaattcgacggtatcagcgccaactacagcggtgctggcttcaccggcatgaaattcaaggctactgccacctctcaggaagacttcgacaagtgggtcgctgaagtcaagcagtcgccgaagaagctggacaaggccgaatacgacgccttggccaaaccaagcgaaaacaacccggtcgcgctgtatagcgaggcttcgcctgagcagttccagctgatcgtcgacaagtacgaaggcatgaaccgcggtcgtagccacgaagaagcaggcagcaaagatctggccacaaccaagggtgtggaatcgagtatgcaaccagctgccggtgcagaggag

SEQ ID NO: 31406 - DNA, 1497 bp, Pseudomonas putida
atgacagacacccaggataagaactacatcatcgccctggaccagggtaccaccagttcgcgggcgatcattttcgaccgtgacgccaatgttgtaggtacctcccagcgcgagttcgcacagcattacccgcaggcgggctgggtcgagcatgacccgatggagattttcgccacacaaagcgccaccatggtcgaggcccttgcccaggcgggtatcagccacgcccaggtcgctgcgctgggcatcaccaaccaacgcgaaaccacggtggtgtgggacaaggaaaccgggcgtccggtgtacaacgccattgtctggcagtgccgccgcagcaccgagatctgtgctcagctcaagcgtgacggccatgaagactacattcgtgaaaccaccggcctggtcaccgacccgtatttctccggcaccaagctgaaatggatcctcgacaatgtcgacggcgcccgtgaacgcgccgagcgtggcgaactgctgttcggcaccatcgacacctggctgatctggaagcttacgggtgggaaggttcacgtcaccgactacaccaatgcctcgcgcacgctgatgttcaacatccacagcctgcagtgggacgacaagctgctggaaatcctgggcatcccgcggcagatgctgcctgaggtgcgcccatcctcggaagtgtacggccacaccaagagcggcatagccatcgccggtatcgccggcgaccagcaatcggcactgttcggccagatgtgcgtggagccgggccaagccaagaatacctacggcactggctgcttcctgttgatgaacacgggcgaccaggcggtgaagtcgtcccacggcctgctcacgaccattgcctgcggcccgcgtggtgaggtggcctatgcactggaaggcgcggtattcaatggtggctctaccgtgcaatggctgcgtgacgaactgaagatcgtcaacgacgccctggataccgagtatttcgccagcaaggtcaaggacagcaatggcgtgtacctggtgccagcctttaccggcctgggtgccccgtactgggacccgtatgcccgtggtgcgttgttcggcctgacacgtggcgtgaaggtagaccacatcatccgcgccgcactggagtccatcgcctaccagacccgcgatgtcctcgacgccatgcagcaggactgtggccagcgcctgtccgagctgcgcgtggacggtggtgccgtggccaacaacttcctcatgcagttccaggccgacatcctcggcacctgcgtggagcggccgcagatgcgcgaaaccacggcgctgggcgccgcctatctggcaggcctggcctgtggcttctggagtggcctggacgagctgcgcgacaaggcgatcatcgagcgtgagttcagcccgcaactggacgaaacgcagaaagaaaagctgtatgccggctggaagaaggcggtcgagcgtacccgtgactgggaagatcacgaggca

SEQ ID NO: 31407 - DNA, 849 bp, Pseudomonas putida
atgacgactgctctgcgccaacccacactgtccagccaatgcctggccgagtttctcggcaccgccctgctcatcttcttcggtaccggctgcgtcgccgcgctcaaggtggccggcgccagcttcgggctttgggaaatcagtatcatctggggcgtgggcgtcagcatggccatctacctcaccgccggtatttccggtgcgcacctgaacccagccgtgagtatcgccctcacactgttcgcagggttcgacaagcgcaagctgcccttctacatgctggcccaggtatgcggcgcattctgtggcgcagcactggtctacacgctgtacagcaatctgttcttcgatttcgaacaagcccacgccatgctgcgcggtagcgaaggcagcctggagctggcctcggtgttctccacctacccgcacccgtcgctgtccaccagccaggcgtttctggttgaagtggtgatcactgccattctgatggccgtgatcatggccctgaccgacgacaacaacggcctgccgcgcggcgccatggccccgctgctgatcggcctgctgattgcagtgattggcagcgccatgggcccattgactggctttgcgatgaacccggcccgcgatttcgggccaaaactcatgaccttcctggccggttggggcgaaatcgccttcactggcgggcgggatattccctatttcctggttccggtatttgcaccgatccttggcgcctgcttgggtgcagcgagctatcgcggcctgattgcacgcaacctgccaatggcgcccgccgcgacccctgagacaaatgacattcgccagggcgatactcaagccaat

SEQ ID NO: 31408 - DNA, 1047 bp, Pseudomonas putida
atgcgcgtcgccgatttttccttcgaactccctgattccctgatcgcccgccacccgttggccgagcgccatggcagccgtctgctggtgctcgatgggcctaccggcgcgctggcgcaccggcaattccccgacttgctcgactatctgcgccccggcgacttgatggtgttcaacaacacccgagtgatcccggcgcggttgttcggccagaaagcctccggcggcaagctggaggtactggtcgaacgcgtgctcgacagccaccgggtgctggcccatgtgcgcgccagcaaggcgcccaaggtaggcgcggtcatcctcatcgatggcggtggcgaggccgaaatggtcgcgcgccatgacacgctgttcgaacttcgcttcaccgaagaggtgctgccgttgctcgaccgtgtcggccacatgccgctgccgccctatatcgaccgcccggacgagggcgccgaccgtgagcgctaccagactgtgtacgcccagcgcgccggcgcggttgccgcgcctaccgcaggcctgcacttcgacgaggcgctgctggaaaagatcgccgacaagggcgtcgagcgcgccttcgtcaccctgcatgtgggcgccggcaccttccagccggtgcgggtcgacaagatcgaagaccaccacatgcataaagagtggctcgaagtgggccaggatgtggtcgatgccatcgaggcctgccgggcccgtggtggtcgggtgatcgcggttggcaccaccagtgtgcgttcgctggaaagcgccgcgcgtgatggcgtgctcaaggccttcagtggcgacaccgacatcttcatctacccgggccggccgttccatgtggtcgactgcctggtcaccaacttccatctgccggagtccacgctgctgatgctggtctcggctttcgccggctaccccgagaccatggctgcctacgcagcggcggtcgagcacgggtaccgcttcttcagttacggtgatgccatgttcatcacccgcaatccggcgccacgcgggcccgaggatcaagca

SEQ ID NO: 31409 - DNA, 1113 bp, Pseudomonas putida
atgtccttcgaactgctggccaccgacggcaaggcccgtcggggtcgcatcaccttcccacgtggcaccgtggaaaccccggcattcatgccggtggggacctatggcacggtcaagggcatgctgccacgcgacatcgaggccatcggcgccgagatgatcctcggcaacaccttccacctgtggctgcgtccgggcaccgaggtgatcaagaagcacaacggcctgcacgatttcatgcagtggaaaggcccgatcctcaccgactccggtggtttccaggtattcagcctgggtgccatgcgcaagatcaaggaagagggcgtgaccttcgcttcgccggtcgatggttccaaggtgttcatgggcccggaagagtcgatgcaggttcagcgtgacctgggctcggacgtggtaatgatcttcgacgagtgcaccccgtacccggccgagcacgatgtggcacgcacctccatggagctgtcgctgcgctgggcccagcgctcgaagaacgcccatgccgacaacaccgcagcgctgttcggcattgtccagggcggcatgtaccaggacctgcgcatgcgctcgctggaaggcctggaaaacatcggtttcgacggcctggccattggcggcctgtcggtgggcgagcccaagcacgaaatgatcaaggtgctggattatctgccggaccagatgcctgctgacaaacctcgttaccttatgggggtaggcaaaccggaagatctcgttgagggtgtgcgccgcggcgtcgacatgttcgactgcgtgatgccgacgcgtaacgcgcgcaacggtcatctgttcgttgatacaggggtgatcaagatccgcaatgcgttccatcgtcacgatgaatcgccgctggatccgacctgtgactgctatacctgcaccaacttctcgcgcgcctatctccatcatctggacaaatgcggcgaaatgctgagcagcatgctgaataccatccacaacttgcgccattatcagcgcttgatggccggtttacgcgaggctattcaacagggtaaattggccgcctttgtcgacgccttctacgccaagcgcgggcttcctgtaccgcccttggac

SEQ ID NO: 31410 - DNA, 3042 bp, Pseudomonas putida
atggcgttcaccgacacgttcatccaacgcccggtgctggccagcgtggtcagcctgctgattctgctgctcggcttccaggcctggaacaagctgcagatccgccagtacccgcaaatggaaaacgccctgatcacggtcaccaccgcctaccccggggccaacgccgaaaccattcagggctatatcacccagccattgcagcaaagcctggccagcgccgaaggcatcgactacatgacctcggtgagccggcagaatttctcgatcatttccatttacgcgcgcattggcgccgacagcgaccggctgttcaccgagctgctggccaaggccaatgaggtgcgaaacaagctaccccaggactccgaagacccggtactgagcaaggaagctgccgacgcctcggcgctgatgtacgtcagcttctacagcaaggaaatgagcaacccgcagatcaccgactacctgtcacgggttatccagcccaagctggccactctgccgggcatggccgaggcggagatcctcggcaaccaggtgttcgccatgcgcctgtggctggacccggtgaagctggccggtttcggcctttcggctaccgacgtgaccaatgccgtacgccgctacaacttcctttccgccgctggcgaggtgaaaggcgaatacgtggtcaccagcgtcaacgccagcaccgagctgaagtcggccgaggcgttcgccgccctgccgctcaagaccagcggtgacagccgcgtgctgctgggcgatgtggcgcgggtcgagatgggcgcagaaaactacgacacggtcagctcgttcgacggcaccccgtcggtctatatcggcatcaaggccaccccggccgccaacccgctggatgtcatcaaggaagtgcggcgcatcatgcctgagctggaaagccagctgccctcggcactgaacgtatcgattgcctacgacgccacgcggttcatccaggcctcgatcgacgaagtgatcaagaccttgggcgaagcggttctgatcgtcatcgtcgtggtgttcctgttcctcggtgccctgcgctcggtactgattccggtggtgaccataccgctgtcgatgatcggtgtactgttcttcatgcagatgatgggctactcgctcaacctgctgaccctgctcgccatggtgctggccatcggcctggtggtggacgatgccattgtggtggtggagaacattcaccggcacatggaagaaggcaagtcgccgttcgatgcagccctggaaggcgcgcgcgaaattgccatgccagtggtgtccatgaccatcacccttgccgccgtgtatgcaccgatcggcttcctcaccgggctcaccggcgcgctgttcaaggagtttgccctgacgctggccggggcggtgatcatttccggaatcgttgccctgaccctgtcaccgatgatgtgcgccctgctgctgcgccgggagcagaacccgagcggcctggcccaccgcctcgatcagctgttcgaacgcctgaaagggcgctaccagcgtttgctgcacgccaccctcgacagccggccggtggtgctggtgtttgccgtgatcatcctgtgcctgatcccggtgctgctcaaattcacccagaacgaactggcgcccaacgaggaccagggggtgatcttcatgatgagcagctcgcctcaaccggccaacctcgactacctcaacgcctacaccgaccagttcacaccgctgttcaaggccttccccgagtattactcgtcgtttcagatcaacggcttcaacggcgtgcagaccggtatcggtggttttttgctcaagccctggaacgagcgcgaacgcacgcagatggagctactgccgctggtgcaggccaaactcgaggaaatcagcgggctgcagatcttcggcttcaacctgccttcgttacccggcactggcgagggcttgccattccagttcgtgatcaataccgctggcgactacccggcactgctggacgtggcccaacgcatcaagacgcgcgctcaggaatcgggcaagttcgccttcctcgatatcgatcttgccttcgacaaacccgaagtggtggtggacatcgaccgggcaaaggcggcgcagatgggggtgtcgatggacaccctcggcggcaccttggcgaccctgctgggcgaggcggaaatcaaccgtttcacccttgaaggccgcagttacaaggtgatcgcccaggttgaacggccttaccgcgacaaccccggctggctgaacaactactacgtgaagaacgaccagggccagttgctaccgctgtcgaccctgatcaccctcaccgaccgcgctcgcccacgccagctcaaccagttccagcaactgaacgctgcgatcattcagggcgtgcccatggtcagcctgggcgaggcgctcaagaccgtgcaggacatcgctcgcgaagaggccccggaaggctttgccttcgactacgccggcgcggcccgccagtatgtacaggaaggcagcgcattgtgggtcaccttcggcctggcgctggcgatcattttcctcgtactggctgcacagttcgaaagcttccgcgacccgttggtgattctggtgacagtgccgttgtccatctgtggcgcgcttttgccgctgttcctgggtgtgtcgagcatgaacatctacacccaggtcgggctggtgacattgatcgggcttatcagcaagcacggtatcctgatcgtcgagttcgccaatcagctacgcgatgagcgtggcctgagtgtgcgcgaagcgatcgaggaagcagcggccattcgcctgcggccggtgctgatgaccactgcggctatggtgttcggcatggtgccgctgattctggcaagcggggcaggagcggtcagccggtttgacatcggtatggtgattgccaccgggatgtcgattggcacgttgtttaccttgtttgtgttgccgtgcatctacaccctgctggcgcacaaggcgagcgccaaggcacctgcaatcgct

SEQ ID NO: 31411 - DNA, 1044 bp, Pseudomonas putida
atgtccgatcgcctgaccctcctgcgccccgacgactggcacatccatctgcgcgatggtgccgtcctgccccacaccgttggcgacgtggcgcgtaccttcgcccgtgccatcatcatgcccaacctcgtgccgcccgtgcgcaatgtcaccgaggccggcgcctaccgtgagcgcattctggctgcccgcccggccggcagccgcttcgagccgctgatggtgctgtacctcaccgaccgcaccagccccgaggacgtccgcgcggccaaggccagcggtttcgtgtacgccgccaagttgtacccggccggcgccaccaccaactccgattccggcgtgaccagcatcgacaacatcttcccggccatagaggcactggcggaagtgggcatgccgctgctggtgcatggcgaagtgacccgcagcgagatcgacgtgttcgaccgcgagaagcgcttcatcgacgagcacatgcgccgtgtggtcgagcgcttcccgacgctgaaagtggtgttcgaacacatcaccaccagtgatgccgcgcagttcgtcaccgaggccccggccaacgtcggtgcgaccatcaccgcccagcacctgctgtacaaccgcaaccacatgctggtcggcggcattcgcccgcacttctactgcctgccgatcctcaagcgcaacacccaccaggtggccttgctggacgcagccaccagcggcaatccgaagttcttcctcggcaccgactcggcacctcatgcccgtcacgccaaggaagcagcctgcggttgcgcgggttgctacaccgcctatgcggccatcgagatgtacgccgaagcgttcgagcagcgtaacgcgctggacaagctggaaggcttcgccagcctgcacggcccggccttctatggcctgccggcgaacaccgacaccattaccctggtccgcgaagaatggaccgctccggaaagcctgccatttggcgagcaaaccgtagtcccgctgcgcgctggcgaaaaactgcgctggcgcctgctggagaaaaacgcg

SEQ ID NO: 31412 - DNA, 888 bp, Pseudomonas putida
atgttcgactacaaactgctggctgccctcgcggcagtgatcgaacaaggcggtttcgagcgtgcggcgcaggtgctgggcttgtcgcaatcggcgatttcccagcgcatcaagttgcttgaggcgcgggtcggccagccggtgctggtacgtgcctcgccgcccggcgcgaccgaagtcggccgccagctactcaaccatgtgcagcaggtgcgcctgctcgaacgcgacctgcagcgccaggtaccggcgctggacgaagagggcatgccggagcgcctgcgcatcgccctcaacgccgatagcctggccacctggtgggccggcgcggtgggcaacttctgcgcacaacagaacgtgctgaccgacctggtggttgaggaccaggaagtgggcctgaaacgcatgcgtgccggcgaagtggcggcctgcctgtgtgggagtgagcggccggtagccggcgcacgcagtttgccactgggggccatgcgctaccgggcattggccagtcccgtgttcatggcgcggcacttcccccaaggttttgtcgccagccgcctggcccgtactccagcgatcgtgtacggcccggacgatttcctgcagcatcgctacctggcatcgctgggcatagagggtggtttcctgcaccacctgtgtccttcatccgaaggcttcctgcgcatgaccgaggccgggttgggatggggcctggtgcccgaattgcaggcccgggagcaactggccagtgggcaattggtggaaatctgccgcgatacccctatcgatgtgccgctgtactggcatcattggcgcaatggcgggcaattgctcgcgcaactgaccgaccacctgcggcacaccgcacagcattggctggtgcccttg

SEQ ID NO: 31413 - DNA, 990 bp, Pseudomonas putida
atgcgaattctggtcaccggcgcgagtggcttcattggcgggcgttttgcgcgtttcgccctggagcaaggcctggacgtgcgcgtcagcggccgccgtgccgaaggggtcgagcatctggtcaagcgtggcgcacagttcatcccgggtgatctgggtgacgccgagctggcccggcgtttgtgccagggtgtcgaagccgtggtgcattgcgctggcgcggtgggtaactgggggcgctatcaggatttctaccaaggcaacgtggtggtgaccgagaacgtggtcgagggctgcctgaaagagcacgtacggcgcctggtgcatctgtcttcgccgtcgatttacttcaatggcccttcgcgtctggacgtccgtgaagaccaggtaccgcgtcgcttccacgatcactatgggcaaaccaagtacctggccgagcagaaagtgttcggtgcccaggagttcggcctggaagtgctggcgctgcgtccgcgtttcgttaccggcgcgggcgatgccagtatcttcccgcggctgatgcagatgcagcgcaaagggcgtgtggcgatcatcggcaacggcctgaacaaggtcgatttcaccagtgtgcacaaccttaacgaggcgctgctaagtgcattgttcgctgatgaccgggcgctgggccaggcctacaacataagcaacggccagccactgccgctgtgggacgtggtcaactacgtgatgcgccagatgcagcttccccaggtgacccgctaccgttcctatggtcttgcctatagcctggccacgctgaacgaggcggcctgcatgttatggccagggcgcccgcaaccgaccttgtcgcgcctggggatgcaggtgatgagccgtgatttcaccctggatatcagccgtgcccggcagtacctggactaccaacccaaggtcagcctgtggacggcgctggatgaattctgcggctggtggaagcatttgccgcccggc

SEQ ID NO: 31414 - DNA, 300 bp, Pseudomonas putida
atgccactcgatctcgacgaaatcataaaagcactggcccacccggtcaggcgagaaattctcagttggctgaaagacccggcaacccagtttccggaccagtaccacagcaccgaaaacggtgtgtgtgccgggcaaatcgaccaacgctgcggcctgtcgcagtcgaccgtctctgcccacctggccacgttgcagcgcgccgggctgatcagcagccagaagattggccaatggcacttcttcaaacgcgacgaagccaccatacaggcgttcctcgaacaactgcgccaagcactt

SEQ ID NO: 31415 - DNA, 2037 bp, Pseudomonas putida
atgtccgagccacgccagattctcgtcaccagcgccctgccctatgccaatggatcgatccatctcggccatatgctggagtacatccagacggacatgtgggtgcgcttccagaagctgcgcggcaaccagtgcatctatgtctgcgccgatgacgcccacggttcggccatcatgctgcgcgccgaaaaggaaggcatcaccccggaacagctgatcgccaacgtccaggccgagcacagcagcgatttcgccgacttcctggtggacttcgacaatttccactccacccacagcgacgagaaccgcgagctgtcgagcctgatctactcgcgcctgcgtgaagccgggcacatcgccacccgttcggtgacccagtacttcgacccggaaaaaggcatgttcctcgccgaccgcttcatcaagggcacctgcccgaagtgcgcggccgaagaccagtacggcgacaactgcgaaaaatgcggcgccacctacgcacccaccgagctgaagaaccccaagtcggcgatctccggtgccaccccggtactgcgtgattcccagcatttcttcttcaagctgccagacttccaggccatgctgcagcagtggacccgaagcggcaccctgcaggacgcggtagccaacaagctggcggaatggctggactccggcctgcaggagtgggatatctcccgcgacgcgccgtacttcggcttcgagatcccgggcgagcctggcaaatacttctacgtatggctggatgcaccaatcggctacatggccagcttcaagaacctctgcgcacgccgcccggagctggacttcgacgccttctggcacgaaggctccaaggccgagctgtaccacttcatcggcaaggacatcgtcaacttccacgccctgttctggcctgccatgctcgaaggcgccggcttccgcaagccgaccgcggtcaacgtgcacggctacctgacggtcaacggcgccaagatgtccaagtcgcgcggcaccttcatcaaggcccgcacctacctggaccacctgcagccggaatacctgcgttattactatgcggccaagctgggccgtggcgtcgacgacctggacctgaacctggaagacttcgtgcagaaggtcaactccgacctggtcggcaaggtcgtcaacattgccagccgctgcgccggtttcatccacaagggcaacgaaggtgtgatggtaggcggtgatgccgcgcctgagctgaccgaagccttcctggctgccgcaccttccatcgccgaagcctatgaggcccgtgattttggccgcgccatgcgcgaaatcatggcactggccgaccgcgccaacgcctggatcgccgacaaggcaccgtggtcactggccaaacaggaaggcaagcaggatgaagtccaggccatttgcgcccaaggcatcaacctgttccgccagttggtgatcttcctcaaaccggtactgccggtgctggccgctgacgccgaggctttcctcaacgtggccccgctgacctggaacgaccacctgacacgcctggaaaaccaccagcttaatccgttcaaggccctgatgagccgtatcgagccggccaaggtcgaagccatggtcgctgccagcaaggaagacctgctggctgccgaagccaaggccccggcgggcaatggcgagctggccaaggacccgctgtcggcagagatcgagttcgataccttcgctgccgtcgacctgcgtgtggcgctgatcgtcaaggctgaagccgtggcgggtgccgacaagttgctgcaactgaccctggacattggtgacgagcgccgcaacgtgttctccggcatcaagtcagcctacccagacccgtccaagctggaaggccgcctgaccatgatggtagccaacctcaaaccccggaagatgcgctttggcgtgtccgaaggcatggtcatggctgccggccctggcggtgaagaaatctacctgctgagcccggacagcggcgccaagccaggccagcgcatcaag

SEQ ID NO: 31416 - DNA, 786 bp, Pseudomonas putida
atgacagtcaattatgatttttccggaaaagtcgtgctggttaccggcgctggctctggtattggccgtgccactgcgcttgccttcgcgcagtcgggcgcatccgttgcggtcgcagacatctcgactgaccacggtttgaaaaccgtagagttggtcaaagccgaaggaggcgaggcgaccttcttccatgtcgatgtaggctctgaacccagcgtccagtcgatgctggctggtgtcgtggcgcattacggcggcctggacattgcgcacaacaacgccggcattgaggccaatatcgtgccgctggccgagctggactccgacaactggcgtcgtgtcatcgatgtgaacctttcctcggtgttctattgcctgaaaggtgaaatccctctgatgctgaaaaggggcggcggcgccattgtgaataccgcatcggcctccgggctgattggcggctatcgcctttccgggtataccgccacgaagcacggcgtagtggggctgactaaggctgctgctatcgattatgcaaaccagaatatccggattaatgccgtgtgccctggtccagttgactccccattcctggctgacatgccgcaacccatgcgcgatcgacttctctttggcactccaattggacgattggccaccgcagaggagatcgcgcgttcggttctgtggctgtgttctgacgatgcaaaatacgtggtgggccattcgatgtcagtcgacggtggcgtggcagtgactgcggttggtactcgaatggatgatctcttt

SEQ ID NO: 31417 - DNA, 909 bp, Pseudomonas putida
gtggctgcctataccttgcgacaactgaagtacttcgtcaccaccgtggaagcgggcagtgtggccgaagcgtcacgccagctgtacatcgcccagccgtccatctccacggccatcaagagcctggaggaaagtttcggtgtgcagctgttcatccgccaccacgcccagggtgtgtcattgacgcccagcggcaaacgcttctacgccaagaccaagtcgctgctgcagatggcccatgagttcgaacagaacgccctggccgacaacgataccgtcgccgggcaaatcgacattggctgtttcgaaaccgtggcgccactgtacctgccgcgcctgatcgccggttttcgtcagcgctacccgggtgttgacattcgcctgcgcgacggtgagcagcaggacctgatccagggcctgaccgctggaacattcgacctggcatttctctatgaccacgacctggatggcactatcgaggccgagccgctgatgccgccgcagaagccctatgtgctgctacccgagaaccaccgctttgccagccaggcccaggtctcgctgcgcgacctgtgcccggagccgatgatcctgctggacgtggcccctagccgcacgtactttgtcagcttgttcaacgagatgggcctggcaccgaacatcgtcttcagttcaccgtcgatcgagatggtgcgcggcatggtcggtcagggtttcggtttttcgttgctggtaacccgtccgcactcggaatacacctatgacggccaacgcctggcaatgctcgacattgccgagccggtggcgctgtcggggctggctgcggcgtggttgaagcgagtccagctgaccaaaccggcgcagttgttcgtggagttttgtcgggaagagctggcgaagttcctgaag

SEQ ID NO: 31418 - DNA, 2607 bp, Pseudomonas putida
atgggcaaatcgctggtcattgtggaatccccggccaaggccaagaccatcaacaagtacctgggcaaccagtacgtggtgaagtcgagtatcggccatatccgagacctccccaccagcggttcggccagcgcgagcaaagagccggccgccaagcgtggcaaggctgcgggtgaggcgccggcgctttcgccgaaagagaaggcccgccgccagctggtggcacgcatgggcgtcgaccccgaccatggctggaaggccaagtacgagatcctgcctggcaaggaaaaggtgatcgaagagctgcgccgcctggccaaggatgccgacaccatctacctcgcaaccgacttggaccgcgaaggggaagccattgcctggcacctgcgcgaggccatcgggggtgacgacacccgctacaagcgcgtggtgttcaacgaaattaccaagaaggccattcaggaagccttctcgcagccaggcgagctggacatcgaccgggtcaatgcccagcaggcgcggcgtttcctcgaccgcgtggtcggttacatggtttcgccactgctgtgggccaagattgcccgtggtctgtccgctggccgtgtacagtcggtggcggtgaagctggtggttgagcgtgagcgtgagatccgcgccttcatcccggaagagtactgggagatccacgccgacctcggcaccgccaagaacgccaaggtgcgtttcgaggtggcgcgcgagaagggcgaggccttcaagccgctgaacgaagctcaggccatggctgcactggaaaagctcaaggcttccagttacagcgtggtcaagcgcgaagaccgtccgaccagcagcaagccatcggcaccgttcattacgtccaccttgcagcaagcggccagtaaccgcctgggcttcggtgtgaagaaaaccatgatgatggcccagcgcttgtacgaagccggttacatcacctacatgcgtaccgactcgaccaacctgtcggctgacgccctggatatggcacgcagctacatcgaacgggagttcggcaagcagtacctgccggaggcgccactggtttacggcagcaaggagggcgcccaggaggcgcacgaagcgattcggccttctgacgtgaatacccacccgaccaagctcagcggcatggagcgtgacgccgagcgcctgtacgagctgatctggcgccagttcctggcgtgccagatgccgccagcgcagtacctgtccaccagcgttaccgtcgctgccggcgatttcgagctgcgcgccaagggccgcatcctcaagttcgacggttacacccgtgtgctgccgcagcagagcaagccgggcgaagacgacgtgctgccagagatggtgcagggtgaagcactcaagctgatccagatcgacccgagccagcactttaccaagccacctgcacgctttaccgaagccagcctggtcaaggaaatggaaaagcgcggtattggccgcccatcgacctacgcggcgatcatttccaccatccaggaccgtggctatgtgacgctgcacaaccgtcgcttctactccgagaagatgggcgacatcgtcaccgagcgtttgtcggagagcttctccaacctgatggactacggctttaccgccgacatggaagagaacctcgacgacgtcgcccagggcgagcgtgactggaagaacgtgctcgacgagttctacggcgatttcagcaaaaagctgcagactgccgagtccagcgaagacggcatgcgtgccaaccagccgaccatgaccaacattccgtgcaaggaatgtggtcggccgatgatgattcgcaccgcttctacgggtgtgttcctgggttgctctggctacagcctgccgccgaaagagcgctgcaaggctaccgtcaacctggtgccgggcgacgagattgccgctgacgacgagggcgagtcggaatcgcgcgtgttgctgggcaagcaccgttgcccgatctgcgccacggcgatggacgcctacctgctggacgagaaacacaagctgcacatctgcggtaacaacccggattgtgtcggttacgagatcgaagaaggcaactaccgcatcaagggttacgaagggccgagcctggagtgcgacaagtgcggtagcgagatgcaattgaagaccggccgtttcggcaagttcttcggctgcaccaacccggcgtgcaagaacacccgcaagctgctcaagagcggcgaggcggcgccaccgaagatggacaaggtggacatgccggagctcaagtgcgagaaggtcgacgatacctacgtgctgcgcgacggtgcttccgggttgttcctggctgccagccagttccccaagaaccgcgaaacccgtgcgccgctggtgctggagattgtgccgcacaagcatgagatcgacccgaagtaccacttcctgtgcgatgcgccgcagaaagacccggatggccgcccggcggtgatccgctacagccgcaagaccaaggagcagtatgtgcagtccgaggtcgatggcaagccgaccggctggaaggcattctacgacggcaatgcctggaaggttgaagataagcgc

SEQ ID NO: 31419 - DNA, 1173 bp, Pseudomonas putida
atgagcctgaatccaagagacgtggtgattgtcgacttcggtcgcacgccaatgggccgctccaagggtggcatgcaccgcaacacccgcgccgaagacatgtcggcgcacctgatcagcaagctgctggaacgcaacggcaaggtcgacccgaaagaagtcgaggacgtgatctggggctgcgtcaaccagaccctggagcagggctggaacatcgcccgcatggcttcgctgatgaccccgatcccgcacacctctgcggcgcagaccgtcagccgcctgtgcggctcgtccatgagcgcgctgcacacggccgcccaggcgatcatgaccggtaacggtgatgtgttcgtggtcggtggcgtggagcacatgggccacgtcagcatgatgcatggcgtagaccccaacccgcacctgtccttgcatgccgccaaggcttccgggatgatgggcctgactgcagaaatgctcggcaagatgcacggcatcacccgtgagcagcaggacctgttcggcttgcgttcgcaccagctggcccacaaggccacggtcgaaggcaagttcaaggacgagatcatcccgatgcagggctacgacgagaacggcttcctgaaggtgttcgatttcgacgaaaccattcgcccggaaaccaccctcgaaggcctggcatcgctcaagcctgcgttcaacccgaaaggcggtacggtcacggccggtacctcgtcgcagatcaccgacggcgcctcgtgcatgatcgtcatgtccggtcagcgtgccatggacctcggtatccagccattggcggtgatccgttcgatggcagtggccggtgtcgacccggcaatcatgggctacggcccggtgccatcgacccagaaagccctcaagcgtgcgggcttgaccatggccgatatcgacttcatcgagctcaacgaagccttcgctgcgcaggccctgcccgtgctgaaagacttgaaagtgctcgacaagatggatgagaaggttaacctgcacggcggcgccattgctttgggccacccgttcggttgctccggggcgcggatttccggcaccctgctcaacgtcatgaagcaaaatggcggtacgctgggtgttgcgaccatgtgcgtcggcctgggccaaggtatcaccactgtcttcgaacgcgtc

SEQ ID NO: 31420 - DNA, 537 bp, Pseudomonas putida
atgaaagccaaggcagatacccccttcgtggcgctgaacatcgccgtgctcacggtcagcgacacccgtaccttcgacaccgacacctctggccagatgttcgtcgaccgcctgagcgccgccggtcaccgccttgccgagcgtgtgctgctcaaggatgacctgtacaagatccgggcccaggtcgccacatggatcgccgatgacaacgtgcaagtggtgctgattaccggcggtaccgggtttactggtcgcgacagcacccccgaggcggtggcctgcctgctggacaagcaagtagacggctttggtgagctgttccggcagatttccgtggccgacattggcacctccaccgtgcagtcgcgtgccttggccgggctggccaacggcacgctggtgtgctgcctgccaggctccaccaacgctgtgcgtaccggttgggatggcatcctggccgagcagctcgatgcccgtcatcgcccttgcaacttcgtggcgcacctgaagcaggcagcggcctgtgacagccgtggc

SEQ ID NO: 31421 - DNA, 3642 bp, Pseudomonas putida
atgaagattctcgccatccgcctgaagaacctggcatcgctggccggcccgatcgacatcgatttcaccgcagaacccttggccagcgctggcctgttcgccatcaccgggcctaccggtgccggcaagagcaccctgcttgacgccctgtgcctggcgctgttcggcaccgtgccgcgcctcaatgccattggccgtgaggccaaggtgccggatgccgacggcgacatccccacctccgacccgcgcaacctgctgcgccgtggcaccggcagcggttttgccgaggtcgatttcgtcggcatcgacggccgccgctaccgcgcccgctgggaagccaaccgcgcccgcgacaaggccaacggcaaactgcagcacagccgtcaaagcttctacgacctcgacagcgagcaagtgctcggcagtggcaagaacgaatacaagcaactggtcgaagcccgtctgggcctgaacttcgaacagttcacccgtgcggtgatgctggcccagagcgagttcggcgcgttcctcaaggccgacgacaaagaccgtagcgagttgctggaaaagctcaccaacaccgcgatctacacccgcctgggccagcgtgccttcagcaaggcgcgcgaagccggcgaggcgcacaacgccctgaaagaacgcgccagccatctactgccgatggctgccgaggcccgtgccgagctcgaccagcgcctggagcaggcgcaacagcagttcaaggccgaccaggccggcgagcgccagctggagcagcaacgcaactggctgaatgaacaacgccagcttcaggcccaacacaccgaagccagcaccacgctgcaggccgccgaactggactggcaacagctggccgaaccacgcctggacctggcacgcctggagcgcctggccccacagcgtcaccagttccaccgccgacaggccctgagcgcacagctggcgccagtggccgcgaaaattgccgaacagcaacagcagcaagccgaactgcaggtgcgcacccgcgaactcgaacaggcgctggacactgcgcgccaagcgcttgccgaccgccaggccgagcacggcgagaatgcgccgcgcctgcgccaggcctttgccgctcaggatacgctggcacgcctggaccaggagctggccgcccagcgcagcatcagccagcaggcgcaacagcaggttgctgacggccagcagcaactgcagcagctggaagacaaccagcagcgcagcgtgcaacaactggcgctgatcgacaccgcgcttgccgacagccagcacctggcgggcctggccaatgcctggcacgcctacctgccgcaactgaagcaggtgatgctgatcggtggccggctgaccaagggccgagaagagctacccggcctgcaggcccaggccagccaggccaatgcgcgcttgcaggccgagcgcgacgcctacgacctgttgttccgtgaagccaaggccgaaccccaggccctggccgagcagatcgacctgctcggcggcatgttgcaggacaaccgcaaacagcagcgcgccgtagaggaaatgtcacgcctgcacggccgtgaacaggagctgcgccagcagctggatgccctgcgcgaacggcagcagcaggccatgctgcaacgccagcaactgattaccgaaggcaccgccgccaaggccgagctggaggccgccgaacaggcgttgacgctcacccgtcaactgctggaacgccaacgcctggcacgcaacaccagcgtcgaagaactgcgtaaccaactgcgtgacggcgaaccctgcccggtctgtggcagcgccgaacaccccttccatcagccagaagcgctgctgcagagcctgggccgccatgaccaggccgaagagcacgccgcccagaagcaggtcgagacgctcaacagcaagctggtggagctgcgtacccagctgggtgtggtcaatgcccagctcaaggacttccagcaacagcagcagcgactgggcgaacagttgcaaccgctggtggctcaggtacaggcacacagcctgtggccagccctcgccccgcaggacgacaaggcccgtagcgcctggctcgacagccagctgcgtcgcctggatgaagaaatcagccaggacgagaaacgccagagcgccctgctcgccctgcaacgggacgcggcccgcctcaaccagcaattgcaggctgcccacgacgcccaacaacaggcccagcgccacctggagcaacagcaccaagccctggccaacgacgagcagctgttgcagcaaggcctgaacgacctggccggcgtactaccagaggaagcgctcaaggccctcaacgacgacccggccaatgccttcctcgccctcgaccagcagattgcccagcgcctgcagcaactggaacagcgcaaggacgaactggaagagcagcaagcccgccaaacccagctggacaagctgcgtgaccaacagcaggcgcgcgtgcaaggccagcagcagttacagcagaaactggccgccctcgacgagcaacgccagcaagccctggcctcactcgccgaactgctcggcgaacatgccagcgccgaagcctggcagcagcacatggacaccgcgctggagcacgcccgcacccttgacgccgacaccgcccagcgcctgcaagatctgcgcacccaaggcgtgcaactggccagcgagctcaaggccaatacccagcaacaacaggcactggatgccgaatgccaacagttgcaggcccagatcgcccagtggcgcagcgagcatccggaactggacgatgccggcctcgatcgcctgctggccatggatgacgcgcaagtcaatgaattgcgccagcgtttgcaaggcgcggaaaaagccatcgagcagggccgcgtcctgctgcaggagcgcgaacagcgcctgcagcatcacgcggcacagatgaccgtggacaccacggtccaagccctggagcaagccttggccgaactgcgcgaacgcctggcaaaccacgagcagcaatgcgccgaattgcgtgcacaacaggccgacgaccagcgccgccagcaggcccaccaggcgctggcggcagaaatcgaacaggcccaccagcagtggcaacgctgggcccgcctcaatgccctgatcggttcggcctccggtgatgtgttccgcaagatcgcccaaggctacaaccttgacctgctgctgcaccacgccaacgcccagctacgtcagctggcccgtcgctaccgcctcaagcgcggcggcagcgccctgggcctgctggtgctggacaccgagatgggcgacgaactgcgttcggtgcactcgttgtcgggcggggaaaccttcctggtgtcgctggccctggccctgggcctggcgtcgatggcgtccagcaccttgcgtatcgagtcgctgttcatcgacgaaggtttcggcagcctcgaccccgagtcgctgcaactggcaatggacgccctcgacggcttgcaagcccagggtcgcaaagtggcggtgatctcccacgtacaggaaatgcacgagcgcatcccggtgcagatccaggtgcggcgccagggtaatggcctcagtgacgtggaggtgtgcggg

SEQ ID NO: 31422 - DNA, 2655 bp, Pseudomonas putida
atgcgtaccgaacaaccgcaagtgatctacctcaaggattaccaggcgccggagtacctgatcgacgagacgcacctgaccttcgagctgttcgaggaccacacgctggttcacgcgcaactggtcatgcgccgcaacccggcacgcggtgccggcctgccgccactggaactcgatggccagcagctggaactgctgcgcgcctcgctggatgaccaggaattgcagccaggcgagtaccaactcgacgccgacagcctgaccgtgcagcccaaggccgagcgcttcaccctcgacaccagcgtgaagatccacccggaaagcaacaccgccctggaaggcctgtacaagtcgggcaagatgttctgcacccagtgcgaggccgagggcttccgcaagatcacctactacctcgaccgcccggacgtgatgagcaccttcaccaccacggtcatcgccgagcagcatcgctacccggtcttgctgtcgaatggcaacccgatcggcagcgggccggccgaagatggccgccactgggcgacctgggaagacccgttcatgaagccggcctacctgttcgccctggtggccggtgacctgtggtgcgttgaagacagcttcacccgccagtccggccgtgaggtgaccctgcgcatctacgtcgaacccgagaacatcgacaagtgcgaccacgccatggtcagcctgaaaaagtccatgcgctgggacgaagaagtctatggccgcgagtacgacctggacatcttcatgattgttgcggtcaatgacttcaacatgggcgccatggaaaacaagggcctgaacatcttcaactccagctgtgtgctggcccgtgccgaaaccgccaccgatgctgcgcaccagcgcgtcgaaggggtggtcgcccacgagtacttccacaactggtcgggcaaccgcgtcacctgccgtgactggttccagctgtcgctgaaggaaggcttcacggtattccgcgatgccgagttcagtgccgacatgaactcgcgcacggtcaagcgcatcgaagacgtcgcctacctgcgcacccaccagttcgccgaagacgcgggccccatggcccacccggtgcgcccggacagcttcatcgaaatctccaacttctacaccctgaccgtctacgagaagggcgccgaagtggtgcgcatggtccgtaccctgttgggtagcgaaggcttccgtaagggcagcgacctgtactttgaacgtcatgatggccaggcggtaaccaccgacgacttcatcaaggccatggaagacgccaacggcgtcgactttacccagttcaagcgctggtacagccaggcgggcaccccacgcctggaggtcagcgaggcgtatgacgccgccgcgcagacctacagcctgacgttccgccagagctgcccgcagaccccggacaaggccgagaaactgccgttcgtgatcccggtggagctgggcctgctggatgccgacggcaacgacctgccgctgcaactgactggcgaagacgctgctcaaggaaccagccgcgtgctgtcggtaaccgaagccgagcaaaccttcaccttccagggcatccaggccaagccgctgccgtcgctgctgcgtggcttcagcgccccggtgaagctgagcttcccgtatgaccgcgaccagctgatgttcctgatgcagcacgacagcgacggcttcaaccgctgggaagcgggccagcagctgtcggtgcaggtactgcaggaactgatcggccagcatcaacgcggcgaagccctgaagctcgaccagcgcctgatcaccgccctgggcactgtgctgggcaatgtatcgctggacccggccatggtggccgaaatgctctcgctgccaggtgaggcgtaccttaccgagatcagccaggtggccgacgtcgacgccatccacgccgcccgcgagttcgcacgccagcagatcgccgaacacctgttcgacgccctgtgggcgcgttaccaggccaaccgtgaagtgtcgcgcagcactgcctatgtggcctcggccgagcactttgcccgccgcagcctgcagaacatcgccctgtcgtacctgatgcagagtggcaagcaacaggtactggacgcgaccctggagcagttcgagcactgcgacaacatgaccgagcgccttaccgcgctggcggtactggtcaactcgccgttcgaggccgagcgcgccaaagcgctggaggcctttgccgagcacttcaaggacaacccgctggtcatggaccaatggttcagcgtgcaggcggccagcacgctgccgggcgggctggcgcgggtcaaggcgttgatgcagcacccggccttcaccctgaagaacccgaacaaggtgcgtgcgctgatcggcgcctttgccgggcagaacctggtcaacttccatgctgccgatggctccgggtatcgcttcctggcggacctggtgatcgagctgaatgcgctgaatccgcagattgcctcgcggcaactggcgccgctgacacgctggcgcaagtatgacgatgcgcgtcaggcgctgatgaagggtgagctggagcgcattctggcttcgggtgagttgtccagtgatgtgtatgaggttgtgagcaagagtctggcg

SEQ ID NO: 31423 - DNA, 924 bp, Pseudomonas putida
atgacctccaagctggaacaactcaagcagttcaccaccgtggtcgccgacaccggggacctggacgccatcacccgcctgaagccggtcgatgccaccaccaacccgtcgctgctgctcaaggctgctgccatcccgggctacgccgacctgcttaaacaggtgaaggccgacgccaagggtaatgtcgacctggcctgcgacaagtttgcagtggcggtaggctcgggcattctcaaggtcatcccggggcgtatctccaccgaggtggatgcacgcctgtcgttcgatgagccagccctgctgaacaaggctcgtcagctgatcgccctgtacgaggcggccggagtggcaaaagagcgtgtactgatcaagctggcctccacctgggaaggcattcgcgccgccgagcagctggagaaggaaggtatccagaccaacctgaccctgctgttctccttcgcccaggcccaggcttgtgccgatgccggggtgtttttgatttcgccgttcgtgggccgtatctacgactggtacaagaagagcaccggccaggaatacgtgggcgccgaggacccaggcgtgcagtcggtcacccgcatctacaactactacaaggccaatggttacaacaccgtggtcatgggcgccagcttccgcaatatcggccagatcgaacaactggccggctgtgaccgcctgaccatcagccccgaactgctgcagcagttgagtgatgaccagggtgaattgccgcaggtgctgaaaccgggcaacgccggtgaagccaagcagcacctgaacgaaagccagttccgctgggcgatgaacgaagacgccatgggcaccgagaaactggccgaaggtatccgtcagtttgcacgggaccaggaaaagcttgagaagttgatagctgaaaaggcc

SEQ ID NO: 31424 - DNA, 738 bp, Pseudomonas putida
atgagcctgcaaggtaaagttgcactggttaccggcgccagccgtggcattggccaggccatcgccctcgagctgggccgccagggcgcgaccgtgatcggtaccgccacgtcggcgtccggtgccgagcgcatcgctgccaccctgaaagaacacggcattaccggcactggcatggagctgaacgtgaccagcgccgaatcggttgaagccgtactggccgccattggcgagcagttcggcgcgccggccatcttggtcaacaatgccggtatcacccgcgacaacctcatgctgcgcatgaaagacgacgagtggtttgatgtcatcgacaccaacctgaacagcctctaccgtctgtccaagggcgtgctgcgtggcatgaccaaggcgcgttggggtcgtatcatcagcatcggctcggtcgttggtgccatgggtaacgcaggtcaggccaactacgcggctgccaaggccggtctggaaggtttcagccgcgccctggcgcgtgaagtgggttcgcgtggtatcaccgtcaactcggtgaccccaggcttcatcgataccgacatgacccgcgagctgccagaagctcagcgcgaagccctgcagacccagattccgctgggccgcctgggccaggctgacgaaattgccaaggtggtttcgttcctggcatccgacggcgccgcctacgtgaccggcgctaccgtgccggtcaacggcgggatgtacatg

SEQ ID NO: 31425 - DNA, 372 bp, Pseudomonas putida
atggagaatgacgccaacggcgccagcgcttcgggcaagcgcctgggcgcggccatgctggggctgctgcacagtcacatcgagctgttcggtatcgagttgcaggagcagaagggccgtaccttgagcctgctgctgttcgccggcctggcgctggtgttcgccctgctgctgctgaccgcgctgtccgggctgctgctggtgctgctgtgggacagctatcgactggccggtatcattggtctgtgcgtgttctatggcattgctgcactgtactgcggcgtgcgcctgaaggcggcggtgttcgacgaatcatcgcccttcggcgccaccctcgacgaacttgccaaggacagggagcgcctgttgcca

SEQ ID NO: 31426 - DNA, 576 bp, Pseudomonas putida
atgcttcctttgttactggcttccagctctgcctatcgccgcgaactgctcgcacgcctgcacctgcccttcacctgggcaagccccgatatagacgagcaacgcctggatggcgaaccgcccgtagagctggtgcgccggctggccaggcaaaaggccgaggcattggcaggcagccacccccgacacttgatcataggctcggaccaggttgcggtattgggcgagcaggtgctgggcaagccgcatacgttcgagcgcgcttgcgagcaactactggagtgcagcgggcagcaggtgagctttcttaccgggctggcactgctgaacagcgccaccgggcaatgccaggtggattgcgtgccttttaccgtgacactgcgtgaactgagcagggagcaggtcgagcgttacgtggcagcagaacagccgctggattgcgcagggagtttcaaggcggaggggctgggggtgagcttgttccagagcacgcacgggtgcgacgcgaccagcctgatcgggctgccgctgattcggctggtggatatgctgaccaaggaaggggtgatggttccg

SEQ ID NO: 31427 - DNA, 3627 bp, Pseudomonas putida
atggcccgagttatcaatcgcctgctgctcgtcctgctgctcagcggcgcgacacaggctggccatcgcgaagccgcgtcctttacgctactggcgcgctcatcggcccgccccgtccagcccgtgctcacgcccgaacaacggcaatggcgcgaaggccggcaggaactggtgctgggcacgtcggcacccgactatccaccgttcgacatcaccggtggcggcaacgactaccagggcctgaccgccgagtatgcaaacctgatcggcaaggccttgcagttgccagtgagggtgctgcgtttctccagccggcaggcggcggtggaggcgctcaggcacggtgatatcgacctgctgggcagcgccaatggctacgaagcggccagtgacggcctggcactgtcgcgcccctatgccgtcgaccaacctgtactggtaacgcgtgaagacgaaaaccgggcactggacacggaccttgccggcatgcgcctgggcatgctctaccactatttgcccagacaggaagtactcaccgcctaccccaaggccgagctgctggccttcggttcttccagccaggcactgaatgctgtcgcgttcgggcaggccgacgtgttcatcggcgataccatctccacacactaccagctcaaccgtggtcatctgccccgcctgcgcatggccaacttcggcaaacacgaggccatcggcttcggttttgccttgcgtcagcaagataccgtgctgctggacctggtgaacaccatcctggacaggcaaagcccggccattcgctccagtatcttcaaacgctggagcgccggcagcgacctgttgctgagcgatcgccaactgcaattgagcgcggccgagcagcagtggctggagaagcaccccgtgatgcgcgtggcagccgatgacgcggctgcaccactgtcctacttcgatgattcgggacatttccgaggcatcaccgccgacctgctggaactcattcgcctgcgcaccgggttgcgtttcgaagtgcagcgcgccagtggcattgccgacatggtcgctcgcctcaaggatggccgggccgatgtcatcgccgcactggccagcgccggcaaagcaggggacgacctgcaaatcagccgcccctacctcgaaagcgcctatgtgctggtcaaccacaaggacaacaacgcattgagttcactggagcagttgcaggggcatcgcatcgccattacccgctacagcaccatgaacgccatgctgtcccgggactacccaaagataagctgggtcgaaaccgaaagcgcgttctactccatggcgttgctcaacagcggggctgtcgatgcggtgatcaccaccctgatcgacgccaatcacgccctggccagcaacccagaactggtcatccgcacctcggtcggcagcgaacccgccaacttcgccatggccaccattgccccgtcaccggcgctgttgtcgatcctcgacaaagctttgctgagcatctcaccggaagagctgggggtaatcaacaaccgctggcgtggctttggcaggcatgaggatgacaactccaaaggctacagccgcctggccctgcaggtggtgctggccacggccgtgcttttgttgctggccctgctctggaatgcccgcctgcgcctgcagattcgccagcgccagcgcgccgaacgcgcgctgaacgaccagttggcattcatgcgcgccctgctcaacggtacgccccaccccatgtatgtgcgcgaccgcgagggttgcctgaaaagttgcaactacagctaccttgaagccgtgcaggcccgctccgatcaggtgatcggcaaaaaactcaaggacagcctgtttgccgattccgagcaggctcggcagatccaggcggattaccagaaagtcatggcggcgggctcaccactgatcaaggaccgtccattacggatcaagggccgggacctgaccatctaccactggatcctgccgtaccgcgactccctgggtgaggtgcaggggatcatcggcggctggatcgacatcagcgaacgccgccaactggtcctggagctgcgccaggccaagcagcaggccgacgatgccaaccgcgccaagagcacgttcctggcgaccatcagccacgaaatccgcaccccgatgaatgccgtgatcggcatgctggaactggcggtcaagcgcgccgaccagggccgggtggaccgcagcgcgctggaactggcacaccattcggccaaagacctgctaggcctgatcggtgacattctcgacatcgtgcgcatcgagtccgggcacttgtccctggccccggaggtggtcgacctggcggcgctggtcgaatcggtggcgcgcattttcgatggtcaggcgcggcagaaaggcctggccctggaggtgcagatcgccccggccgcacgctgccatgtcctgcttgacccgctgcgcttcaagcaggtgctgtccaacctggtgagcaatgccatcaagttcaccgagcacggtcaggtgcgcatcagcgtcaggctgctggatgacggaaccagcacaccagccgtactggagctggaggtgcgcgacagtggcatcggcatccaccccgacgacctgcagcgcctgttcaacccgttcatccaggccaacccgcacagccagggcgcccgcgccggtaccgggctgggcctggccatctgccgcaacctgtgcgaaatgatgggcggcagcctgtccatgaagagcctggaggatgtcggtacccaggtgcgcctgaagatgccgctgcaacgggtggatggcgcagagcagcccaaaccgctgcccgagcagctcgacgtgcccgacccacggctgaacgtgctggtcatcgatgatcaccctgccaacctgcaactgatggcgcaacaacttggctacctgggcctggagcacgccagcgcccgcgatgggcaggaaggcctggcgacctggcgggaaggcgacttcgatgtgctggtactcgactgcaacatgccgcacatgaacggttaccagctggcgactgccgtgcgcgccgaagaacgccatggcaagcgaccaccctgcaccatcctcggctataccgccaacgcacagccggaagtacgccgcaagtgcctgaccgccggcatggacgactgtctgctcaagcccatcagcctgagcaccctcagccagcgcctggctggcattcgcccgcgccgccagcaacgcccccgacgcaagctgtaccagctggacggcctggccgccgtggtcgggcctgacccggttgaccgtcagcgcttcctggaaaccttgcaccagagccttcaggccgacctggccagcctgatggcgcttcacccgcaacacgacagcggcgccattgccgagcaggcccacaaggtgctcagcgccgcgcgcatgctggaagcccctgacctgatggcggcctgtgaagccctcgaggccagcgacttgcccactgcccaggtgcgcctgcggcgccaggcactggcacggcatatgtgccgagtggaacgtgccctggccaaggaattggccacaagcacggatactcaggcaggcaaccacacgtgt

SEQ ID NO: 31428 - DNA, 1452 bp, Pseudomonas putida
atgatcaaaacgcttcgtcccctcatacttgccggcctgctgttgccacttgccttgcccagccacgccgccgtcaataccaccctgcctgccaaagtgcagcaggcgctcaaggccaacaagctgcaggacacagcactgtcgctggtgatgctgccgctggacggccccggcaccccgaccgtgttcaatgccgatgtgtcggtgaacccggcgtcgaccatgaaactggtcaccacctacgccgccctcgaactgcttggcccgaccttccagtggaaaaccgagttctacaccgacggcaccctgagcaacggcgtgcttaacggtaacctctaccttaaaggtggcggtgaccccaaactgaacatggaaaagctgtggctgctgatgcgtgacctgcgcgccaatggcgtgcgcaccgtcaccggtgacctggtgctggaccgcagccacttcgtgcaacccaacctgccgcagttcaacgacgacggcggtgatgaaaacaagccgttcctggtcaagcccgactcgctgctggtcaacctcaaggccctgcgcttcgtggcgcgcaatgatggtggcaaggtcaccgtcgccgtcgagccaccgattgcccgcatccgcatcgacaaccaggtcaagccggtagcctctaagaaatgcaccggtgatgtgcgctacaacccggtgccccaggccgacggcatcagtgtaacggtcagcggccaactaggtgacggctgcaactcgcaaacctacctgtcactgctcgaccattccacctacgccgccggtgccgtgcgcgcaatctggaacgaactgggtggcaacatccagggtggcgaccgcatcgagaatgtgcccaagagtgctcgcctgctggcccgcgccttctcgccagacctggtggaagtgatccgcgacatcaacaagtacagcaacaacaccatggcccagcagctgttcctgagccttggcgcgcagttccgcaccgatgccgatggcgacgacgcccgtgctgcccagcgcgtggtacgccaatggctggcgaaaaagggcatcaccgcgccgcatctggtgatggaaaacggctctggcctgtcgcgtgccgaacgggtcagtacccgggaaatggccgagatgctgaaagccgcctggaagagcccttatgctgccgaattcatgagctcgatgccgctggtgggcatggacggcacgatgcgcaagcgtctcaagcgcaccgcgatggccggcgaagggcacatcaagaccggcacactgaacactgtgcgggcgattgccggcttcagccgcgacagtaacggccatacctgggcggtagcggcgattctcaacgacccgaaaccgtggggtgcctcgcaggtgctggatcaggtgttgcttgacctgtatcgccagccgaagctggctggcagtacagcggccaac

SEQ ID NO: 31429 - DNA, 1017 bp, Pseudomonas putida
atgacagtgcagtggcaggagcaggtatcgctcaagccttacaataccttcggcatcgacgtgaaggcgcgctatttcagccaggtgcaggacgaccagcaggtgcgtcaggcactgggccaggcacagcagaggggcttgccggtactggtgatcgggggtggcagcaacctgctgctgacccgcgatatcgatgcactggtgctgcacatggccagccgcggtcggcgtgtgctcagtgacgatggcgagcgtatcgtggtcgaagccgaggccggtgagccgtggcacgcttttgtgcagtggacgctggcgcagggctattgcgggctggagaacctcagcctgatccccggcaccgtcggtgctgcgccgatgcagaacgtgggcgcatacggggtggagatcaaggacgtgttcgccgggctgacagccctggaccgtgagacgggcgagctgcgtgacttcagtttggcggaatgtgctttcggctatcgtgacagccttttcaagcgcaaccctggccgctggttgatcctgcgtgtgcgctttgccctgacccgcaccctgcacgctcatctggattacggcccggtgcgccaacgcctgtctgagcggggtgtgaccgagctgaccgcgcaagcgatcagtgatgcaatctgcagcattcgccgcgagaagctgccagatccggcagagttgggcaatgccgggagcttcttcaagaacccggtggtaacggctgatctggtcgagcgtattcgtgcgcagtatcccggtgtcgtggcatacccacaggctgatggtcaggtgaaactggcggcgggctggttgattgagcaggcgggctggaagggtcatcgtgagggtgatgctggcgtgcatcgcttgcagtcgctggtgctggtcaactatggccaggcgagcggggcgcagatgcatgcgctggcgcgcaagattcaggcggatatcttcgagcggtttggggttgagctggagatggagcctaatctttac

SEQ ID NO: 31430 - DNA, 1668 bp, Pseudomonas putida
atgagcctgcaactgagctttgcccaagccagcgccaccgggccgcgcgcggaaaaccaggacgccctgcgcctggtcacgccggcaccagaactggccgccagcaaaggctacctgttcgccctggccgacggcgtcagccaatgtaccgacggcggcctggcggcgcgcgccagcctgcaggcactggccctggattactacgccacgccggccacctggagcgtggcccaggccctcgaccgcctgctgctggcgcaaaaccgctggttgcgcgcccagggcagcggccagccgttgctgaccacacttagcgcgctggtgttgcgcggccggcgctttaccttggcccatgtaggcgactgccgggtgtaccgctggcacgaggggaacctgcaatgcctgagcgaagaccatgtctgggaccaaccgggcatgcagcatgtactgaaacgggcgctgggcctggaccagcacctgctggtggattacctggaaggcgagctgcaaccgggcgaatgttttctgctgctcagcgacggggtctgggccagcctgggcgaacagcacatccaggccgtgctgcgcgagcaaactgacctgcaactggccgccgacaccctggtggccagtgcccacctcagcggcagcaaggacaacgccagcgccttactggtgcaagtcgaacaactgggcacggccaacctgggcgataccctggcgcaactgcaacaatggccagtgcccggcccgctgcgcgaaggccaggtgatcgacggctggcaggtcgaaacactgcatgcgcacagccgccagtccttgctgtacaaagtgcgcgatagccagaaccagccttggctgctcaagaccctgcccactgcacgcgaacaggaaccgggggcggcgcaagggctgttgctggaagagtggtttctgcgccgcatcgccggccggcacttccccgagctacacgccgccagtcagcgccagcacctgtactacgtgatgcgcgaatatcccggccagaacctggcggcgttgctagccgaacagggcccgctgcccctgccgcaatggctggaagtcgcacggcaactgctgcaggcagtcggtgtgctgcatcggcgcaacttgctgcaccgcgatatcaagccagacaacctgcacctgggccgtgatggccagctgcgcctgctggacttcggcctggcttattgcccgggcctgtccgaagacccgctgcacgagctgcccggcacgccctcgtatatcgccccggaagcattcgatggccacccgcccagcccgcgtcaggacttgtatgcagtgggcgtgaccctgtaccacctgctgaccggacactacccgtacggcgaggtagaggccttccagcgcccgcgcttcggccagccggtcaacgccgcgcgctaccgacccgacctgccggaatggctgcagcacaacctgctgcaggccgtggcgagcgacccggcgcagcgcttcgaaaccgccgaacactggttgctgctgctcgagcgcggcgaccgccaggaactgcccagccgcccccggccgctgctggaacgcgagccgctgaaggtatggcgcaccctggccctgttgtcgttgctgatcaatctgatactgctgttcaccctgctcaagggc

SEQ ID NO: 31431 - DNA, 1347 bp, Pseudomonas putida
atgcgccgggtttccctcggcagccgcctggccctgctgttcgccgcctgcaccgccaccgtctcgctgggcgccggtctgctgttcagccgggccagcgagcagcacttcgtcgaactcgaccaacaactgctggactcgcgcctgtcattgtttcggacgcaactggctggcgtcagcacggctgatgagctccaggcccgcctgccggccctgcgcgatgaactgagtcaccaggccgacctggccctgcgcatcagcgccagcaatggcgccacctggttcgaaagccgcagcgggctgcctcatgcagcgcaggccaccgggctggccaccctgcatgcgccaggcatcgactaccgcagcctgtccgtgcccctgacacagggcgccatgcagtcgccgcgactgaccctgtacctcgacatcacccaccaccagcacttcctgcagggcatgcaacgactgatctggctgacggtcggcctgtcggcgctaatcaccgcactattgggtgcctgggccgcccgcagcggcctgcgcccattgcggcagatgggccaggtggccgccagcgtgtcagcgcgctccctcaccacccgtctgccggtggcgcagatgcccgaagagttggccgagctggccagcagcatgaacgcgatgctgcagcgcctggacgatgccttccagcgcctgtcagcgttttcggccgatatcgcccacgagttacgtacgccgctgtccaacctgctgacgcacacccaggtcaccctcacccgcccacgcagcctcgaagaataccgagaggcactgcatggcaacctggaagaactgcaatggatggcgcagatgatcaacgacatgctgtttctggccaaggccgaccacggcctgctggtaccgggggacgcgcctttggcgctgcatgacgaggtggatgcgctgctggagtactacgcgcctctggcagaagacagcgacgtgcagatgctgcgcgagggtgaagcggtgctgcacggcgaccagcatatgctgcgccgggcgctgtccaacctgctggacaacgccatgcgttttaccccggcaggaggacagatcaaggtaaccctggggccggggccgacgatcaacgtggccaataccgggctggctatcgacccggccgcactaccgcggcttttcgaccgcttctaccgggtggacccggctcgacgggaaggcagcagcgagcatgcggggctgggcctggcgattacccggtcgatcgtgcaggcccatggcggatgcatacgggcggagtgcgagggtgggtggacccgattcgtgatcgagttcactcaagaccgg

SEQ ID NO: 31432 - DNA, 714 bp, Pseudomonas putida
gtgaccctgatctacggccatcgcggcgccaagggcgaagcacccgagaacaccctgaagagctttcagcaatgcctgtcccatggcgtgacccgctgcgagctggacctgcacttgtcatccgacaacgaactgatggtcatccacgaccccaccctcaagcgcaccacgggccggcgcggcaaagtggtcgagcacccggccgccgaactggtcaagatcgatgcccgcaaaggcggcccgggccacgtgcagccctgcccgatcccgaaactggaagagctgttcgaaaaatgcccgttcgaacactggcaactggaggtgaaaagcgcctctcgcacccgcgcggccaccaccgtcctggcgatccgtgaactggctcagcaatatggcctgctggacaaggtgaccatcacctccagttcacgcgaagtactgggcgccgccctggaactggtgccagacgtgaagcgcgggctggtggccgaatacgcctggctcgacccgctgaaggtggcacaaaactatggctgcgaactgctggcattgaactggacgctgtgcacccccgagcgcctgctcaaagcacagggccagggtttgcatgtgtcggtgtggacggtcaacgagccggcactgatgcgccggctggctgactttggtgtggacagcctgattacagactttcccggtttggccaagaccaccctcggg

SEQ ID NO: 31433 - DNA, 1392 bp, Pseudomonas putida
atggctgtctacaactacgacgtagtggtgctgggttccggcccggccggtgaaggcgcggcaatgaacgccgccaaagcagggcgcaaggtagcgatggtcgatgaccgtcgccaggtcggtggcaactgcacccacttgggtaccattccgtccaaggcactgcgtcactcggtgcggcagatcatgcagttcaataccaacccgatgtttcgtgccatcggcgagccgcgctggttctcgttcccggacgtgctgaaaagcgccgagaaggtcatcgccaagcaggtcgcatcgcgcaccggctactatgcccgtaaccgcgtcgacgtgttcgtcggcaccggcagctttgccgacgagcaaaccgtggaagtggtgtgcccgaatggcgtggtcgagaagctcaacgccaagcacatcatcatcgcgaccggctcgcgcccctaccgcccggccgacatcgacttccaccacccgcgcgtatacgacagcgacaccatcctcagcctcagccataccccgcgcaagctgatcgtgtacggtgccggcgtgatcggttgcgaatacgcttcgatcttcagtggcctgggcgtattggtcgagctggtcgacaaccgtggccagctgctgagcttcctcgattcggaaatttcccaggcgctgagctaccacttcagcaacaacaacatcaccgtgcgccacaacgaagagtacgagcgcgtcgaaggcctggacaacggggtgatcctgcacctcaagtcgggcaagaagatcaaggccgacgccttgctgtggtgcaacggccgtaccggcaacactgacaagctgggcctggaaaacatcggcatcaaggtgaacagccgtggccagatcgaggtcgacgaggcctaccgtaccaccgtgccgaacatctacggtgccggcgacgtgatcggctggccaagcctggccagtgctgcccatgaccagggccggtcggccgctggcagcattgtcgataacggcagctggcgcttcgtcaacgacgtgccgacgggtatctacaccattcccgagatcagctcgatcggcaagaacgagcaggagctgacccaggccaaggtgccgtacgaagtgggcaaggccttcttcaagagcatggcgcgtgcgcagatcgccggcgagccgcagggcatgctgaagatcctgttccaccgcgaaaccctggaaatcctcggcgtgcattgcttcggctaccaggcttcggaaatcgtccacattggccaggcgatcatgaaccagccaggtgagcagaacaacctgaagtacttcgtcaacaccacgttcaactacccgaccatggccgaagcctatcgggtagctgcctatgacggcctgaaccggcttttt

SEQ ID NO: 31434 - DNA, 396 bp, Pseudomonas putida
gtgcaggagattccgcaagtcagcagcgacactggcaatcaactcaacatcgccttgcgcacacgcatcaaactgttctatcggccgcccacactcaagggtacgccgaccgatcacctgaactcgctgacgttttccttgagcgtacgtaacggggtggagcagttggtggtcaagaacccatcgcctttccacatcaccttcaaccgcctggaggtgaagggccaaggccagcaacacaccttgaaaaacaccgccatgctggaaccctttggcgaaaaaacctacccgctgaccggcatcactcgcgcctccagcctgcaggcccgtttttccatcgtcaatgactacggtggcttcaccgaaccgctgagcgcgcctattcaactggccaac

SEQ ID NO: 31435 - DNA, 2157 bp, Pseudomonas putida
atgcgcctggacgcactggccaatccagaggatcaggcgagtgcctgcctggacttgctgactgtcgttcctggtgcacaaatcgtcttcacccctacggagctgcacctggccatctcgattccgcagatctccatgcgccggaacaccgctaaccaggtcgacccttcccgctgggacagtggtatcaatgccgctttcatcaactatcaggcctccaccctgaacggccgcaaccgctcctctggccgttacaccagcaacgacctgtacctgaacagtggtatcaacctgggcgaatggcgcctgcgcagtacccagtcctggcgccagggcagccagggcaagactgaatggacccgggcacagacctacgcacagcgcgatataccgggtaccctcgccaatctgacgattggcgaaaccttcacggacagggaggtgttccgttcggtgccgatatcaggcgtgcgcgtggcctcggacatgggcatgctggccgacaaccagcgcggttatgccccgatcattcgcggcgtggcccagagccgggcgaaagtcgagatctggcagcatggttatccgatctactcgacgtacgtcagcgccggcccctacgccatcgacgacctgagtaccgcaggcagcggcgagctggaagtcgtcgtgaccgaggccgatggccaggtccgccgcttcatccagccgtactcgaccatgagcaatctgctgcgcccaggcgtatggcgttacagtgccacggtcgggcgctacaacccctccagcgacctcgagaccccgctgctctggcaaggcacgctggccgtaggctcctactgggacaccacggtttacggcggcttgatggccagcgaattctaccgcgcgggcaacctggggtttagcaaggacctgggccacttgggcgcagtggccttcgatgtaacgcaggcgtccagcgcaatcgacaatgcccatgagcgcgaggtgcagggttccagttacgccctgaagtatgccaaggccttcaccactcaaaccaacctgcgctttgccggatatcgctattcgacccaaggctaccgtgacttcgatgaagtggtgcgccagcgcagccaggacactacgttcagcggcagtcgccgcagccgcctggaggcctcggtccaccagagcctgggcaggaccagctcgctgaccctgacgctgtcgcaacaggactactggcgcagcaatgccacccaacggcaataccagttcaacttcaatacccagcatcggggtgtaggctacaacctgttcgcctcacaatcgttgaccgaccgttacggcaatgatcgtcagtttggcctgagcgtgacggtacccttgcatttcggtcaccgcgccaatgcgaccttcgacctgcagcacaacgccaacggctacagccagcgtgccacgctcagcggcagcgacagcgcgcgcgcgctgagctacagcaccagcctgagccgtgacgaacacgcccgcaagacagcggcactgtcgctcggccatcaggccccctatgccagcgtgagtgctggctataccgaagccgacaactaccgcagcctgtcattgaatgccagtggtgcggtgctgctgcatgctgacgggctggagttcggccgatacctgggagataccgcggccttgatcgaagtccctggcgtggccaatgtgggcctgcaaaacgcaacgggtacgcgcaccaattcacgcggttatgcacttttgccctacctgcaaccgtaccggaccaattcggtggtcctggaaaccgaccgtctcgatcctgatgtggaaatcgacaacggcatcgcccaggtagtgcctcgccagggtgcagtggtcaagcaccgcttcgaggcacgccgcgtttcacgccttgtactgaccctgcacgatacccagggtcaaccgctgccctttggggcccaggtgctggccgagaacggtacccaactgggcatggtcgggcaggcgggcctggtaatgctcaccaaccccagccaggagcaaccgctgcaggtgagttggggcgaacagcccaacgccggctgccaggtgcatctcgatgaactggacgctcccgtcgtcgacggctatcgccagcaaaccctgacctgtatc

SEQ ID NO: 31436 - DNA, 816 bp, Pseudomonas putida
atgaaacgaaccgcgttcttcatctccgacggcaccggtatcactgccgaaaccctgggccagagtttgctcgcgcaattcgagagcattcccttcaacaaattcacccgcccttacatcgactcgccggacaaagcgcgggtcatggtccagcaaatcaacgctgcggccgagcgggatggggtccgcccgatcatcttcgacaccattgtcaaccaggacatccgcgagatcctggcgacgtcgaatggcttcatgatcgacatcttttcttcgtttttatccccacttgagcaggaattgattgcccattcgtcgtattccgtgggcaaatcccactcgattggtggcaattccaactacatggaacgcatcgaggcggtgaatttcgccctggataacgacgatggtgcacgcacccactactacgacaaagccgacctgattctggttggcgtgtcgcgttgcggcaaaaccccaacctgcctgtacatggccatgcagttcggcatccgtgccgccaattacccgctgaccgaggatgacatggagcgcctgcagctgccggcggtgctgaaaaagcaccacagcaagctgttcggcctgaccatcgaccccgaccgcctcaccgccatccgccacgaacgcaagcccaacagccgttattccagctttgcccagtgcgaattcgaagtgcgtgaagtggaaagcctgttccgcagggagaacattcccaatatcaattccacgcatttttcggtggaagagatttccgccaagatcctggtcgaaaaaggcgtggagagacggttcaag

SEQ ID NO: 31437 - DNA, 2136 bp, Pseudomonas putida
gtgctggcgggcccgttgtttttcgccagtgcctgctgggcagaaaccctcgtagatgccgatactcagctggatgccggcagcacactcgacagctaccgggtgatcggcccggccgttctgacagccaccggggcgacgacgttgcagatcgccgcccaggcgggcgccaccgtgaacctgtcggatagccaggtcaccgctgaatcgaatggcaatggcctggcgctcaatggtgccagtgccaccgtacaccgctcgaccatccgcagtgacgcccgtggcctggcgctgagtgctgcaggggcgggaaacggctcgcgcgccttgatcaacgacagcgtgatcgaaggcggcgtacaaggcgcgaccctcaatgccagttctgccgaactgcagcgcagcgaactacgcgggacgggcgccagcagcgagggcgcacgcctggttgccggcaccctgattgccagggacggcagcaccatcagcggcggcaattatggcgcgcgcattcttgaggacgacggccgcggctctacgctggtggtcgacaacagcctgatcgagggacgcaacgggccagcgattgccgtcggccgaggggccggctttgcagcatcggcgcagatcgacgttatcaacggtgccagcctcagtggtggcaacggcatgctgctgcacgtggcggaggatgctgccgccaacctgcgggtcaacaacagccacctggtcggcgatatcgtcgccgccagcggcggcaccgccaacgtgctgctggaaaacttcgccaccctcaaaggccggctggacaacgttgcaagcctggaaatcaacagcggtggcgaatggaccctggtcgacaacagccaggtgaccgacctgtcactggataacggtgccgtgcgcttcggcgggccgggcgaattctttaccctttccgtggaaaacctcaccggcaacggcaccttcatcatggaggccgatttcagcacctcgcagtcggacttcctcgacgtgacgggcaccgccagcggcaaccaccagttgctgatcagcgccagcggcaacgatccgctgacagacaacagcctgcatgtggtgcataccgctgctggtgattcacaattctcgctgctgggtggctccgtggacctgggagcctattcctacgacctggtgcaacgcggcgacaatgactggtacctggacgcgaccacccgtacggtcagccccggcacacaaacggtgatggccttggccaacgtcgtgccgaccatctggtacggcgagctcggcgtgctgcgtagccgcatgggcgacgtgcgccgcaaccctggcaaggccggtggctgggtacgcagctacggtaaccaattcaatgtctcggcgacgtctggcgcggcgtaccagcaacagcaacaaggcctgtcgatcggcgcagatgcgcccctggcagctggcgacggcaactggctggtcgggatcacggccggctacagcaattccgacctgaaccttgcccgcggctcttcggccagcgtcgacagctaccacgccggtgcctacgccacctggctcgatcccgaaagcggctattacatcgacaccgtggcgcgcatcaaccgtttccgcaatcaggccgacgtgcgcctgagtgacggcagcaaggccaagggtgactacagcaacctgggtgctggcgtttcgctggaggtggggcgtcatctgaacctggccgacgactggttcctcgaaccgttcgctcaactgtccgggctcgtggtccagggcaaggactacagcctggacaacggcatgcgcgccaacagcaacagtacccactcgctgctgggcaaagtgggtacctcggtcgggcgcaccttcagcgcgggcacaggccgtagcgtgcaaccctacctgcgggtggcagcagttcatgagttcgtcaacgacaaccaggtgaaagtcaacgacaaccgcttcagcagcaacctggccggttcgcgtgctgaaatcggtgcaggggtggcggtcgcctggggcgaaaaatggcaggcccacgccgacttcgattacagccatggcagcaagcttgaacagccatggggcgtgagcgtcggcgcccgttacaactgg

SEQ ID NO: 31438 - DNA, 1479 bp, Pseudomonas putida
atgaccaccgtacgcacgcgtattgcgccatcgcctaccggcgacccccatgtcggcactgcctacatcgccctgttcaactactgctttgccaagcagcacggcggtgagttcatcctgcgcatcgaagacaccgatcagctgcgctccacgcgtgagtcggagcaacagatcttcgacgccctgcgctggcttggcatcgaatggaacgaaggcccggatgtcggcggcccgcacggcccttaccggcagagcgagcgtggcgaaatctacgccaaatacgccaaggaactggtagacgccggccacgctttctactgcttctgcactgccgaagagctggagcagatgcgtgccgagcagcaggctcgcggcgaaaccccgcgttacgatggccgtgcgttgctgatgagcgccgaagaagtgcagcgccgcctggacgctggcgagccgcacgtgatccgcatgaaggtgccgagcgaagggatctgcgtggtgccggacatgctgcgcggcgatgtcgagatcccgtgggaccgcatggacatgcaggtgctgatgaagaacgacggcctgccgacgtacttcctggccaacgtggtcgacgaccacctgatgggcatcacccacgtgctgcgtggggaagagtggctgccatcggcgcccaagctgatcaaactgtacgagtacttcggctgggagcagcccaagctgtgctacatgccgctgctgcgcaacccggacaaatcgaaactgtccaagcgcaagaacccgacctcggtcaccttctacgagcgcatgggcttcatgcctgaagcgatgctcaactaccttggccgcatgggctggtcgatgcctgacgagcgcgagaagttctcgctggccgaaatggtcgagcacttcgacctgtcacgtatctcgctgggcggcccgatcttcgacatcgagaagctgtcctggctcaacggccagtggctgcgcgagctgccggtagaggagtttgccgcacgcctgcagaagtgggcgttcaacagcgactacatgatgaagattgccccgcacgtgcaaggcagggtcgaaaccttcagccaggttgccccgttgggcgggttcttcttcgaaggcgcgctcaagctggacgccaagctgttcgaaagcaagaaactgtcggccgaccaggtgcgccaagtgatccagctgatcctgtggaagcttgaaagcctgcgtcagtgggaaaaagagcgcatcaccggttgcatccaggctgtggtcgaagcgctggaactgaagctgcgtgacgccatgccgctgatgttcgccgccatcacgggccaggccagctcggtttcggtgctggacgccatggaaatcctcggccccgacctgacgcgctaccgcctgcgccaggctctggacctgctgggtggggtgtcgaagaaagaaaacaaagagtgggaaaagctgttggcttccatcgcc

SEQ ID NO: 31439 - DNA, 1714 bp, Pseudomonas putida
atgggtctttgcggatgcacctagaggcagacccatgacccaggaaaccggcggcttcgccgctctcgatcttaacccgaacattgttgctgccgttgtggctaccggctacgaagagccgtccgccattcagcaacaatcgatcccgatcatcctcgccggtcacgacatgatcggccaggcgcagactggcaccggcaaaaccgctgccttcgccctgccgatcctgaacaagatcgatgtgagcaagcgcgaaccgcaagccctgatcctggcgccaacccgtgagttggcgctgcaagttgctaccgctttcgaaacctacgccaagcagatgccgggcgtgaacgttgtcgccgtctacggtggtgccccgatgggcccacagctgcgtgcgatccgcaacggcgcgcaaatcgtcgtggccaccccgggccgtctgtgcgaccacctgcgtcgtgacgaaaaagtcttgtcgaccgtacagtacctggtactggacgaagccgacgagatgctgaagctgggcttcatggacgacctcgaagtgatcttcgacgcaatcccggctacccgtcagaccgtactgttctccgcaaccctgccgtcgtcgatccgttcgatcgccgagcgtcacctgcgtgaacccaagcacgtcaagatccagaccaagacccagaccgttaccgcgatcgagcaggcccacctgatggtccacgcggaccagaagatcccggctgtgctgcgtctgctggaagtggaagagttcgacgcgctgatcgccttcgtgcgtaccaagcaagccaccctggacctggccgccgcgctggaagccaaaggctacaaggctgctgcactgaacggcgatatcgctcagaaccagcgtgagcgcgtgattgactcgctcaaggatggccgcctggacatcgtcgtcgccaccgacgtcgctgcccgaggcctggacgtaccgcgcatcactcacgtgttcaacgttgacatgccgtacgacccggagtcctacgtacaccgtatcggccgtactggccgtgccggtcgcgatggccgtgcactgttgctggttaccccgcgtgagcgccgcatgctgcaggtgatcgagcgtgttaccgggcagaaggttgccgaagcgcgcctgccgaatgcccaggccgtgctggatgcccgcatcaagaagctgacctcgagcctggcgccgctggtagccgaagcagaagccacccacggcgagctgttcgaccgcctgaccaccgacctgggttgcagcgcgcgtgccctggcttcggccctgctgcgcaaggccaccaatggccaggcgctggacctggcggcggtagagcgtgagcagccgctggtgccgagcttcgccccgcgtggtgagcgtaccgagcgcggtgagcgtggcgagcgtcctgatcgtggtgaccgtgagcgccgtgcaccgttgccgttggccgaaggccgcgtgcgttgccgtaccgccttgggtgcccgtgatggcatcgctgccaagaatctgctgggggcgatcctcaacgaaggtggcctggcgcgtgacgctatcggccgcatccaggtgcgcgacagcttcagcttggtcgagctgccggaagacggcctcgagaagctgctgtccaagctcaaggacactcgcgtggctggcaagcagctgaagctgcgtcgctaccgcgaggattga

SEQ ID NO: 31440 - DNA, 891 bp, Pseudomonas putida
atggaatatgagctgcaagacatcagatctttcgtgaaaatcgccgaactgggcagtttccatgaggccgccgaagcgctccacttgtcccagccggccctgagccgacggatcaagaagctggaggaaggcctgggcacctcgctactggaacgcaccactcgccgggtcagcctgaccagcgtgggccgcgacttcctgcccaaggccaggcgcctgctggatgattttgaagactcgatcctcagcatccgcgagctggccgagcgccagaccggtcaggttaccctcgcctgcattcctaccgcggcgttctacttcctgccgtcggtgatccgcgattacaacgagcaatacccgaaaatccgcattcgcctgctggaccttagcgccaacgacgggctcgaagccgtgctgcgcggcgaggccgacttcggcatcaacatgatgagtggccagcacccggacatcgagtttgtctcgctggtgcaggagcactttgtactggcctgccggcgtgaccacccactggcgaatcgcgcctccgttacctggacagagctggctgattaccgcctgatcggcgtcggccgcctgagtggcaaccgcatgctgctggaccatgcgttgtccgggctcaacctgcggcccaagtggttctacgaagtgcaacacctgtccacgtcgctgggcatggtcgaggccgggctgggcgtgtcggccatgcccagcctggccatgcccaatgccgaccaccccacgctggtgagcgtgccgttgatcgagccgcaagtcacccgcacgctagggctggtgtaccggcgcggcgcatcgctgtcgccggctgcggagaaattcgtttcgatcctgctgcagaaatggccaaatcgc

SEQ ID NO: 31441 - DNA, 153 bp, Pseudomonas putida
atgcgtgaattgatccgtctggtttcgagtgccggtaccggccacttctacaccaccgacaagaacaagcgcaccaccccggacaaaatcgagatcaagaaatatgatccggttgttcgcaagcacgtggtgtacaaggaagccaagatcaag

SEQ ID NO: 31442 - DNA, 234 bp, Pseudomonas putida
atgtcgagagtctgtcaagttactggtaagggtccagtaaccgggaacaacatttcccacgcaaacaacaaaacccgtcgtcgtttcctgccgaacctgcagcaccaccgtttctgggttgaatccgagaagcgtttcgtgcgtctgcgcgtttccgccaaaggcatgcgtatcatcgacaagcgcggcatcgacgccgttctggttgacatccgtaaagctggcgccaaggtt

SEQ ID NO: 31443 - DNA, 768 bp, Pseudomonas putida
atgaagaagctgcttgctgtcgctgccgctgtcgcggccttctcggcccaggccgatacccttaccgtcgccgccaccccggtgccgcacgccgagatcctcaacttcgtcaaaccacagctggcgaaagaaggcgtagagctgaaggtcaaggaattcaccgactacatccagccgaacgtgcaggtggcggaaaagcgcctggacgccaacttcttccagcaccagccttacctggatgaattcaacaaggccaagggcaccagcctggtgagcgtggccggcgtgcacatcgagccactgggcgtgtattcgaccaagatcaagaaactggacgagctgtcctccggcgccaccgtggtcatccccaacgacgccaccaacggcggccgcgccttgctgctgctggacaaggctggcgtgatcaagctcaaggacaacaagaacatcctgtcgaccgtgaaggatgttgccgaaaacccgaaaaacgtgaagttccgtgagctggaagccgccaccatcccgcgtgtgctgacccaggtagatgccgccctgatcaacaccaactacgcgctggaagccaagctgaacccggaaaaagacgcgctggccatcgagggcagcgactcgccctacgtgaacatcctggttgcccgcccggacaacaaggactcggacgacatgaagaaactggcggctgcactgcactcgcctgaggtgaagcagttcatcatcgagaagtacaaaggcgctgtggttccggcgttc

SEQ ID NO: 31444 - DNA, 669 bp, Pseudomonas putida
atggacgccctgaatttctttgccaacgtcgactgggccgaaatctggctggccaccgtcgataccatgatcatgctgttcggctcgctgttcttcaccgtgctactgggcctgccactgggcgtgctgctgttcctctgcgggccaaagcagatgttcgaacagaagggcgtctatgcgctgctgtcgctggtggtcaacatcctgcgctcgctgccattcatcattttgctgatcgtgatgatcccgttcaccgtgctgatcaccggtacctcgctgggcgttgcaggcgccatcccgccgctggtagtgggtgccacgccgttctttgcgcgcctggttgaaaccgccttgcgtgaagtggaccgcggcatcatcgaagccacccagtcgatgggcgccaccacccgccagatcatcaccagtgcgctgctgccggaagcccgtccgggcatcttcgcggccataacggtaaccgccatcaccctggtttcttacactgccatggccggtgtggtgggtgccggtggccttggtgacctggctatccgcttcggttaccagcgtttccagaccgatgtgatggtagtgaccgtggtactgctgctggtactggttcaagtcctgcagagcgtgggcgacaaactggtcgtgcatttttcccgtaaa

SEQ ID NO: 31445 - DNA, 1818 bp, Pseudomonas putida
gtgatcgaaaatctgcgtaacatcgccatcatcgcccacgttgaccatggtaaaaccactctggtcgacaaactcctgcgtcagtccggcactctggagcgtaacgagctcaacgacgagcgcgtcatggactccaacgaccaggaaaaagagcgcggtattaccattctggcgaaaaacaccgccatcaactggaacggctaccacatcaacatcgtcgacacccccggccacgccgacttcggtggcgaggttgagcgtgtaatgtcgatggtcgactccgtgctgctgctggtcgacgcccaggacggcccgatgccgcaaacccgcttcgtgaccaagaaggctttcgaagccggcctgaagccaatcgtcgtgatcaacaaggttgaccgtccgggcgcacgtcctgactgggttctggaccagatcttcgacctgttcgacaacctcggtgccaccgacgaacagctggacttcaaagtggtctacgcctcggccctgaacggcattgccggcctggaccacactgccatggccgaagacatgaccccgctgtaccagtcgatcgtcgacaacgtaccagcaccgtctgttgaccgcgacggcccgttccagatgcagatctcggcactggactacaacagcttcctcggcgttatcggtgttggccgcatcgcccgtggccgcgtcaagccgaacaccccggttgtcgccatcgacaccaacggcaagaagcgtaacggccgtatcctgaagctgatgggtcaccacggtctgcaccgcgttgacgtcgaagaagcccaggctggcgatatcgtctgcatcagcggtttcgatgagctgttcatctccgacaccctgtgcgccccggatgcggtagaagcgatgaagccgctgaccgttgacgagccgaccgtttcgatgaccttccaggtcaacgactcgccgttctgcggtaaagaaggcaagttcgtcaccagccgtaacatcaaggaccgtctggacaaggagctgctgtacaacgttgccctgcgcgttcaggagaccgactccccagacaagttcaaggtttcgggccgtggtgagctgcacctgtcggtgctgatcgaaaccatgcgtcgtgaaggcttcgaaatggccgtgggccgtcctgaagtgatcatccgcgaagtcgacggcgtgaagcaggagccgttcgagaacgtcaccatcgacatccctgaagaatcccagggcaaggtcatggaagagatgggtctgcgtaaaggcgacctgaccaacatggttccggatggcaagggccgtgttcgtctggagtacaacattccagcccgtggtctgatcggtttccgtaaccagttcctgaccctgaccaacggtgcaggcatcctgacctcgatcttcgatcgctacgacaccatgaagtcgggccagatgtccggccgcctcaacggcgtactggtttcggtcgagaccggcaaggcactgacctactcgctggaaaccctgcaggctcgcggcaagctgttcgttgaacacggccaggagatctacaacggtcagatcatcggcctgaacagccgtgacaacgacctgggcgtgaacccgaccaaaggcaagaagctcgacaacatgcgtgcttcgggcaaagacgaagtcatcgccctggtaccgccagttcgccacaccctcgagcaggccctggaattcatccaggacgacgagctgtgcgaagtgactcctaagtcgatccgtctgcgcaagaagatcctggacgaaggcgagcgtacccgcgcagccaagaaagccaagaac

SEQ ID NO: 31446 - DNA, 2745 bp, Pseudomonas putida
atgagccaagcgcccctcgtcctggtggacggttcctcctacctttatcgcgccttccacgcgctgccaccgctgaccacgtccaagggcatgccgaccggtgcggtgaagggtgtgctgaacatgctcaagagcctgcgcaagcaatatcccgacagcctgttcgccgtggtgttcgacgccaagggcggcactttccgcgatgccatgttcgctgagtacaaggccaaccgccccagcatgccggatgacctgcgggtacagatcgagccgctgcacgccagcgtcaaggcgctgggctacccgctgctgtgcgtggagggtgtcgaggctgacgacgtgatcggcaccctggcgcgcagcagtgccgccctgggtcgcccggtgatcatctcgaccggtgacaaggacatggcgcaactggtggacgggcacattaccttggtcaacaccatgaccggaagcgtgctggacgtggctggcgtgcacgagaaattcggcgtcggcccggaacacattatcgacttcctggccctgatgggtgacaaggtcgacaacatccccggcgtgccgggcgtgggcgaaaaaacggcggtggggctgttgaccggcatcggcggcggtctcagcgacctttacgccaacctggacaaagtgccagcgctggccattcgcggcgccaagaccttgccggccaagctggaggagcaccgcgacgcggcattcctgtcctacgaactggccaccatcaaggttgacgtgccgctggatgtggaggtcgaggcgctggtgtgcggtgaacctgaccgcgaggcgctgctggcgttgtacaccgagatggagttcaagagctgggtcgccgaattgcagcgcgatgcggccaaggccggtgacgatgttgccccggccgtggagcctgcggtcaaggtcgaggccaaatacgaaaccattctcgaccaggcccgtttcgacgcctggctggagaagctgcgccaggcaccgctgtttgccttcgacaccgagaccaccggcctggacgcccagcaggcgcagttggtcggcctgtccttcgcagtcgagccgcatgaagcggcctatgtgccgctggcccacgattacgaaggcgcgccggtccagctggaccgcgaggccgtgctgctggcgctgaaaccactgctggaggacccggccaaggccaaggtcgggcagaacgccaagtacgacatcaacatcctcgccaatggctcccccgccatcgagatgcgcggtgtggcctacgacaccatgctcgagtcgtacgtgctgaactccaccgccacccgtcatgacatggacagcctggcgcagaagtacctcgaccacaccacgatcgccttcgaggacatcgccggcaagggtgccaagcagcttaccttcaaccagatcaacctggacaaggccggcccctacgccgccgaggacgccgacatcaccctgcgcctgcaccatgcattgcaggcccgcctggcacagacgccgagcgtgcaaccggtgctgatggatatcgagatgccgctggtgccggtgctggccaggatcgagcgccagggtgcactggtcgatgccgagctgttgaaagtacagagcggtgagctgggcgtgaagatggctgagctggagctgcgtgcctacgagctcgccggtgagacgttcaacctcggctcgcccaagcagctgggcacgatcctttacgacaagctgggcatgccggtgttgagcaagaccgccaagggccagccatccaccgccgaagcagtgctcgacgaactggccttgcaaggctacccgctgccagaggtgctgatgcagtaccgcagcctgagcaagctcaagagcacctacaccgacaagttaccggggcagatcaacccgcgcaccgggcgtatccacacgtcctaccagcaggccgtggcggccaccggccggttgtcgtcgagcgacccgaacttgcagaacatcccgatccgcaccgctgaagggcggcgtatccgccaggcgttcatcgccagtccgggttacaagcttctggcggcggactattcacagatcgagctgcgtatcatggcccacctggccaaggacgaaggcttgctgcatgccttccgcaatgacctggacgtgcaccgcgccacagcagccgaagtgttcggtgtggccctggaagacgtgaccaccgaccagcgccgcagcgccaaggccatcaacttcggcctgatctacggcatgagcgcctttggcctggccaagcagatcggcgtcgaccgcaagcagtcacaggactatatcgaccgctactttgcccgctacccaggcgtgctggcctacatggagcgcacccgcgcccaggcggccgagcaaggctttgtcgaaaccctgtttggccgccgcctgtacttgccagacatcaatgccaagaaccctgccctgcgcaagggcgccgagcgcacggcgatcaacgccccgatgcagggtactgctgccgacatcatcaagcgggccatggtcaaggtagataactggttgagcgagagcgggctggatgcccgggtgatcctgcaggtgcacgacgaactggtgcttgaagtacgcgaggacctggtgcagcaggtgaaagatgaaattcgccagcacatgagccaggccgcgcagctggatgtgccgctgcttgtcgaagcaggcgttggtgcgaattgggacgaagctcac

SEQ ID NO: 31447 - DNA, 1407 bp, Pseudomonas putida
gtgattttgacccgttcctcactcgtcaagcgcctgacgctgatgatcatgttcgcggtcatcgctgttcttgtggtcgcaggcatcagcttcaacatgctgagccagcatcacttccgcatgctcgatgaacaagcgctgtccgaaaagctggagtcaacgagacacatcctgtcaatccaggcacctggaacgggaatggaagagctgagaccacaactccgcgcattgctgggtgctcatcaggatctgacggcggagattctgacctcagagggtgaggtactattttcagatctcaaagcagtacaaattccagataaatacaagcgcgccgacaaggaagaaatgtgggaatggcaggacgaatcccataatttccgtggtatcaccactgacgttgagatccagggccaaccagctcccggcaccgtcatgctgatgctggatatcaccagtcatgcgcacttcttcgaaaccctgcaacggtggtttgcgattggtttggttatcagtgcgttggtcagtgctggtataggctggctggtcgcgaaaagtggtctacgccccgtcgaacagatcacgaaggttgctacgtccatatctgccaggtcacttcaagagcgcatccctctggagcctgtaccactcgaactgcaaacactgatcttgtccttcaacgggatgcttgcacgcctggaagatgccttcgttcgtctatccaatttctcagctgatatcgcgcatgagctgcgaacacctgtcagtaacctgttaacgcacaccgaggtggtgctgacccggaaacgcgacgtcgacgcctatgaagaaaacctttattcaaacctggaagatctgaagcgaatgtcacgcatgatcgatgacatgctcttcctcgccaagtcagacaacggcctcatcatccctgagcaggttgacatccagcttcatgacctcgtttccaagttatttgagtactaccagttgctggcggacgatcgaggcatacgactcacgcttcaagggaaaggtgtcatctccggagacaggctcatgatcgaccgagctgtatccaatattctctcgaatgccgttcgatacacgccggacggaagcgggatctcggtagaaattcagcaagccgcagacaaggtaaccctcacgatcaaaaacggcggggcaaccattgacccacaacacatcaacaagatttttgatcgcttctaccgggccgacccggcaaggcgagaggggggacctagcaatgctgggcttggtctggccattacccgctccatcgtcaaagcacatgatggaaaagtctggtgcacctcgtccgaaggggttacagcattcaatttcatttttcctgccgcccaccgaacagctcacattcgcacgcggcat

SEQ ID NO: 31448 - DNA, 615 bp, Pseudomonas putida
atgaacaaactagtcgtgagtctgctgttgaccttgggtgtcgctggtgcggccactgctgcgcaacctatcaaaggcgatgccgccgctggccaggccaagaccgccgtgtgtggcgcctgccacaatcccgacggcaacagcctggcaccgaacttcccgaaactggccggccaaggccagcgctatctcgaaaaacaacttcacgatatcaagtcgggcaagcgtaccgtgctggaaatgaccggcatgctggccgcattcagcgaccaggatctggccgatatcgccgcctacttctccagccaaaaaggcagcgtgggggccgccgatcccaagctggtcgagcgcggccgcgcgttgttcaatggcggcgacctggaaaagggcatgccggcctgcactggctgccactcgcccaacggcgcgggcatcgccctggccggcttcccgcacctgggcgggcaacactcgcagtacgtggccaagcagctcactgacttccgcgaaggcaaccgcaccaacgatggcgatgccatgaccatgcgcaccatcgctggcaagctgagcaaccatgacatcgaagcgttggccagctacatccagggcctgcat

SEQ ID NO: 31449 - DNA, 1596 bp, Pseudomonas putida
atgtcagccttcatcgccttgctgcgccaaattttttaccgtccctggatgctggccactttggcagcgctggccagcgccgcggtgttgctctctgccagcatcggcattgccctgcaacaaatgaaacaaagcgaaagcgaacagatgaatgcccagggcgagcgttttctggaacggctcgaacaggtgttcggccaactgcgcgaaggggtcgatctgctgcaggcccaacccttgcgcggctgcagcccggcaatgttggcagccttgcagcaggttggcctgaactcgcggttcatctatgaagcggcttatgtagatggcaatgttgcctgctccaaccgcggtgatgagcgagcgttcgttcccttgcgggcgccagatatccaggggccgacgtacagctactggcttaacaccaccaccgagccgaacgagaacctggcagcactgatgctgggtcggggcaagtttctggtttccacctcccgtgggcatttgaccgatgtggtggacctgcccccaggtggcagcctggtggtggtgctggacaacggcgcccgggccattccggtgctcggcccgccacaggtatggccaccaccctcggcctggtcgaccagccacaagtctctgttggaactcagtgatcggctgatctaccgaatgccgaccaagtcgccggattaccagttggtgctgattgccccgagggccagtctgccgttgaagatgaacggcatgctctggttgctgttccccggtagcgtgctggcggcctgctgcatcggttggttggtactgcagttgattctgcaacgacggtcgatgagttcagagttgcagaatgccttgcgtcgtggagagctgcaggtgctctaccagccaatcatcgagctcgacagccggcgctgtgtgggcgccgaggccttggtgcgctggcgccgcccggacggcaccctgaccagcccggaccttttcattccgctggcggagaataccgggcagattcgccagatcaccgactttgtcctgcagcgtgtgcttgaacagctcggacagctactgcgctcgcaccccaagctatacatatcgataaacctggcggcctgcgatgtgatggtgccacgtattggccgggtggcggcgcgcttgttggccttgcatcgagtggcgcccagccagattgccttcgaggtgaccgagcgcggcctgatcgacgtggtggtcgcccgtgacaatctgcaggcgctacgtgccgtggggcaccaggtgctgatcgacgactttggtaccggttattgcagcctggcctacctgcaaaccctgccagtggactgcctgaaaatcgacaaggcattcatcgacgctctgggccacgatgccgccagtagcggtgtggccccgcatatcatccgcatggcccatgacttgcacctgcgggtaattgccgaaggaatcgagttcgaggaccaggcggtgctgctgaacagcgagggggtcaattatggccagggctggttgtttgcccggccgctgaacgcccggcagtttgccgagttggtgactcgtgggcacctgccgcggcgggtg

SEQ ID NO: 31450 - DNA, 1779 bp, Pseudomonas putida
atgaaatggccgcccatgaagctgcgtacgcggcttttcctcagcatctcgacgctcgtcaccgtggcgttgctggggctgctgctgggtctggtcagcatgctgcagatggctacagtgcaacagcgactggtgcgcgataccacccatgccctggaagtggggctgaagttgcgccagaacctgggcgaacagctgatgctgattctcgatgaagacaccgccccagaaagcctgcggctgctgcaggacaacttccaggacctgctcaaccaagggctggaacaaggcggtgagcgcaccggtttcagcaaggcgagcagcaattaccaggccttcctccagacctatcgcgacagcgccacacccgctcgcagcatgggtgtcgatcagcctcttggggccgcgttcaatcaggtgcgcaccgacctcatcgattcccacaagcaggcattggacctgattacccgtagcgaggaacgcacccgtgaccgcgcattgctggtcagtggtgtactcggcctgatggggttggtggtgttggtactgggctttatcaccgcgcacaacatcgcccggcgtttcggccagccgatcgaagccttggccaaggcggccgaccagttgggcaagggcaatttcgatgtgaccttgccggtcacccaggccgccgagctcaaccagctgacccgccgttttggtctgatggccgatgccttgcgcaagcaccaggccaccaacgtcgacgagctgctggccggccagcagcgtttacaggcggtactcgacagcatcgacgacggcctgctgatcatcgaccgtcagggccgcctcgagcacctcaacccggtggcgcagcgccagctgggctggaacgacagccgcttgggcagcagcctggtcgaagccctgcagcgccccgagcttgagcaacaactgcgccaggttctgcgcgggggcagcctcgaccgcccaccggacgacctgaacatggaggtcgatgaagaatcacgtctgctcacctacagcctgaccccggtcagccacccgcagggaccaatcctcggcgcggtgatggtgctgcacgatgtgaccgagcaaagggccttcgagcgggtgcgcagcgaattcgtgctgcgcgcctcccacgaactgcgtaccccggtgaccggcatgcacatggccttcggcctgctgcgcgagcgggtcaagttcccgcccgaagcccgcgagaacgacctgctggaaaccatcggcgaagaaatgcagcgtcttacccaactgatcaacgacctgctcaacttctcccgttatcagagcggtttgcaaaagctcgagctggccccctgtgccatcgacgacctgctggaccacgcgcaatcgcgctttgccgaacaggccgcgcacaagcagatcgagttgatcaaggaactggacccgccgctaccgcgtatccaggccgacgtcgcccagttggaccgagtgctggacaacctgctgcacaacgccatccgccataccgccaacggcgggcgcatccgcctgcatgccagacggcatgcagaacgggtgatcatcagcgtcgaggacaacggagagggcatttcctatgggcaacaagcgcgcatcttcgagcctttcgtgcaggtaggtcgcaagaaaggcggcgctgggctggggctcgcgctgtgcaaggaaattgtgcagctgcacggcgggcgcatgggcgtgttttcgcggccggggcaggggacccagttctacatggcgttgccggtc

SEQ ID NO: 31451 - DNA, 1227 bp, Pseudomonas putida
atgctcaacggcctttggctcggctttttcctggtggcggcggtgtccgccatggcccaatggctggtgggtggcaacgcaggcatcttcgcggcaatggtcgaaagcatcttcgccatggccaagctgtcggtcgaggtgatggtgctgctgttcggcacactgaccctgtggctgggctttctgaagatcgccgagaaggccggtatcgtcgagtggctggccaaggtgctaggcccgctgttcgcccgcctgatgccggaggtgccgcccggccacccagccctgggcctgatcaccatgaacttcgctgccaacggcctgggactggacaacgctgctacgccgattggcctgaaggccatgcgcgcgctgcaggagctgaaccccggcagcactaccgcgagcaacgcgcagatcctgttcctggtgctcaacgcctcgtcgctgaccctgctgccggtaaccgtcttcatgtaccgggcccagcaaggcgcgccagacccgaccatggtgtttctgccgatcctgctagcgaccagcgtctcgaccctggttggtctgctgtcggtggcagtgatgcagcgtttgcgtctgtgggacccggtggtgcttgcctacttcatccccggcgctttgctgctgggaggcttcatggcttttcttggcaccctgtcggccgccgcgctggccagcctgtcgtcgctcctgggcaacctcacgctgtttggcgtgatcatgctgttcctggtggtgggcgccctgaaacgggtgaaggtgtatgaagcctttgtcgaaggcgccacggaaggcttcgatgtggccaagagcctgctgccctacctggtggcgatgctggtggcggtgggtgtgctgcgcgcctctggtgccctggagctggccctggacggtatccgccatgcggttagctggatgggcctggacacgcgcttcgtcgagggcctgcccaccgcgctggtcaagccgttctctggcagcgcagcgcgggcaatgctgatcgagaccatgcagacccaaggcgtggacagtttccctgccttggtggcagcgacgattcagggcagcaccgaaaccaccttctacgtactggccgtgtactttggtgccgtgggcatccagcgcgtgcgccatgcggtcggttgcgcactgctggccgagttttcaggggtagtcgcggcgatcttcgtctgctactggttctttgcc

SEQ ID NO: 31452 - DNA, 459 bp, Pseudomonas putida
atgtttcacgtcatcctttttcaaccagaaattccgccgaataccggcaacatcattcgtctatgcgccaacagcggctgcgccctgcacctgatcgaacccatcagcttcgaactggatgacaagcgcctgcgccgcgcagggctggactaccacgagtatgccacgctcaagcgccacgagagcttggccggatgcctggaaagccttggcaacccacggttgttcgcctttaccaccaagggctcgcacccgttccacgaagtggccttccagccgggcgacgccttcctgttcgggccagagagccgcgggttgccggccgaggtgctggacagcctgccggccgagcatcgcctgcgcctgccgatgcggccggggtgccgtagcctgaacctgtccaatacggtggcggtgacggtgtatgaggcgtggcggcagaacgggtttgccgggagc

SEQ ID NO: 31453 - DNA, 252 bp, Pseudomonas putida
atgaagcctgtcatcgtctactccagcgactactgcccctactgcatgcgcgccaagtacctgctcgagagcaagggcgtggccttcgaggaaatcaaggtcgacggcaagccgcaggttcgcgccgagatgagtcagaaagccggccgcacgtcggtgccgcagatctggatcggcagcacccatgtcggtggatgcgatgacctctatgccctggagcgcgcgggcaagctcgacgcgttgctggcggcc

SEQ ID NO: 31454 - DNA, 765 bp, Pseudomonas putida
atgcgttatctgctgtgtctgttgttttgcctgatggccggaatcgcgcaagcggcaccggccaacaaggcctacatgagcatcatcatcgacgacctgggccagagcccagagcgcgacagccgtaccctggccctgcctgggccggtgaccatggcgatcatgcccgacaccccgcatgccaccgactttgcacgccaggcgcacaaggccggcaagacggtgatcctgcacatgcccatggacccggccaccgggccctatgcctggcacccgggcatcgccatcgaagagctggcgcggcgcctggacgcagcattggtcaaggtgccctacgccgccggcatcaacaaccacatgggtagccgcatgaccgcacagcgtgaacccatggcgtggttgatgggcgagctgcagcggcgccatctgttctttgtcgacagccgcaccagtgccgccacggttgccgcggccgaggctcaagcacacgatgtcgcgcatgtatcacgggatgtatttctggatgacgtgcgcacgccggaagccatcgacgctcagctgcaacagggtattgcactggcccgcaagcaaggctcggccgtgttgatcggccacccctacccgcagacgctagcggtgctggaaagtcagattccacggctcaagcaattggggatcgaactggtcacgctgcaacagatgatcgccacacgtggcaaccaggccatgcctgcacacggtaagcatggccgttacagcaatcgc

SEQ ID NO: 31455 - DNA, 1695 bp, Pseudomonas putida
atgtcccaagaattcgattacatcatcgtcggtgccggctcggccggtaacaccctggcgacccgcctgaccgaagacgccggcgtcaccgtattgctgctggaagccggtggccccgactaccgcttcgacttccgcacccagatgccagccgccctggccttcccgctgcaaggccgccgctacaactgggcctacgagaccgacccggagccgtacatggacggccgccgcatggaatgtggccgtggcaagggcctgggtggctcgtcgctgatcaacggcatgtgctacatccgcggcaacgccatggacttcgacggctgggcagaactgccaggcctggaagactggacctacctggactgcctgccgtacttccgcaaggccgaaacccgtgacatcggcccgaacgactaccatggcggcgaaggcccggtcagcgtgaccacgccgaaagccggcaacaacccgctgttccatgccatggtcgaagctggcgtacaggccggttacccacgcacagaagacctcaacggttaccagcaggaaggcttcggtccgatggaccgcaccgtgaccaagaacggccgccgctccagcactgcccgtggttacctggaccaggccaagaagcgcccgaacctgaccatcgtcacccacgccctcacggatcgcgttctgttcgacggcaagcgcgccatcggcgtgacctacctggtcggcgacagcgaagagcgcgtcgaagcccgcgcccgcaaggaagtgatcgtcagctccggggccatcgcctcgccgcaactgctgcagcgctccggcgtcggcccgcgcgccctgctggaaagcctcgacatcccggttgtgcacgaccttccgggcgttggtgaaaaccttcaggaccacctggaactgtacctgcagtacgcctgcacccagccggtttcgctatacccgtcgctgctgtggtggaaccagccggcgatcggtgccgagtggatgttcaatggcaccggtatcggcgccagcaaccagttcgaggccggggggttcatccggactcgtccggagttcaagtggccgaacatccagtaccacttcctgccggttgcgattaactacaacggctccaatggcgtgaaggaacatggcttccaggcgcacatgggctccatgcgctcgcctgcccgtggccgcatccaggtcaagtcgaaagacccgcgccagcacccgagcatcctgttcaactacatgtccaccgagcaggactggcaggaattccgtgacggcattcgtctgacccgtgaaatcatggcccagccggcgctggacccgtaccgtggccgcgaaatcagcccgggcgctgacgtgcaaaccgacgagcagctggacaagttcatccgcgagcacgccgaaaccgccttccacccgtcctgctcgtgcaagatgggcaccgacgacatggcagtggtcgatggtgaaggccgcgtgcacggcatgaagggcctgcgcgtggtcgatgcctcgatcatgccgctgatcatcaccggcaacctcaacgccaccacgatcatgatcgccgagaagatttcggacaagatccgtggtcgcaagccactgccgcgcagcaccgccaagtactacgtggcgggggatgcaccagtgaaaggcaagccgatgcgtgaagtgaaacagggc

SEQ ID NO: 31456 - DNA, 3306 bp, Pseudomonas putida
atgtccctgcgcgtgtaccttcgcacagccctgctcgggttgtgcctgtccctttcttttgcggctggcgcggcagaagccccgaccaccgccagtatccagaacagcctcgacaagatcgccgagcgcaagctgcccgaggcagaccagaaggcgctgcagcaggtgctcgagcaaacgttgagcctgcttgctgccaaggaagacaacgaaaagaaactggctgcactcaagcagcagctgagcagtgcccccaaggagaccagcgacagccagaaggagttggccaagctcaaggaaaccaaggcacaaccggtggcacagcgctacgccaccctcaccgtgccacagcttgaacagatgctcagcgaacgcaacacgcagcagggcgagctgcaaaaggcgctgtctgaagccaacagcctgatcatcaactcgcaaacccgccccgagcgcgcccaggcggagatcagcagcagccagacgcgcacccagcagatcaacaacatcctcaaaaccggcaaggacggtggcaaagccatcaatgccgaccagcgcaatcagctcaacgccgagttggcctcgctcaacgcgctgaccctgctgcgccgccaggaactggccggcaacagcctgctgcaagacctcggcaatgcgcgtcacgacctgatggtcgagcgcgctgcgcgcctggagcaggaaatccaggacctgcagacgctgatcaacgccaaacgcctggcccagtcccaggaagccgtcacccagcagtcgatcgaggctcagaaggccggcggcagcagcctgctggccactgaaagcgcgatcaacctcaagctttccgactacctgctcaagagcaccgatcgccttaacgaactgacccagcagaacctgcgcaccaagcagcagctcgacagcctgacccaggccgaccaggcgcttgacgagcagatcaacgtgctcaagggaagcctgctgctgtcgaagattctctataaacagaaacagaccctgccgcacctgaaggtcgaccgcgacctggccgaccagatcgccgacacccgcctgtaccagttcgaagtcaaccagcaacgcgagcagatgagcagcccggtcacctacgtcgacaagctgctggcggcgcaaccgcaggaagatgtgacaccgcagctgcgcaaggccctgctggaagtggccatcacccgcagcgacctgttggagcggctgaaccgcgagctgtcggcgctgctcaacgaatcgatcaccttgcagctcaaccagaagcagctgctgggcaccgcgcagagcctgcgcaccaccctcgacgagcaaatgttctggatccccagcaacaagccgctggactgggactggctgcaatacgtgccgaagcgcctggccgaccaggtcgccaacttgccatggggctccagcctgaaagagctggccgatggcctgagccagcgcccgttgttgttcctgccgctgctgttggtgatcggcgcgcttttgtggcggcgcaaatacctttaccaacggttgggcaaggtgcaccaggatatcggccacttccgccgtgacagccaatggcacacgccccaggcaatccttatcaacattctgctggcgatgccggtcagccttggcctggcgctgtgcagctatgccttgcagatcgatgctcgcgggcaaaacgccaacctgggcgccgcactctggcagctggcccaggcctggctggtgttctacaccgcctaccgtatcctcgcacccggtggcgtggcggaagtccacttccgctggcacaaaccgcaggtcgagttcctgcgcggctgggttcgccgcctgggcactgtggtgctggcactggtcggcgtggtggcggtggccgagcaccagccttcggcactggcagacgacgtgttgggcatcggcgtggtgctgacctgctatgcgctaatggcctggctgctcagccgtctgctgctcagcagcccggcacaccgtgacacctcgctgttccgcagggcggtgggggtagcgttcaccgccctgcccatcgccctgttcgtcgccgtgtgcttcggctactactacacggcactgaagcttaccgatcgactcatctacaccctgtacctgctgctgttctggttggtgatcgaagccgccttcgtgcgcggcctgtcggtggctgcacggcgcctggcctaccagcgtgcgttgaccaagcgtgcggcggccaaggaagggctggatggcgaagtcatcaccgaggagccaacgctggatatcgaacaggtcaaccagcagtcgctgcgcctgatccgcctggccctgctcggcggcttcatcgccggcctgtactgggtgtgggccgacctgatctcggtgttcgcctacctcaacaatttcgtcctctacgaatacaccagcggcaccggcgccgccgccagcatggtaccgatcagcctcggcgacctgctcggcgcgctggtgatcgtcggcatcaccttcgccctggccggcaacttgccaggcttgctggaagtactggtgctgtctcgcctgaacctggcccagggcagtgcctacgccaccaccacgctgttgtcgtacaccatcgtcggcatcggcatcgtcagcaccctgtcgaccctgggggtgagctgggacaagctgcaatggctggtggccgcgctgtcagtagggctgggcttcggcatgcaggaaatcttcgccaacttcatctccggcatcatgatcctgttcgagcgcccggtacggattggcgacaccatcaccatcggcaacctgtcgggcacggtaagcaagatccgcatccgcgccaccaccatcaccgacttcgaccgcaaggacatcatcgtccccaacaagaccttcatcactggccaactgatcaactggtcgctgaccgacacggtcacccgggtgacgctgaagctgggcatcgactatggctcagacctcgacctggtgcgcgacctgctgctcaagggcgcgcatgagaacccacgcgtgctcaaggatccggaaccgatcgtgtacttcctcaacttcggcgaaagctcgctggaccacgaactgcgcatgcacgtccgtgacctgggcgaccgcaacccgacgctggacgagatcaaccgctacatcaaccgcgagttcaaggcccataacatcaagatctcggtacgccaggtagaggtgttcctgatggatgcgaagggcagcaagcagcaattgattccgatggaacagccaaaatcggatggcactgcttcggcc

SEQ ID NO: 31457 - DNA, 1275 bp, Pseudomonas putida
atgcttttttcattgcgccagaggtacccgcccgtgaaaactgcagtagcccccctcctccttgagccaaaacctgccatcctgaccgaaatgtggatcgaaaaaggcacacccgccttcatgaaaaccgtgctggccttgttcagcggcggtttcgccaccttcgccttgctgtactgcgtacagccgatgatgcctctgctgtcccgggagtttgccatcaacgcggcacagagcagcctggtgctgtcggtgtccaccgccatgctggcgttcggcctgctgatcaccggccccatttctgaccgcatcggacgcaagcccgtgatggtgttcgcgctggtctgcgccgccctgtccaccttggccagcgcagtgatgcccagctgggagctggtactggccacccgcgcattggtcggcctgtcgctgagcggcctggcggcagtggcgatgacttacctgagcgaagagatccacccgcaacacattggcctggccatgggcctgtacatcggcggcaacgcgattggcggcatgagcgggcgtctcatcacgggcgtactgatcgacttcgtcagctggcacacggcgatgctgaccattggcggcctggccctggtggccgcgctggtattctggaaggtgctgccggagtcacgcaatttccgcgcacagacgatgaacccacgcagcctgctggacggctttgtcatgcacttcaaggacgccggcctgccctggctgttccttgaagccttcctgctgatgggcgccttcgtcacattgttcaactacatcggctaccgcctgctggccgagccctaccacatgaaccaggcgctggtcggcttgctgtcggtggtttacctgtcgggtatctacagttctgcacaggtcggcgccctggcggacaaactgggccggcgcaaggtgttctgggccagtatcgtggtaatggcggttggcttgctgatgacgctggccagtccactggtgatggtgatcgtgggcatgctggtgttcaccttcggcttctttggtgcgcactcggtggccagcagctggatcggccgccgggcgctgaaggccaaggggcaggcgtcgtcgctgtacctgttctgctactacgctggctccagcgtggccggtacggcgggcggggtgttctggcaccagtggggctggaacgggatcgggctgttcattggcagcttgctggcggtggccttgatggtggcgttgcacctgagcaagttgccacccaaaacggtg

SEQ ID NO: 31458 - DNA, 4416 bp, Pseudomonas putida
ctgtaccatcccgaagaattcaaggacaactgtggttttggcctgatcgcccatatgacgggtgagccgagccaccaccttctgcaaactgccatgcaggcgctgacatgcatgacccaccgcggcggcatcaatgccgacggcaagaccggtgacggttgcggtctgctcatgcagaagcccgatcaattcctgcgtgccatggcccaggagcacttcgctgtcgagctgcccaagcagtacgccgtcggcatggtgttcttcaaccaggacccggtcaaagccgaagctgcccgcgccaacatggaccgcgagatcctcgccgctggcctgaaactggtcggctggcgcaaggtgccgatcgacaccagcgtcctcggccgcctggccctggagcgcctgccgcagatcgagcaggtgttcattggcggtgaaggcctgagcgaccaggaattcgccatcaagctgttcagtgcccgtcgtcgttcgtcggtggccaacgcccacgacgccgaccactacatctgcagcttctcgcacaagaccatcatctacaaaggcctgatgatgccgcgcgatctcgcggcgttttatccagacctgggtgacgagcgcctgcaaaccgcgatctgcgtgttccaccagcgcttctccaccaacaccctgccgaaatggccgctggcgcagccgttccgcttcctcgcccacaacggcgagatcaacaccatcaccggcaaccgcaactgggccgtggctcgtcgcaccaagttcgccaatgaccagatcccggacctcgaagagctcggcccgctggtcaaccgcgtcggttccgactcgtccagcatggacaacatgctggaactgatggtcaccggtggcatcgacctgttccgcggcgtgcgcatgctggtaccgccagcgtggcagaacgtcgagaccatggacgccgacctgcgcgccttctacgaatacaactccatgcacatggagccgtgggatggcccggccggtatcgtcatgaccgaaggccgccacgcggtgtgcctgctcgaccgtaacggtctacgcccggcgcgctgggtgaccaccaccaatggttacatcaccatcgcctcggaaatcggcgtatggggctatcagcctgaggaagtgctggccaagggccgtgtcggcccgggccagatccttgccgtggacaccgaaaccggccagatcctcgacaccgacgccatcgacaaccgcctgaagtcgcgccacccgtacaagcgctggctgcgtcagcacgccacccgcatccaggcgacgctgaccgacgaccagggtgtggccagctacgacgctgaccagctcaagcaatacatgaagatgttccaggtcaccttcgaagagcgtgaccaggtactgcgcccgttgggtgagcagggccaggaagccgttggctcgatgggtgacgacacgccgatggccgtgctgtcgcagcgcgtgcgctcgccgtacgacttcttccgccagcagttcgctcaggtaaccaacccgccgatcgacccgctgcgcgaagcgatcgtaatgtcgctggaaatctgcctgggtgccgagcgcaacatcttccaggagtccccggagcacgcttcgcgggtcatcctcagctcgccggtcatctcgcccgccaagtggcgttcgctgatgaacctggagcgcgaaggcttcgaccgccagctgatcgacctcaactatgagcagagcgtcggcctggaagcggccatccgcaacattgccgaccaggccgaagaagctgtgcgtgggggcaagacccagctggtgctgagcgaccgttatatcgccccgggcaagctgccggtgcacgcttcgctggccgttggtgcagtgcaccaccgcctgaccgaacagggcctgcgttgcgacagcaacatcctggtggaaaccgctaccgcccgtgatccgcatcacttcgccgtgctgctgggcttcggtgcctcggccgtttacccgtacctggcgtatgaagtactggctgacctgatccgtaccggcgaagtgctgggcgacctggacgaagtgttcaagtactaccgcaaaggtatttccaagggcctgctgaagatcctgtccaagatgggtatctccaccatcgcctcgtaccgcggtgcacagctgttcgaagccattggcctggccgaggaagtggtcggcctgagcttcaagggcgtgtccagccgcatcaagggtgcgcgcttcgaagacctggaaaacgaccagaagctgctggcggccgaagcctggagcgcgcgcaagccgatccagcaaggtggcctgctgaagttcgtccacggtggcgaataccacgcctacaacccggacgtggtcaacaccctgcaagcggctgtgcagcagggcgactacgccaagttcaaggaatacaccacgctggtggaccagcgcccggtgtcgatgattcgtgacttgctcaaggtgaaagtggccgaccagccgctggcgctggagcaggtcgagccgctggaggcgattctcaagcgtttcgactcggcgggtatctcgctgggtgcactgtcgccggaagcccacgaagcgctggccgaggccatgaaccgcctgggcgcacgctccaactcgggtgaaggcggcgaagacccgtcgcgctatggcaccatcaagagctcgaagatcaagcaggtggccaccggccgttttggtgtgaccccggagtatctggtcaacgccgaagtgctgcagatcaaggttgcccagggcgccaagccgggtgagggcggccagttgccgggcggaaaggtcaacggcctgatcgccaagctgcgttatgcggtaccgggcgtgaccctgatctcgccaccgccacaccatgacatttactcgatcgaagatctggcccagctgatctacgacctcaagcaggtcaacccgcaggcgctggtatcggtcaagctggtagccgaagcgggcgtgggcaccatcgccgcaggtgtggccaaggcctatgccgacctgatcaccatctccggttacgacggtggtaccggtgcttcgccgctgacctcgatcaaatacgccggcgccccttgggagcttggccttgcggaaacccaccagaccctgcgcggcaatgacctgcgtggcaaggtacgggtgcagaccgacggcggcctgaaaaccggcctggacgttatcaaggcggccatcctcggcgccgaaagcttcggctttggtaccgcgccaatgattgccctgggctgcaagtacctgcgcatctgccacctgaacaactgcgccaccggcgtggccacccagaacgacaagctgcgcaaggaccactacatcggcaccgtcgacatggtgatcaacttcttcacctttgtcgccgaagaaacccgcgagtggttggccaagctgggcgtgcgcagccttggcgagctgatcggccgtaccgacctgctcgaagtgctgccaggtgacaccgaacgccagcagtacctggacctgtcgccgctgctgggcagctcgcacattcctgcggacaaaccgcagttctgcgaagtcgacaagaacccgccgttcgacctgggcgagttggccgagaagatggttgatatggccatgccggccatccgcgaccaggcgggtggcgagttcagcctcgacatctgcaactgcgaccgctccattggtgcgcgtgtgtcgggcgaaatcgcccgcctgcacggcaaccagggcatggccgcggcgccgatcaccttccgcttcaaggggactgcgggccagagctttggtgtgtggaacgccggtggcctgaacctgcacctggaaggcgacgccaacgattacgtcggcaaaggcatgaccggtggcaaggtcaccatcgtgccgccagccggcagcccgttcgaaacccagcacagcgccatcgtcggcaacacctgcctgtacggtgccactggcggcaagctgtttgccgcaggtactgcgggcgagcgcttcgctgtacgtaactccggcgcccatgctgttgtcgagggcactggcgatcactgctgtgaatacatgaccggcggctttgtctgcgttctgggcaagaccggttacaacttcggttctggcatgactggcggctttgcctacgtgctcgacatggacaatagcttcgtcgacaagctcaaccacgagctggtggaaatccagcgtatcagtggcgaagcgatggaggcctaccgtagccacctggcgcgtgtccttgccgagtatgtggatgagaccggcagcgagtgggggcgtgagctctcggagaacctggacgactacgtgcggcgcttctggctggtcaagccgaaggcagccaacctgaagcagctgttgtccagcacc

SEQ ID NO: 31459 - DNA, 2319 bp, Pseudomonas putida
ttgcagatccccctcagggtgtacagcagcgatggcaagctgattgccgaattcggcgaaatgcgccgctcgccgatccgcttcgcggaaattcccccacaattcattcaggcgctgctgtcagccgaggacgacaatttcctcaaccactacggcgtcgaccccagcagcctgatgcgcgcagcaacccagctggtgaaaaccggtcatatccagaccggcggcagcaccatcaccatgcaggtggcgaagaacttcttcctcaccagcgagcgcagcttctcacgcaagaccaacgaaatcctgctggccctgcaaatcgagcgtgagctgaccaaggacgaaatccttgagctgtacgtgaacaagatctacctgggcaaccgcgcctacggtatcgatgcagcagcacaggtgtattacggcaagtccatccgtgacgtgagcctggcgcagatggcgatgatcgccggcctgcccaaggcaccgtcgcgcttcaacccgctggccaacccggtgcgcgccaaagagcgccgcgactggatcctcgggcgcatgtacaagctgggcaagatcgaccaggccagctacgaggccgccctggccgagccgctcaacgccagctatcacgtgccgacgcctgaggtgaatgccccctacatcgccgaaatggcccgcgcggaaatggtcggccgttacggcagcgacgcctacaccgaaggcttccgcgtcacgaccaccgtgcctagcgacatgcaggaaatggccaacaaggccgtcctcaagggcctctccgattacgatgagcgccacggctaccgtggccctgaagcacgcttcccgggccgcacccaggcagcgtggctgcaggagctgggcaagcaacgcacccttggcggcctggagccagccattgtcacccaggtggaacacaccggcctcaaggtgctgacccgtgacggccaagaggcgcaggttgcctgggacaccatgaaatgggcgcgcccgttcatcaacaacaacgcccagggccgttcaccgcaatcaccggccgacgtggcccaggtcggtgacctggtgcgcctgcaacgccttgacgatggcacattgaagttcagtcaggtgcccgttgcgcagagtgccctggtcaccctcgacccgaacaacggcgccatccgcgccctggtcggcggtttctcgttcgaacagagcaactacaaccgcgccgtgcaggccaagcgccaaccgggctcgagtttcaaacccttcatctacagcgccgcgctggacagcggctacaccgcttccagcctggtcaacgatgcgccgatcgtgttcgttgacgagtcggtggacaaagtgtggcgaccgaagaacgataccaacaccttcctcggccctatccgcatgcgtgaggcgctgtacaagtcacgtaacctggtgtcgatccgcctgctgcaagccatgggcgtggaccgcaccatcgactacatcgccaagttcggcttcaacaagcaggacctgccgcgcaacctgtcgctggccctgggcaccgccaccctgaccccgatggaaatcgccaccggctggagcacctttgccaacggtgggtacaagatcaccccgtacctgatcgagcgcatcgagagccgcagcggcgagacactgttcaccgccaacccggcccgcgtaccgcaaggtgcccaagaccaggcgggcctggccgcccccgagcagccaatcagcactgcggccatgccaggcgaggcaccttctgccttcagtcaggtggccgcggcatcgcaagcgccggcagtggccgaacagatcatcgacgggcgtaccacctacatcctcaccagcatgctgcaggacgtgatcaagcgcggcaccggccgccgggcgctggccttgggccgcaccgacctggcgggcaagacgggtacgaccaacgaatccaaggacgcctggttctccggttacaacgccgattacgtgactaccgtttgggtcggcttcgaccaaccggaaaccctcggccgccgcgaatatggcgggactgcggcactgccgatctggatgaacttcatgggcgcggcgctcaaggacaagcctgcgcatgccccggcagaaccggagggcattctcagcttgcgcgtcgacccggtcagcgggcgcgcggcatcgccgagcacaccgaatgcctacttcgagctgttcaaagccgaagattctccgccgtcggtggacgaactgggcaatggcgcggcaccgggcagcccgctgccagccgatgaagcgacgccgatggatctgttc

SEQ ID NO: 31460 - DNA, 213 bp, Pseudomonas putida
atgaaagaaggtatccacccgaactacgaagtagttgcagtcacctgcagctgcggtaacaagttcgaaactcgttcgaccctgggcaacgtcctgtcgatcgacgtttgcaacctgtgccacccgttctacaccggtaagcagaaagttctggacaccggtggtcgcgtacagaagttcgccgatcgcttcggcatgttcggtgccaagaag

SEQ ID NO: 31461 - DNA, 663 bp, Pseudomonas putida
atgagttaccagcaccagtacgtagacggcacgcgcattcacttccccttgggcaaggtggtgtgcatcggccgtaactatgccgagcatgccaaggaactggacaacccgatccccaccgagccgctgctgttcatcaagccaggcagctgcgtggtgccggccgaaggtggcttcaagatcccggccgagcgcgggtcggtgcactatgaggttgaaatcgccgtgctgctgggcaagccgctgtcgacccacccgagcgaggaagaggtgctggacgccatttccggttacgcaccggcgctggacctgaccctgcgcgacgtgcaggccaaactgaaggaaaaggggctgccctgggagctggccaagtgctttgacggcgcttgcgtgctgccaccgttcgtctcggccgccagcttcgaggacgtgacagacatcccggtgcgcctgaccgtgaacggcgaagtacgccaggatggtaatagcgcgatgatgctgaacccgatcgtgccgatgattcagtacatggcagcgcatttctcgctacaagcgggggatgtgatcctcaccggtaccccggccggcgtcgggccgttcaatgtcggtgacgagctggtgctggagctgccgggtgtgagccgcttcgaaagccgggtgctt

SEQ ID NO: 31462 - DNA, 684 bp, Pseudomonas putida
atgtccaccctagcagacaacctttccgcgatttccgcccgtatcgccagtgctgcccaggcagtcgggcgtgatccggccagcgtccagttgctggccgtgagcaagaccaagcccgccagcgctatccgcgagatccatgccgccggtgtgcacgacttcggggagaattacctacaggaagcactgacaaagcagcaggccctcagcgacttgcccttgatctggcacttcatcggccccattcagtcgaacaagaccaaagccatcgccgagcatttcgactgggtgcattccgtggaccgcctgaaaattgcccaacgcctgtcggaacagcgccctgcggggctggcgccgctgaacatctgcctgcaggtgaacgtcagcggcgaagacagtaaatccggctgcaccccagccgacctacccgcgttggccaaagccgtagccgcactgcccaacctgcgcctgcgcgggctgatggcaatcccggaacccaccgaagaccgcgccacccaggaggccgccttcgccagcctgcgcaagttgcaggaaggcctggggcttggcttggacaccctgtcgatgggcatgagccacgacctggaagcggccatcgcccagggcgcgacgtgggtacggattggcacggccctgttcggagcccgcgactacggcaacacc

SEQ ID NO: 31463 - DNA, 594 bp, Pseudomonas putida
atgatgaatttccagcaactcgtattggccagccacaatgccggcaaactgaaggaactccaggccatgctcggccattccgtgcagctgcactcgattggtgagttcagccaggtggagccggaagaaaccggcctgtcgtttgtcgagaacgccatcctcaaggcgcgcaacgccgcccgcatttccggcctgccggccttggccgatgactctggactggcggtggacttcctcggtggcgcgccgggcatctactcggcgcgctatgccgatggcaaaggtgacgcggcaaacaacgccaagctgctcgaagccttgaaagacgtgcctgaagctgagcgcagtgcacagttcgtctgcgttctggcgctggtgcgccacgccgacgacccgttgccgatcctgtgcgaaggcctgtggcacgggcgcatcctgttcgaggccagcggcgaccagggctttggctacgatccgctgttctgggtaccggagcgcaactgctccagcgccgatctagccccagcagacaagaaccagctcagccaccgcgcccgtgccatggccctgctgcgcaaacgtctgggcctggca

SEQ ID NO: 31464 - DNA, 705 bp, Pseudomonas putida
atgggccgcagcaaaggcaggggtggaatgaacatcagggagtggccggcggaagaacggcctagggagaagttgttgcagcgaggggcagggagcctgacagatacggagctgctggccgtttttctcggctcaggcgtacgtgggtgtaatgtcgtggagctttctcgaggcttgttggtgaagttcggcagcttgcgccggttgctggaggccgaccgcgaggccttcgtcggcgagcttgggttgggcccggtgaggtacagccagctgcaggcactgcttgagataggccgcaggcaccttgcaacgtcgattgagcgggagtctgccatggacagcccggcagcggtgcgacgctacttgaaagccatgctcaggcatgaggccagcgaggtgttcgggtgtctgtttctcgataccaagcaccggccactggcattcgagatcctgttcaggggcacgatagatcgggcgagtgtctatccgcgagaggtggtgcggcgggcgctggtgcacaacgctgcggcattgatcctgtgccacaaccatccttcagggatcagtgaaccgagtcaggacgatgtgcatttgacgctgtcgttgaagcgggggctggcgttgattgatgtgcgggtgctggatcacatcatcattggtgatggggagccgttgtcgatggtcgagcatgggtggattgtggtc

SEQ ID NO: 31465 - DNA, 708 bp, Pseudomonas putida
atgctgtcaacgcttatccgtcgcctctcccgcgccctgctctggttcgttgccggcagcatcgtgctggtgctggtgttccgctgggtaccaccgcccggcacggcgctgatggtcgagcgcaaggtacagtcatgggtgaatggtgaaccgatcgacctgcagcgcgactgggagccatgggagaacatctccgatgagctcaaggttgcagtcattgctggcgaggaccagaagttcgccagccactggggcttcgacctcccggccattcaggcggcgctggcccacaacgagcgtggcggcaacattcgcggcgccagcaccctgacccaacaagtggccaagaacctgtttctgtggtcaggccgcagctggtttcgcaaggggctggaggcctggttcaccgcactgatcgagctgttctggtcgaaggaacggattctcgaggtctatttgaacagcgccgagtggggcaagggcgtgtttggtgcccaggcagcggcgcgttatcactttggcgtcgacgccagccggctcagccgccagcaggcagcgcagctggcagcggtgctgccaagcccaatcaagtggagtgccagccgaccgagtgcctacgtggccagccgggccggctggattcgccggcagatgagccagctgggcgggcccagctacctgatgcagctggactcctccagaaagctt

SEQ ID NO: 31466 - DNA, 1482 bp, Pseudomonas putida
atgtttggttccaacgacgacaaaaaagcgccggccgaggctggtgagaagaaaggcctgttcagctggtttcgcaagaagccgcagccacctgcgggagcgggcgtgcccgcgcatgaaccccccgctgtcgagcagtctgcagccgctccggtcgagggatctgccgccgaagcgccacaggcccccgaacccgttcaggccgttgcggccccacagctggctgagccgcagccggtcgccgcacccccccggcctccggtagtcgaggcccccgtccctgaaccggttgcgtcgcagccgttgcaggcgcctgagccagagccggtcgcatcccagccgctggtggcacctgccccgcagccggttgcgtccatgcccttgcaggcggcccctgtggagtctgcccctgtcgaggccgcagcgccggtcagcaacctggtgctgccggttgccgaagagcccgtggccctggtgccggacctggagccgaaggcaccgcccgcaatcccggaacgcgcggcaccagcccctgttgctgcacccgtcgaacaggccaagcccggcttcttcgcgcgcctcaagcaaggcctgtccaagaccagtgccagcatcggcgagggcatggccagcctgttcctcggcaagaaggtcatcgacgacgacctgctcgacgaaatcgagacgcgcctgctgactgccgacgtgggtgtggaggctacctcggccattgtccagaacctgacccagaaggtcgcgcgcaagcagttggccgatgccgatgccctgtacaaatcgttgcaggaagaactggctgcgctgctgcgcccggtcgagcagccgctgaacgtacaggcccagaacaaaccctatgtgatccttgtggttggcgtgaacggcgccggcaagaccaccaccattggcaaactggcgaaaaagctgcaactggaaggcaagaaggtcatgctggctgccggtgataccttccgcgcagcggcggtcgagcagttgcaggtgtggggcgagcgtaaccagattccggtgatcgcccagcacacgggcgccgactctgcttcggtaatcttcgatgccgtgcaggccgccaaggcgcgtggcgtcgacgtgctgatcgccgacactgccggccgcctgcacaccaaagacaacctgatggaagagctgaagaaggttcgccgggtcatcggcaagctcgacgttgaggcgccgcacgaggtgctgctggtgcttgacgccggcaccggccagaacgccatcagtcaggccaagtacttcaaccagagcgtcgagctgaccggcctggccctgaccaagctggacggcactgccaagggcggggtgatcttcgccctggccaagcagttcaacatcccgatccgtttcatcggcgtcggtgaaggcatcgacgacctgcgtaccttcgaagccgagccgttcgtcaaggctctgttcgccgagcgagat

SEQ ID NO: 31467 - DNA, 1353 bp, Pseudomonas putida
atgaatgctctagcccgccgcgccgctggcctgttgctcggcacgctttgcctgccgctcgcggccttcgccgccgatgtgcaacccacccacgaattcatcctcgacaatggcctgaaggtcgtggtccgcgaagaccatcgtgccccggtggtggtctcgcagatctggtacaaggtcggctccagctacgagaccccgggccagaccggcttgtcccatgcgctggaacacatgatgttcaagggcagcgccaaggtcggccccggcgaggcctcgcgcattctgcgtgacctcggcgccgatgaaaacgccttcaccagcgacgattacaccgcctattaccaagtgctggcccgcgaccgcctgccggtagccctggaactggaggccgaccgccttgccagcctgcgcctgcctgccgacgagttcagccgcgaaatcgaggtcatcaaggaagaacgccgcctgcgcaccgacgaccagcccaatgccaaggcattcgagctgttccgcgccatggcctatccggccagcggctaccacacgccgaccattggctggatggccgacctggagcgcatgaaggtcgaggaactgcgccactggtacgagtcctggtacgcccccaacaacgccaccctggtggtggtcggtgatgtcaccgccgacgaggtcaagggcctggcgcagaagtatttcggcaatattcccaagcgcgccgtaccgccagccaagctgcctctggagctggctgaaccaggttggcgccagttgaccctgcacgtacgcacccagctgccaagcctgatctacggcttcaacgtgcccggtctgcccaccgccaaggaccctcggacggtacatgccctgcgcctgatctcggcactgctcgacggcggctacagcgcccgcatgccggcccgcctggagcgtggccaggaactggtggccggcgcgtcgtccagctacaacgccttcacccgcggcgacagcctgttcctgatctcggcgacgccgaatgtgcagaagcagaaaaccctcgccgacgtcgagaaaggcatctggcagctgcttgaagaactcaagagcacgccgcccagcgccgaagagctggaacgcgtacgcgcccaggtcatcgccggcctggtctacgaccgcgactccatcagcagccaggccaccaccatcggccagctggaaaccgtcggcctgtcctggaagctgatcgacagcgaactggacgagctcaagcgcgtcaccccgcaggacatccagaacgccgcgcgcacctacttcacccgcgaacgcctgagcgttgcccatgtactgcccgaggagtccgcccatgag

SEQ ID NO: 31468 - DNA, 861 bp, Pseudomonas putida
atggtgcacagcatgaccgcttttgctcgtgtcgagcgcgccggcagccaaggcaccctggtctgggagctgcgttcggtcaaccaccgttatctggagccgcacctgcgcctgcccgaagccctgcgcgacctcgaaggcggtgtacgtgaaggcctgcgccagggcctgtcacgcggcaaggtggaatgcaccttgcgcctcaacgaagacagcaatggcaaaccgctgaaagtggaccatgagcgcgccgcgcaactggttgccgccgccgaggaagtggctggcctgatcaagcagccggcccccctgaacccgctggaagtgctgtcatggccaggcgtgctggtggccgacaccagcgacccccaggcactgaacgccgaagccatggcgctgttcgacgaagcgctggccgaactcaaggccgggcgccagcgcgaaggccaggaactggcccggctgatcaacgaacgcctggacaacatggccagcgaagtcactaccctgcgcgccctggtgccgcagatgctggcggcgcagcggcagaagattctcgaccgcttcggcgacatgcaagccgagctggacccacagcgcctggagcaggagatggtactgctggcccagaaaagcgacgtggcagaggaactcgaccgcctcagcacccacgtcaccgaagtgcgccgcgtgctcaagggtggcggcgccgctggccggcgcctggacttcctgatgcaggaactcaaccgcgaggccaacaccctcggctccaaggccttcgacccacgcagcacgcaagcggcggtcaacctgaaggtattgatcgaacagatgcgtgaacaagtacagaacatcgag

SEQ ID NO: 31469 - DNA, 2106 bp, Pseudomonas putida
atgccgggtatagaagccttggccgaacggctttcgacctatcttggccccgaacaggtcaacctggttcggcgtgcctatttctacgccgaacaggcccacgatgggcaacgccgccgcagtggcgagccctacgtgacccacccgctggccgtggccagcatcctcgccgacatgcacatggaccatcagagcctgatggcggccatgctgcacgatgtgatcgaagacaccggcatcgccaaggaagccctcagccagcagtttggcgagaccgtggccgaattggtcgatggggtcagcaagctgacccagatgaatttcgagaccaaggccgaggcgcaggcggaaaacttccagaagatggccatggccatggcccgcgatatccgcgtgatcctggtcaagctggccgaccgcctgcacaacatgcgcaccctggaagtgctgtctggcgaaaagcgccggcgcattgccaaggaaaccctcgagatctacgcccccatcgcaaaccgcctggggatgcacaccgtgcgcgtagagttcgaagaccttggcttcaaggccatgcacccgatgcgctcgtcgctgattcatcgtgcagtgaagagcgcgcgcggcaaccgcaaagagatcgtcgccaagatcgagcactcgctggccaactgcctggccgccgacggcatcgagggcgaagtcagcggtcggcagaaacacctctatggcatctacaagaagatgcgcggcaagcgccgtgccttcaacgagatcatggacgtgtatgccttccgcatcatcgtcgacaaggttgacacctgttaccgcgtgctcggcgccgtacacaacctgtacaagccgctgcccggacgcttcaaggattacatcgcgatccccaaggccaacggctaccagtcgttgcacaccaccctgttcggcatgcacggcgtgcccatcgaaatccagattcgcacccgcgaaatggaagagatggccaacaacggcatcgccgcgcactggctgtacaagtcaaacgacgacgagcagcccaagggcagccacgcgcgcgcccgccagtgggtcaagggtatccttgaactgcagcaacgtgccggcaactccctggaattcatcgagagcgtgaagatcgacctgttcccggacgaggtctacgtgttcacgcccaaaggccggatcatggagttgcccaaaggctccacggccgtcgacttcgcctacgcggtccacaccgacgtcggcaacagttgcatcgcttgccgcatcaaccgccgcctggcgccgctgtccgaaccgctacaaagcggctcgacagtggaaatcgtcagcgccccgggcgctcggccaaacccggcatggctcaactttgtggtctcgggcaaggcacgcacgaatatccgccacgcgctcaagcaacagcgccgctcggagtccatcagcctgggcgagcgcctgctgaacaaggtactcactggcttcgacagcagcctggagaaaatcccccaggaacgcatccagtctattctcgccgagtaccgcctggagctcatagaagacctgctcgaagacatcggcctgggcaaccgcatggcctacgtggtcgcgcgccgcctgctgtcggccgaaggcgaacagctgccggcgccagaaggcccactggcgatccgcggcaccgaaggcctggtgctcagctacgccaagtgctgcacgccgatcccgggtgacccgattgtcggccacctgtcggccggcaagggcatggtcgtgcacctggagaactgccgcaacatcagtgaaatccgccacaaccccgaaaagtgcgtgcaactctcctgggccaaggacatcactggcgagttcaatgtcgaactgcgtgtcgaactggaacaccagcgcgggctgatcgccctgctggccagcagcgtcaacgccgccgacggcaacattgagaagatcagcatggacgaacgcgacggccgtatcagcgtggtccaactggtggtcagcgtgcacgaccgcgtgcacctggcgcgtgtgatcaagaagctgcgtaccctgaccggtgtggtccgcatcacccgcatgcgtacg

SEQ ID NO: 31470 - DNA, 1833 bp, Pseudomonas putida
atgtgtggaatcgttggtgctgtcgccgagcgtaatatcacagccatcctgatcgaaggccttaagcgtcttgaataccgcggttacgacagcgccggtttggctgtactcacccagaacggtgaactgcagcgccgccgccgcatcggcaaggtcagcgagctggaggttgctgttgctgatgacccattggcaggccagctgggtattgcccacacccgctgggctactcacggcgcgccgactgaaggcaacgcccacccgcacttctcgggcaatgatgtggccgtggtgcacaacggcatcatcgagaaccatgaggagctgcgcgaagagctgaagggcctgggctatgtcttcacttcgcagaccgataccgaagtcatcgtccacctgatccaccacaccctgaagagcattccagacctgaccgacgcccttaaggcggcggtgaagcgcctgcacggcgcttacggcctggcgctgatcagtgccaagcagccggaccgcctggtggcagcacgcagtggtagcccgctggttatcggcctgggccttggcgagaacttcctggcgtccgaccagctggcgctgcgtcaggttactgaccgcttcatgtacctggaagaaggcgacatcgctgaaatccgccgtgatcaggtctctatctgggaccagcagggcaacaaggtccagcgcgaaaccgtgcagtaccacgaaggtgccgaggctgccgacaagggcgcttaccgtcacttcatgctcaaggaaattcacgagcagccaagcgttgttcagcgcacgcttgaaggccgcctgggcaaggacaacgtgctggtccaggcctttggcccgcaagctgccgacctgtttgccaaggtgcgcaacgtgcagatcgttgcctgtggcaccagctaccacgccggtatggttgcgcgctactggctggaaagcctggccggcatcccttgccaggtagaagtggccagcgagttccgttaccgcaaggtggtggtgcagccggacactctgttcgtctccatctcgcagtccggcgaaaccgccgataccttggccgcactgcgcaacgccaaggagttgggtttccttggcagcctggcgatctgcaacgtgggtatcagctcgctggtacgcgagtcggacttgaccctgctgaccttggccggccctgaaatcggcgtggcttcgaccaaagcgttcaccactcagctggtttcgctgatgctgctgaccctggcccttggtcaggtgcgcggtacgctggaagccggtgtcgaagctgagctggttgaagagctgcgtcgactgcctacccgcctgggcgaagccctggccatggatgccaccgtcgagaaaattgccgagctgttcgccgacaagcaccataccctgttcctcggccgcggcgcgcagtacccggtggcgatggaaggtgctctcaagcttaaagaaatctcctacatccacgccgaagcatacccagcaggcgagctgaagcacggcccgctggctctggtggacaacgacatgccggtggttaccgttgcaccgaacaacgaactgctggagaagctgaagtccaacctgcaggaagtgcgtgcccgtggtggcgagctggtcgtgttcgccgacgagcacgctggcatgaccaatggcgaaggcacccacgtgatcaaggtgccgcacattgccgatgccctggcgccaatcctgtacaccattccgctgcagttgctgtcttattacgtggccgtgctaaaggggaccgacgttgaccagcctcgtaatctggccaagtcggtgactgtcgag

SEQ ID NO: 31471 - DNA, 1365 bp, Pseudomonas putida
atgcacaaagaaaccgaactgaagctccgcgccagccgcgagacccttgccgccctgcgcgagcaccctctgctgaaaaagcgcaacaagtccggctggcagacccgtgaactgctcaaccagtacttcgacacccccgagcgtgagctgtccgccgcccgtgtcgccctgcgcctgcgccgcgatggcgacgctgtcattcaaaccctcaagtgccgcggccagagcgtggccggcctgtccgaacgcaacgagtacgaatggaacctggacaaggtcaagctcgacctgaagaagctggacgccacctgctggcccgagcaactggccaacctggacaagaaaaccatcaagccgctgttcaccaccgacttcagccgtgaatacgctgaaatcgcctggggccgtggcaagagcaaggtggtgatcgaggctgcactggaccaaggcttcgtgatcgccggcaagcgcaaggaagagatctgcgagctggagctggagctgcgtgaaggtgaaccgcaagcactgctggaactggctgcagaactggccgccagcctgccactgatgccgtgcgacatcagcaaggctgagcgcggttaccgcctgctggaaccggacagctacgagctggacctgccgcacaccgcgctggacgccgaaatggccctggacgacgcctatgccgccctcgcctggcagctgctgggcagcagccagcgcctggccgagcagtaccgccacaacggccactggcgcctgctccaggactgggtcgagtgcctgagcgagctgcgcgcgctcaccgccagcctgggccaggcagcaccgcgcgccaccacccgcgacctgcgcgccagccttgatgccttgcttgaggactggcgcccgctggtgcaggccggcaacgatgacgaagacatccgtcgcgccgcgcccgagcagtttgccgaagagctggaagacgtacgctggggccagttctcgctggaaacctcacgctggctgatggcccggacctggaccgcagagcgcaagggccgcggcgaacgccagggcaaggcgcaactggccagctggctggggcacctgctgggcgaggaaggccgcgcgctgaagctgccgctgtacacccagcgcccggaagacctggccgagcagctgccacgtatcgagcaacttctggcctggctgcaccacgcccgccaggtgctggaagcgccgcaaatggaccgcttgtacggcgacctgaaaaagctgcacgagctggccgagcagcccatcagcgatgaagtgctggaagcgcgtatcgaacaggctcgggcggtggaccagagccgcggctggaagcacctgctcaaggcg

SEQ ID NO: 31472 - DNA, 729 bp, Pseudomonas putida
atgatgaaaacgcgctctaacatggcgcgctacggtggcagcctggcgatcgtgctgggtgtgcacgtggtcgccgtgctgctgacgctcaactggtcggtgccacaggccatcgagctgcccccggcagcgatgatggtcgaactggcaccgttgccggagcctgcgccaccaccacccccaaaggcagctccgcagccaccggccccggtcgaggaaccaccgttgccgaagctggcagaagcgcccaagcccaagatcgccatccccaagccgcccaagccgaaggccaagccccagccgcccaagcccgagaaaaagcctgagccgccgaaggaagcaccgcccaccgagcaaacggtggacgcaccgcccagcaactcgccaccgcagaagtccgcggcaccggcaccgagcattgcgtccaacagcaacgccttgccaacctggcagagcgacctgctgcgccaccttgccaagtacaagcgttacccggaagacgcgcgccgtcgcggcctgcaaggcatgaaccgcctacgcttcgtggtcgacgccgaaggcaaggtcgtgtcgtactccatggccggtggctcaggcagtgccgcactggaccgggcgaccctggaaatgatccgtcgggccggcacggtacccaagccgccacccgagttgctgaacaatggcacgattgaagtcgtggcaccgttcgtctactcactggaccgccgc

SEQ ID NO: 31473 - DNA, 789 bp, Pseudomonas putida
atggctaaggtattcgcaatcgcgaaccagaaaggtggtgtgggcaagacaaccacctgtatcaatctcgccgcctcgctggctgcgaccaagcgtcgtgtcctgctgatcgacctcgatccgcagggcaacgccaccatgggcagcggtgtggacaagcacgagctcgagcattcggtctacgacctgctcatcggggagtgcgacttggcccaggctatgcactactccgagcacggaggcttccagttgctgccggccaaccgtgacctgaccgccgctgaggtggtgctgctggaaatgcaggtcaaggaaagccgtctgcgcaacgccctggcgcctattcgcgataactacgactacatcctcatcgactgcccgccgtcgctgtcgatgctcacgctgaatgctctggtcgcttccgatggcgtgattatccccatgcagtgtgagtactacgcactggaaggtctcagcgaccttgtggataacatcaagcgtatcgccgcccggttgaacccggagttgaagatcgagggcctgctgcggaccatgtacgatccgcgtctgagcctgaacaacgatgtttcggcacagttgaaggagcactttggccctcagctgtacgacacggtcattccgcgcaacattcgcttggccgaggcccccagcttcggcatgccagcccttgcttacgacaagcaatcgcggggcgcgctggcgtacctggccctggctggggaactggtacgccgtcaacgccgtccatcacgcactgcacaaacaact

SEQ ID NO: 31474 - DNA, 1671 bp, Pseudomonas putida
atgcacacccccgacaaccccgcactcgacctcaagcgcgtgctccaggccctgctcgctgaccagcacctgcacgccagcgataccctgcaagtactcgaacacgccgctgcccaccccgctagccacccgctggagcacatcgccgcctgcagcctggaaagccgccagcaccccggccagcccctggacttggagcacctttgccagtggctggccgacaaggtcggccaaccctacctgcgcatcgaccccatgcaactcgacctgccccaggtcaccagcctgatctccccagccttcgcccagcgccacggcatcctcatcgtcgcggccgatgcctccagcgtcaccgtcgccagcgcccagcctttccaggatgactggcaggccgacctggcccgcagcctcggccggtcgatccgtcgcgtactggccagcccgcagcagatccgtcagtcagcgcagtcgttccaccgcctggcccagtcggtaaaaggcgcgcaataccagcagtcggcgagcctgggggaacttgagcaattgcttgagctgggcaaacgccaggccgaggccagcgcagacgacgcgcatatcgtgcatatcgtcgactggctgttgcagtacgccatcgagcaacgcgccagcgatatccacctggaaccacgccgcgaacagggccagctgcgctaccgtatcgatggcctgctgcacaccgtctacgccttccccgccggggtcaccctggccctcgtcagccgcctgaaacacctgggccgcatggacgttgcagagaagcgccggccgcaggacggccggctgcaaagccgcctacccggtggtggcgaagtggagctgcggctttcgaccctgcccaccccatttggcgagaaactggtgttgcgcctgttcgacccgcaccagttgcaagagggcttcgaccgccttggcctgcacggccagcaactggcccaatggcagcgcctgcttcgtcagcgccaaggcatcatcctggtcaccggccccaccggctccggcaagaccagcacgctgtacaccagcctcaaactgctggccacaccacaggtcaacctgtgcaccatcgaagacccgatcgagcgcctggagccagccttcaaccagttgcaggtgcagcccgcgctggacctggggtttgccaacgcggtcagggccatgctgcgccaagaccccgacatcatcatgatcggcgaaatccgcgaccgcgaaaccgctctggtggcggtgcaggcagcgctgaccgggcacctggtgctatcgaccctgcataccaacgacgcctgcgcagcaatcacccgtttgcaagagctgggtgtggccgactacctgatcaaggcgacgcttatcggggtgatggcccagcgcctggtgcgaaccgtctgcaccgactgccagacaggttcatcagccacctgccgagcctgccgcggcaccggttttcaggggcgcacgggattattcgaactgctcgagcccagcgacaccttgcgcgcattgatcggccctgatgccgacctgacctgtttgcggcgccaggcgctggccgatggcctggttgacctgcgccgttgcggcgaggccaaggtggccgctgggcagacccgtgccgaggaagtgctgcgcgtctgcaac

SEQ ID NO: 31475 - DNA, 648 bp, Pseudomonas putida
ttgagttccctggtcacccctcaacacgctgaagagttgtccacaggtgcgcgccagcttggtgtcgagctgactgccgagcagcacgagaagctgcttggctacctggctctgttgatcaaatggaacaaagcctacaacctgactgctgtgcgcgacccggacgagatggtttcgcgtcacctgctcgacagccttagcgtcatgtcttttatccacaacgatcgtgataactggctggatgttggcagcggcggtggcatgcccggcatcccgctggctatcctgcatccacacaagcgcgtcaccgtgctggacgccaatggcaagaagacccgtttcctgactcaggtgaaaatggaactcaagctggacaacctcacggttatccacagccgggtcgaggccttccagccggcacaaccgttcgacggaatcatctcccgcgccttcagcagcatggagaacttcaccaactggacccgccacttgggcgacaccgggacgcaatggcttgcaatgaaggggctgcatcctgccgatgaactggtagcattgcccgcagacttcacagtggaaagcgaacaggccctgaccgttccgggttgccagggccagcgccatctgctgatactgcgccgcaaggca

SEQ ID NO: 31476 - DNA, 372 bp, Pseudomonas putida
atgaagttccgctttcttctctgggccatggggctgttgatggccagggccagccgtaataaccccgcattccagcagcagctcaagggcaaggacctggtgttccagatgcagaccctggacggcaaggtcgcccggcacttcatcgtcaacaacgagcgcatcagcagcaagggcggcgcgcacccacagccggcattcgccattgccttcaaggacgccgcctatggcttcgccaccatgcaggcgggtaacaagcagctggcgttcatgcaagggattcaggacaagcacatccagatcaagggcaacccggcgctggtgatgtggttccaggggttgatgaaatacctgaaaccaaagaagaaaggc

SEQ ID NO: 31477 - DNA, 249 bp, Pseudomonas putida
atgtccctgatcatcaccgacgattgcatcaattgcgacgtctgcgaacccgagtgcccgaacgaggctatctcccaaggcgaagagatctacgtgatcgaccctaacctgtgcacccagtgcgtaggccattacgatgagccgcagtgccagcaggtctgcccggtcgactgcatcccgctggatgaagcgcatccggaaaccgaagaacagctgatggccaagtatcgccggatcactggcaagggc

SEQ ID NO: 31478 - DNA, 810 bp, Pseudomonas putida
atgccggaattgccagaagtagaaaccacccgacgcggtattgcgccacacctggaaggccagcgggtcagccgtgtggtggttcgcgaccggcggctgcgctggccgattccggaagacctcgatgtgcgtctgtcagggcagcgcatcgtcagcgtggagcgacgcgccaagtacctgttgatcaatgccgaagtgggtacgctgatcagccacttgggcatgtcgggcaacctgcggctggtcgagctgggcttgccggcggccaagcatgagcatgtcgacatcgagctggagtccgggctgatgctgcgttacaccgaccctcgccgctttggtgccatgctgtggagcctggaccctctgaaccatgagttactgctgcgcctggggcctgagccgctgaccgacctgttcgatggtgaacggctgttccagctgtcccgcgggcggtcgatggcggtcaagccgttcatcatggacaacgcggtggtggtaggggtgggcaacatctacgccaccgaggcgttgtttgccgccggtatcgacccacgccgagaggcgggcgggatttcccgggcgcgctacctgaaactggcgatcgagatcaaacgggtgctggcggcggccatcgagcagggcggtaccaccctgcgcgactttatcggtggcgacgggcagccggggtacttccagcaggaactgtttgtgtacgggcgtggcgggcagccgtgcaaggtatgcggcactgagttgcgcgaagtgaagctggggcagagggcgagcgtgtactgcccgcgctgccaacga

SEQ ID NO: 31479 - DNA, 1194 bp, Pseudomonas putida
atgtccctgcccagccttcgcctcaaagccaatgccgaccgccgcctgcgcgccggccacctgtgggtctacagcaacgaagtcgatgtcagcgcgacccctttgcaaggcttccaggcgggccagcaggccattctcgaggcagccaacggcaagccgctgggcatcgtcgcgctgagtccgaacaacctgatctgcgcccgcctgctgtcacgcgacatcaagctgccgctggacaagtcgctgctggtacaccgcctgaacgtcgccctgtcgctgcgcgagcgcctgttcgagcagccgtgctaccgcctggtctacggtgactccgacctgctcccaggcctggtggtcgaccgtttcttcgatatcctcgtggtgcagttggcctcggccaccatggaagcgcacaaggatgacgtgatcgccgcactggtgcaggtgctcaagcccagcggcatcctgttcaagaacgattcggccgcgcgcgacgccgaaggcctgcagcgctatgtcgagaccgtctacggcgaagtgccggactgggtgccgctggaagagaacggcgtcaagttcgaagctccggtgcgcgaaggccagaagacgggctggttctacgaccaccgcatgaaccgcgcccgcctggcaccgtacgtgaagggcaagcgtgtactcgacctgttcagctacatcggcggctggggcgtgcaggccggtgccttcggcgccagcgaagtgttctgcgtcgatgcctcgggctttgccctggacggcgtggagcgtaacgctgcactgaacggcatcagcgagaagctgacctgcatcgaaggcgacgtgttcgaagccctgcgagagctcaaggcggccgaagaacgcttcgacgtgatcattgccgacccacctgccttcatcaagcgcaagaaggacctgaaaaacggcgaagcggcctaccgccgcctgaacgaacaggccatgcgcatgttgaacaaagacggcatcctcgtcagcgcctcgtgctcgatgcacctgcccgaggacgacctgaacaacatcctgctgaccagtgcccgccacctggaccgcaacatgcagctgctcgagcgaggcggtcagggcccggatcacccggtacacccggccatcgccgaaacccgctacatcaaaagcatcacctgccggttactgccaaacagc

SEQ ID NO: 31480 - DNA, 1839 bp, Pseudomonas putida
atgcctgattatcgttccaagacttccacccaaggccgcaacatggccggcgcccgtgccctgtggcgcgccaccgggatgaaggacgaagacttcaagaaaccgatcatcgccatcgccaactcgttcacccagttcgtaccgggccatgtgcacctgaaggacctgggccagctggtggctcgcgaaatcgaacgcgccggtggcgtggccaaggaattcaacaccatcgcggtcgatgacggcatcgccatgggccacgacggcatgctgtactcgctgccaagccgcgaaatcattgccgacgccgtggaatacatggtcaatgcgcactgcgccgacgccatcgtctgtatctccaactgcgacaagatcacccccggcatgctgatggccgccctgcgcctgaacatcccggtgatcttcgtttccggcggcccgatggaagccggcaagaccaagctggccagccacggcctggacctggtcgatgccatggtcatcgcggccgactccacggcctccgacgagaaagtcgccgaatacgagcgcagcgcctgcccgacctgtggttcgtgctccggcatgttcaccgccaactcgatgaactgcctgaccgaagccctgggcctggccctgccgggcaacggttcgaccctggccacccactccgaccgcgagcagctgttcctcacggccggccgtaccatcgtcgagctgtgcaagcgctactacggcgagaatgacgagtcggtcctgccacgcagcatcgccaacttcaaagcgttcgaaaacgccatgatgctggacatcgccatgggcggctcgaccaacaccatcctgcacctgctggcagcagcacaggaaggcgaagtggcgttcgacctgcgcgacatcgaccgcctgtcacgcaaagtgccgcagctgtgcaaagtggcgccgaacatccagaagtaccacatggaagacgtccaccgcgccggcggcatcttcagcatcctcggttcgctggcccgtggcggcctgctgcacaccgacctgccgaccgtgcacagccgcagcatggaagaagccatcgccaaatgggacatcacccagaccgatgacgaagccgtgcacaccttcttcaaggctggccctgccggtatcccgacccagaccgcattcagccagtcgacccgttgggaaaccctcgacgacgaccgtgaaaacggctgtatccgcagctttgaacacgcctactcgcaagagggcggcctggccgtgctgtacggcaacatcgcactggatggctgcgtggtcaaaaccgccggtgtcgacgaatcgatccacgtgttcgagggcaccgcgaagatcttcgaaagccaggacagcgccgtgcgcggcatcctcgccgacgaggtgaaagccggcgacatcgtcatcatccgctacgaaggcccgaaaggcggcccgggcatgcaagaaatgctctacccgacctcgtacctcaagtccaaaggcctgggcaaggcctgcgccctgctcaccgacggtcgcttctcgggcggtacctcgggcctgtcgatcggccacgcctcgccagaggccgcggcgggcggcgccatcggcctggtgcgcgacggcgacaaggtactgatcgacatccctaaccgctcgatcaacctgctggtcagcgatgaagagctggcgcaacgccgtgtcgagcaggacaagaagggctggaagccagccgaggtccgtccacgcaaggtaaccaccgcgctcaaggcctatgccctgctggccaccagtgccgacaagggtgcggtgcgtaacaaggcaatgctggaaggcctc

SEQ ID NO: 31481 - DNA, 1296 bp, Pseudomonas putida
ttgtccggccctctggctgccaaggccggcctgttgatcaccggccgcaccctgaccccgcggcatgcccattacggtccattccgcgacgatgaagggctggtgctggacgaagggattgctctgttctttccagggcctaattcgttcactggcgaggacgtgcttgaactgcagggacacggtggccctgtggtcttggacatgctgctgcagcgctgtgtacaagtcggctgtcgtctggcccgcccgggcgagttcagcgagcgcgccttcctcaacgacaagctcgacctggcgcaggctgaagccatcgccgacctgatcgaggccagttccagccaggcagcgcgcaacgccctgcgctcgctgcaaggggaattctccaggcgtgtgcacagcctcaccgaggcgttgattgccttgcgtatttacgtcgaggcggcgatcgattttcctgaagaagagatcgacttcctcgccgatggccacgtgctgtcgatgcttgatgccgtgcgcagcgagttatccactgtgcagcgcgaggccgggcagggcgccttgctgcgtgacggcatgacggtagtcattgccggccggccgaatgccggtaaatcgagcttgctgaaccagctggctggtcgggaagctgccatcgtcactgacatcgccggcactacgcgggatatcctgcgcgaacatatccacatcgacggcatgccgctgcacgttgtcgatactgccggtttgcgcgataccgatgaccatgtggaaaagatcggcgtggaacgcgccctgaaggccattggcgaggcagaccgcgttctgctggtagtcgactctactgcgcccgaggccagcgacccgttcgctttgtggcctgagtttctggctcagcggcctgacccggccaaggtcacgctgattcgcaacaaggccgacctgagtggtgagcgggtagcgctggaacagtgcgatgacggccatgtgaccattaccctgagcgccaagggcgacgacacagggctgcaactgctccgcgaccatctgaaaggctgtatgggttatgagcagactgcagagagtggcttcagcgcccgccggcgccatctggatgccttgcgccaggccagcgagcacctggagcacggccgtgctcaattgaccttggcgggcgcgggagagcttctggctgaggacttacgccaggcacagcatgcgctgggggagatcacaggagcattcagctcggatgacctgcttgggcggattttctccagcttctgcatcggcaag

SEQ ID NO: 31482 - DNA, 495 bp, Pseudomonas putida
gtgcccgtatggctaccaagaacggccgtgctgttctgtcgcgtcgtcgtgccaaaggccgtaagcgtctggccatttgatttttcggcacaggtggtgagtcaggacttcagtcgggaaaagcgactgcttacaccccggcatttcaaagcggtcttcgactccccaaccggcaaggttccagggaaaaacctgctgatccttgctcgcgagaacggcctcgatcacccacgccttggcttggtaatcggcaagaagagtgtcaagctcgccgttcaacgcaaccgcctcaagcgcttgatgcgcgattcctttcgtctgaaccagcaattgcttgccggtctggacatcgtgatcgtcgcgcgcaagggattgggtgagatagaaaacccggaattgcaccaacattttggcaagctctggaaacgcctggcgcgcagccggccgacaccagcagtcaccgccaattccgcaggggtagacagccaagatgcg

SEQ ID NO: 31483 - DNA, 1080 bp, Pseudomonas putida
atgggacagcgcacgcttttgtatgacctgcacctggcgctaggcgccaagacggtcgatttcggtggctgggacatgcccctgcactatggctcgcaggtcgaggagcaccatcaggtgcgcagcgattgcggcgtcttcgatgtttctcatatgaccgtgatcgatgtcgacggcactgatgccacagtttggctgcagcgcctgctggccaacgacgtggcccgcctcgacgaccccggcaaggcgctgtatagcccgctgctgaacgaacagggcggggtgatcgatgatctgattgtctaccgcactgaaaccggctatcgcctggtcaccaatgccgccacccgtgccaaggtgctcgattggctgcaattgcaacgtgccggtttttccgtggacttccaggtccgccctgatctggccatccttgccatccaggggccgcgtgcccgcgaaaaggtggcggccctgctcagccccgcgcgcgctgcactcatccgcgaactgcgcccgttcgagggcgttgccgacggcgactggttcattgcccgcaccggctataccggtgaggacggcctggagatcatcttcccgggcgatcaggcggtggccttcttcaacgacctggtcggcgccggtatcgccccaagcggcctgggcgcccgcgataccctgcgcctggaagccggcatgaacctgtacggccaggacatcgacgaaaaccacaccccgctcacctccaacctgggctggagcatcgcctgggaaccggccgagcgcaacttcatcggccgtgtcggcctgcttgcggaaatcgagcacggcgtgcaggaaaagctggtgggtctggtgctggaagagcgcggtgtactgcgcgcccatcaggtcgtgcgtgtagccggcattggcgaaggggagatcaccagtggtagtttctcgcctacgctgagcaagtccattgcgttggcgcgtgtgcctatggctaccggggatcgggccgaggtggaaattcgcggcaagtggtacccggtgcgggtggtcaaaccgaccttcgtgcgccacggcaagattctgatc

SEQ ID NO: 31484 - DNA, 132 bp, Pseudomonas putida
atgaaacgtactttccaaccaagcaccatcaagcgcgcccgcacccacggtttccgtgcccgtatggctaccaagaacggccgtgctgttctgtcgcgtcgtcgtgccaaaggccgtaagcgtctggccatt

SEQ ID NO: 31485 - DNA, 1518 bp, Pseudomonas putida
gtgtcagtggaactttggcagcagtgcgtggagcttctgcgcgatgaactgcctgcccagcaattcaacacctggatccgtccgctacaggtcgaagccgaaggcgacgagttgcgcgtctatgcgcctaaccgtttcgttctcgattgggtcaatgaaaagtacctgggtcgcttgctcgagctgttgggtgagaacggtagcggcattgcaccagccctttccttattaataggtagccgtcgcagctcggccccaagggctgcgcccaacgcgccggtcagcgctgccgttgcggcttcgctggcgcagactcaggcacacaagacggccccggcagcagcggttgaacccgttgccgtggctgcagccgagcctgtactggtcgagacgtcttcgcgtgacagctttgatgccatggccgagcccgctgcggcgccgcccagtggtggtggccgggctgaacaacgcaccgtgcaggttgaaggtgcgctcaagcacaccagttacctgaaccggacctttacctttgacaccttcgtcgaaggtaagtcgaaccagctcgcccgcgcggctgcctggcaggttgcggacaaccctaagcatggctacaacccactgttcctttatggtggtgtgggtttgggtaaaacccaccttatgcatgctgtgggtaaccatctgctgaagaaaaatccgaacgccaaggtggtgtacctgcattcggagcgtttcgtcgcggacatggtcaaagcgctgcaactcaatgccatcaacgaattcaagcgcttctaccgctcggtggatgctttgctgatcgacgatatccagttcttcgctcgcaaagagcgctcgcaagaagagtttttccacaccttcaacgccttgctcgagggtggccagcaggtaatccttacctctgaccgctatcccaaggaaatcgaaggcctggaagagcgtctgaagtcgcgctttggttggggcctgacggtggctgtcgagccaccagagctagagacccgcgtagcgatcctgatgaagaaggccgaccaggccaaagtcgagctcccgcatgacgcagcctttttcatcgctcagcgcatccggtccaacgtccgtgagctggaaggtgcactgaagcgggttatcgctcactcgcacttcatggggcgtgacatcaccatcgagctgattcgtgaatcgctcaaggatctgttggcgctgcaagacaaactggtcagtgtggataacattcagcgtaccgtcgctgagtactacaagatcaagatctccgatctgttgtccaagcgtcgttcgcgttctgtcgcgcgcccgcgtcaggtagccatggccctgtccaaggagttgaccaaccacagtctgccggaaatcggcgacatgttcggtggtcgcgaccatacgaccgtgctgcacgcctgccgcaaaatcaatgaactgaaggaatccgacgcggacatccgcgaggactacaagaacctgctgcggacgctgacgacc

SEQ ID NO: 31486 - DNA, 2052 bp, Pseudomonas putida
atgagtgctcaagatttcctggtagaactgggcaccgaagagctgccacccaaggccctcgccagccttggcgacgccttcctggccggtatcgaaaaaggcctgcaggctgctggcctgaactacaccggcaagcaggtgtacgccgcgccgcgtcgtctggccgtgctgattcgccagctggacgtgcagcaacctgaccgcagcatcaacatcgacggcccgcccctgcaggctgccttcaacgccgaaggcgagccgacccaggctgcgctgggcttcgccaagaagtgcggtgtggaactggccgagatcgaccagagcggccccaagctgcgcttctcccagcacatcccgggcaaggctaccgttgggctgctgccgaccatcgtcgaagattcgctgaacgacctgccgattcccaagcgcatgcgctgggcggccagccgtgaagagttcgtgcgcccgacccaatggctggtgatgctgctgggcgatcaggtggtcgattgcaccatcctgtcgcagaaggccgggcgtgaatcccgtggccaccgcttccaccatccggaaaacgtgctcatcaccaccccggccaactacgtcgaagacctgcgcaaggcctacgtcctggccgacttcgccgagcgccgcgagctgatcagcaagcgtaccgcagagctggccatgcagcaggaaggcacggccatcgtgccaccggcgctgctggacgaagtgaccgctctggtcgagtggccggtgccgctggtgtgctcgttcgaggagcgtttcctcgaggtgccgcaagaagccctgatcaccaccatgcaggacaaccagaagtacttctgcctgctggacagcgaaggcaagctgctgccgcgcttcattaccgtggccaacgtcgaaagccgcgacccgaagcagatcgtgcaaggcaacgaaaaagtcgtgcgcccgcgcctgaccgacgccgagttcttcttcaagcaggacaagaagcagccactggaaaccttcaacgagcgcctcaagaacgtggtgttccaggctcagctcggcaccgtgtacgacaaggccgaacgtgtttccaggctggccgccttcattgctccgctgatcggcggcgacgcccagcgcgctggccgtgccggcctgctgtcgaagtgcgacctggccaccgagatggtcggcgaattccctgaaatgcagggtgttgccggttactactacgcgctcaacgacggtgagccggaagacgtagccctggccctgaacgagcagtacatgccgcgcggtgcaggcgccgagctgccgcagaccctgaccggtgctgccgtggccatcgccgacaagctcgacaccctggtgggtatctttggcatcggcatgctgcctaccggcagcaaggacccgtacgccctgcgccgtgctgctctgggcgtgctgcgtatcctgatcgagaagcaactggacctggacctgaccggcgcggttgagtttgcggtcaagcagttcggcgccaagatcaaggcccccggcctggccgagcaagtactggagttcattttcgaccgcctgcgcgcgcgttacgaagacgaaggcatcgacgtcgccacgtacctgtcggtacgcgcactgcagccaggctccgccctggacttcgaccagcgcgtacaagccgtgcaggcgttccgcaaactgccggaagccgaggccctggccgcggtgaacaagcgcgtgtcgaacctgctgagcaaggccgaaggagccatcgccgagcaggtcgagccgaagtacttcgacaatgccaacgagttctccctgtactcggccatccagcaggccgaccaggccgtgcaaccgatggctgcagcacgtcagtacagcgaatcgctggcccgcctggcggccctgcgtgacccggtcgatgccttcttcgaggcggtcatggtcaacgccgaagacgccaaggtacgtgccaaccgttatgccctgctcagccgtctgcgcggcctgttcctgggcgtggctgacatttcgctgctgggg

SEQ ID NO: 31487 - DNA, 1221 bp, Pseudomonas putida
atggaaatgcgcgcagatctgttgattgtcggtgccggtatggtgggcagcgccctggccttggcgttgcgccacagtggcctgcaaattttgttgctcgatggtggcccgctgacggtcgtacccttcgatgcccaggccccgttcgagccgcgtgtcagcgcgctatcggcggccagccagcgcatcctcgagcgccttggcgcctgggacggcattgcccagcggcgcgccacgccgtattccgacatgcatgtgtgggatggcagcggcaccgggcagattcacttctcggcggccagtgtgcatgcccaggtgctcggccatatcgtcgagaaccgggtggtgcaggacggcctgctggagcgcctgcacgacagcgacatcggcctgctggccaatgcgaggctggagcaattgcgtcgctcgggcgatgagtggctgctgaccctggcggatggccggcaactgcgggcaccgttggtgatcgctgccgacggtgccaattcggcggtgcggcgtctggccggctgcgaaacccgcgagtgggattacctgcaccatgccattgtcaccagcgtgcgttgcagcgccgggcaccaggccacggcctggcagcgcttcactgacgaaggtccgctggcgttcctgccgttgacccgcgatggccagcaggactggtgctcgatcgtctggtcgaccaccccggagcatgccgagcagttgatggcgatggatgaagcggccttcctgcaggccctggagcgggccttcgaagggcgtctgggcgaggtgcttcaggccgacccacgggtgtgcgtgccgctgcgccagcgacacgccaagcgctacgtggatgaaggcctggtcttgatcggtgatgctgcacacaccattcacccactggccgggcagggtgtgaacctcggcttcctcgacgcggcggtgctggctgaggtgctggtcaatgcttgcgagcgcggtgagaggctggccgatgtgaaggtgctgagccgttacgagcgccggcgtatgccacacaacctggcgttgatggcggcgatggagggcttcgagaggttgttccaggccgatccgctgccgttgcgctggttgcgcaacagcgggttgaagctggtggagcagatgccggaggccaaggcgctgtttgtgcgccaggcgttgggtttgagtggtgacctgccggatctggccaaggct

SEQ ID NO: 31488 - DNA, 1338 bp, Pseudomonas putida
atggacccttcctctggtattagcctcacctcgttattcgccgacttcggcatgatcatctttgccttcctgctggtgctgctcaacggcttcttcgttgctgcggagttcgccatggtcaagctgcgcgctacacgcgtagaggccatcgccgaaaagcacggctggcgtggcaacatcctgcgcaaggttcacaaccagctcgacgcctacctgtcggcctgccaattgggcatcaccctcgcctcgctgggcctgggctgggtgggtgagcccgccttcgcccacttgctggaaccattgctggcctatctcggcgtggacagcgccgagctggtcaaggcgatctcgttcttcgtcgccttcttcgtcatctcgtacctgcacatcgtggtcggcgaactggcccccaagtcctgggctatccgcaagccagagctgctgtcgctgtggaccgccgtgccgctttacctgttctactgggcgatgtacccggccatctacctgctcaatgccagcgccaacaccatcctgcgcattgccggccagggcgagcctggcccgcaccatgagcaccactacagccgcgaagaactcaagctgatcctgcactccagccgtggccaggacccaagcgaccaaggcatgcgcgtgctggcctcggccgtggaaatgggcgagctggaagtggtcgactgggccaactcgcgtgaggacatgatcagcatcgacgcccatgcgcctctgaagcagatcctggccctggtgcgccgccacaagttcagccgctacccggtgtacgacgccgagcgcgaagaattcaccggcctgctgcacatcaaggacctgctgctggagctggctgagctggagcacttgccagagaccatcgacctggaggaccttgcccggccactcgaacgcgtgtcgcggcacatgccgctggcacagttgctggagcagttccgtaagggcggcgcgcacttcgtgctggtcgaggaagccgatggcaaggtgatcggctacctgaccatggaagacgtgctggaagtgctggtaggcgacatccaggacgagcaccgcaagaccgagcgtggcattcttgcctaccagccgggcaagctgctggtgcgtggcgacaccccactgttcaaggtcgagcgcctgctgggtatcgaccttgaccacatcgaggccgaaaccctggccgggttgatctacgagacgctcaagcgcgtgcctgaagaagaggaagtgctggaggtcgaagggctgcgcatcatcatcaagaagatgaaaggccccaagatcgtactggccaaggtgctgaagctggat

SEQ ID NO: 31489 - DNA, 969 bp, Pseudomonas putida
atgaaacagtatctggacctggtccgcgacgtcattgataacggcacgttgcagggaaaccgcaccggcatccgcaccatcagcctgccgggcgcgatgctgcgtttcgacctgcagaagggctttccggccattaccacgcgcaagctggcgttcaagtcggcgatcggtgaaatggtcggtttcctgcgtggggtgaaaaacgccggtgagttccgcgagctgggctgcaaggtctgggaccagaacgccaacgaaaacgcccagtggctggccaacccgttccgtcagggccatgacgacctgggcgagatctatggtgtgcaatggcgccagtggccgggctacaagcgcatcccgctgagcaacccggcggccatcgaaatggccgagcaagccggtttccgccgcattgcccaggacgaagaggacggcgtcgcgttcgtcatcctgtacaaggcgatcgaccaggtacgccagtgcctggacaccatcgccaacgacccgggtagccgccgcatcctgttccacggctggaactgcgcgcaactggacgaaatggcactgccaccgtgtcacttgctgtaccagttccacccgaatgtcgagaccagggaaatttccctgaccctctacatccgctccaacgacctggggctgggcacgccgttcaacctcaccgaaggcgcggcgctgctgtcgctgttcggccgcctgaccggctatacaccgcgctggttcacctacttcatcggcgatgcccatgtgtatgaaaaccacctggacatgctgaacgagcagctcaagcgcgagccgttggaagcgccgaagctggtgatcagcgaccgtgttccggcatttgccgaaactggcaagtatgagccggagtggctggagaagattgagccgagtgatttctggctggaaggctatgagcaccatgcgccgatgacagcgccgatggcggtc

SEQ ID NO: 31490 - DNA, 606 bp, Pseudomonas putida
atgaccgaaaacgtgccgctcacccgcccccagctacgtcgcctgcttcgcaatgcccgccgcgcccttacccctgcccagcaacgccaggccaccctcggcctgtaccgccagctggcgcaacaccccttgttccgccgcgcccgccacattgccctgtacctgcccaacgacggtgaaatcgaccctcgcctgctgatgcgcgaagcccagcgtcgcggcaagtgcatctacctgccggtgctgcatgcctggccgcgcacgcgcatggtgttccagcgttttgagcagggtgagaagctcaagcccaaccgcttccgtattccagagccgattatcgatcgcaaacgccagcggccgatctgggcgctggatctgattctgctaccgctggtcgggtttgacgaagtgggcggccgcctgggtatgggcggtggcttctatgatcgcagcctggcctaccaggcgcgtcggcaaacctggaaaaaacccttgctgctggggctggcgcatgaatgccagaaggtcgagcggctggcgcaggccagttgggatgttccgctgcagggcacggtctcggaccgtggctggtacctggcgccacgt

SEQ ID NO: 31491 - DNA, 396 bp, Pseudomonas putida
atgattgagctcgaacaagaagatccaatcccgcaaggcgacctggccttgcaaatcaccgcattgccgcgagaaaccaacgggtttggcgatattttcggcggttggctggttgcgcagatggacctggcaggcacggccatggccagccgtgtcgccggcggccgcgtagccaccgtcgccatcgaccgcatggccttcctggtacccgtcgcggtcggcgcacagctgtctttctatacccagaccctggaaatcggccgcagctcgatccagatgatggtcgaggtgtggagcgacgacccgctgtccagcgaatggcgcaaggtcaccgaagcggtattcgtcttcgtcgccatcgacggcagtggtcgtacccgctcggtgcctcgtcgc

SEQ ID NO: 31492 - DNA, 1068 bp, Pseudomonas putida
atgtggtttgcctgcagccccggatatcggcacataacttgctccgtaatgcgtcccagccaaacgggattacccagcatgctgcacagccacctgaccaccctcaacgcagtttcgctgatcctcaacgtcttccaggcagacggttgcgaggcgtcggcgttgctggccggcagcggcattggcccggcagacctggggcatgccgatgcgcgcatcaccacccagcaggagctgcaggtttgcgccaatgctgtggcccggcgcgaggacattggcctggaactgggccagcgcatgcgcgtgtcgtgctacggcatgctcggttacgcgctgctctccagtgccactttgggtgacgccctacgcctggcgctgcagtatccggcactgctgggaacagtcttcaagctgcgcttgctcgacgacggccaacgtgtctggttcagcgccagcgattaccaggacagcccggcgctgagcgctttcaacgccgagttctgcctggtgtcgctgaaagtcatctgtgatgacctgcttggccggccgttgccgctgcttggcgcacgcttcgaacaccctcgccctggttaccacgcgctctatgccggagcctttcaatgcccgatcggtttcgccgccgaggacaatgcctttgccttcgaacggcgatggctggatatgccgctgccgctggccgacccgattactcacaaagccatgagcgagcgctgccggcgcctgaaccttgaattcaccggtcgccaggcatggctgggacggattcgccagctgctggcgcagcaactggacgcagcacccgggctggaagggcttgcgcggcagatgaactgctcttcgcgcaccctgcgccggcatttgcaggcgctgggcagcagttatcaacagctgttggacgagctgaggttcgagcgggccaagcagttgctggccgatgaacagatgccgatctaccggattgcagagactttggggttcagtgagacggccagttttcggcatgccttccagcgctggagtggcgtggcgcccagccattttcgtggt

SEQ ID NO: 31493 - DNA, 859 bp, Pseudomonas putida
atgtcaaaacgcctggtaccctccatgaccgccctgcagtgctttgaagctgcagcccgccatctgagttttacccgtgccgccgaagaactgcacctgacccagagcgcggtcagcaagcaggtggcgcagctggaagacatgctgcgccaccacctgttcctgcgcatccgccggcgcttgcagctgaccccggccggcagcctgtacctggccgaggtcaacaaaatcctgacccaggtggatatgtccagccgctatgtgctcacctacggcgagcagaccgagatattgaaggtagccactcaaccgagttttggcgtgcgctggttgatcccgcacctcaaggggtttggcaaacggcacggcaatatccacctggacattcgcaacgagatggagccgttcgccctgctgcaaggctcggctgacgtggtgttcttctatggccagggcacctggccgggggccacttgcgtggagttgtttcgcgaggaggtggtgccggtgtgtgcgccagagctgctggccgggcgcaagctggccggtgccgaggagctggccgagctggtgctgctgcaaagcacctcgcgcccggaggcctggcatgagtggttcctggagcaggacctgcagagcgtcagcgcttaccacgggccgcgcttcgatacgttctatatggcgttgagtgcagcacaggccgggtgcggggtagcgctggtgccgcgctacctggcggcgaaggaactggccgacggtagcctggtggtgccgtggaaccatgcaatgcgcagtgccggagcgcattacctggcgtatgccgagcatgcggcagaggtgccaaaggtgcgggcgctgg

SEQ ID NO: 31494 - DNA, 1413 bp, Pseudomonas putida
gtgataaaaaaaatcctgatcgccaaccgaggtgaaatcgcagttcggatcgtgcgtgcttgcgccgagatgggcattcgctcggtagcgatcttttccgacgccgaccggcatgccttgcacgtcaagcgcgctgacgaagcacacagcatcggtgccgagccgctggccggttacctcaacccgcgcaagctggtgaacctggctgtggaaaccggctgtgatgccctgcacccaggctacggtttcctttcggaaaacgctgaactggcagaaatttgcgccgagcgcgggatcaagttcatcggcccggccgccgacgtgattcgccgtatgggcgacaagaccgaagcgcgccgcaccatgatcgccgccggtgtgccggtaaccccgggcaccgaaggtaacgttgccgatattcatgaagccctgagcgaaggtgaccgcatcggttatccggtgatgctcaaggccacctccggtggtggcggccgtggtattcgccgttgcaatagccgcgaagaactggaacagaacttcccacgggtcatttccgaggcgaccaaggcattcggttcggccgaagtgttcctggagaaatgcatcgtcaaccctaagcacatcgaggcgcaaattctcggtgacagcttcggtaacgtagtgcacctgttcgagcgcgactgctctatccagcgccgtaaccagaagctcatcgaaattgcccccagcccacagctcactcctgagcagcgcgcctacatcggcgacctggcggtgcgtgcggccaaagcggtgaattacgagaacgccggtaccgtggagttcctgctcgccgatggcgaagtgtacttcatggaaatgaacacccgggtgcaggtggaacacactattaccgaggaaatcaccggtatcgacatcgttcgtgagcagatccgcatcgcctcggggctgccactgtcggtcaagcaggaagacattcagcaccgcggctacgccctgcagttccgtatcaatgctgaagacccgaaaaacaacttcctgcccagcttcggcaagatcacccgttactacgcccccggcggcccgggcgtgcgcaccgacacggcgatctacaccggctataccattccaccgttctacgactccatgtgcctgaaactggtggtgtgggcgttgacctgggaagaagccatggaccgcggcctgcgggccctggacgacatgcgcgtgcaaggggtgaagaccaccgccgcgtactaccaggaaatcctgcgcaatccggaattccgtagcggccagttcaataccagctttgtcgaaagccaccctgaattgaccaactactcgatcaagcgcaaacccgaagagctggccctggccatcgccgccgccatcgccgcccacgcaggcctg

SEQ ID NO: 31495 - DNA, 2007 bp, Pseudomonas putida
atgtcccgactcaatccccggcagcaggaagcccgtgactatgtcggcggccctcttttggtgctcgccggtgcaggttcgggcaagaccagcgtgatcacgcgcaagattgcccacctcatccagaactgcggcatccgcgcccagtacatcgtggcgatgaccttcaccaacaaggctgcgcgcgagatgaaggagcgggtcgccaccttgctgcgcccgggggaaggccgtggcctgaccgtgtgtacgttccacaacctgggcctgaacatcatccgcaaggaacacgagcgcctgggctataagccgggtttctcgatcttcgacgagtccgacatcaaggcgttgctgtcggacatcatgcagaaggaatactccggcgacgacggcatcgacgagatcaagaacatgatcggtgcctggaagaacgacctggtcctgccgccagaagccctggaaaaggcgcgcaacccgcgcgagcagaccgccgccatcgtctacacccactatcagcgcacgctcaaggcgttcaacgcggtggacttcgacgacctgatcctgcagccggtcaagctgttccaggagcaccccgaggtgctggagcgctggcagaaccgcgtgcgttacctgctggtggacgaataccaggacaccaacgccagccagtacctgctggtgaaaatgctgatcggcatgcgcaaccagtttaccgtggtgggcgacgacgaccagtcgatctacgcctggcgtggtgcgcgccccgagaacctgatgctgctcaaggaggactacccctccctgaagatcgtcatgctcgaacagaactaccgttccaccagccgcatcctgcgctgcgccaacgtgttgatcgccaacaatccgcatgcgttcgaaaagcagctgtggagcgaaatgggcgtgggcgacgagatccgcgtgatccgctgcaagaacgaggaagccgaggccgaacgcgtggccatggaaatcctcaccttgcacctgcgcaccaaccgcccgtacagcgactttgccatcctttaccgcggcaactaccaggccaagctgatcgaactgaagttgcagcaccaccaggtgccgtatcgcctgtcgggcggtaacagcttcttcggccgccaggaggtcaaggacctgatggcctacctgcgcctgctggtgaacccggacgacgacaacgcctacctgcgggtaatcaacgtgccgcgccgcgagatcggctccaccaccctggaaaagctcggcaactacgccaccgagcgcggcatttcgatgtacgccgccagcgaagagctgggcctgggcgagcacctggacgcgcgctacaccgagcgcttgcagcgtttcaagcactggctggacggggtgcgccacaaggttgccctggaagacccgattgccgcactgcacgagatgatccgcgacatcgactacgagaactggatccgccagcagaccgccagcgacaaagctgccgagttccgcatcagcaacgtctggttcctggtcgaagcgctgaagaacaccctcgagaaggacgaagagggtgacatgaccatcgaggacgccatcggcaagctggtgctgcgcgacatgctcgagcgccagcaggaagaggaagagaacgccgagggcgtgcagatgatgaccctgcatgcctccaagggcctggaattcccctacgtgttcatcatgggcatggaagaggaaatcctcccgcaccgctccagcatcgaggccgacaccatcgaagaggaacgccgcctggcctacgtgggtatcacccgcgcgcgccagaccctggccttcaccttcgccgccaagcgcaagcagtacggtgaaatcatcgactgcacgcccagccggttccttgacgaactgccaccggacgacctggcctgggagggcctggacgatgcgccggtcgaggtgaaggccgctcgcggcaacaacgccctggccgatatccgggcaatgctcaaacgc

SEQ ID NO: 31496 - DNA, 1440 bp, Pseudomonas putida
ttgactattccttgcgacattctggtcttcggcggcaccggtgatctggccctgcacaaattgcttccggcgctctaccacctgtttcgcgaggcccgtctgaaccctgccgtgcgggtcatcgcactggccaggcgcaacctgccacgcatcgactatctgaagctcgccgaacgccattgtcgggcgcagattgcccgcagcgacttcgacgaagaggtgtggcagcggttttccgcacgggtcgactacttcccgatggatgcttcacagagcgccgacttcggccgcctggcacgctacctgggcgaacccggtggactgacacgcatcttctacctggccaccgctcccaacctgttcgtgccgattgccaaccacctgcgcattgccggactggccgacaccgaagcgcgcatcgtgctggaaaaaccgatcggccattcgctggaatcggccactgccatcaatgaagcgattggcacggtgttcgaagaaagacaggtgttccgcatcgaccactacctgggcaaggaaaccgtgcagaacctgatggccctgcgttttgccaatgccctgctggagccggtgtggcgcaacaaccaggtcgaccatgtccagatcagcgtttgcgagacactgggcgtagaaaaccgcggtgcctactacgatcgcgccggggctattcgcgacatgctgcagaaccacctgctgcagctgctgtgcctggtggccatggagccacccgcgcaattcgaggcagaggcggtacgcgacgaaaaggtgaaaatcctgcgcgccctcaagccgatcaccggccaggatgtgcaggacaagacggtacgcggccaatatggggccgggcgtatcggcggccaggaagtgccggcctactactttgaaaaggacgtcgacaacgacagcgataccgaaactttcgtggccatcgaggcgcatatcgacaactggcgctgggcgggcgtgcctttctatctgcgcaccggcaaacgcatggcgcggcgcgcttcgcagatcgtcatccagttcaagccagtgcctcacgaactgttcagcggcggccaggtcaaccagttgctgatacagctgcaaccggacgaacgcatcagcctgcgcatgatgaccaagagcccaggcaagggcatgcgcctggaacccgtggacctggaccttaatctggcccaggtgttcagccagactcgccgctgggaagcctacgagcgtctgctgctggatgtgctcgaaggtgattcgacactgttcatgcgccgcgatgaagtggaagcagcctgggcttgggtagatccaatcatcaagggctgtgaagagcacttccaggcgccccgcccctacccggctggcagtttcgggcccgaacaagccaacagcctgctcgccaggcatggcaggcactggcatggc

SEQ ID NO: 31497 - DNA, 2184 bp, Pseudomonas putida
atgcgcacagacgacctctctctcctgctgaattccctcaacgatgcccaacgccaggccgtagcggccacgctcgggcgtcaactggtgcttgccggcgccggttccggtaaaacccgcgtgctggtacaccgcatcgcctggctgatccaggtcgagcaggcgtcgccgcactcgatcctgtcggtgaccttcaccaacaaggccgcagcagaaatgcgccagcggatcgagcaactgctgggcatcaacccggcaggcatgtgggtaggcaccttccacggcctggcccatcgcctgttgcgggcccactggcaggaagcgcggctggtgcagaacttccagatcctcgacagcgacgaccagcagcgcctgatcaagcgggtcatgcgcgagttgggcctggacgagcagaagtggccggcacgccaggcccaatggttcatcaacggacagaaagacgaaggcctgcgcccgcagcatatccaggcggggggcgacctgttcctggcgaccatgcgcgaggtctatacggcctacgagcaggcttgcgagcgcgccggtgtcatcgatttctccgagctgctgcttcgcgccctggacctgtggcgtgaccacccgggcctgctggagcactatcagcgacgcttccgccacgtgctggtggacgagttccaggataccaacgccgtgcagtacgcctggttgcgcctgctggcacgcggtggcgacagcctgatggcggtaggcgatgacgaccagtcgatctacggctggcgcggcgccaagatcgagaacattcaccagtacaccgccgacttccccgacgccgaaatgatccgcctggagcagaactaccgctccaccggcggcatcctcaaggcggccaacgcgctgatcgccaacaacagcgggcgcctgggcaaggaactgtggaccgacatgggcgaaggcgaaccactgaccctgtacgcggcctacaacgagcacgacgaagcgcgctatgtcgtggaaaccatcgagagcctggtcaagcagggcaatgcgcgcaacgagatcgccatcctgtaccgttccaacgcccagtcgcgcgtgctggaagaggccctgctgcgcgagcgcatcccctaccgcatctatggcggccagcgcttcttcgagcgcgccgaaatcaagaatgccatggcttacctgcgcctgatcgaagggcgtggcaacgatgccgctctggagcgggtgatcaacgtgccgccgcgcggtattggcgaaaaaaccgtcgaagccatccgcgagcacgcccgccacagccagctgtccatgtgggaggccatgtgccagctgatcgctgccaaggccctcaaaggccgcgccgccagtgccctgggggcctttatcgagctgatcgaggggctggctgccaaggttgtggacatgccgctgcataccatgacccagaccaccatcgaacagtccggcctgatcacctatcaccaggaagaaaagggtgaaaagggccaggcacgggtagaaaaccttgaggaactggtcagtgcggcgcgcaacttcgagtccaccgacgaagacgccgacctttccccgctctcggccttccttggccacgcctcactcgaagctggcgatactcaggctgacgagcatgaagacagcatccagctgatgaccctgcacagcgccaaaggccttgagttcccatatgtgttcctggtgggcatggaagaaggcttgttcccgcacaagatgagcctggaagaacccggccgcctggaagaggaacgacgcctggcctatgtaggcatcacccgcgccatgcgccagctggtcatgacctatgccgaaacacgccgcctttatggcagcgagacttacaacaaggtgtcgcgtttcgtacgtgaaattccggcaggcctggttcaggaagtacgcctgtccaacagcgtcagccgcccgttcggcggggccaagacggccaccaacagcaacctgttcgccaatgccagcattccgcagaccgcgttcaaccttggccagcgtgtgcagcatgcggtattcggggaaggtgtgatcctcaacttcgagggttctggcgctcaggcgcgggtgcaggtgaattttgccgaaggtagcaaatggctgatgctggggtatgccaagctcgaggctgtc

SEQ ID NO: 31498 - DNA, 458 bp, Pseudomonas putida; identical to SEQ ID NO: 31314

SEQ ID NO: 31499 - DNA, 366 bp, Pseudomonas putida; identical to SEQ ID NO: 31315

SEQ ID NO: 31500 - DNA, 1794 bp, Pseudomonas putida
atgtgcggattagcaggagagttacgtttcacccccatcgaccaagcccctcgcccagccgacctggctgcggtagagcgcattacccatcacctggccccgcgaggcccggatgcctggggcttccatagccagggcccgatcgccctgggccatcggcgcctgaagatcatggacctgtcggacggctcggcgcagccgatggtcgacaatacgctgggcctgtcgctggccttcaacggtgccatctacaacttccccgaactgcgcgaggaactgcaggcgctgggctacagcttctggtccgacggcgacaccgaggtgctgctcaagggctaccacgcctggggcgcggcgctgctgcccaagctcaacggcatgtttgccctggccatctgggagcgcgacaaccagcgcctgttcctggcccgcgaccgcctgggcgtcaaacccctgtacctgtcacgcaacggcgagcgcctgcgctttgcctcgaccctgccggcactgctcaagggcggcgacatcgacccgatgctcgacccggtggccctcaaccactacctgaatttccacgccgtggtaccggcaccgcgcaccctgctggccaacgtgcagaagctggagcccggcacctggatgcgcatcgaccgccatggcgaagtggaacgccaggtctggtggcaactgcactacggcccccaccccgacgagcgtgaactggacctggaaggctggaccacccgcgtgctcgacgccacccgcgacgccgtagccatccgccaacgggcagccgtcgatgtgggtgtgttgctgtccggcggcgtcgattccagcctgctggtcggcttgctgcgcgaagtgggcgttgacgacctgtcgaccttctccatcggctttgaagatgccggcggcgagcgcggcgacgagttccagtattcggacctgatcgccaaacactacggcacccgtcaccaccagttgcgcattgccgaacacgaaatcatcgaccaactgccggccgccttccgcgccatgagcgagccgatggtcagccacgactgcatcgccttctacctgctgtcgcgggaagtggccaagcactgcaagggcgtacagagcggccagggtgccgatgagctgttcgccggttaccactggtacccgcaggtggacggcgccgacgacgcctatgcggcctaccgtgaggcgttcttcgaccgcagccacgccgaataccgcgacaccgtgcaggccccctggctgctggaaaccgacgctgccggcgacttcgtgcgcgaacacttcgcgcgccccggcgcaccggctgccgtggacaaggcgctgcgcctggacagcaccgtgatgctggtcgacgacccggtcaagcgggtggacaacatgaccatggcctggggcctggaggcgcgtacgccgttcctcgattaccgcctggtggaactgtcggcacgcattcccgcccgcttcaagctgcccgacggcggcaagcaggtgctcaagcaggcggcgcgacgggtgatcccgcatgaggtgatcgaccgcaagaagggttacttcccggtaccgggcctgaagcatctggaaggtgccaccctgggctgggtacgcgaactgttgaccgaccccagccaggaccgagggttgttcaacccgaccatgctcgaccgcctgctgagcaacccgcacggccagctgacgccactgcgcggttccaagctgtggcaactggcggcgctgaacctgtggctgagcgaacaaggaatctgaccgatg

SEQ ID NO: 31501 - DNA, 195 bp, Pseudomonas putida
atgcaagtgttcaatgtacaaggcatgacctgcggccattgcgtgaaagccgtgacccgcgcggtgcaggagcgggatgcggcggccagggtggaagttgatctggcaggcaaacaggtgcgtgtgcagagcgagttggcgcaggagcagatcctcactgcgattcgggatgaggggtatcaggccgaactcgcc

SEQ ID NO: 31502 - DNA, 741 bp, Pseudomonas putida
atggctcagcaggtgagtggtcgccaacctcgctataaacgcattttgctcaaacttagcggcgaggccctgatgggctcggaagacttcgggatcgacccgaaagtgctggatcgcatggcgcttgaagttggccagctggtagggatcggtgtccaggtcggcctggtgatcggtggtggcaacctgttccgcggcgccgcgctcagcgcagccggcatggaccgcgtcacgggtgaccacatggggatgctggctaccgtgatgaacggcctggccatgcgcgatgcgctggagcgctcgaacatcccggccctggtcatgtcggccatttccatggtgggtgtcaccgatcattacgatcgccgcaaagctattcgtcacctcaactccggggatgtggtaattttctccgccggtaccggcaacccgttcttcaccaccgactccgcggcctgcctgcgcgccatcgaaatcgatgctgacgtggtgctgaaggcgaccaaggtcgatggcgtgtacactgccgatccattcaaggacccgcatgccgagaaattcgatcacctgacctacgatgaggttctggatcgcaagctgggtgtgatggatctgaccgcaatctgcctgtgccgtgaccacaagatgccattgcgggtattcaacatgaacaagcctggcgccctgctgaacattgtggtgggtggcgctgaaggcacactgatcgaggaaggccaagca

SEQ ID NO: 31503 - DNA, 2022 bp, Pseudomonas putida
gtgacagcccgaaaatataacgacatgtcccttccaaagaatcacctggaactgctcagccctgcccgtgacgtggccatcgcccgtgaagcgatcctgcacggcgctgacgccatctatatcggcggcccgagcttcggcgcgcgccataacgcctgcaacgaagtcagcgatatcgccgagctggtcgagttcgcccatcgctaccatgcacgcgtgttcaccaccatcaacaccatcctgcacgacaacgagctggaaccggcgcgcaagctgattcaccagctgtacgatgccggcgttgacgcgctgatcgtgcaggaccttggggtgatggagctggacatcccgccaatcgagctgcatgccagcacccagaccgacatccgcaccctggaacgggccaagttcctcgaccaggccgggttctcgcaactggtactggcgcgggagctgaacctgcagcaaatccgcgccatcgccgccgaaaccgatgccgccatcgagttcttcatccacggcgcgctgtgcgtggcgttctctggccaatgcaacatttcccatgcgcagaccggccgcagcgccaaccgtggtgattgctcgcaagcctgccgcctgccctacacgctgaaagatgaccagggccgcgtggttgcgttcgagaaacacctgctgtcgatgaaggacaacaaccagaccgccaacctggctgacctggtcgatgccggcgtgcgctcgttcaagatcgagggccgctacaaggacatgggctatgtgaagaacatcaccgcccattaccgcaaagagctcgatgccatccttgaagaccgccctcagtacgcccgcgcgtccagtggccgtacccaacacttcttcctgcccgacccggataaaaccttccaccgcggcagcaccgactacttcgtgaccgaccgcaaggtcgatatcggcgccttcgactcgccaaccttcaccggcctgccggtgggcgtagtggaaaaggtcggcaagcgtgacatgcaagtggtcaccgacgtaccgctgaccaacggcgacggcctcaatgtgctggtcaagcgcgaagtggtgggcttccgcgccaacatcgccgaaccgcgtggcgaattcgaagaagacggccagaagcgctaccgctatcgcgtcgagcccaacgaaatgcccgaaggcctgcacaagctgcggcccaaccacccgctgtcgcgcaacctcgaccacaactggcaacaggccctgcaacgcacctcctccgaacgccgggtcggcgtggagtggcacgcggtcctgcgcgagcagcgcttgatgcttaccctcagcagtgaagaaggcgtgagcgtgcaggtggccctggacggcccattcggcgtagccaacaagccgcagcaggcactggagcagttgcacgacctgctcggccagctgggcaccaccctgtaccacgccgaccgtatcgaactggatgccccacaggcgtacttcattcccaactcgcagctcaaggccctgcgccgcgaagccatcgaggcactgactgcagcacgcgtgcaggcgcatccgcgtggcgggcgcaaggccgagaccacgccaccgccggtgtaccccgagtcgcacctgtcgttcctggccaacgtatacaaccagaaggcccgcgacttctaccaccgccacggtgtgcaactgatcgatgcggcctatgaagcgcatgaagaacacggcgaagtgccggtgatgatcaccaagcactgcctgcgcttctccttcaacctgtgccccaagcaggccaagggcgtgaccggcgtgcgtaccaaggtggcaccgatgcagctgattcagggtgacgaagtactgaccctgaagtttgactgcaagccgtgcgagatgcatgtgatcggcaagatgaagagccacatcatcgacctgccgaccccgggcagcgcggtggcccaggtggtggggcatatcagccccgaagacttgctcaagaccatcccacgcggaccgcac

SEQ ID NO: 31504 - DNA, 390 bp, Pseudomonas putida
atgaaacgtatttcgactcttttcctgctcgcaacactgggcctggccgcgggcactgctcaggctgcccagccggatgccggcctgaccggttgcgccgccaagcgcagcgccatcgaaaaccagctgaaaattgcccgtgaccacggcaacagcgaccaggttggagggctggaggaagccctgcgcggtgtggacaactgcaccgacgccagcctgcgcaaggaacgtgagcagaaggtgctcgatgcgcgtcacgaagtggcgcagcgggaaaaggacttgaagaaggcagagaagaaaggcgacgccgagaagatcaacaagcgcaaggacaagctggccgagtcgcgtaaagagctgcaggaagcggtcgacgctctcgaccgc

SEQ ID NO: 31505 - DNA, 858 bp, Pseudomonas putida
atgaatgttgatctgcactgtcacagcacggcctccgacggcgccctgtcgccttcggtactggttgcccgggctcatgagcacggggtgcaagcgctggcactgaccgaccatgacaccctcgaaggcctgcccgaagcgcgccaggcctgcgttgacctgggtatgcgctgggtcagcggggtggagctgtcctgcacgtggggcggcgcgaccatccatgtgctgggttatgacttcccactcgacgcaccgccactgctggcggcgattcaagcgctgcaccacggccgctggctgcgtgccgaagaaatcgacagacggctggcggccaagggcatgcccggcacgctcgaaggcgcgcgcgccgtgcagcacgagttgggtgacagcggcaacgccccggcgcgcccgcattttgccgagtatctggtgcgggccgggcacgtcaaggaccgtggtgaagcgtttcgcaagtggctgggcgccggcaagctgggcgacgtcaagcagcactggccgacgctcgacgaaaccgttgccacgctgaggcagtccaatgcctgggtgagcctggcgcatcccatgcactacgacctgacccgcagcaagcgcaggcggctgattgccgactatattcaggcaggagggcaggcgcttgaagtggtcaacgggatgatgcctgctgagcaagtgggcaccatgtccatccttgcccgtgagttcggcctgctggcaagcgctggcagtgacttccacggccccggcacctggggcgagatcggtgcctatcggcctttgcccgaggatctgccacctttgtggcgtcgattcagccatgaacagcctttggcgcta

SEQ ID NO: 31506 - DNA, 276 bp, Pseudomonas putida
gtgtttctctcgcccgctgaaatcagttcgacctcatttggggccggctacatcacgttgtaccccgccgcatgcagtgtccttgcttgggcagatccacacgatcactggcaaattcgacttggtatttgcgggggttgccgcactcaggacgatggctacgacaccaaggcggacatctgcggccacgggttccgtgccatggcatgcagtgcgctggtcgagtctgggttgtggtcggagacggctatcgagcctgtcaaaccaccccatgca

SEQ ID NO: 31507 - DNA, 1197 bp, Pseudomonas putida
atgaagtcggttgaagagcagctggcgcttatcaagcgcggtgcggaagaagtactggtcgagtcggaactggtggagaagctcaagcgcggccaacctctgcgcatcaaggctggctttgacccgaccgcacctgacctgcacctgggtcacacggtgctgatcaacaagctgcgccagttccaggatctgggccaccaggtcatcttcctgattggtgacttcaccggcatgattggcgacccgagcggcaagagcgccacgcgcccgccgctgacccgcgagcaggtgctggagaacgccgagacgtacaagcagcaggttttcaagattcttgaccctgccaagactgaagtcgcgttcaactccacgtggatggacaagctgacccctgccgacttcattcgcctggcttcgcagtacaccgtcgcgcgcatgctggagcgtgatgacttcgacaagcgttacaccaccaaccagccgattgccattcacgagttcctctatccgctggtgcaggggtacgactcggtagcgctgaaggcggacgttgagctgggcggtaccgaccagaagttcaacctgctgatggggcgcgaactgcagcgctcttatggccaggaagcgcagaacattgtgaccatgccactgctcgaagggctcgacggcgtgaagaagatgtcgaagtcgctgggcaactatgtcggcatccaggaagcgccaggggtgatgtacagcaagctggtgtcgatcccggataccctgatgtggcgttacttcgagctgctgagcttccgttcgatggaagaaatcgagcagttccgtgccgacgtcgccaacggtgccaacccgcgtgacatcaagatcaagttggcagaagagatcgtcgcgcgcttccatggagaagaggctgcggccaatgctcaccgtgctgccggtaaccgtatgaaggaaggcgagctgccggaagacttgccggagatcgaagtggctgcggcggaagacctgccaattgctgcggtgctgaaccgggctggtctggtcaagaactcggcacaggcgcgagacttgctgaatagcggcgcggtgaaagttgatggtgcagtggtcgacaaggacttcatgtttgtccttggtgctacccatgtgtgccaagcgggcaagaagtcgtttggccgggttaccctcaaggctgag

SEQ ID NO: 31508 - DNA, 783 bp, Pseudomonas putida
atgaagaagaccctgctgaccactgccctggctgctgccctgtcgttctccggcctggccgctgctgccgagaaactggtggttgccgctaccccggtaccgcacgccgaaatcctcgaattgatcaagccgaccctggcaaaagaaggcgtggaccttcagatcaaggtcttcaccgattacgtgcagccgaacgtgcaggtggaccagaagcgtctggacgccaactacttccagacgctgccgtacctgcagaacttcaacgaaggcaagggcacccacctggaaaccgtggtgggtgtacacgtagagcccttcggtggctactcgaagaaggtcaaggccctgagcgagctgaaagaaggcgcaaccgttgccatccctaacgagggcagcaacagcggccgtgcgctgctgctgctgcagaaggccggcctgattaccttgaaagacccgaagaatgccctggccacccccaaggatatcgccgagaacccgaagaagctgaagttccgcgagcttgagtcggccatgctgccccgtgtgctggaccaggtcgacctggacatgatcaacaccaactacgccctggaagctggcctgaacccggctaaagatgcactggtgatcgaaggtgccgactcgccttacgtgaacttcctggtggcccgcccggacaacaaggacagtgaggccatccagaaactggccaaggccctgaccagcccggaagtcaaggcattcattgccaagaagtaccaaggtgccgtactgccggcgttc

SEQ ID NO: 31509 - DNA, 540 bp, Pseudomonas putida
atgctcaccggccagctctaccacgctggctgccctgaactacaggccgagcagatcgccaacaagcactggatgcatcgctacaacaacagtgtcgaactgctcaacgacgcacgccacgggctgcttgtggagcactttggccaggttggcgaaggcgcggtgattcgcccgccgttctattgcgactacggctacaacatcagcgttggccgtaatactttcatgaacttcaactgcgtgatcctcgacgtggtgccggtgcgtatcggcgaggactgccagatcggtcccaacgtgcagatctataccgccgaccatccgctcgatcctgaagtgcggcgcagcgggctggagagcgggcggccggtaaccatcggcgacaacgtgtggattggcggtgcggcgatcatcctgccgggggtgaccatcggtgataatgccatcgtcggcgccggcagtgtggtgacccgggatgtgcccgcgggcgcgacggtggtgggtaacccggcgagggtccgtcagcccgaccaagggcag

SEQ ID NO: 31510 - DNA, 996 bp, Pseudomonas putida
atggatgtgaccgacctgttggcccgagctgtggatgcgggggcttcagacctgcacctggcgacgggccagattccgatgctgcgcctggatggcgagttgcagcgtatgggcttgccgccgttgagccagggtgccttgatcgagggcatggccagcgtgctggataacgatcagcgccggcagtgggcccaaggcgatgaaatggaccttgcgctggagttgccggcgcttgggcgctttcggctgaacctgtttcgccagttgaatggcccggcggttacctttcggctgatcccggggcgcattgcgacggtgagtgagctggaccttgcggatgtgtttcaagctgttgcgcattgccgggatggcttgatcctcgtgggcgggccgaccggcagtggcaagtccagcaccctggcaacgctgctcgaccagctgaaccgcgagcgggcgctgcacatcattaccctggaagaccctgtcgagatcatccatgacagccagcgcagcctggtcaaccagcgtgagatggggcgccatagtcgcggctttgctcaggggctgcgcagtgcgctgcgccaggacccggacgtgatcatgatcggcgagttgcgcgacctggaaaccattcgcctggccctgcgcgcggccgaaaccgggcacctggtgctggcaaccgtgcatgcgcgttcggcgaccagcagcatcgacaggttggtggaggtgtttgctgccgaggaaaagccgttggtgcgggcgatgctggccgagtcgctgcgcctggtggtcgcgcaggtgctggtcaggcgcgtagggggtgggcgggtggcggcgcgggaagtgctggtggcgacgccggcggtgcgtaacctggttcgggaggggcggttggcgcagttgtcttcagtgatgcagggcggggcggcggaggggatgctgacgatggagggggcgttgcggaggctgagggagcgagggttgatcaaaggcttg

SEQ ID NO: 31511 - DNA, 900 bp, Pseudomonas putida
atgcgtcgttttgttcgcctgttccttgttctggctgcccttgctctgctgctgcttggctgggccgggcaggagtttcgcctgttcgagcgtggctggttcaatctcaagacctggtggcagcctgtggagcgcagcattggcctggatcgctaccgggtggtgctggaggcgcaaccgatcgaagggctggatgatgacatttcggcgctgacctacgaccccgaccgcaaaaccctcttcacggtcaccaacgcccgttcggagctgatcgagctgtcgctggatggccgtatcctgcgccgtgtgccgctgactggcttcggcgacccggaggctgttgagtacgttgggccaaacagctatgtgatcaccgacgagcgtcagcaacggctgattcgcgtacggctggaagacgacacgatgtttctcgatgccggtgatgccgaacagctgacgttgggtattggcctcaatggcaacaaaggcttcgagggcctggcgtacgattcggcgggcaagcgcctgttcgtggcgaaggagcgtgacccgatgctgatctatgaggtgcatggcttcccgcatgacaatccggaaaagccctacgccgtgcatgtggtgcaggaccgcaagcgcgattcacggttgtttgtgcgggatttgtcgagcttgcagttcgatgaacgcagtgggcatttgctggcattgtcggacgagtcgcggttggtgctggagctggatgtacagggccagccgctgagtaccttgtcgttgcgcaagggtttccaggggttgcaggcgacggtgccgcaggcggaggggattgcgatggatgaagcggggaccatttacctggtcagtgagccgaacctgttctatgtgttcaagcagccgactgac

SEQ ID NO: 31512 - DNA, 1416 bp, Pseudomonas putida
atggctgaacgtctgaacaacgacttccagttcatcgaagtgggccgaaaggacccgaaaaaaaagctgctgcgccagcgcaagaaggagttcgtggaaatctacgaaccgttcaagccgcagcagtccgtggagcaggcgcaccgctgcctgggctgcggtaacccgtattgcgagtggaagtgcccggtacacaacttcatccccaactggttgaagctggtctccgaaggcaacatcctggccgcggcggaactgtcgcaccagaccaacaccctgccggaagtatgcggccgtgtttgcccgcaagaccgcctgtgcgagggtgcctgcaccctgaacgacggtttcggcgcggtgaccatcggctcggtggagaagtacatcaccgacaccgccttcgccatgggctggcgtccggacatgtccaaggtcaagccaaccggcaagcgcgttgccatcatcggcgccggcccggcgggcctgggctgcgccgacgtgctggtgcgcgccggggtaaccccggtggtgttcgacaaaaaccctgagatcggtggcctgctgaccttcggtatccccgagttcaagctggaaaagaccgtgctcagcaaccgccgtgaagtgttcaccggcatgggcatcgagttccgcctgaacaccgaggtgggcaaggatgtgaccatggaacagctgctcgccgagtacgacgcggtgttcatgggcatgggtacctacacctacatgaagggcggcttcccgggtgaagacctgccgggcgtgcatgacgcactggacttcctgatcgccaacgtcaaccgcaacctgggcttcgagaagtcgccggaagacttcgtcgacatgcagggcaagaaagtggtggtgctgggcggtggtgacaccgcgatggactgcaaccgtacctcgatccgtcagggtgccaaggcggtgacctgtgcttatcgtcgtgacgaagccaacatgccgggttcgcgcaaagaggttaagaacgccaaggaagagggcgtgaagttcctctacaaccgtcagcccattgccattgtgggcgaggacaaggtcgaaggcgtcaaagtggtcgagactcgcctgggcgagcctgatgcccgtggccgccgcagccctgagccaatcccgggctccgaagagatcctgccggcagacgccgtggtaatcgccttcggcttccgcccgagcccggcaccgtggtttgaacagcatggcattcagctggacagccaaggtcgtgtggttgccccggagaagggcaagttcaagcaccagaccagcaacccgaaagtgtttgccggtggcgacatggtgcgcggttcggacctggtggtgactgcgatcttcgaagggcgtacggctgccgagggtatcctggactacctcgaagtc

SEQ ID NO: 31513 - DNA, 462 bp, Pseudomonas putida
gtgatcggcatcgacaactccatgccctggcatttgccgggggacttcaagtacttcaaggccaccaccctgggcaagccgatcatcatggggcgcaagacctgggactcgctggggcggccgctgcctgggcggctgaacatcgtggtcagccgccagccggggcttgaacttgcaggtgccgaagtgttcgcctcgcttgaagaggcgttggtgcgggccgagcagtgggcgcgcgagcagggcgtcggtgagctgatgctgattgggggcgcgcagctgtacgggcaggcgctggagaaggggctggtcagccgcatgtacctgacgcgggttgagttggcgccagagggggatgcgtggttcccggcgtttgatgaagggcagtggaggctgacttctagcgaggcacaggctgaggaaggtaagccggcgtatcacttcgaggtttgggataagggt

SEQ ID NO: 31514 - DNA, 1305 bp, Pseudomonas putida
gtgcaacttcaggcgcggctcggtaccccggccaatcttgctgcccagcatcatcaacgccgtgcggaagaacccgtacagcgccatctggtgcatgcggtacagcgacacatagaacatgcgcgccagccagccttccagcttcacgctgcccatcaggttacccatcaggttgcccaccgccgagaagcgcgacagcgacaccagcgagccatagtccttgtactcgtacgtcggcagggccttgttctccaggcgcgccttcaggctttgcgccagcatcgaagcctgctggtgcgccgcctgtgcgcgcggcggcacgttacgatcgctgccgggttgcgggcaggcggcgcagtcaccgaaggcgaagatgttgtcgtcgcgggtggtttgcagggtagggcgcacgaccagctggttgatgcggttggtttccaggccatcgatgtccttgaggaaacctggcgcgcggataccggctgcccacaccttcaggctggcctggatcacttcaccgtccttggttttcaggccgtcctcggtcacttcactgactgcggcgttggtcatcaccttcaccccgagtttttccagggttttgtgaaccggtacgctgatgcgctccggcagcgctggcagaacgcgcgggcccgcctcgataagggtgatgtgcatgtccttgggctggatgcggtccaggccataggccgccagctcgtgggcagcgtggtgcagctcggccgccagctctacaccggtggcaccggcgccgacaatggctacgctgattttctcgctggccacgtcgccggcgtgggcacgcaggtagtggttgagcagttgctggtggaaacgctcggcctgcttgcgggtatccaggaacaggcagtgctgcgctgcgcccagggtgccgaagtcgttggtgttggagcccacggcaatcaccagggtgtcgtagcccagggtgcgcgcaggcagcagctcgcggccctcttcgtcgagggtggcagccagttgaatctgcttgccttcacggtccaggccgctcatgcgccccagctggaaattgaagtggttccacttggcctgggccacgtagttcagttcgtcttccgaggagttcagcgagccggcggccacttcgtgcagcagtggcttccagatgtgcgtgaggttggtgtcgaccagggtgatttcggcctgcttgcgcttgcccaggcttttacccaggcgggtcgccagttccaggccgccggcgccgccgccgacaatcacgatgcgatgagtcatgggaatatctca

SEQ ID NO: 31515 - DNA, 987 bp, Pseudomonas putida
atgtcggccaaaaagaagccagtaagtacgccgttacacctgctccagcaactttcgggcagcttgctcgaacacttggaagaggcctgctcgcaagcgctggctgatgcggaaaaactgctggcgaagttggaaaagcagcgtggcaaggcgcaggaaaaactgcacaacggtcgcctgaaactgcaagacgcggccaaggcaggtaaagccaaggcgcaaagcaaggcgcaaaaagccatcggtgaacttgaagaactgctcgagtctctcaaggaacgtcaaacccagacgcgctcttacattcagcaactcaaacgcgatgctcaggacagcctcaagctggctcagggtgtaggtaaagtacgcgaagctgcaggcaaggcccttgatcaacgtgcggccaaaccggcagccaaggcaaccgctgctgccaagcctgcggccaaaccagctgccagggcgaccgctgccgccaagcctgcggccaaaccagctgccaagacgaccactgccgccaagcctgcggccaaaccggctgccaaggcgaccgctgccgccaaacctgcggccaaaccggctgccaaggcgaccgctgccgccaagcctgcggccaaaccggctgccaaggcgaccgctgccgccaagcctgcggccaaaccggctgccaaggcgaccgctgccgccaagcctgcggccaaaccagctgccaaggcgaccgctgccgctaagcctgcggccaaaccggctgccaaggcggctgcggcagccaaacctgcggccaagccagctgccaaagcccctgctgccaagccggccgcaaaaccagctgccaccaaggcaccagcacgcacggccgccaaacccgccgccaaacctgctgaagccaaacccgctacaccggccgccacaaccaactcggtgagcccggctgctgcagcaccgtcggcacctgtgagcacgccgtctcaggcaccttcggcgtcc

SEQ ID NO: 31516 - DNA, 2871 bp, Pseudomonas putida
atgtcccagtcgccatccctgcatcaactgcaagagctcaacccgtttctgcgtcgccacctgggccccgatgccacagagcagcaggccatgctcaacgcgctgggtatcgccagccgcaacgagctgatcgagcagaccgttccgccagacatccgcctcaatcgccccctcgacctcccagcggcactggacgagcaagccgccctggccaagctcgccggttacgccgaacagaaccaggtctggaccagcctcatcggcatgggctaccacggcaccatcacccccacggtcatcctgcgcaacgtgctggaaaaccctggctggtacaccgcctacacgccctaccaacccgaaattgcccaaggccggctggaggcgctgctgaacttccagcaaatggtcatcgacctcaccggcctgcctctggccaatgcctcgctgctcgatgaagccaccgctgccgccgaagccatggccctggccaagcgggtggcacgcaacaagagcaacgccttctttgccgacgagcactgccatccgcagaccctatcggtactcaagacccgcgccgaaggcttcggctttgagctgatcgtcgattctgtggataaccttgccaagcactcggtgttcggcgccttgctgcagtacccggacacccacggcgaagtgcgcgatttgcgcccgctgatcgaccagttgcacagccagcaggccctggcctgcgtagccgctgacctgctgagcctggtggtgctggcaccgcccggagagctcggcgccgatgtggtgctgggctcgacccagcgctttggtgtgccgatgggctacggcgggcctcacgcggcctatttcgcctgtcgcgacgactacaagcgagccatgccggggcgcatcatcggcgtatcgcgcgatgcccgtggcaacaccgcattacggatggccctgcaaacccgcgagcagcatattcgccgcgaaaaggccaactccaacatctgcacggcccaggtgctgttggccaacattgccggcttctacgcggtgtaccacggcccggaaggcctgcaacgcatcgcgcagcgtgtgcaccggttgaccttcatcctggcagccggccttgaggccaaaggcatcaaacgcctcaatcagcacttcttcgacacccttaccctgaatgttggcggtgcccaggcggccatcattgaaagcgccgaggccgcgcacatcaatttgcgcattctcggtcgcgggcacctgggggtgagcctggacgaaacctgcaccgaacagacggtgctgcgcctgctcgacatcttcctgggggtggatcatggcctggaaatcaccgccctcgaccagctggccctgcctgaaggcatccccgccagcctggtgcgacgcacgccattcctcgcccatccggtgttcaacctgcatcacagcgaaacagagatgctgcgctacctcaagcagctagagaacaaggacctggcgctgaaccagtcgatgataccgttgggctcgtgcaccatgaagctcaacgccaccagtgagatgatccccatcacctggcccggttttgcccagctgcacccgttcgccccggcggcccaggcagcgggctacaaggcgatgatcgacgaactggaaagctggctgtgcgcgatcaccggcttcgatgcgatctgcatgcagcccaactccggtgctcagggtgaatacgccggcctgatggccattacccgctatcactgcagccgccaccagccgatgcgcacgttgtgcctgatcccgtcgtcggcccacggcaccaacccggcgtcggcacagatggccggcatggaagtggtgatcgtcgattgcgacaacgatggcaacgtcgacctggctgacctcaaagccaaggcgcatgcggccggggagcgtctgtcgtgcctgatgattacctacccctcgacccacggcgtgtacgaagaggggatacgcgaaatctgcgatgtggtgcaccagtacggcggccaggtttacatggacggtgccaacctcaacgcccaggtgggcctggcgcgccccgcagacattggggccgacgtttcacacatgaacctgcacaagacgttctgcattccccacggcggcggcggcccgggtatggggccgatcggtatccgcgcgcacctcaagccgttcgtcgccagccatccggtggtgccggtgcctgggttggacccgaacaacagcgcggtcagcgccgcgccctggggcagcgcaagcatcttgccgatcagctggatgtacatcgccatgatgggcccgcagctggccgacgccagcgaggtggctatcctttcggccaactacctggccagccagttgggcgcggcgttcccggtgctctaccgcgggcgcaaccagcgcgtggcgcatgaatgcatcctcgacctgcggccgttgaaagcgctgacaggcatcagcgaagaggacgtggccaagcgcctgatggactatggcttccacgcaccgaccatgtccttcccagtgccgggcacgctgatggtggagccgaccgagagtgaatcgaaggctgagctggatcggtttgtcgaagcgatgctggcgattcgcgcggaaattgacgaagtacagcagggcaactggccagcggagaacaacccgctgaaacatgcaccgcataccttggctgatgtcttgggggtatgggacagaccgtatagcctggagcaggcggtggcccccagtgctcacgtgcgccagcacaaatactggccggcggtgaaccgggtagacaacgtgtatggggacaggaacctgttctgtgcgtgtgtgccggtagaggcttatcgc

SEQ ID NO: 31517 - DNA, 891 bp, Pseudomonas putida
atgaaacgcttcagtttctccaagctgatgctggtgctcggcttgctgttcatctacctgccgatgctgatcctggtgatctactcgttcaacgcctccaaactggtgacggtgtggggcggctggtcgatcaaatggtacgtcggcctgctcgacaactcccagctgatgggttcggtgatgcgctcgctggaaatcgcttgctacacggcggtggcggcagtggcgctgggtaccctggcggccttcgtgctgacccgcgtcacccgcttcaagggccgcacgctgttcggtggcctggtcactgcgccgctggtaatgcccgaagtgatcaccggtctgtcgctgttgctgctgttcgtggccatggcgcagatgatcggctggcctcaggagcggggtatcgtcaccatctggatcgcccatacaacgttctgtgcggcgtatgtggcggtggtggtgtcggctcgcctgcgtgagctggacctgtcgatcgaggaagcggcgatggacctgggtgccaagccgtggaaggtgttcttcctgatcaccatcccgatgatcgcgccatcgctggcggcgggcggcatgatgtcgtttgccctgtcgctggacgacctggtattggccagcttcgtctccgggcctggctcgaccaccttgccgatggaagtgttctcggcggtgcgcctgggtgtgaagcctgagatcaacgccgtggccagcctgatcttgctgtcggtatcgctggtgaccttcttcgtctggtacttcagccgccaggccgaagagcgtcgtcgcaaggcgattcagcaggcgatcgaagagggtgctgcagccaacgcttcgcagccgcaggtcaagcgcccggcgcaggtggctgcgtcggcc

SEQ ID NO: 31518 - DNA, 981 bp, Pseudomonas putida
atgcaactgggaatcatcgggctgggccgtatgggcggcaatatcgcaaggcgcctgatgcgcgccggtcaccgcaccgtggtgcacgaccgcaaccgtgatgccatcaccggcctggagggcgaaggcgcccagggtgcgcatgacctcggtgcactggtacaaaagctgaaagcgccgcgcgcggtatgggtgatgctgccggctggtgacgccaccgagcagaccatcgcccagctggccgaaatgctggagccgggcgatgcgatcatcgacggcggcaacaccttctacaaggacgacatgcgccgcgctgcagaactggccaagcgcggcctgcattatctggacgtcgggacttccggcggcgtgtggggcctggaccgcggctactgcatgatgatcggcggcgaaaaggacgtgttcgagcgcctggaaccgctgttcaaggcgctggcgccgggcgtgggcgacatcccgcgtacccatggccgcagcggcgagcaccagcgtgccgagcacggctacatccatgccggtccaccgggcgccgggcactacgtgaaaatggtgcataacggcatcgagtacggcctgatgcaggcctatgccgaaggcttcgacctgctgcgcagcaaaggcggcaacgagttgcccgaagaccagcgcttcgacctgaacgtagccgaaattgccgaagtgtggcgacgcggcagcgtggtgacctcgtggctgctcgaccttaccgccgatgcgctggtggccgaccctcagctgtcgcaattcagtggctcggtgtccgacagtggcgaaggccgctggaccatcgacgccgccgtcgagcaggcggtgccggtgccggtgttgtccagcgcactgttcgcgcgcttccgttcgcgccagcaacagggcacctacggtgacaagatcctctcggccatgcgcctgggcttcggtggccacgtcgagaagaaaggcgaa

SEQ ID NO: 31519 - DNA, 458 bp, Pseudomonas putida; identical to SEQ ID NO: 31314

SEQ ID NO: 31520 - DNA, 297 bp, Pseudomonas putida
atgaaccaggaacgcgtattcaaagtcctccttggcccgcacgtttccgagaaggctaccgttctggctgagaaaaaaggccagttcgtattcaaggttgctactgatgcaaccaagctggaaatcaagaaagctgtcgaaggcctgttcaacgtaaaagttgaaaacgtgtcgactgttaacgttctgggtaaaaccaagcgtaccgcacgtggtctgggcaagcgtaatgactggaagaaggcgatcgtctcccttcagccaggccaagatctcgatttcagcagcagtgctgag

SEQ ID NO: 31521 - DNA, 1656 bp, Pseudomonas putida
atgctgaccctgctcaacctgctctcggccgtaacgcttctggtctggggtacccacattgtgcgcaccggtatcctccgggtattcggctcgaacctgcgacgcatcatcagccagaacatggacaagcgcccgctggcattcatcgccggtattctggtcacggccatggttcaaagcagcaacgctacggccatgctggtcacctcgttcgtcggccaaggcctgatggccatgaccccggcgttggcgatcatgctgggtgccgatgtgggtaccgcactgatggcccgggtactgaccttcgacctgtcctggctgtcgccactgctgatcttccttggcgtgatcttcttcctttcgcgcaagcagacacgggccggccaactgggccgggtgggcatcgggcttggcctgatcatcctggcactcgaacttatcgtgcaggcagcggcgccgatcacccaagcccaaggcgtgaaagtgctgtttgcctcactgaccggcgacatcatgctcgacgctctggtcggggcaatgttcgccatgatttcctattccagcctggccgccgttctgctcacagcgacactggccggcgccgaactgatcagcctgccggtcgccatcgggctggtggtcggcgccaacatcggcagcgggctgctggccttcatcagtaccagcatgcagaacgccgccgggcgccgggtggccttgggcagcctgctgtacaagctgatcggcctggtgctgatcatccctgtgctgcacccgctggtggcatggatggactcgctgagtttcagccctcaggaactggtcatcggctttcacctgctctacaacacgctgcgctgtctgatcatgctgcccacggtcaaaccgatgggtcggctgtgcaacgccctgctacctgaacgggaaatcggcaatggtcaggtgcgcccgcgccaccttgacgcctcggccctggaaacgcccagcctggccctggccaacgccgcccgcgagaccttgcgcctgggggacatcgtcgacagcctgctcgaagccatgcttggagctctgcgtggcacccagaccgccttgccacagcaagttcgcgccttgggcgaagacgccgaagccctgtacagcgcaatcaagctgtacctggcgcagatgtcacgggaagacctcagcgaacaggacaaccgccgctgggccgaaatcatcgagctgtcaattaacctcaaactcgcctgtgacctgatcgaacgcatgctgcgcaaggtccagcagcagaaaaccagccagcgacgggagttttcccaggtaggcctggaagagctgaccggcctgcaggagcaattgctggccaacctgcgcctgggcctgtcggtgttcctcagtgccgacccggaaagcgcccgcttgctgctgcgggaaaaacgccggttccgtgcccaggaacggcgcctcgcccacgcccatgtcagccgcctgcagcgcaaggtcgtgcaaagtatcgagaccagttcgctacacttggagctgatcgccgacatgaagcggttgaactctttgttctgtagcagtgcctatgtggtactgggcggctcggacaccggagggctgatgctcgacagtgtgcccgatgaagcccgcctgccg

SEQ ID NO: 31522 - DNA, 963 bp, Pseudomonas putida
gtgggtgcttcccttgggagcgccgccgatgcctacggcgcccaattggtactcaaagtggtcgcccccaacgaccaggaactggccctgatcaacagcggcagccttctggtgggcatgctcaaccccttcaacggtgaactgatcggcaagatggccgaacgcggcattaccgccttcgccctggaagccgcgccgcgaacctcgcgggcgcagagcctggacgtgctgtcgtcgcaggccaacatcgccggctacaaggccgtgttgctggcagcccatcactacccacgcttcatgccaatgctgatgaccgctgccggtaccgttaaggccgcccgagtgctggtactgggcgccggcgttgccggcttgcaggccatcgccacagccaagcgcctgggtgcggtgatcgaagcatccgacgttcgcccggcagtgaaagagcagatcgaatcactgggtgcaaaattcatcgacgtgccatacgagaccgacgaggagcgagaatgcgccgaaggtgttggcggctatgcccgaccaatgccggccagttggatgcagcgccaggcgcaagccgtgcacgagcgcgccaagcaggcggatatcgtcatcaccaccgcgctgatccccggacgcaaggcgccgaccctgctaagcgccgaaaccgtggcgcagatgaagcccggctcggtggtcatcgacctggctgcagcccaaggcggcaactgcccgctgaccgtcgcagaccaggtggtgcaggagaacggcgtgatcatcgtcggcccgaccaacctgccggcccaggtgagtgccgatgcctcggcactgtacgcacgcaacctgctggacttcatgaagctgctgttcgacaaggatggcgcgctgatcatcaacctcgaagacgacatcgtcgcggcctgcctgatgtgccgtgatggtcaggtcgtccgcaaaaacggc

SEQ ID NO: 31523 - DNA, 1089 bp, Pseudomonas putida
atgtccggcaatacctacggcaagctgttcactgtcaccaccgctggcgagagccatggcccggcgttggtcgccattgtcgatggatgcccaccgggcctggaaatttccctcgccgacctgcagcacgaccttgaccggcgcaagcccggcaccagccggcacaccacccagcgccaggaagccgacgaggtggaaatcctttccggcgtgttcgaaggccgcaccaccggctgctcgatcggcctgctgatccgcaataccgatcagaagtccaaggactactcggccatcaaggacctgttccgcccggcccacgccgactacacctaccaccacaagtacggtatccgcgactaccgcggtggtggccgcagctcggcccgtgaaaccgccatgcgcgtggccgctggcgctatcgccaagaagttcctggccacccagggcatcaccgtgcgtggctacatgagccagctgggcccgatcgaaatcccgttcaagacctgggagtcggtggagcagaacgccttcttcagccctgatccggacaaagtacctgagctggaggcctacatggaccagctgcgccgagaccaggattcggtgggcgccaagatcaccgtggtcgcagaaggcgtgatgcccgggctgggcgagccgatcttcgaccgcctggatgcagagctggcccatgcgctgatgagcatcaacgcggtcaagggcgtggaaatcggcgccggtttcgccagtgtggcccagcgcggcaccgagcaccgggacgaactgaccccggaaggcttcctcagcaacaacgcgggcggcattctgggcggtatttcgtcgggccagccgatcgttgcccacctggcactgaagcccacttccagcatcaccaccccgggccgctcgatcgatgtcgatggcaacccggtggacgtcatcaccaaaggccgccacgacccgtgcgtgggcatccgtgccacgccgattgccgaggcgatgatggccattgcgttgatggaccacctgctgcgccaccgtgcgcagaatgccgatgtgcaagtgaataccccggtgctgggccagcgc

SEQ ID NO: 31524 - DNA, 1215 bp, Pseudomonas putida
atgacccagtcccaataccgccccggccccgacgccaatggcctgttcggctcgttcggcggccgctacgtggccgaaaccctgatgccactggtgctggacctggcccgcgaatacgaagcggccaaggcagaccccaagtttcttgaagagctggcttactttcagcgcgactacatcggccgccccaacccgctgtacttcgccgagcgcctgaccgagcattgcggcggagcgaagattttcttcaagcgtgaagagctcaaccataccggcgcgcacaaggtgaacaactgcatcggccaagtgctgctggccaagcgcatgggcaaaaagcgcctgatcgccgaaaccggcgccggcatgcacggtgtcgccaccgccactgtcgccgcgcgcttcggcctgccttgcgtgatctacatgggtgccaccgacatcgagcgccagcaggcgaacgtgttccgcatgaagctgctgggcgccgagatcgtgccagttaccgccggcaccggtaccctgaaagacgccatgaacgaagccctgcgtgactgggttaccaacgtcgaagacaccttctacctgatcggcaccgtggctggcccacacccgtaccccgccatggtgcgcgacttccagtcgatcatcggcaaagagacccgtgcccagttgcaagagaaggaaggccgtctgccagacagcctggttgcctgcgtcggcggcggctccaatgccatgggcctgtttcatgagttcctcgaagagccgagcgtgcagatcatcggcgttgaagccggtggccacggcgtacacaccgacaagcatgccgccagcctgaacggcggcgtaccgggcgtgttgcacggcaaccgcacctacctgctgcaggaccaagacggccagatcaccgatgcccactcgatttccgcaggcctggactacccgggcatcggcccggagcacgcctatctgcatgaggtgaagcgcgtcgagtacgtcagcatcaccgatgacgaagcattggatgcgttccacgcaacctgccgtctggaaggcatcattccagccctggaaagctcccacgccttggccgaagcgatcaagcgcgcaccgaagctgcccaaggaccacctgatggtcgtgtgcctgtcgggccgcggcgacaaagatatgcaaaccgtcatgaaccacatggccgcccaggagaaacaggca

SEQ ID NO: 31525 - DNA, 1302 bp, Pseudomonas putida
ttgcgccccattttcagcgaattcggcctgatccgtttccgcgccctggtcgaagtgcgctggctgcagcgcctggccgcccacccgcaaatcggcgaagtgccggcgttctccgccgaagccaacgccctgctggacagcctggccaccgatttcaagctggagcacgccgagcgcgtcaaggaaatcgagcgcaccaccaaccacgacgtcaaggccattgaatacctcctcaaggagcaggccgccaagctgcctgagctggccaaggtcagcgagttcatccacttcgcctgcaccagcgaggacatcaacaacctgtcccacgccctgatgctgcgcgccggccgtgacgaagtgctgctgccgctgatgcgccaggtcgccgacgccatccgcgccctggcccacgcccacgccgaagtgccaatgctgtcgcgcacccacggccagccggcttcgccgaccaccctgggtaaagagctggccaacgtcgtgtaccgcctggagcgccagatcgcccaggttgccgccgtgccgctgctgggcaagatcaacggcgccgtgggcaactacaacgcccacctgtcggcctactcgcagatcgactgggaagagaacgcccgcgccttcatcgaagacgagctgggcctgcagttcaacccgtacaccacccagatcgagccgcacgactacatcgccgagctgttcgacgccatcgcccgcttcaacaccatcctgatcgacttcgaccgtgatgtgtggggctacatttcgctgggttacttcaagcagaagaccgtcgccggcgaaatcggttcgtcgaccatgccgcacaaggtcaacccgatcgacttcgaaaactccgaaggcaacctgggtatcgccaacgcgctgttccagcacctggccagcaagctgccgatctcgcgctggcagcgtgacctgaccgactccaccgtgctgcgcaacctgggcgtgggctttgcccacagcgtcatcgccttcgaggccagcctgaaaggcatcggcaagctggaagtcaacgaagctcgcatcgccgccgacctggacgcctgctgggaagtgctggccgagccgatccagaccgtgatgcgccgcttcaacatcgaaaacccctacgagaagctcaaagagctgacccgtggcaagggcatcaccccagaagcgctgctgaccttcatcgacggcctggacatgccagccgaagccaaggccgagctcaagcagctgacccccgctacctacatcggtaacgcggcagcccaggccaaacgcatc

SEQ ID NO: 31526 - DNA, 1011 bp, Pseudomonas putida
atgtcggcggtacgcatcggccaatacacactacgtaacaacctgatcctcgcgcccatggccggggtcacggaccagcctttccgtacactttgccagcgcctgggcgccggtatggtggtgtcggaaatggttagcagcgacatgagcctgtggaacagccgcaagtcgagcctgcgccgcatccatgaaggtgatcccgagccacgctcggtgcagatcgccggcggcgatgcgcagatgatggctgcggcggcaaaggccaatgtcgaggcgggtgcccagatcatcgatatcaacatgggctgtccggcaaaaaaagtctgcaacaaagccgcaggctctgctttattgagagatgaagccttggtcagcgagatcctccacgccgtggtcagcgccgtggacgtaccggtgaccctgaaaatccgcaccggctgggaccgggcgaacaagaacggcctgaacgtggcgaagatcgccgaacaggctggcatccaggcgctggcggtgcatggccgcacacgtgccgacctgtacaccggcgaagccgagtacgacaccatcggtgccatcaagcaggcggtgtcaatcccggtttttgccaacggcgatatcacctcgccagaaaaggcccgggcggtgctggaaaccaccggggtcgatggcctgttgattggccgggctgcccaggggcggccatggatctttcgcgagatcgagcattacctgcgcactggcgaacatctgccagcgccgcaactggacgaagtggaacgcatcctgctggagcatctggccgcgctgcatgccttctatggcgatgtgatgggcgtacgtatcgcccgcaagcacgttggctggtacctggcaacacgacccggcggcaaggagtttcgcgcccggttcaacgctttggaagacacacaagcgcagtgcgccaacgttcgcgcgtttttcagcgaacgtcgacagagccttgagacagaggacggacaaggggtggccgca

SEQ ID NO: 31527 - DNA, 975 bp, Pseudomonas putida
atgtccaatcaactcagtactgaacaactgctgcatgcctatgaagtcatgcggaccatccgcgccttcgaagaacgcctgcatgtggagttcgccaccggcgaaattcccggcttcgtccacctgtatgccggcgaagaagcctctgccgccggggtcatggcccacctgcgcgacagcgactgcatcgcctcgacccaccgcggccatggccactgcatcgccaaaggcgtggacgtgtacggcatgatggccgagatctacggcaagaagaccggcgtgtgcggtggcaaaggcggctcgatgcacattgccgacctggaaaagggcatgctcggtgccaacggtatcgtcggcgccggcgcaccactggtggccggggcggcgctggcggccaagctcaagggccgcgatgacgtgtcggtagccttcttcggcgatggggcatccaacgagggcgccgtattcgaggccatgaacatggcgtcgatcatgaacctgccctgcatcttcgtggccgagaacaacggctacgccgaggccactgcctccaactggtccgtagcctgcgaccacattgccgaccgcgctgccggcttcggcatgccaggcgtcaccatcgacggctttgacttctttgccgtatacgaggccgccggcgctgccatcgagcgcgcccgctccgggcaagggccgtcgctgatcgaggtcaagctcagccgttactacggccatttcgaaggcgatgcgcaaacctaccgcgcccctgatgaagtgaagaacctgcgcgaatcccgcgactgcctcatgcaatttcgcaacaagaccacccgcgccggcctgctcacggccgagcaactggacgccatcgacgcccgcgtcgaggacctgatcgaagacgccgttcgccgcgccaaatccgatcccaagccacagcccgccgacctgctcaccgacgtctacgtcgcctacccc

SEQ ID NO: 31528 - DNA, 3062 bp, Pseudomonas putida
atgaacctctcgcgcctgttcatcctgcgcccggtcgccaccacgctgagcatgctggccatcgtgctggccggcctgatcgcctacaagttgctgccggtttccgccttgccgcaggtggattacccgaccattcgcgtcatgaccctgtaccccggcgccagcccgcaggtgatgaccagcgccgtcaccgcaccgctggaacgccagttcggccagatgccgggcctggaacagatggcctcgaccagttctggcggtgcgtcggtgctgaccttgcgtttcaacctcgacatgaacatggacgttgccgagcaacaggtgcaggccgcgatcaacgccgccagcaacctgctgcccagtgacctgccggcaccgccggtgtacaacaaggtcaacccggccgacaccccggtgctgaccctggccatctccagcaagaccatgccgctgcccaagctcaacgacctggtcgatacccgcgtggcgcaaaagcttgcgcaaatcagcggtgtgggcatggtcagcattgccggtggccagcgccaggcggtacgcatcaaggtcaacgtcgacgccctggcggccaatggcttgaatctggatgacgtgcgcacgctgatcggtgcctccaacgtcaaccagcccaaaggcaacttcgacggcccgacccgggtgtcgatgctcgatgccaacgaccagctgcgctctcccgaggagtacgccaacctgatcctggcctacaacaacggtgcgccgctgcgcctgaagatgtggccgaaatcgtcgacggcgccgagaacgagcggctggccgcctgggcgaacgagaaccatgcagtgctgctgaacatccagcgtcagccgggcgccaacgtgatcgaagtggtcgaccgcatcaagggcctgctgccgtcgatcaccgacaacctgccggcgggcctcgatgtatcggtgctgaccgaccgcacccagaccatccgcgctgcggtcaaggacgtgcagcacgaactgctgatcgccatcgttctggtggtgatggtcaccttcgttttcctgcgccgtttcagcgccaccctcattccgtcgattgccgtgccactgtcgctgatcgggacgttcggggtcatgtacctggccgggttctcggtcaacaatctgacactcatggccctgaccatcgccaccggctttgtggtcgatgatgccatagtcatgctggagaacatctcccggcatatcgaagagggcgagacgcccatgcaggcggcactcaagggcgcccgacagattggcttcaccctgatttcgctgaccttctcgctgattgcggtactgatcccgttgctgttcatggcggacgtggtcggtcgcctgttccgcgagttcgccatcacgctggcagtggccattctgatttccctggtggtgtccctgaccctgacgccgatgatgtgcgcgcgtctgctcaagcgcgagcccaaggaagaagaacaaggccgcttctaccgcgccagtggcgcctggatcgactggctgatccagcactacggcagtgccctgcagtgggtgctcaagcatcagccgctgaccttgctggtggcggtggccagcctggtgctcacggtgttcctgtacatggtcgtgcccaagggcttcttcccggtgcaggataccggggtgatccagggtatttccgaagcgccgcagtccacctcgttcgctgccatgagcgaacgtcagcaggccctgagcaaggtcatcctgcaagacccggccgtgcagagcctgtcgtcctacattggcgtagacggcgacaacgccacgctcaacagtggtcgcctgctgatcaacctcaagccccacggcgagcgcgatgtcagcgccagcgaagtgatcagccgcctgcagccgcaggtcgaccggctggtgggcatccgcctgttcatgcagccggtgcaagacctcagcatcgaggaccgggtcagccggacccagtaccagttcagcctgtcgtcgccggacgccgacctgctggcgcagtggagcggcaagctggtgcaggcgctgcagcagcgcccggaactggccgatgtggccagcgacctgcaggacaagggcttgcaggtgtacctggtaatcgaccgtgacatggccagccgcctggggatcagcgtctcgcagatcaccaatgccctgtacgacgccttcggccagcggcagatctcgaccatctacacccaggccagccagtaccgcgtggtgttgcagtccagtgacgccgccacgatcggcccgcaggcgctggagtcgatccacgtcaaggccaccgatggcggccaggtgcgcctttcggcgctggcgcggatcgagcagcgtcaagcgcagctggctatttcccacatcggccagttcccggcggtgaccttgtcgttcaacctggcccacggcgcgtcgctgggcgaagccgtgcaggtgatcgagcaggtgcagaaggacatcggcatgccgctgggtgtgcagacccgcttccagggtgcggcggaggccttccaggcgtcgctgtcgagtaccctgctgctgattctggcggcggtggtgaccatgtacatcgtgctgggggtgctgtacgaaagctacatccacccgatcaccatcctctcgaccctgccgtcggcggcggtcggtgccttgctggccttgctcatcagcggtaacgacctgggcatgatcgccatcatcggcatcatcctgctgatcggtatcgtcaagaagaacgcgatcatgatgatcgacttcgccctggaggccgagcgcaatcagggcatgagcccgcgcgatgccatctaccaggcggcgttgctgcgcttccggccgatcctgatgaccaccctggccgcgctgtttggtgcggtgccgctgatgcttgccaccggttcgggcgccgagctgcgccagccactgggcctggtgatggtcggcgggttgctggtcagccaggtgctgacgctgttcaccactccggtcatctacctgtacttcgatcgcctggcccgccgcctg

SEQ ID NO: 31529 - DNA, 1587 bp, Pseudomonas putida
gtggcactggcgggcgttaccgtgccgggggcgctgtatgtccagcgtcagctcacccgagaggaattcccggaaacccccggcgaggcggtcgtggaattggccgatacggcgacccagcaactgggcgacaccttgcgcggcatctggcgctggtcgttcaagggggcgcaggccggcttgccgggcttgcagggcgagacgctggaattgttcatcgatgttgcgcagaagggccgcagcattcgcggttacctcgataccgccgagcgcttgcgcagcggtgccgagccacgatatcgggtgctcggcgacttgcctgccgacaagccgggacggttacgctggcgcttgttcgacagtgccgatggcggccgcatgccgcgctacgagtgccatctcgtgctggatgaagtgtggggggtatttggcaatgcggggccggccaccctcaatggcagcatcctcgaccttgagcggccattggccatgcccgagcaggacaatcgcttcctggcccacaagcagacctttcccgaagcccgcgaacgcaccgccttgtcgccggcgatgatcgattggctgatcgcgccggagcatcgcctgttccaccagctgtggcatgcctcccgtgacaaatggcacaagctcgacaaggacaagcgcaacgccttgcgtggcctgggctggcagccggggccgcgtgaccgtgagcgcgatgcccgtggccggcacaaggaccgcaacggctcgggtgaagacttcctgttcatgcaccggcacatgctcggcgctgcacgggccatccaggacctgccgtcatggccgcgcttccccttgccacagcctgaacttgagcgcgatcgcctgggtttcgcgcgttacttcgataatcatgacggcaacgccttgccaccaacctggttggcttacgatgatgacgagtacacccagtgggtgcgcgatatcaaaagcgccgaaacctttcatggcaatttcgaggtgtgggagtcgcgttacagcgacccccagtacctgtcccggctgacgttggggcagttcggctcggagcttgaactgggcttgcacgactggctgcacatgcgctgggcctcagtcccacgtgacccgagcaacggcatgccggtgccgatggcgcgcacgccggatgatttcgcggcgcgctggtatggcgcgcagaacgactttctcggggacccgttctcttcccacgtcaaccctgtgttctggcgcttccatggctggatcgacgaccgtgtcgaggactggttccgcgcccatgaacgattccaccctggcgcagtcgtgcgccaggaggtcaatggcgtgccatggttcgcgccggggcgctgggtggaggtcgccgatccttggctggggccggacacgcacggctgcagtaacgtggcggggctgcgcccagggcgtagcgtggagatggatccggaaaccatgaagctggccttgcgcctgatttacagcgacgaggagcgctttgacgggctggtaggcaaagtgccgcgccgcccctggtatgctcgccacctgaaggtcaggcagcggtcg

SEQ ID NO: 31530 - DNA, 1770 bp, Pseudomonas putida
atggctagcattccaaccatttccttcgacgccatcatcatcggtggcggcggcgccggcatgcgcgcagcgctgcaactggctcaaggcggccacaagactgccgtagtcaccaaggtcttcccgacccgttcgcacaccgtatccgcccagggcggcatcacctgcgccatcgcttcggccgacccgaacgacgactggcgctggcacatgtacgataccgtcaagggttccgactacatcggtgaccaggacgctatcgaatacatgtgtcaggaaggcccggctgcggtcttcgaactggaccacatgggtctgccgttctcgcgcaccgaaaccggccgcatctatcagcgcccgttcggtggtcagtccaaggacttcggtaaaggtggccaggccgcccgtacctgtgccgcttccgaccgtaccggtcacgcgctgctgcacaccctgtaccagggcaacctgaaggcgggcaccacgttcctcaacgagtactacgcagttgacctggtgaaaaaccaggacggcgcattcgtgggtgtgatcgccatctgcatcgaaaccggcgaaaccctgtacatcaagtccaaggccaccgtgctggccactggcggtgcgggccgtatctacgcgtccaccaccaacgccctgatcaacaccggtgacggtatcggcatggccctgcgtgcaggcgtgccggtgcaggacatcgaaatgtggcagttccacccgaccggtatcgccggcgccggtgtactggtcaccgagggttgccgcggtgaaggtggctacctgatcaacgcccacggcgagcgcttcatggagcgttacgcgccgaacgccaaagacctggccggccgcgacgtggttgcccgttccatggtcaaggaaatcatcgccggcaacggcgtgggcccgaacaaggaccacgtactgctgaagctggaccacctgggcgaggaagtgctgcacagccgcctgccaggtatctgcgaactgtccaagaccttcgcccacgtcgaccctgtggtcgcgccggtgccggtcgtgccgacctgccactacatgatgggcggcgttgccaccaacattcatggccaggccatcaccatggacgccgacggccaggatcacatcatcccgggcctgttcgccgtaggtgaagtggcgtgcgtatcggttcacggtgccaaccgcctgggcggcaactcgctgctcgacctggtggtgttcggccgtgctgccggcctgcacctggagaaggcgctgagcgaaggcgtggaataccgcgacgccagcgacaccgacgtcgatgttgccctgaaccgcctgaacaagctcaacgagcgtaccagcggtgaagacgttgccagcctgaagcgcgagctgcagagctgcatgcagaactacttcggtgtattccgtactggcgaatacatgcagaagggtatcgagcagctggccggtctgcgtgaccgtatcgccaacgtcaagatcaacgacaagtcccaggccttcaacaccgcgcgtatcgaagcgctggagctgcagaacctgctggaagtcgccgaagctaccgccatcgcggccgaagcccgtaaagagtcccgcggcgctcacgcccgtgaagacttcgaagaccgtgacgacgaaaactggctgtgccacaccctgtactacccgggtgagaagcgcgttgccaagcgcggcgtcaactttgcgccgaagactgttccagccttcgaaccaaaagtccggacttac

SEQ ID NO: 31531 - DNA, 2763 bp, Pseudomonas putida
gtggaagagctctacgagctctacctgcacgaccctaacgctgtgccagaagagtggcgcacttacttccagaagttgccagccgacggcagcaccgctactgatgtatcgcactcgacaatccgcgaccatttcgtactgctggcaaagaaccagcgccgcgcccaaccggtttccgccgggagcgtgagcagtgaacacgagaagaagcaggttgaagttctgcgactgatccaggcctatcgtatgcgcggccatcaggctgccaagctcgacccgttggggttgtggcagcgccctgcgcccgtagacctgtcgatcaatcactacggcttgaccaatgccgatcttgatacgaccttccgtgccggcgacctgttcatcggcaaagaggaggcgagcctacgcgacatcttcgatgcactccagaagacatattgtcgcaccattggcgccgaattcacccacatcgtcgattccgagcagcgcagctggttccagcagcgcctggaaagcgtgcgcggccgtccggagtattccgctgacgtgcaggcccacctgctcgagcgcgtaaccgccggtgagggcctggaaaagtacctgggcaccaagtacccgggcaccaagcgattcggccttgaaggcggcgagagcctgattccgatgctggatgaaatgatccagcgttccggctcttacggcgccaaggaggtcgtgatcggcatggcccaccgtggccgcctgaacgtgctggtgaacaccttcggcaagaacccgcgcgagctgttcgacgagttcgaaggcaagaagatgaacgagctgggctccggtgacgtgaagtatcaccagggcttctcctcgaacgtgatgaccccgggtggcgaagtgcacctggccatggcgttcaacccgtcccacctggaaatcgtttcgccggtggtcgagggttcggtgcgcgcccgtcaggaccgccgcaacgacaccgttggcgacaaggtggtgccgatctcgatccacggcgacgctgcgttcgctggccagggcgtggtcatggaaaccttccagatgtcgcagacccgcggtttcaagaccggcggtaccgtgcacatcgtgatcaacaaccaggttggtttcaccatcagcaacccgctggatgcgcgctccaccgagtacgcgaccgacgttgccaagatgatccaggcaccgatcctgcacgtgaacggcgatgacccggaagccgtgctgttcgttacccagctggccatcgactatcgcatgcagttcaagcgtgacgtggtcatcgacctggtctgctaccgtcgccgtggccacaacgaggctgacgagcctaacggcacccagccgctgatgtaccagcagatcagcaagcagcgcactacccgtgagctgtatgccgagcagctgatccaggccggtcgcatcgacgccgagcgcgctcaggccaagatcgacgagtaccgcaacgcgctggacaatggcctgcacgtggtaaaaagcctggtcaaggagccgaaccgcgagctgttcgtcgactggcgtccgtacctgggccatgcctggaccgcgcgtcacgacacccgtttcgacctcaagaccctgcaggatctgtcggccaagctgctcgagctgccggaaggtttcgtggtccagcgtcaggtgtcgaagatctacgaagaccgtcagaagatgcaggccggtggcttgccgatcaactggggttatgcagagaccatggcttacgccaccctgcagttcgaaggtcacccgatccgcatgaccggccaggacatcggccgtggcaccttctcgcaccgtcacgcggtgttgcacaaccagaaggacgccagcacctacattccgttgcagaacctgttcccaggccagccacgtttcgatctgtacgattcgttcctgtccgaggaagcggtactggccttcgaatacggctactccaccaccatgccgaacgcgctggtgatctgggaagcccagttcggcgacttcgccaacggtgcgcaagtggtgatcgaccagttcatcaccagtggtgagcacaagtggggccgcctgtgcggtctgaccatgctgctgccacacggctatgaagggcaggggccggagcactcctccgcgcgtctggagcgttacctgcagctgtgcgccgagcacaacatccaggtctgcgtaccgacgacgccggcacagatttaccacctgctgcgtcgccaggtcattcgcccgctgcgcaagccgctggtagtcctgacgccgaagtcgctgctgcgccacaagctggccatctcgaccctggaagacctggcagaaggctcgttccagaccgtgatcccggaaatcgacgcaatcgatccggccaaggtcgagcgtctggtgctgtgcagcggcaaggtctactacgacctgctggaaaaacgccgtgccgaaggccgcgaagacatcgccatcctgcgtatcgagcagctgtatccgttccctgaggacgatctggtcgaaatcctcgccccttacaccaacctcaagcatgcggtctggtgtcaggaagagccgatgaaccagggcgcctggtacagcagccagcaccacatgcgccgtatcctgggccgccacaacaaggcactggtcctggaatacgccggtcgcgacgcttctgccgcgccagcctgtggttacgcttcgaagcacgccgaacagcaggaaaaactgctgcaagacgccttcactgtc

SEQ ID NO: 31532 - DNA, 1434 bp, Pseudomonas putida
atgacccagaaattcgacgtagtggtaatcggtgcaggcccaggcggctatgtggctgccatcaaggctgcccaacttggtctgaagactgcctgtatcgagaagtacaccgacgccgagggcaaactggccctgggcggcacctgcctgaacgtaggttgcattccttccaaggcgctgctggacagctcctggaagtacaaggaagccaaagagagcttcaacgtccacggtatctccacgggcgaagtgaagatggacgtcgccgcgatggttggccgcaaggccggcatcgtcaagaacctgaccggtggcgttgccaccctgttcaaggccaacggcgtcacttcgatccagggccacggcaagctgctggccggcaagaaagtcgaagtcaccaaggctgacggcaccaccgaagtcatcgaagccgagaacgtgatcctggcttccggctcgcgcccgatcgacattccgccggccccggtcgaccagaacgtcatcgtcgactccaccggcgccctggaattccaggccgtaccgaagcgcctgggcgttatcggtgcaggcgtgatcggcctggagctgggttcggtatgggctcgcctgggtgctgaagtgaccgtcctggaagccctggacaccttcctgatggctgccgacaccgccgtgtcgaaagaagcccagaagaccctgaccaagcaaggcctggacatcaagctgggcgctcgcgtcaccggctcgaaagtcaacggcaatgaagtcgaagtgacctacaccaacgccgaaggcgagcagaagatcaccttcgacaagctgattgttgcagtcggccgtcgcccggtgaccaccgatctgctggcttccgacagcggcgtgaccatcgacgagcgtggctacatcttcgtcgacgattactgcgccaccagcgttccgggcgtgtacgccatcggtgacgtggtacgcggtatgatgctggcccacaaggcttcggaagagggcatcatggtcgtcgagcgcatcaagggccacaaggcccagatgaactacgacctgatcccgtcggtcatctacacccacccggaaatcgcgtgggtcggcaagaccgaacaggccttgaaggccgagggcgttgaggttaacgtgggcaccttcccgttcgcggccagcggccgtgcgatggctgccaacgacaccggtggtttcgtcaaggtcatcgccgatgccaagaccgaccgcgttctgggtgttcacgtgattggcccatcggctgccgaactggtgcagcagggcgcaatcgcaatggaattcggcaccagtgccgaggatctgggcatgatggtcttcagccatccaaccctgtccgaagcgttgcatgaagcagcgctggcggtgaatggcggcgccattcacgtggccaaccgtaagaagcgt

SEQ ID NO: 31533 - DNA, 6522 bp, Pseudomonas putida
atgaacgcccaagactcactcaaactggctcgacgcttcatcgagctgcccgctgccaagcgacggttgtttctggatgccatgcgcggggagggcgtcgatttcgcgctgttgccgatcgcgcctggggtcgaggttgctgcccgtgacgcgctgtcatatgcccagcagcgcatgtggttcgcctggcggctcgatgccaagagtgctgcctacaacctgcccatggcagtcaagctcaaggggccgatagcgcctgaggccttgcagcaggcgctggacaccctggtggcgcgacatgaatcgctgcgcacgctgtttcccgaggttgacgaccagccacgccaacgcgtgcaggcgcaggcgtcgatcaggggcgagatgttggacctttcccacctgcagggcgaggcccaggcgcagcaggtcgaggccgcatgtgctgcagagtcggcggcacccttcgacttggccgccgggccgctgatgcgggtgcgcttgctgcgcacctcggccaccgagcacctgttgctgatcactctgcaccatatcatcgccgacggctggtcgctgggtatcctgatcgacgaactggttcggctttacgatgccgccgtggccggccaggcgtcagcacttgcgccgctggccatccagtatcgcgatttcgccctgtggcagcgcagctggctggaagccggcgagcaggcgcgccagctggagtactggttggatcatctgggcaacgaccaccccgtgttgcaattgccgagcgatcacctgcgtccggcgctgcccagctaccgtggcgaacgcctggagctgcaaatcgatgcagcgttggcccagcgcctgcaggccctggccaggcggcacaacgtcacgctgttcgtggtgctgctggccgctttcaagaccttgttgtaccgctacagcggccagtcgcgggtacgcgtcggtgtgccgatcgccaaccgcaaccgcagtgaagtggaggggctgatcggttgcttcatcaatacccaggtgctgcagaccgacatcgatccgactcagggtggtgcgcacctgctgagccaggtcaaagcctgtgcggcgcaggcgcaatcgcaccaggacgtgccgttcgaccagctggtggaagcgctgggcctggagcgcaccgggggcgtgagcccgctgttccaggtgcttttcaaccatcagtcgatggtcaccgacgtcgccactgtgcgcaccgcctcgggccttgagctggaaaaactcgagctgcgcaagagcactgcacgcttcgaccttaccctggacaccgtggaggttgccgggcagcttcgcgccgccttcacctttgcccttgacctgttcgagcgcgacaccgtcgaggccatggggcgtgattggctgagcctgctggccgccctcagccgcgatgacgtcgctgcgctgggtgactggccgctggcgggcgcacctgttgccgcaccgcaggtgctgccttatgccggcccgttgctgcaccagcgcgtgacggcctttgccaaggcgcagccgcagcgcatcgccgttgtcagtgccgatggctcgctcagttacggcgagctcgacgcgcgcgccgatcagctgtgtgcccagctgcaagcgcacggtgtggtcgccgatcagccggtgggcctgatcgccgagcgctcggtgaacctgttggttggcctgctggcgattctcaaggccgggggggcgtatgtaccgctggagccgggtcagccgcagcagcgaatggcattcatgctgcgtgacgcacagatcaaggtcttgctcagggccgaggacgagcctggcccggccatcgggggcgtacagtgcctggcgctgaacgcggcaggtggcgaggcaggggtgcccgtggcggttcactccggcaacctggcttatgtgatctacacctcgggcaccaccggtatgcccaagggggtcgcggtgtctcatggggcgctggccaattaccttgaaggcttgtccgagcggattgcccttggcgatctggaacacttcgccatggtctccacgcctgccgccgaccttgggcataccatgctgtttggcgcgctctgggccggcaagacggtacatctgctgcagcgcgaggcggtgctcgatgccgacggtttcgccgcctacctgtcggcaaaccacgtcgatgcgctgaaaatcgtgccttcgcacctgggtgcgctgctcgatgcctgcgccgatgccagcgtgctgccgcagcgttgcctggtgcttggcggcgaggcctgcccgccggcactgctggcgcgtatcggcaccttgcgcccgggcctgaaggtcttgaaccattacgggccgaccgaaaccacggtaggcgtgctcaccgccgaactggcggctggcgaggtaacgcatctgggcagcccgttgcgcaacagccgagtgcaggtgctcgacgccacgctgcaggcggtgcccggtatggccaaaggcgagctgtgcatcgccggggccggcctggcccgtggttacctcgcacgccctgggttgaccgctgagcgtttcgtgcctgatgcccacggcgagcctggggcgcgtctgtaccgcaccggcgatgtggtgcagcgtgatcgccaaggccgcctgttgtacctggggcgcgtcgatcaccagctgaagatacgcggctaccgcgtcgagccgggggagatcgaggcgtgcctgcaaggcctgccggatgtggacaaggcggtggtgcgtgccaccggccaggatggcagtttgcagctgctggcctacctggtggcgccgcggctgctggcccgcgagcgtgatgccgaggcggcacaggaggccgtgcagcaagcgctgaagttgcacgtgcaggcgcacatggtgccagcccgcgtgttgttcctcgacagcctgccattgactgccaacggcaaggttgacctggccagattgccgctgccggaccaacaacacccggtggccagccacacaccggctcagacgccactgcagatcgacctggccaacctttggcaggaagtgctgggctgtccgcaggtcggcttggacgacaacttctttgccctgggtgggcactcgctcatggccacccagatcgtctcgcgcgcacgccgacaactgggcctggatatcccgttgcgcctgctgttcgatacggccgacctgcgcagcttcagccacagggtcagccaactgggcgaggtggccgatgcaccgatccaggtgctcgaccgccaggcttggttgccggtgtcccatgcccagtaccgccagtggctgttctggaaaatccatccgcacagctcggcctaccacacgccgatggccgtgcgcatcaccggtgccctggaccgtgaagcgctggcccaagcgttttcggcgctggtgtcacggcatgaatcattgcgtacctgtttcgaagagcagcaaggtgtgcctggcttgcgcgtccacgccaatctcgcggtcacccttgagcagcagcaggcgcaagcctttgaccccgcgcaactgttgcagcagttgcaggccgacatccagcagccattcgaccttgccaacgggccgctgattcgcatgaagctgtatcagcgtggcgagcaggagcacctactgctcgtgaccctgcaccacatcgtctccgacggctggtcgatgggcgtgatggtgcgcgagtgcattgccgtctacaaccaccatgccgcaggggcagcgcagcctgatttcgcgcctttgccggtgcaatacgccgactatgccagctggcaacgcgagcgcctgagcgaaggccagatgcaagcccagctcggctactggcaggcgcacctggaagatgatttcgcagtgctgcagttacctgccgaccgcccacggcccgagctgcaaagctatcggggcggacgtctggacgtgcgcctgcccgcgcagttgacggcggacctgcggcgcctggcagtgcgctgcaacgccacgctgttccacgtcttcctagcctcgttcggcctgctgctggcgcgctacagcggcaacgagaagatcaacatcggcgtgcccatgaccaaccgcaatcgcctggagctcgaagggttgatcgggttcttcgtcaacaccgtggtgctgcggctgagtgtggactacagcgtcagtttcgagcagttgctggcccataccaaagaaatcagcctgcaggcccaggccaacaaggacctgccattcgacgctctggtcgaggcgctgcagccagagcgcggcatgggttacaacccgttgttccaggtgatgtacaaccacttgcgcgatctgggtgagcaggtgaccgggcaaagcttgaatggcctgcaggtagaggaggtggaccttgacgaaggcaccgcgcagttcgatctctcgctcgacaccgtggagcgctccgacggcgtgttggcgaccttcacctatgccgtcgacctgttcgacccctcacgcatacagcgtatggccacgcactggctgaacctgctgcaagcgctgtgtgcccagccgcacgtctgcgttgatcgcctggccctggccacggccgacgagcgccgtctggtcgagagagactggtgccaggggcctgcagagcaattgagcgatactgccgtggcccgccagttcgaagcgcaagtgctgcgcgcaccggatgccgtggctgtcatccatgaaggccaggcctggagctatgccgaactcaaccggcgcgccaaccgcctggcccatcgcctgcaagcgctcggcgccgggcctgaggtgctgatcggtgtggccctggagcgtggcctggggatggtcgcgggcttgctggcgatcctcaaggtgggcgctgcctatgtgccgctggaccctgactacccggccgaacgcctggcctacatgatcgaggacagcggcctggccttgctgctgacccaggccagcctgagtgagcagctggcggtgcctgcctgcgtcacgcaggtgtgcctcgacgcgctgctcgaagacggtgacgcttccaacccgcaggtcgccatcgaccctgccacgctggcctacgtcatgtacacctcgggctccaccgggcggcccaagggtgtggcgatcacccagggcgcactgagccagcatgcccaggtgtcgctgggcttcttcaacctcaagcccagcgatcgcatcctgcagttcgccaccttcaacttcgacggcttcgtcgagcagctgtacccggcgctgatctgcggcgcttcggtggtggtccgcgggccggagttgtggggcagtgagcggttctaccgcgaactgatcagcaatgacatcagcgtggtagatgtgaccaccgcctactggttcatgctggccaaggactttgccgagcacggccctcgcgactacggccgcctgcaccagtttcacgccggcggcgaagccatgccgccggagggcttgctcgcctggcaggcggcgggccttggccatgtaacgctgctcaatacctacggcccgactgaggcgaccgtcacggttaccgcccacgactgcgcgccttacctaggtgccacggcgcaggcgctgccaccggtgatgccgatcggccgggtgctggccgggcgcagcatccacctgctggataacagcggcggtgctgtgctcaatggcgcggtcggcgaactgatgatcggcggcgaactgctcgccaggggctaccaccagcgccctggcctgaccgctgagcgcttcatccccgacccgttcggcgcccccggcagccgcctctatcgctccggcgacctggcgcgctacctcgccgatgggcagatcgaatatgccgggcgcatcgaccatcaggtgaagattcgcggcttccgcatcgagctgggagaagtcggcgcgcgcctgctggagcacgccagcgtacgtgatgccctggtcatcgacgtcgatgggccgctgggcaagcaactggttggctacctggtgcctgcggtggcagacgtcgcccaggccagcgtgcaaacgcaacaggagcttctggcgcagttgcgcaccgaccttcgcagcagcctgccggactacatggtgcctgcccacctcatatggttgcccgagctgcccctgagcccgaacggcaagctggaccgcaaggcgctgccgcaacccgatctggcccagcttcaggtgcgctatgtgccgccgtacagcgataccgaatgcaaggtcgcagcgatctgggccgatgtcctgcgcatcgagcaggtcgggctggacgacaacttctttgaactgggtggtcactcgctgctggcggcccaggccctctcacgtatcaacagccaactgggcatcgatatgccgatccgtctcatcttcgaaacaccggttctgcgggcctttgcccaggcgctggaaggcgcgggccaggccctgaccgaagaaggcctcgccggtatcgaacaactgatgaatgaattgactgaggct

SEQ ID NO: 31534 - DNA, 4989 bp, Pseudomonas putida
gtgcctgcgcacgttcaacgtctggttttttaccgtccgtcatgccacgggttggctatcgttgatccgtacacggcgcacgcagcgacgcttcaattattacaaagcccaagcggagtaccacagatggcgttcttcaccgcagccagcaaagccgacttccagcatcaactgcaagcggccctggcgcagcacatcagcgaacagtccctgccacaagtggcgctgttcgccgagcagttcttcggcatcatctctctggacgaactcacccagcgcaggctttccgacctggccggctgcaccctgtcagcctggcgcatcatcgagcgtttcgaccccgaatacccgcaagtgcgggtgtacaaccctgattacgaacgcaatggctggcagtcgacccataccgtggtcgaagtgctgcaccatgacctgccgttcctggtcgactcggtgcgcaccgagctcaaccgccgtggctacagcatccacaccctgcaaaccaccgtgctcagcgtgcgccgtggcgccaagggcgagctgttggagctgctgcccaagggaacccagggcgaaggcgtgcgctacgagtcactgatgtacctggagatcgaccgctgcgccaatgccgccgagctgacagtgctgacccgcgagatcgagcaggtgctggccgaggtacgggtggtggtggccgacttcgaaccgatgaaggccaagctgcgtgaagtggtagcgcaggtggagcaaaccgcctttggccccgcccaaaacgagaaaggcgaagtcaaggccttcctcgaatggctgctggataaccacttcaccttcctgggctatgaagaattcaccgtcaagggcgacgccgatggcggccagatggtctacgacgagcagtcgttcctcggcctgccgcgccgtctgcgcgtgggcctgaccgcagaagagctgcgcatcgaagactacgctgtggcctacctcaacgagccgctgctgctgtcgttcgccaaggccgcactgcccagccgcgtgcaccgcccggcctacccggactacgtgtcgatccgccagctggacgccgacggcaaggtcatcaaggagcaccgcttcatggggctgtacacctcgtcggtgtatggcgaaagcgtgcatgccattccgtacatccgcgtgaaggtggccgaagtcgagcgccgttcgggctttgatcccaaggcccacctgggcaaggaactggcccaggtgctggaagtgctgccgcgcgacgacctgttccagacgccgatcgacgagctgttcagcacggtcatggcaatcgtgcagatccaggagcgcaacaagatccgcgtgttcctgcgtaaagacccgtatggccgcttctgctactgcctggcctacgtcccgcgtgaaatctattccaccgaagtacggcagaagatccagcaggtgctgatggagcgcctgaaggccagcgactgcgagttctggaccttcttctccgaatcggtactggcccgtgtgcaactgatcctgcgggtcgaccccaagaaccgtatcgacatcgacccgcagcagctggaacgcgaagtcatccaggcctgccgctcgtggcatgacgactactcggcactggtggtggagaacttcggcgaagcccagggcaccaacatcctcgccgatttccccaaaggcttcccggccggttaccgcgagcgcttcgccgcgcactcggcggtggtcgacctgcagcatgtgctgaacctgtcggaaagcaagccgctggccatgagcttctaccagccgttgacccaggtgggcgagcgcatcctgcactgcaagctgtaccacgccgacaccccgctggcgctgtccgacgtgctgccgattctggaaaacctcggcctgcgcgtgctcggcgagttcccgtaccgcctgcgccatgccaatggccgcgaatactggatccacgacttcgccttcacctacagcgaaggcctgagcctggacatccagcagctcaacgacaccctgcaggacgccttcatccacatcgtccgtggtgacgccgagaacgacgctttcaaccgcctggtgctcaccgccggcttgccgtggcgcgacgtggccttgctgcgtgcctacgcccgttacctgaaacagatccgtctgggcttcgatctgggctatatcgccagcaccctgaacaaccacaccgacatcgcccgtgagctgacccggttgttcaagacccgcttctacctggcgcgcaagcttacccaggacgaccttgacgacaagcagcagcgcctggaacaggccatcctgagcgccctggatgacgtgcaggtgctcaacgaagaccgcatcctgcggcgctacctggacttgatcaaggccaccctgcgtaccaacttctaccagcccgacgccaacggccagaacaagtcgtacttcagcttcaagttcaaccccaagctgatccccgaactgcccaaaccggtgccaaagttcgagatattcgtctattcgccgcgcgtcgagggcgtgcacctgcgctttggcaacgttgcccgtggtggcctgcgctggtccgaccgcgaagaggacttccgtaccgaagtgctggggctggtgaaagcccagcaggtgaagaactcggtcatcgtgccggtcggcgccaagggtggtttcctgccgcgtcgcctgccgctgggcggcagccgtgacgagatcgccgccgaaggcgtggcgtgctaccgcatcttcatttccggcctgctcgacatcaccgacaacctcaaggacggtggcgtggtgccgccggccaacgtggtgcgtcatgacgatgacgacccgtacctggtggtagcggccgacaaaggcaccgcgaccttctccgacatcgccaacggcattgccatcgactacggcttctggcttggcgatgcctttgcctcgggcggctcggccggttacgaccacaagaagatgggcattaccgcgcgcggcgcctgggtgggcgtgcagcgtcacttccgcgagcgtggcatcaacgtgcaggaagacccgatcaccgtcattggtgtgggcgatatggccggcgacgtgttcggcaatggcctgctgatgtccgacaagctgcaactggtggctgcgttcaaccacctgcatatcttcatcgaccccaaccccgaccctgccaccagctttgccgagcgcaagcgcctgttcgacctgccgcgttcggcctggagcgactacgacaccagcatcatgtccgaaggcggcgggatcttcccgcgcagtgccaagagcatcgccatcagcccgcagatgaaagagcgcttcgccatcgaagccgaccgcctgaccccgaccgagctgctgaacgcgctgctcaaggccccggtggacctgctgtggaacggcggcatcggtacctacgtgaaggccagcactgaaagccacgccgatgtcggcgacaaggccaacgatgcgctgcgggtcaacggtaacgaactgcgctgcaaggtagtgggcgagggcggcaacctgggcatgacccagctcggccgcgtcgagttcggcctgaacggcggcgccaccaacaccgacttcatcgacaacgccggcggcgtggactgctccgaccacgaggtcaacatcaagatcctgctcaacgaagtggtgcagggtggcgacatgaccgagaagcagcgcaaccagctgctgggcagcatgaccgacgaagtggccggcctggtgctgggcaacaactacaagcagacccaggcgctttcgctggccgctcgccgcgcccgcgagcggattgccgagtacaagcgcctgatggccgacctcgaggcgcggggcaagctggaccgtgccatcgaattcctgccgtccgaagagcagttggccgaacgcctggctgccggccagggcctgacccgcgccgagctgtcggtgctgatctcgtacagcaagatcgacctcaaggagcaactgctcaagtcgctggtgccggacgacgactacctgacccgtgacatggaaaccgctttcccgccgtccctggtcagcaagttcgccgaggccatgcgccgccaccgcctgaagcgcgaaatcgtcagcacccagatcgccaacgacctggtcaacaacatgggtatcaccttcgtccagcgcctgaaggagtcgaccggcatgagcccggccaacgtggccggtgcttacgtgatcgtgcgcgatatcttccacctgccgcactggttccgccagatcgaggcgctggactatcaggtgccggcagagatccagctcaccctgatggacgagctgatgcgactgggccgccgagccacccgctggttcctgcgtagccgccgcaacgaacaggacgccgggcgcgataccgcgcacttcgggccgaagatcgcgcagctgggtctgaagctggatgagctgctcgaaggccctacccgcgaacgctggatggtccgctaccagggctttgtcgacgccggtgtgccggagttgctggcgcgtatggtggcgggtaccagccacctgtacaccctgctgccgatcattgaagcggccgacgtgaccggccatgagcctgcgcaggtggccaaggcattcttcgccgtgggcagcgcgctggacctgacctggtacctgcaggaaatcagcaacctgccggtggaaaacaactggcaggcgctggcgcgcgaggcattccgcgacgatatcgacttgcagcagcgggcgatcaccatttcagtcctgcagatggccgatgcaccgcaagacatggatgcccgcgtggcgctgtggtcagagcagcatcggggaatggtggagcgctggcgcgccatgctcgacgacctgcgcaatgccacgggcactgactatgcgatgtacgcggtggccaaccgcgagctggtcgacctggccatgagcgggcaggcagcggtggtgccgtcc

SEQ ID NO: 31535 - DNA, 1071 bp, Pseudomonas putida
atgcgtcccgcccgcgccctgatcgacctccaggccctgcgccacaactaccgtctggcccgtgaactgacgggtgccaaagccctcgccgtgatcaaggccgatgcctacggccacggcgccgtgcgctgcgccctggccctcgaggccgaagccgacggctttgccgtggcctgcatcgaagaggcgctggaactgcgcgccgccggtatcaaagccccggtactgctgctggaaggtttttttgaagccagcgaactggcgctgatcgccgagcacgacctgtggtgcgtggtgcactcgctgtggcaactggaagccatcgagaaaaccccgctgcacaaaccgctcaacgtctggctgaagctggacagtggcatgcaccgcgttggcctgcaccccaaggactaccacgatgcctaccagcgactgctggccagcggcaaggtttcgcgcatcgtgttgatgacccacttcgctcgcgccgacgaactggacgctgacgctacctcccagcaaatcgccgtgttcgaagctgcccgacagggcctggccgccgaatgcagcctgcgtaactcgcccggcgtgctgggctggccgcaagcgcccagcgactgggtgcgcccaggcctgatgctgtacggcgccacgccgttcgaagtggcgcaggccgaggccgcacgcctgcaaccggtgatgaccctgcaatcgcgggtgatcagcgtgcgcgagctgcctgccggcgagccggttggctatggtgccaagttcgtcagccctcggccgacccgcgtgggtgtggtcgccatgggctatgccgatggctacccgcgccaggcgcctaacggcaccccggtgctggtcgctggcaagcgcacccagctgatcggccgggtgtcgatggacatgctcagcatcgacctcaccgacgtaccgcaagccactgtcggcagcccggtcgaattctggggcaagcaggtgctggccagtgaagtggccgcgcatgcgggcactattccctatcagatcttctgtaacctgaagcgggtaccacgggactacatcggcgaa

SEQ ID NO: 31536 - DNA, 1857 bp, Pseudomonas putida
atgcacctctgctccatcgaccaggctgtcgagcaggtcttgtcccggctgccagcccatatccatatgggcctgcctttgggcctggggaaacccaacgccttcgtcaacgcgctttacgcccgcgtacgcgagctgcccgaacggcgcctgaccatctataccgcactttccctcggccgcccgccactgggcgatggcctgcagcggcgctttctcgaacccttcgtcgagcgtgtctttgctgactacgaagagctcagttacctcgcagacctgcgcaacgacacgttgccacccaatattcgggtcgaacagttcttcatgcagcccggcagcctgctgcacagcgaatcggcccagcaggactacgtcagcagcaactacagccacgccgcacgtgatatcaacgccaagggcctgaacctgatagcccagttggtggccgccacccccgaaaagcccgtgcacctgagcctggcctgcaacccagacatcaccctcgacctgctgccgatgatcgccaagcgccgcgctgcaggcgaaaccatcctcatgctgggccaggtgcatgccgaactgccctacatgccaggcgatgccgagctgcccatcgatgccttcgacctgctgctcgatgaagtcgagcaacgtcggctgttttccacaccaaacatgccggttggcattcaggaccactgcatcggcctgcacgccagcagcctggtgcgtgacggcggcaccctgcagatcggcattggtgccatgggcgatgcggttgccgcggcattgctggcacgtcagggcgacaacgccggttaccgtgcggtgctcaaggcgctggatgtcggaccgtggcaggcgttgatcgagcgagaagggggcctggacacccttacccacggcttgtacggctgcagcgagatgttcgtcaacggcctgctggtgctggccgaagcagggctgctacgacgcccggcggacgagcagggcgcaatactgcatggcggcttttttctcggcccgcaagcgttctaccagcgcttgcgcgagatgccgctggagcagcgcgcgcagtttgtcatgacccgtatcagcttcatcaacgagctctacgggcaggaggcactcaagcgccgacaacgtcgtgatgcgcgcttcatcaacaccgcgtttggcatgaccctgctcggcgccggggtggccgaccagctggaagacggccgggtgctcagtggcgtgggcgggcagtacaacttcgttgcccagggccatgcgctggagggcgggcgttcgatcctgctcttgcgcagctggcgcgaggcaggcggggaggtgacctcgaacctgttctggacctatggccactgcaccattccccggcacctgcgcgatatcgtggtgaccgagtacggcattgcggacttgcgtgggcagactgacagcgaagtgattgcgcggttgttggcggtgagcgattcgcggtttcagccgggcctgatcaagcaggccaaagacgctggcaagcttgccgacgactttcagctggaggcgcgctttaccgacaataccccgcaacgcctggaggcgatcagggcacagcatgcgcggctgttcccggagtatccgatgggcacggactttacggccgaggagcgggatctgttgcgggcgctgaactggttgaagagcaagttcaagctgagcgaggtgctggagctgggcaaggcagcgttggatgcaccggggccggaggggtatgaaagccacctggggcggatgcagttggggcagccgcaggggcttaaagaagaactttaccagcgcttgttgttggcggggctggcggcaaccaga

SEQ ID NO: 31537 - DNA, 1431 bp, Pseudomonas putida
atggctggcaaaacgctctacgacaaactctgggaagcccatgaggtcaagcgccgtgatgacggctcgtccctgatctacatcgaccgccacatcatccacgaagtgacgtcgccccaggccttcgaaggcctgcgcctggccaaccgcaagccatggcgtatcgacgccaacatcgccacgcccgaccacaacgtgccgaccacgccagagcgcaagggcggtatcgaggcgatcgtcgaccaggtgtcgcgcctgcaggtgcagaccctcgacgagaactgtgacgaatacggcatcgtcgaattcaagatgaatgacgagcgccagggcatcgtccacgtcatcagcccggagcagggcgccaccttgccgggcatgaccgtggtctgcggtgactcgcacacctccactcacggcgccttcggtgccttggcccatggcatcggcacttccgaggtcgagcacgtgctcgccacccagtgcctggtcgccaagaagatgaagaacatgctggtgcgcgtggaaggccaattgcctgccggcgtcaccgccaaggatatcgtgctggccgtgatcggcaagatcggcaccgccggtggcaacggtcacgccatggaattcgcaggcagtgccattcgcgaattgtcgatggaaggccgcatgaccatctgcaacatgtccatcgaagccggcgcccgcgtgggcctggtggcaaccgatgccactaccgttgcctacgtcgaagggcgcccgtacgcgccgaagggcgagcagtggaagcaagcggtcgagtcgtggaaagacctggtgtcggatgacgatgccgtattcgacaccgtggtcgagctggatgccagccagatcaagccacaggtcagctggggcacttcgcccgagatggtcctggccgtcgaccagcgcgtaccggatccggctgccgaaaccgacctggtcaagcgtggttcgatcgagcgtgccttgaagtacatgggtctgaccgccaaccaggcgatcaccgacatcaagctggaccgtgtgttcatcggctcgtgcaccaactcgcgaatcgaggacctgcgcgctgcggcggaaatcgccaagggccgcaaggtggccgccagcgtcaagcaagccatcgtcgtgccaggttccggtctggtcaaggcccaggccgagcgtgagggcctggacaagatcttcctcgaagccggtttcgaatggcgtgaaccaggctgctcgatgtgcctggcgatgaacccggaccgccttgaaagcggcgagcactgtgcgtccacctccaaccgcaacttcgaaggccgtcagggcgccggtggccgtacccacctggtcagtccggccatggccgccgctgctgctgtagcgggccacttcatcgatgtccgcgagttgatccaagggagcgcagca

SEQ ID NO: 31538 - DNA, 1224 bp, Pseudomonas putida
gtgacagccgtggctgaggtcagccaggcccggccgctgatgccggtggaacaggcgctggagcaactgctggcgctggccgaagctgcaccgatccgcgagaccgaaaacctgccgctggccgaagccgagggccgcgtgctggccaccgacctggtggcctcgctcgacctgccgccctggccgaacagcgccatggacggttatgccttgcgcctggctgactggcagggccagccgctgccggtcagccagcgtattttcgccggccatgcgccccagccgctgcaaccgggtacctgcgcgcggatcttcaccggcgcgcctgtgccggagggggccgactgcgtcgagatgcaggaaaacaccgaagtactcgaagatggccgggtgcgctttctcgaagcgttgcgcaccgagcagaacatacgccctcaaggtcaggagacccgcaagggcgagcaggtgatgagcgccggcacccgccttgggccgatcgaactgggcctggcggcgaccttggggcatggccgtctggacgtggtgcgcaaggtaaaagtggcggtgctgtccaccggcgacgaactggtcgagccaggcctgccgctcgggcctgggcagatctacaacagcaatcgcaggctgctggtcagctggttgcagcggctgggttgcgaagtggtcgatgccggcatcctgccggatgacctggcccgcactcgcgcctgcctggctgaactgggtggcgtagacctgattctgtccaccggaggcgtctcggtgggcgaggccgactacctcggtgccgccctgcgcgaggccggcgaactggcgttgtggaagctggcgatcaaaccgggcaagccgctgaccttcggccacttccagggcgtgccggtgattggcttgccgggtaacccggcctcgaccttggtcaccttcggtctgctgaccaggccctacctgctgcgtcgtcagggtgtgattgacgtcacgccgttgcggttcgacatgccggccgggtttgactggcccaagccgggtacgcgccgcgaatacctgcgcgcgcgcatcgaacagggccgcgtgcgcatctacaagaaccagagctcgggtgtgctgcgcagcgcagcctgggcggagggcctggtggaagtgcgtgaaggcagcacgccgaagcagggcgacatcgtgccattcatccccttcagcgagctacttggc

SEQ ID NO: 31539 - DNA, 885 bp, Pseudomonas putida
atgcaagggcgcaaggcaatgctggtgctgcacggcaagcaggcgatgaacgaagacgtgcgcagcgccgtgggcgacctgcgcgatagcggctgggtgctggatgtacgggttacctgggaggcgggcgacgcccaacggctggtcgccgaggcactggcagcgggctacagccatatcgtcgccggtggcggggacggcacgttgcgtgatgtggccgaggccatgggcctggccgctacccaggccagcctggccttgttgcccttgggtacggccaacgattttgccaaagccgctggcatccccttggagccggcatcggcgctggccttgctgaatgtcgcgccacaaccgatagacctggggcaggctggcgatcagttgttcctcaacatggccacgggtggctttggcagccaggtcaccgccaatacctccgaagacctcaagaaagtgctgggcgctgccgcctacctgttcaccgggttatcccgcttcagtgagctacaggcggcttcggtagagctacaggggccaggcttccattggcaaggagatttgctggcgctgggtatcggcaatggccgacaggctgggggcgggcaggtgctgtgccccgaagccatggtcaacgacggtttgcttgacgtcgctattctgcctgcaccacaggaagtggtgggggctctgcgggacctgttgggcggtgacggcctgttcgttcgggccaggttgccatgggtcgagatcaagagttcgcaagggttggacatcaacctcgatggcgagccgttgcaggctgccaacctgcgctttcaggcaaggccggcggcgttgcacctgcacctgccggccgggtcaccgttgctcagtcatccaggc

SEQ ID NO: 31540 - DNA, 1470 bp, Pseudomonas putida
atgatcgatttattcagcggactggatgcctgggtgttggtgagcctgctgctcgccttgaccttcgtactcgccttcgagttcatcaatggctttcatgacaccgccaacgcggtagctaccgtcatctataccaaagccatgccgccgcacctcgccgtgttcttctccggcgtgttcaacttccttggcgttctgctcggcggtgtaggggtggcctatgccatcgtgcacctgttgccggtagagctgctgatcaatgtgaacaccggccacggcctggccatggtcttctcgttgctggctgcggccatcacctggaacctgggcacctggtactttggcatccccgcctccagttcgcacacgctgatcggttccatcctcggtgttggcctggccaacgccctgatcaacgacattccgctgggcgacggcgtcaactggcagaaagcgatcgatatcgccatgtcgctggtggtctcgccaatggccggcttcgccgttgctgccctggtgctgatcggcctgaaatggtggcgcccgctgtcgaagatgcacaaaaccccggaacagcgccgcaagctcgacgacaagaagcacccgcccttctggaaccgtctggtcctggtggtttccgccatgggcgtgagcttcgtgcacggctccaacgacggccagaaaggcatcggcctgatcatgctggtgctgatcggtattgtcccggccaagttcgtactcgacctgaacagcaccacctaccagatcgaacgtacgcgcgacgccaccctgcacatgagccagttctaccagcgtaacgccgccaccctgggcgagttcctggcactgggcaaggccaaggccagcgacctgccggagcagttcagttgcaacccgcagcagaccgagccgaccattgctgcgctgcagacctcgctgaagggcgtgacggactaccacagcctcgatgccgagaagcgcgttgaagtgcgccgctatctgttgtgcctggatgacacggcgaagaaggttggcaagctgccaggcctggacgcccgtgaaaagtccgaccttgaaaaactgcgcaaagacctcaccgccaccaccgaatacgccccgttctgggtgatcgtggccgtcgcactggcccttggcctgggtaccatggttggctggaagcgcgtggtgttgacggtgggcgagaagatcggcaaacaaggcatgacctatgcccaaggcatgtcggcacagatcaccgcagcctgcgccatcggcatggccaacgtattcgccctgccggtatcgaccacccacgtgctgtcgtctggcgtggccggcaccatggtcgccaacaaaagtggcctgcaaggcggcactgtgaaaaccatcctgctggcatgggtcctgaccctgcctgcctcgatgggcctggcggccggcctgttctggctggcgtccaaagccattggc

SEQ ID NO: 31541 - DNA, 849 bp, Pseudomonas putida
atgcgcacctatcgtctggtgatcgcctgccccgaccgtgtaggcatcgtggcgaaagtcagtaatttcctggccttgtacaatggctggatcaacgaagccagccaccactccgatgagcagagcggttggttcttcatgcgtcatgaaatccgcgctgaatcgctgccgttcggtatcgaagccttccgtgaggcgtttgcgccgatcgccgaagagttctccatgacctggcgcattaccgactcggctcagaaaaaacgcgtggtattgatggccagccgtgagtcgcactgcctggcagacttgctgcaccgctggcacaccgatgagctggactgcgagatcccttgcgtgatttccaaccacaacgacctgcgcagcatggtcgagtggcacggtattccgttcttccatgtaccggtcgaccccaaagacaaggccccggcctttgccgaagtgtcgcgcctggtgcaggagcatgccgccgacgtcgtggtgctggcccgctacatgcagatcctgccgccacaactgtgccgggactatgccgagaaggtgatcaacatccatcacagcttcctgccgtcgttcgtcggcgccaagccttaccaccaggccgccctgcgtggggtgaagctgatcggcgcgacgtgccactacgtcaccgaagagctggatgccggcccgatcatcgagcaggatgtggtgcgtgtcagccatgccgacagcatcgaggacatggtccgcttcggccgtgatgtggagaagatggtgctggcccgtggcctgcgttatcacctggaggaccgcgtgctggtgcatggtaacaagactgtggtgttcgac

SEQ ID NO: 31542 - DNA, 939 bp, Pseudomonas putida
atggccgattccgctttcttctgccccctgtcccacgagggcatcctcgccgtccgcggctccgatgcaggcaagttcctgcaaggccagctgacctgcaacatcaactacctcagccaggaacacgccagcctcggcgcccgctgcatggtcaaggggcgcatgcagtcgagcttccgcatagtgcccgaaggcaacggctacttgctggccatggccagtgaactgctcgacgcgcaactggccgacctgaaaaaatacgccgtgttctccaaggccacgctgaccgacgaaagcaccgcatgggcacgcttcggcctgcaaggtggcgacgctgcactgcaggcgctggggcttgtcgtgcccgccgccgccggtagcaccgtgcgccatgacgggctgatcgcgatcgccgtgtccgccggccgggtcgagctgtgggtgccggtggctgacgccgagccagtacgccaggcccttgccgcagcgctgcccgaaggcacgctaaacgactggctgctgggccagattcgcgcaggtatcggccaggtcatgggcccaacccgtgagctgttcatcccgcagatgatcaacctgcaggccgtcgacggcgtcagcttcaagaaaggctgctacaccggccaggaaatcgtcgcccgcatgcagtacctgggcaaactcaagcgccgccagtaccgcctggcacttgaccagcaggccattccggccccgggcgccgagattttctcgcccacccatgggtcgtcggtcggtgaagtggtcattgctgccggcaacggcacgggctgcgaactgctcgcggtgctcagcgccgaggcggtggaagacggccacctgcacctgggcagcctcgaaggcccgcgcctgcaggtgctgaccctgccttacgaactggaccgcgaccgggaaatccagcgc

SEQ ID NO: 31543 - DNA, 1452 bp, Pseudomonas putida
atgagcatccgccgcaccaaaatcgtcgccacccttggccccgccagcaactcgccggaagtgatcgaacaactgatcctcgccggcctggacgtggcacgtctgaacttctcccacggcacgccggacgagcacaaggcccgcgcgcgcctgatccgtgacatcgccgccaagaatggccgccatgttgcactgctgggcgacctgcagggtccgaagatccgcatcgccaagttcgccaacaagcgcatcgaactgaagatcggtgacaagttcaccttctccaccgcccacccgctgaccgaaggcaaccaggacatcgtcggtatcgactaccccgacctggtcaaggactgcggcgttggtgacgaactgctgctcgacgatggccgcgtggtcatgcgcgtcgaaaccgccactgcagatgccctgcactgcgtggtgatcatcggtggcccactgtcggaccacaaaggcatcaaccgtaaaggtggcggcctgaccgcaccggccctgaccgaaaaagacaaggccgacatcaaactggctgcggaaatggacctggactacctggccgtatccttcccgcgtgacgccagcgatatggaatacgcgcgcaagctgcgtgacgaagccggcggcagcgcctggctggtagccaagatcgaacgcgccgaagcggtggccgatgacgagaccctcgacaagctgatcgccgcctccgacgctgtgatggttgcccgtggtgacctgggcgtggaaatcggcgacgccgagctgatcgctatccagaagaagatcatccagcacgcccgccgcaacaacaaggccgtgatcgtggcgacccagatgatggagtcgatgatccagaacccgatgccgacccgcgcggaagtgtccgacgtggccaacgccgtgctggacaacaccgatgcggtgatgctgtcggccgaaagcgccgccggttcctacccgatcgaagctgtccaggccatggcacgcatctgcctgggtgccgaaaagcacccgaccagccagaagtccagccatcgcctgcacaccaccttccagcgctgcgacgaaagcatcgccttggcggccatgtacactgccaaccacttcccgggcgtaaaggcgatcatcgccctgaccgaaagcggctacaccccgctgatcatgtcgcgcctgcgttcgcatgtaccgatcttcgccctgtcgccgcaccgcgccacccaggcgcgcgcctcgatgttccgtggcgtgtacccgattgccttcgacccggccgcgctgccggccgataaggtgagccaggcggcggtcgacgaactgctcaaacgtggcctggtggagcaaggtgactgggtgatcctgaccaagggtgacagctaccacaccatcggtggcaccaatggcatgaagatcctgcacgtcggtgatccgctggtcggt

SEQ ID NO: 31544 - DNA, 804 bp, Pseudomonas putida
atgaacaagctggccgagttggttcaagcacaattgctcgacgccatcgaaaaggatgacctggtcctgccaaccctgcccgaggttgccttgagcatccgcgaggcagcggaagacagcgagatcagcgtagcggccctgagcaaggtgatcggccgcgacgcggccctgtctgcgcgcctgatcaaggtcgtcaacagcccattgctgcgtgctgcggtcgaggtgaccgacctgcataccgccatcacgcggctaggcatcaactacagctgcaacctggccatcggcctggtgatcgagcagattttccatgcccgctcgccggcagtggagcagaaactgcgcgatatctgggccagtagcctggaagtggcgggcatcagctacgaaatctgccgtcgcttcacacctctcaaacccgaccaggccaccttgggtgggctggtcaaccagattggcgcgctgccggtactcatctatgccgaagagcacaacgaactgttgtccgacccggtttgcctgcattatgtgatcgagcaactccagccggtgctgggggacaagatcctcaaggcctgggagtttccggagcagttggtccacctgccgagccaggttcatgacctggaccgccagactgacaagatcgattacatcgacatcgtgcagatcgcccgctgcatcagtcagcgcgggcgtcaccggccattggctgcgctgccggcgtaccgccatctggggttgccgtttggcaccgagctggaggtcgatgaactgctggaggcgcggagcatgttgcgc

SEQ ID NO: 31545 - DNA, 1512 bp, Pseudomonas putida
atggataccttgagctacctgggccagggcttcggcattgccctgtccccctacaacctggtcaccgccctctccggcaccttgatcggcaccgtggtcggcctgctaccgggcctgggcccgatcaacggcgtggccctgctgatccccatcgcctttgccctcggcctgccgccggaatcggcgctgatcctgctggccgcagtgtacctgggctgcgaatatggcgggcgtatcagctcgatcctgctgaacatcccgggcgaagcctcgaccgtcatgaccaccctcgatggttacccgatggcccgccagggcctggccggtgttgccctgtcgctgtcggcctggagttcgttcatcggcgccttcatcgccacctgcggcatggtgctgttcgccccgctgctggcgaaatgggccatcgccttcggcccggcggagtactttgtgctgatggtgttcgccatcgtcgcgttgggtggcatggccggtgacaaaccactgaaaaccttcattgccgctctcatcggcctgttcctctcggcggtcggcatcgacgccaacagcggcgtgtaccgcttcaccggtgacagcgtgcacctggccgacggcattcagttcgtggtcctcgtgctgggcctgttctccatcagcgaaatcctcctgctgctggaaaagacccaccatggccaccaggcggtcaaggctaccggccgtatgctgttcaacttcaaggaagcggcctcggtgttcctggtcaacatccgttgcggcctgcttggtttcatcatgggtgttctacccggcgccggcgcaacgctggccagcgccgtggcctacatgaccgagaaacgcatggccggggaaagcggcaagttcggcaaaggcgatgcccgtggcctggcagccccggaaactgccattggtgcgtcctgctgtggcgccctggtcccgatgctgaccctgggtgtcccgggctctggcaccacggccgtgatgatcggcgccctgaccctgtacaacatcacccctggcccactgctgttcgaacagcagccagatatcgtctggggcctgatcgcctcgctgttcgtcgccaacatcatgttggtaatcctcaacatcccgatgatccgcatcttcacccgcatcctcgccgtgccaaactgggcgctggtgccggtgatcgccatcatcaccgcgatcggcgtttacgccgtgcatgccactaccttcgacctgttcctgatggtcggcatcggcatcatgggctacatcatgcgcaagctggacttcccactgtcgccgattctgctgggcttcatcctcggcgggctgatggagcagaacctgcgtcgggcgctgtcgatctccaacggcgaactgggcatcctctggtcgagcccgatcagcatgggcatctgggcgctggtagtggtaatgctcgccctgccgctgctgcgcatctggcgcaaacgcagcctgcagcgccgggccctggccgatgcc

SEQ ID NO: 31546 - DNA, 1594 bp, Pseudomonas putida
ctatcgctcggctattgcctgggcatgccttgccatcagcgcaggcagccttgccgcagagtcacctgcccccgtccagatcaacgtcgtggctatcaatgatctccacggctacctggaacccaacccccaggactacgctggcgcgcaaggcgctacccgcctgacctacggcggcatcgccacactcggtgccatgctcgatgaactgcgaacgcaggaccccgatctgctgttcatcggggctggcgacttgatagggggcagccccgccatttctgcgctgtgggctgacgagcctgtgcttgaggccttgaacgcgatgggcatggtcgtcagcgcatccgggaaccacgaactggatgcaggcaaggccgagtttcttcgtcagatccacggaggatgcgagtcgacgcgccctgaaaaggcttgcaagtttcgcggcaactatccaggaagtggcttcccttacatagcgtccaacctgatcgataccactacgggcaagcgcttgctaccggcctatcacattgagcaggtaaaaggggtgaagatagcgttcgtcggtgcagtgccgcgcaacatggaaaaagtggtctcggccagagcattcgcagggctcaaggccacggatgaagcgcaagccatcaatgacgtgattccggagctcaaggccaagggtgtgaatgcaatcattgcggtcatgcaccagggaggggataccgccgagccgttcgacacgcaggattgcagccagctaagtggcacgatcgtcgacgtggcgaagcggctggatcctgcggtagatgccgtcatcagcggccactcgcatgccagctatcaatgcaaggtgggtgacttgagcatcactcaggctggcaagtacggccacttcctgactcagttgaagttgcaggtaacgccaggcacccatcacgtcacgaacatcaccgcccgcaatattcctgctgacccacagaactacctgcccaatgcccagttggcgggtttgctagaggaagtgcgtcagcggtccggggaaaaattgctcgaacccataggacgcatctcgacggcagaacttgaccgcaaagaaaatgccgccggtgaaacaaccttggggaatctggtcacggatgcacaattggccatgacccaggcgttcaatacccaggttgcctttctcaacctgggagggctgcgcagtgatcttatccagcctgccgatagcgacctgacctacgaacaattattcgccgtacaaccgttcaataacccactggtggttcaggaactgacaggcaagcagattaccgaactgctcaaccttcaatggaacaggggcagtttcaatccgctgcaagtatcgaagggttttcattatgagtgggatggttcacggcctgtcggcagccgtgtcgtcgaggggagtgtgcgtcttcacggcaaacccgttgagccgttgacccattatcgcgtcgtcagcaaccttttcctggccgatggtggcggtggcttggccactttcaaagaaggaaggcgacgccaggacaccggcatcaccgaccttgaagccttggtggagtacgtgcgc

SEQ ID NO: 31547 - DNA, 690 bp, Pseudomonas putida
atgcgccttgaccgtttcctcgccaacctgcccagctacaaccgccagaacgttcgcctgatgctggcgcaacgccgcgtgcgagtggatggccaggtagtcagcgacccgctgaccgacgtgcgtgaattcagccgcgtagagctggacgagcaactgctgcaggccggccgcccggcccgctacctgatgctgtacaagcccactggctgcgtaagcgccacccacgatccgcaacaccgtaccgttctcgacctgctgccagcggcgttgcgagatgacctgcacatagccgggcgcctggacttcaacaccaccggcctgatgatcctgaccaacgatggccaatggtcacggcgcctgacccagcctgccaccaagctgcccaagcattatctggtggacaccgaggacgagattggcgagcactatgtggccaagtttcgcgagggtttctattttgccttcgaagacctcaccacccaacctgcccagctggacatcctcggcccccaccgagcccggctggcgatcgtcgaggggcgttaccaccaggtcaagcgcatgttcgggcatttcaacaacaaggtgatcgggctgcatcgggagagcatgggggcgatccggctggatccggggttggcgccgggggagtatcgtgaactgacggccaatgagatagccactgtc

SEQ ID NO: 31548 - DNA, 2274 bp, Pseudomonas putida
ttgctgggcctggccatgggccttgccagtcaggcggccctcgccgcccccaccgccccgcccctacaggacaagcaggcctttatcgagcatctgatcagccagatgaccgaagccgaaaaaatcggccagttgcgcctgatcagcatcggcccggaaatgccccgcgacaagatccgcgaggaaatcgccgccggccgtatcggtggcaccttcaactcacgcactgcccccgaaaaccggccgatgcaggacgcggccatgcgcagccgcctgaagatcccgatgttcttcgcctacgacaccgtccacggcgagcgcaccatcttcccgatcggcctgggcatggccgcgacctgggacatggaggccgtcgccaaggtcggccgcaccgccgcgatcgaagcctcggccgacgccctggacatgacgttcgcgccaatggtggatatcgcccgtgacccgcgctggggccgcacaagcgaaggtttcggcgaagacacctacctgacttcgagaatcggccaggtaatggtgcgctcgttccagggcagcagcccggccaaccccgacagcatcatggccatcgtcaagcatttcgccttgtatggcgccgtggaaggcgggcgcgactacaacacggtcgatatgagcctgccgaaaatgtacaacgactacctgccaccctatcgcgccgcgctcgatgcgggtgccggtggcgtgatggtggcgctgaactcgatcaacggcgtaccggccacctccaacacctggctgatgaacgacctgctgcgcaaggagtggggcttcaagggcgtgaccatcagcgaccacggtgccatccaggagctgattcgccacggcgtcgcccgtgacggccgtgaagccgccaagctggcgatcaaggccggcatcgacatgagcatgaacgataccctgtacggcgaagagctgccgggcctgctgaagtccggcgaggtgacccagcgcgagctggaccaggcggtgcgtgaagtgctgggtgccaagtacgacatgggcctgttcaaggacccgtacgtgcgcatcggcaaggccgaaaccgatctgaaggactactacggcaacgaccgcctgcaccgcgaagctgcgcgcgacgtggcacgccgcagcctggtgctgctggaaaaccgcaaccagaccctgccgctgaaaaaggccggcaccattgccttggtcggcccgctggccgatgctccgatcgacatgatgggcagctgggccgccgacggtaaacccgtccactcggtgaccgtgcgcgaaggcttgcgccgcgccgtggaaggcaaggccaagctggtctacgccaaaggctccaacgtcacgggcgacaaggcgatcttcgattacctgaacttcctcaacttcgatgccccggaaatcgtcgacgacccacgcccgcctgcggtgctgatcgatgaagcaatcaaggcagccaagcaatccgacgtcgtggtcgcagtggtcggcgagtcccgcggcatgtcccacgagtcgtcgagccgcaccaccctggagatcccggccagccagcgcgagctgatcaaggcgctcaaggccaccggcaaaccgctggtgctggtgctgatgaacggccggccgctgtcgatcagctgggagcgcgagcaggccgacgccatcctggaaacctggttcgccggcaccgaaggcggcaatgccatcgccgacgtgctgtttggcgactacaacccctccggcaagctggccattaccttcccacggtcggtggggcagatcccgatgtactacaaccacacccgcatcggccggccgttcacgccgggcaagccgggcaactacacctcgcaatacttcgaagaacccaacgggccgctttatccgttcggctatggcttgagctacagcagcttcgagctgtcaggcctgaacctgtcgagcaaggatctcaagcgcggcgatacgctggatgccaaggtaacggtcaagaacaccggcaaggttgcaggcgagacggtggtgcagctgtacctgcaggatgtgtcggcgtcgatgagccgcccagtgaaagagctgaaaaacttccagaagctgatgcttgaaccgggtgaaacccgcacgttgaccttccgcatcagcgaggacgacctgaagttctacaatggccagttgcagcgggttgccgaaccaggggagttcaatgtccaggtagggctggattcccaggcggtgcagcagcagagctttgaattgctt

SEQ ID NO: 31549 - DNA, 603 bp, Pseudomonas putida
atgtattactacgaacccgccaaaggccacggcctgccgcacgacccgttcaatgccatcgtcggtccccgcccgatcggctggatctcctctcaggaccgcgaaggccgcctgaatctggcgccttacagcttcttcaatgcgttcaactacatcccgccgatcatcggtttctgcagcgtcgggcgcaaagacagcctgaacaacatcgagcagaccggtgagttcgtctggaacctggccacccgcccactggccgagcaaatgaacctgagctgcgcaccggtcgctgccgaagtgaacgaattcgaattgagcggcctcactgccgcaccgtctagcatcgtcaaggtgccgcgcgtgggtgaaacgccggtagccttcgagtgcaaggtcagccagatcgtccagctcaagcgggccgaccaggaacaggtgcccagctggctgatccttggagaagtggtggcggtgcacattgccgagcacctgttgaacaacggcatctacgataccgctgccgccgagccgatcctgcgtgggggtggcccggcggattatttcgagctgggcaacctgttcaagatggcccggccgccggcc

SEQ ID NO: 31550 - DNA, 534 bp, Pseudomonas putida
atgaacgcgacgccagaaaaggctgacgacctcatcgtcgttggcaagattttttcggttcacggcgttcgcggcgaggtgaaggtgtattcctttaccgatccgattgaaaacctgttggattatccacgctggacgcttcggcacgaaggcaaggtaaagcaggtcgagctggtcagcggtcgtggctcccaaaagggcctggtcgtgaagctgaaaggtctcgacgatcgcgatgaagcccgtcttctgagcggttacgaaatctgcatcccgcggagccttttgcccaacctggctgccgacgagtactactggtaccagttggtaggtctgaaggtcatcaaccaggacgaacaactgttcggcaaggtcgatcacctgttggagaccggtgcgaacgatgtaatggtggtcaagccctgcgcaggcagcctggatgatcgcgagcgtctgttgccctatacggagcaatgtgtgctggcaatcgacctcgaagcaggcgtgatgcgggtcgaatgggacgcggacttc

SEQ ID NO: 31551 - DNA, 807 bp, Pseudomonas putida
atgttctcctcacccagcctcatccccaacctgatcgcagccggcctatatatagcggcggccatctaccagggctcatacctgtcccagggccgcaaggccgaaaagcgcctgcttggcctgctgggtgccatcgcggtcctggcccaggccggtgcactgttcttccagctgatcaccccgctgggcctgagcctggacttcttcagcgccgccagcctgatcgccgtggcggtcatctccctgaccctgctggcctgcctgcgcatacccgtggaaaacctgctggtgctgctgttcccgctgggtgcggtgaccgcgctgctggcccagttcgccccccccggcacggtaccgctgatcaacgaagaacccggcatccttgcgcacatcctgttgtcgatcctggcctacgggctgttcaccatcgcggtgttccagtcgctgctgttgctgctgcaggaccgccagctgaagaacaagcacccgtccgggctgatccgcaacttcccgccactgcaaaccatggaaagcctgctgttcggcttcctctgggccggctggtgcctgctgtcgctgtcgctgatctccggctggctgttcctcgacaacctgttcgcccagcacctggcgcacaagaccttgctggcctgtgtcgcctgggtggtgttcagcgtgctgctgtggggccgcacccgcctgggttggcggggccacatggccatccgctggacgctgagcggtttctgcctgctgatgctggcctatttcggcagcaagctggttcgcgaattcatcttgcatatc

SEQ ID NO: 31552 - DNA, 1254 bp, Pseudomonas putida
atgagcatttcgctacccgcacgtcagctgctgcctggcctgttggccatgtcctgcgccctccccgcattcgccgccaacgaaggtggtttcatcgaggacgccaaggccaccctcaacctgcgcaacttctacatcaaccgcaacttcgtcgacccggcccacccacagggcaaggccgaggaatggacacaaagcttcatcctcgatgcccgttccggtttcacccagggcacggtcggtttcggcgtggacgtactgggcctgtactcggtcaagctcgacggcggcaaaggcaccaccaacactcacctgctgcccgtgcatggcgacggccgcccggccgatgactttggccggctgggtgtggcgctgaaggccaagctgtccgaaaccgagctgaaagtcggtgaatggatgccggtactgccaatcctgcgttcggacgatggccgctcactgccgcaaacattccgcggtggccagctgacctccagggaaatcgccggcctgaccctgtacgccggccagttccgcggcaacagcccgcgcaacgatgccagcatggaagacatgtcgctcaacggtaaagccgccttcacctccgaccgtttcaacttcggcggcggtgagtacaccttcaacgacaagcgcaccatgatcggcctgtgggatgcccagctcaaggacatctaccgccagcaatacctcaacctgacgcacagccagccgctgggcgactggacgctgggcgccaacctgggctacttcatcggcaaggaagatggcgccgaacgggccggcaagctggacaaccgcaccgcctccgccttgctttcggcgcgctaccaaggccacaccttttacgttggcctgcagaaggtcagcggcgacgatgcctggatgcgggtcaatggcaccagtggcggtaccctggccaacgacagctacaattcaagcttcgacaatgccaaggagcgttcctggcaggttcgccatgacttcaacttcgccaccgtcggcgtacccgggctgaccctgatgaaccgctatatcaagggtgacaacgtcaccgtgggcagcgtggacgatggcaaggaatgggcgcgggaaacagagctggcctatgtggtgcagtcgggcagcttcaaggacctgtcgctgaaatggcgcaactcgaccatgcgtcgcgacttcagcaccaacgcgttcgatgagaaccgcttgattgtgagttatccgctgaatcttctg

SEQ ID NO: 31553 - DNA, 411 bp, Pseudomonas putida
atgcccaacatcatccgcatcgccgccgccctgctgatcgaccctcagggccgcacgctgctggtgcgcaagcgtggcaccgaggctttcatgcagccaggcggcaagatcgatgccggtgaaacgccggtacaggcgctggtgcgcgagttgcaggaggaactgggcctgcgcatcgacccggctcaggctatgcacctgggccagttcagtgcccccgccgccaacgaaccaggcttcgaagtgcaagccgagctgttccgtgtcgacagcgccgctgccgtggtgccggccgcagagatcgaggaggtggtctggctgacagcagatcaggcgcccgtcatgccactggctcccctgacccgcgacttgatcctgccgctgtatcgccaggcgctcaacgcaccgcgc

SEQ ID NO: 31554 - DNA, 999 bp, Pseudomonas putida
atgacccttcgcatcgccatcaatggattcggccgaatcgggcgcaatgtcctgcgcgcactgtatacccaaggctaccgccaggacctgcaggtcgtcgccatcaacgacctgggcgacagcaccatgaatgcccacctgctcaagtacgacagtgtccacggcaccttcgacgcgaccgtcgaggccgaccacgaaagcctgacggtcaacggtgaccgtatcgcggtcagtgccattcgcaatccggccgaactgccctggaaggccgaggcgatcgacgtggtgttcgagtgcaccgggctgttcaccgaccgcgccaaagccgctgcgcacctggccgccggggcgggcaaggtgattgtctcggcgccggccaagggtgccgatgccaccgtggtatacggggtcaaccacgacatcctgcgcgcctcgcaccagatcatttccaatgcctcctgcaccaccaactgcctggcgccgatcgcccaggtgctgcaccgtgagttcggcatcgagcaaggcctgatgaccaccatccacgcctacaccaacgaccaggtgctgactgacgtttaccacagcgacccgtaccgcgcgcgttcagccacccagtcgatgatcccgagcaagaccggtgccgccgaggccgtgggcctggtgctgccggagctggccggcaagctgaccggcatggcggtgcgggtgcccgtcatcaacgtgtcgttggtggacctcaccgtcaacctcaagcgcgaggccacggccgagcaagtgaaccagctgttcctcgaggccagcaagcattccaaggtattgggctacaacgctctgccattggtttcctgcgatttcaaccacaacccgctgtcgtcgatcttcgatgccaaccatacccgggccaacgggcggatgctcaaggtgctggcctggtatgacaacgagtgggggttcagcaaccggatgctggacaactgcctggcgctgcaccgggctggc

SEQ ID NO: 31555 - DNA, 1986 bp, Pseudomonas putida
gtgcccatcacctttcaggccctgttcgcgcccagcagcctcgccctcaagtttgccatcaagaccctgctcgggggcggcctggcgttgtggctggcgatgcgctgggggctggagcaaccctcctgggcattgatgactgctttcatcgtcgcccagccgctatcgggcatggtggtgcagaaaggcttggcgcggttggccggcacgttggtcggcacagtcatgtcggtgctgttcatcggcctgttcgcccagacccccggcctgtttctgcttaccttggcgctttggctggcgctgtgtaccgcagcgtccacccagttgcgcagcgcctgggcctatgccttcgtgctggccggctacaccgcagcgatcatcgccttgccggccattgaccaccccctgcaagtattcgaccaggccgtggctcgctgtaccgagatctgcctgggtattttctgtgcaacagccagcagtgccttgctctggcccatgcgggtcgagcagcaactgggcgggcaggcgcggcaggcctggcagaacggcctgcaggccgccagcgccatgctgggcggagaggacgaggcgcgcaaaggcctgctggaaagcctggggcgcatcgttgccatcgacagccaacgtgaacatgcctggttcgagggcaatcgcgggcgccaacgtgcccgtgccattcgtggccttagccagaaactgatggtgctgttgcgtatttcccgttcggtgcgccgccagtggcggcaactggatgagggtgaggtagagcatctgacgccctggttgcaggaagtgcgcacgctgctggcccaacccgatcagcccagcctgctgttgttgcgtcagcgaatctgggatgccgcccacgatgagcaaatcagttcagcggagcacttctgcctggcgcgcatggccctgctattggactatgccatggccgccagccaggcacttgaggatgtggaggcgggcagggcgcccaaggacgtgtcccaggggctggccgcgcaccgagactggtcgctggccttgctgttcggctcgcgcagcgcgctggccttcctggtaatgagtggtttctggctggccacggcctggccttcggcccccggtggcctggtgctgacctgcgtggtctgcagcctgttcgccagtcgcgagaacggcgcacagatcggcctgagtttcctgcgcgggatattcctggcgataccggcggcgtttgtggtcgggcagatcatgctgccgcaatggagcagcttcgccatgctctgcctgggcatgggcgtgccactgtttcttggtgcactgggcatggcccatccgcgtaccggggctacggccacttcctattgcctgcacttcattgtgctggtgtcgccgctcaacgccatgcagttcggcgtggcgaccatgctgaacagtgccctggccatgctggtgggggtgtcggcagcggtcatggcctttcgcttgctggtgttccgccatccggcctggctgggccggcgcttgcgtgctgcaacgcagaacgacctggtgcgcctgactcggcgcgacctgcgcggggctgacagctggtttggcgggcgcatggccgaccggctgatgcaactggcgcggcatgccagtgaattaccggaaggcgaacgcaaacgctgggatgacggccttcacgggctggatatcggcgacgaactggtgcacctgcgcatgtgcctggcggtcgctcaggcccctttggggcgggccgagcgcgagtacctgcaacacgtggaggcagcgctggccaaagggcctgctgccgggcgtgggcagctgctggatgctgccagtgagcagttcattgcggccttgcgtcggctacccgccagcgacccgcttcgcctggccgagggggcagtactgcaattgcagaaaagctggggcaaatggtgccgctggcaggaggacacccatgggtttgcg

SEQ ID NO: 31556 - DNA, 867 bp, Pseudomonas putida
atgcgtgcggccgtacgtattctggtgaccctgtgtgtggtggccctggccgtgttggccggctaccagctgtggcagtactacatgctcaccccatggacgcgtgatgcccgtgtgcgcgccgatgtggtggtgattgcgcctgatgtgtccggctgggttcgcgaactcaaggtccatgacaaccagcaggtcaaggctggcgacttgttgatgagtattgaccgcgagcgcttccaggccgcgctcgatcaggccagcgcggtgaccgagacacgcgcccagcaactgcgcttgcgcgagcgtgaagcagcccggcgtactgccctggggccagaggcgatcagtgccgagttgcgtgaaaacgcccagatcaatgccgccatcgcgcgtggcgagctgcatgaagccgaggcgcagttgcaggtggccaggatcaacctggcgcgcagtgaagtgcgggccccgcgcagcgggcatatcaccaatctgcgtctggccgagggcaattatgtgaacaccggggaatcggtgatggcgctggtggatgattcgacgttctacatccaggcctatttcgaggaaaccaagttgccgcgcattcgcgttggggacactgtgaaggtgtggctgatgggcacgggtgaaccgatgcaggggcacgtggagagcatcagccgcggcatcaccgaccgcaacagcaacccggacagccagttgctgccggaggtagagccgaccttcaactgggtgcgactggcccagcgcataccggtgaggattcgcctggatcaggtgccggaagggctgaccttgagtgcggggatgacggcgagtgtgcaagtgcacgaggaccgcgagccgcag

SEQ ID NO: 31557 - DNA, 3897 bp, Pseudomonas putida
atgttgatcctgcgcggcgctcctgccctttctgcctttcgccacggtaaattactcgagcaactgagccagaaagtccccgctgttactggtttgtatgccgaatttgcccacttcgccgatgtcgacggcgagctgaccgccgaccagcagcaggtgctgggccgtctgctcaagtacggcccgagcgtgccggtacaggagccgacgggtcgtctgttcctggtggtaccgcgcctgggcaccatttcgccatgggccagcaaggccagcgacatcgcccacaactgcggcctgcagtcgatccagcgcctggagcgcggcatcgcctactacgttgccggcaccctgagcgacgctgatgccgaactgatcgccgccgaactgcacgaccgcatgacccagcgtgtgctcggccagctggagcaggccgctgacctgttcagccacgcccagcccaagccaatgacctcggtcgacatcctggccggcggtcgcgacgccctggccaaggccaacatcgacctgggcctggccctggccgaagacgagatcgactacctggtcaatgccttccagggcctcaagcgcaacccgaacgacatcgaactgatgatgttcgcccaggccaactccgagcactgccgccacaagatcttcaacgccagttgggatatcgacggccaggcccaggaaaaaagcctgttcggcatgatcaagaacacctaccagatgcacaatgaaggtgtgctgtcggcgtacaaggacaacgcctcggtgatcgtcggcaacgttgccggccgtttcttcccgaaccctgaaacccgccagtacggcgcggtgcaggagccggtgcacatcctgatgaaggtggaaacgcacaaccacccgaccgccatcgccccgttctccggcgcctccaccggctccggtggcgaaatccgcgacgaaggtgctaccggccggggcgccaagcccaaggccggcctgaccggcttcaccgtgtccaacctgcgcattccgggcttcgaacagccttgggagcaggcctatggcaagcccgagcgtatcgtcgacgccctcgacatcatgatcgaaggccctcttggcggcgctgcgttcaacaacgaattcggccgcccggccctgaccgggtacttccgtaccttcgagcaagccatcaacaccccgcacggtgaagaagtgcgcggctaccacaagccgatcatgctcgccggcggtatgggcaacatccgtgaagaccacgtgcagaagggcgaaatcactgtcggcgccaagctgatcgtgctcggtggcccggccatgctgatcggcctgggcggcggcgctgcttcgtcggtggctaccggtgccagctcggctgacctggacttcgcttcggtacagcgcgaaaacccggaaatggagcgccgttgccaggaggtcatcgaccgttgctggcagctgggcgacgaaaacccgatcgccttcatccacgacgtgggcgctggcggtatttccaacgccttccctgagctggtcaacgacggtggccgcggtggtcgcttcgagctgcgcaacgtgcccaacgacgagccgggcatggccccgcacgaaatctggagcaacgaatcgcaagagcgttacgtgctggccgtcagcgcggtcgacttcgagcgcttcaaggccatctgcgagcgcgaacgttgcccgtttgccgtggtgggtgaagcgactgaagaacagcacctgaccgtcagcgacagccacttcggcaacaccccggtggacatgccgctggacgtgctgctgggcaagccgccgcgcatgcaccgttcggttacccgcgaagccgagctgggcgatgacttcgacccgagcgagctggacctggacagcgccgtccagcgcgtgctgaaccacccggccgtggccagcaagagcttcctgatcaccattggcgaccgcaccatcaccggcctggttgcccgcgaccagatggtcggcccgtggcaggttccggtggccgactgcgccgttaccgccaccagcttcgacgtctacaccggtgaagccatggccatgggcgagcgtacgccgctggcgctgctggatgccccggcgtccggccgcatggccatcggcgaaaccctgaccaacctggcggcttcgcgcatcgaaaagctgtccgacatcaaactgtcggccaactggatgtccgctgctggtcacccaggtgaagacgcacgcctgtacgacaccgtcaaggctgtcggcatggagctgtgcccggagctgggcatcaccattccggtcggcaaagactcgatgtcgatgaagaccaagtggagcgacgagggcgtcgagaagagcgtcacctcgccgatgtcgctgatcatcaccggcttcgccccggtcaccgacatccgcaagaccctgaccccgcaactgcgcatggacaagggcgagaccgacctgatcctgatcgacctgggccgcggcaaaaaccgcatgggcgcctcgatcctggcccagacctacggcaagatcgcggcccaggcaccggacgtcgacgacgccgaagacctcaaggccttcttcgccgtgatccagggcctgaacgccgacggccacctgctggcctaccacgaccgttccgacggcggcctggtcaccaccgtgctggaaatggccttcgccggccactgcggcctcgacctgcaactcgacccgctgaccgacagcaagggcgaagtgccggccatcctcttcaacgaagagctgggtgcggtgatccaggttcgccaggatgctaccccggacgtgctggcacagttcagcgctgcaggcctgggtgaagagtgcgtcgcggtgatcggcaagccggtcaacaacgctgaagtgaccatcagcctgaacggcgaagtgctgttcgacgatgaccgtcgcatgctgcagcgccagtgggctgaaaccagctaccagatccagcgcctgcgcgacaacgccgactgcgctgatcaggagttcgacctgctgctcgaggaagacaacccgggcctgtcggtgaagctgggcttcgacgtcaacgacgacatcgccgcgccttacatcaagaagggcgtgcgcccgcaagtggccatcctgcgcgagcagggcgtcaacggccaggtcgagatggctgctgccttcgaccgcgccggcttcgccgccatcgacgtgcacatgagcgatattctcgctggccgtgtcgacttcgaagccttcaagggcctggtcgcctgtggcggcttctcgtacggtgacgtgctgggcgctggcgaaggctgggccaagtcggcgctgttcaacgcccgtgcccgtgacgccttccaggccttcttcgagcgtaccgacagcttcgccctgggcgtgtgcaacggttgccagatgatgtccaacctgcacgagctgatcccgggcaccgagtactggccgcacttcgtgcgcaaccgctcggagcagttcgaggcccgcgtggccatggtcgaagtgcagaagtccaactcgatcttcctgcagggcatggccggttcgcgcatgccgatcgccatcgcccacggcgaaggccatgccgagttcgccagcgaagaagcattgctggaagccgatgtgtccggttgcgtggccctgcgctacgtcgacaaccatggcaaggtcaccgaagcctacccggccaacccgaacggctcgccgcgtggtatcaccggcctgaccagccgcgacggccgcgtgaccatcatgatgccgcacccggagcgtgtgttccgcgctgtgcagaactcctggcgcccggacgagtggcaggaagatgctgcgctgatgcgtatgttccgcaacgcgcgggtgtgggtgaac

SEQ ID NO: 31558 - DNA, 444 bp, Pseudomonas putida
atgctcggcctggctgctgcggtgtcgcaagacgacaccatgcagcgcctgctcaaggccccgcgactgacgagcgcagaaaaggccgccacgttcattgacgtgtgcggtgacaagttcaatgcacaggcacagaatttcattcatgttgccgcggaaaacgaccgtctcctgcttctgccggagattgccgctctgttcgacctgtacaaggccgagcaagagaaatccgtggacgtggaagtcaccagtgccttcgcgttgaaccaagaacagcaagacaaactcgccaaggttctcagtgcacggttaggccaggaagtgcgcctgcacgcgtcggaggatgccagcctgattggcggcgtcgtcatccgcgccggtgacctggtaatcgatggctctgttcgcggcaaaatcgcgaaactggccgaagcattgaaatct

SEQ ID NO: 31559 - DNA, 1542 bp, Pseudomonas putida
atgcagcaactcaatccttccgaaattagtgaaatcatcaagggccgcatcgataacctcgatgtgagctcccaagcccgtaacgaaggtaccgtcgtttcggtatccgacggtatcgtgcggatccacggtctggccgacgtcatgtacggcgaaatgatcgagttccctggcagcgtctacggcatggccttgaacctggagcaagactccgtaggtgcagtgatcctgggtgcctatgacaccctcgccgaaggcatgagcgccaagtgcaccggccgcatcctggaagttccggttggtaaggaactgctgggtcgcgtcgttgacgcactgggtaacccgatcgacggcaaaggtcctctgggcaacacccagaccgacgcagtcgagaaagtggctccaggcgtgatctggcgtaagtcggtagaccagcctgtacagactggttacaaatccgtcgacgccatgatccctgtcggccgtggccagcgtgagctgatcattggcgaccgtcagatcggcaagaccgccatggccatcgacgccatcatcaaccagaaagactccggtattttctgtgtttatgttgcagtcggccagaagcgttccaccgttgccaacatcgttcgcaagctggaagaaaccggcgccctggccaacaccatcgtggttgttgccagtgcttcggaatccgccgcactgcaattcctggcgccatacgccggttgcaccatgggcgagttcttccgcgaccgcggtgaagacgcactgatcgtttacgatgacctgtccaagcaggccgttgcctaccgtcagatctccctgctgctgcgccgtccaccaggacgcgaagcatacccaggcgacgtgttctatctccactcccgtctgctggagcgtgcatcgcgcgtttcggaagagtacgtcgagaagttcaccaacggtgctgtcactggcaaaaccggttccctgaccgctctgccgatcatcgaaacccaggctggcgacgtttctgcgttcgttccgaccaacgtgatttccatcaccgacggtcagatcttcctggaatcggccatgttcaactcgggcatccgccctgcagttaacgccggtgtttcggtatcccgcgtaggtggtgccgctcagaccaagatcatcaagaagctgtccggtggtattcgtaccgctctggctcagtaccgtgaactggctgcattcgcccagttcgcgtccgatctggacgaagcgacccgcaagcagctggagcatggtcagcgcgttaccgagctgatgaagcagaagcagtacgcgccgatgtccatcgcggacatggctctgtcgctgtacgccgctgagcgtggcttcctgatcgacgtagaagtctccaagatcggcagcttcgagcaagctctgatcgccttcttcaaccgtgatcacgctgaactgatggcgaagatcaacgtgaagggtgacttcaacgacgaaatcgacgcaggcctgaaagccggtatcgagaagttcaaggccacccagacctgg

SEQ ID NO: 31560 - DNA, 1563 bp, Pseudomonas putida
atgcatcgcctctctttactgctgcccttcctcacctggcttccccgccaatcgggccgcagcctgcgccaggacctgctggtaggcctgagcggcgccatcctcgccctgccgcaatccatcgcctacgccctgatcgccggcctgcccgccgaatacgggctttacgccgccatcgtgccggtactgatcgcctgcctgtggggttcttcctggtacctgatctgcggcccgaccgctgccatttccatcgtgctctacgccagcatcagcccgctggccgtggccggcagcgctgactacatcacgctggtgttgctgctgaccttcctcggcggcattttccagctgctgctcgggctattgcgcttcggcgcgctggtcaacttcgtctcccattccgtggtgctcggcttcacgctgggtgccgccatcgtcattgccttgggccagctacccaacctgctgggcatggccctgcccagccaggccaccgcgctgatgaccgtgcaggacctggccagccacgcaggcgaggtcgacctaccttccttgctgctgggcctggccaccgtcgtgatcggtgcggccttcaaactctggcgcccacgctggccgagcctgttgataagcctgatcctggtcagcttgctggcctggctgctgccgggcttctttggccatgtaccgcgggtggcagcgttcaccgggcaactcccgcctttcagcccgctgcctttgctggacatggagctcatgttgcgtctgctgcccagcgccgttgcggtaggcatgctggggttggtcaccagcctgtcgattgcccgctcgctatcggcacgttcagaacaactgatcgacccggaccaggaaatacgcgcacagggcctgtcgaatattgccggtgcatttttctctggttacctgtctgccggttccttcacccgctcgggcctgagctacgaggcgggcgcccgttcaccgatggccggggtgttttcagcgctgtgggtggcgttgttcgccgtgaccggcgccggcctgatcgcgcacctgccgataccggccatggccggcagcattctgctgatctgctgggggttggtggaccaccgagggatccgtgcattgttccgggtcagccgctcggagtttctggtgatggcgctgacggctgcagcgacattgctgctggagctgcagacagccatctatgccggcgtgctggcttcgctgttcttctatttgaagcgcacctcacgaccacggatccaacaaagccgtgaaggggacgcggatgtattgcgggtaggtgggtcgattttctttggtgcggcgcattacctgcaggtgcgcttgcagcgctgccaagggccgcatgtagtgatcgatgcccggcaggtgaatttcatcgattactcgggtgtggacatgttgcaccgcgaggcgcggcggttgcggcgattgggggggagtttgaccttgcaccgggccaggccgcaggtgatcgaggagttgcagaagctggaaggggtggagttgtgcccgatccggtttgaggaa

SEQ ID NO: 31561 - DNA, 1758 bp, Pseudomonas putida
atgcatgccatcagcttcatccaggacctggcagtcatcatgctggtcgctggcgtggtcaccattctttttcaccgtttcaagcagccggtggtgctgggctacattgtcgccggcttcatcattggcccgcacactccgccattcggcctgattcatgacgaagacaccatcaagaccctcgccgaactgggggtgatcttcctgatgttctgcctggggctcgagttcagcttgcgcaagctgttcaaggtcggtgccacggcgttcatcgcagcgttcctggaaatcgtcctgatgatctggatcggttttgagattggccgctggtttggctggagcaccatggattcactgttcctgggcgccatcctggccatttcctccaccaccatcatcgtcaaggcgctcaacgacttgaagatgaagaacgagcgctttgcccagctgatcttcggcgtgctgatcgtcgaggacattcttggcatcggtatcattgccctgctgtcgggtatcgcggtcagcggcacggtcagctcgggcgaggtgttctccacagtcggcaagctgtcgctgttcatggttgtcgctctggtcatcggtattttgctggtgccgcggttattggcctacgtcgcaaggttcgaaagcaacgaaatgttgctgatcaccgttctgggcctgtgtttcggcttctgcctgctggtcgtgaagctggaatacagtatggttctgggcgctttcctgattggcgcgatcatggccgaatcacgccagttgttgaagattgaacgcttgattgagcccgtacgcgacctgttcagcgccatattcttcgtcgccatcggtatgatgattgatcctgaggtgctcatcgactatgcctggccgatcgtagtcatcaccctggcggtggtactgggcaagatgctgtcttgcggcatgggggcgtttatagccggcaatgacgggcgtacgtctttacgcgtgggcatggggctttcgcagattggcgagttctctttcatcatcgccgcgctgggcatgaccctgcaggtgaccagcgacttcctatacccggtggcggtcgcagtatcggcaatcactacgttgctgacaccctacctgatccgcgcggctgacccgttgtcgcagaaactgggcaatgtggtgcccgcccgcctcgcgcgcgtgctgtcgttgtatggcgagtggttgcgcaacatccagccgcagggcgagagtgccatgctggcggcgatgatccggcgcatcctgttgcaggtgggggtgaacctggcgctggtgatcgccatcttcttcagtggcggttattttgcagggcgtctcggcaattggctcagcgagtgggtcagcgatgtcagccatcagaaggccgtcatttggggggcagcgttgttgctgtcactgccattcctgatcgccgcgtaccgcaagctaaaagcactctcgatgctgctggcagagatgggcgtgaagccggaaatggccgggcgacatacccagcgcgtgcgccgtgtgatcgccgaagtgatcccgctgttgtcgctgttggtgattttcctgctgctgtcggcattgtccgccagcattctgcccaccagcgaattgctgctggtgattgccgtggtagctgcggtggtggtggcgttgttgtggcgctggctcatccgcgtgcacacgcgcatgcagatcgcgttgctggagacgctggagaacagtcgcgagaactcgcac

SEQ ID NO: 31562 - DNA, 1308 bp, Pseudomonas putida
atgaacccacgcctcgccgccgcccgtgcgctggccgctgtgctcagcggcaaggcttcgctgaacagctcgctgccggcgcaactggacaaggtagatgaacgcgaccgcggcctgacccaggacctggcgttcggtaccgcacgctggcagccacgcctcgacctgctggccgcacagctgctgcaaaagcccttcaaggcagccgatgccgatgttcaggcgctgctgctggtcggcctgtaccagctgttctacacgcgcattccggcccatgccgccatcggcgagaccgtgggctgtgccgacaaactgaagaagccgtgggccaagggcctgctcaatgccgtgctgcgccgtgcccagcgcgaaggcgaggagctgctcgccggcatggagcgcgacccggtggtgcgtaccgcgcacccgcgctggctgcagaaggcgctgaaagccttctggccagagcagtgggaggccatctgcgccgccaacaatgcccaccctccgatgattctgcgggtcaaccgccgtcaccatagccgcgatgcctacctggcactgctggccgaagccggcatcggcgccagcgcatgccagtacagccgggatggcatcgtgctggccgaagcctgcgacgtgcgcggcctgccaggcttcgccgaaggctgggtgagcgtgcaggacgaagctgcgcagctatctgccgacctgctggaactggcccccggccaacgcgtgctcgatgcttgctgcgcaccgggcggcaagacctgccacctgctggaggccgaggctggcctggcgaacatggtggccatcgacctcgaagccaagcgcctgacccgcgtgcgagaaaacctcgaccgcctgcaactggacgccgagctgatcgcctgcgatgcccgcgacactgccagctggtgggacggcaagccattccagcgcattctgctcgacgcgccgtgctcggccaccggcgtgattcgccgccacccggacatcaagatgacccgccaagccgacgacatcccggctttggccacgctgcaaggcgagctgctcgatgccctgtggccgaccctggaagtgggcggcatgctgctatacgccacctgctccacattgccgaccgagaacactgaagtgatcaaagccttcctcgcgcgcaccccgggcgctcgtgagctggacctggcgaccgaagccggcctgcgccagccccacggccgtcagttgctggcccaggaaggcggccacgacggtttctactatgccaagctgatcaagatcgccgcctcgcgcgga

SEQ ID NO: 31563 - DNA, 1371 bp, Pseudomonas putida
atgaagatcatcatcctcggcgcagggcaggtaggcggtacgctggctgaacacctggccagcgaagccaacgacattaccgtggtcgacaccgacggcgaccgcctgcgcgacctcggcgaccgcctggacatccgcaccgtccagggccgtggctcactgccgacggtactgcgtcaggccggtgccgacgacgccgacatgctggtggcggtaaccaacagtgacgagaccaacatggttgcctgccaggtggcctattcgctgttccataccccgaccaagattgcacgggtgcgcgaatcgtcctacctgacccgcgaagagctgttcgacaacgaccatatcccggtcgacgttctgatcagccccgagcaggtggtgaccaattacatcaagcgcctgatcgaacacccaggctcgctgcaggtgatcgatttcgccgagggcaaggcccagctcgtggcagtgaaggcctactacggcggcccgctggtcggccagcaattgcgccagatccgcgcgcacatgcccaacgtcgacacccgcgtggcggccatcttccgccgcgaccggccgatcaccccgcgtggcgacacggtgatcgaagccgacgacgaggtgttcttcattgccgcgaagaaggatatccgtgcggtgatgggcgaactgcgccgcatcgacgaaaccaataaacgcattgtcatcgccggcggcgggcagatcggcgagcgcctggcggaggccatcgaaagccgatatcaggtgaagatcatcgagatgagcccggcgcgttgccggcacctctccgataccctggaaagcactgtggtgctgcagggcagcgcctcggacaaagacctgatgctcgaagagaacatcgccgacgccgatattttcctggccctgaccaacgatgacgaagccaacatcatgtcgtccttgctggccaagcgcctgggcgcaggcaaggtgatgaccatcatcaacaacccggcttatgtcgacctggtacagggtggcgatatcgacattgccatcagcccgcagctcgccaccatcggcacactgctggcgcacgtccgtcgtggcgacatcgtcagtgtgcactcgctgcgccgcggtgcggccgaagcgatcgaggcggtggcacatggcgattcgaagtcgagcaaggtggtcggcaaggcaatcgaggacatcacgctgccaccgggcaccactattggtgcgatcatccgtgacgaagaagtgatgattgcccatgacgacaccatgatcgaatcaggggaccatgtgatcctcttcgttgtggataaaaagcatattcgcgatgtggagaagctgttccacgtcggcttgagtttcttc

SEQ ID NO: 31564 - DNA, 945 bp, Pseudomonas putida
gtgagccagcctacgccagccgtgcgtaccttccaagacctgatcctcgccctgcagaactactgggcagctcaaggttgtgtggtacttcagccctacgatatggaagtaggcgccggcactttccacaccgctacattcctgcgcgccgtgggtccagaaacctggaacgccgcctatgtgcagcctagccgtcgtcctgccgacgggcggtatggcgaaaaccccaaccgcctgcagcactactaccagttccaggtggtgctcaaaccgaacccggccaacttccaggagctgtacctcggctcgctgaaagccatcggcctggatccgctggtgcacgacattcgtttcgtcgaagacaactgggaatcgccgaccctcggcgcctggggtctgggctgggaaatctggctcaacggcatggaagtcacccagttcacctacttccagcaggttggcggcatcgagtgctacccggtcaccggtgaaatcacctacggcctggagcgcctggccatgtacatccagggcgtcgattcggtgtacgacctggtgtgggccgacggcccgttcggcaaggtcacctatggcgacgtgttccaccagaacgaggtggagcagtcgacctacaactttgaacatgcaaacgtcgacaaactgttcgaactgttcgatttctacgaaagcgaagccaaccgcctgatcaagctggagctgccgctgccgacctatgaaatggtcctgaaggcatcgcataccttcaacctgctggacgcccgccgcgccatctcggtaaccgagcgccagcgttacatcctgcgtgtacgtaccctggcccgggacgtggcgcaaagctatctgcaagcccgcgcacgcctgggcttcccgatggccacccctgaactgcgtgacgaagtgttggctaagctggaggctgcacaa

SEQ ID NO: 31565 - DNA, 768 bp, Pseudomonas putida
atgtcgatcctgcaggcgatcagaatctttcttttttacctgctgctgggcaccagttcgctgctgtggtgctcgctgagcttcttcgtcgcgccgttcctgtcgttccccaagcgctacaagttcatcaacgtgtactggtgccgctgcgcgctgtttctggtgcgcaccatcctgggcatcgactacaagatcactggcgccgagaacgtgccagctgagccttgcgtgattttgtccaatcaccagagcacctgggaaaccttcttcctgtcccagtacttctcgccgcttagccaggtgctcaagcgcgagctgctgtatgtaccgttcttcggctgggccatggccatgctgcggcccatcgcgatcaaccgcgacaacccaaaggaagcgctacggcaggtagcgagcaagggtgacgaactgctcaagcagaagacgtgggtgctgattttcccagaaggcacccgtgtaccgttcggcaccatcggcaagttctcgcgcggcggtaccgccctggccgtgaatgccgggctgccggtgctgccgattgcccacaacgccggcaagttctggcccaagaccggttggggcaagcgtgccggtacaatcgaagtggtaattggtgagccgatgtacgccaacggcacggggccacgtgccattgccgaactcaacgaccgcgctgcagcttggaacgaagcgacccagcgggccatgggatcgctgccgccagctgcggaaaaacctcaggagcagatggct

SEQ ID NO: 31566 - DNA, 1806 bp, Pseudomonas putida
atgtccaagaaaattcacgtaaccgacacgatcctgcgcgacgctcaccagtccctgctggctacccgcatgcgtaccgaagacatgctgccgatctgcgacaagctcgacaaggttggctactggtcgctggaagtctggggtggtgcaaccttcgacgcctgcgtgcgcttcctcaaggaagacccgtgggagcgcctgcgcaagctgcgcgcagcgctgccaaacacccgcctgcaaatgctgctgcgcggccagaacctgttgggctaccgtcattacagcgacgacgtggtcaaggccttcgtcgccaaggcggcggtcaacggcatcgatgtgttccgcattttcgacgccatgaacgacgtgcgtaacctgcgcgtggccatcgaagcggtcaaggccgccggcaagcacgcccagggcaccatcgcttacaccaccagcccggtacacaccatcgaagccttcgtgaaccaggccaagcagatggaagccatgggttgcgactcggtggcgatcaaggacatggccggcctgctgaccccgttcgccactggcgagctggtcaaggcgctgaaggcagaacagtcgctgccggtgttcattcactcccacgataccgccggcctggcagccatgtgccagctgaaggccgtggaaaatggcgcggaccacatcgacaccgccatctccagcttcgcctggggcaccagccatccgggtaccgagtcgatggttgctgcactcaagggcagcgagttcgacaccggcctggacctggagcttctgcaggagatcggcttgtacttctacgctgtgcgcaagaagtaccaccagttcgaaagcgagttcaccgcggtagacacccgggtgcaggtcaaccaggtaccgggcggcatgatttccaacctggccaaccagctcaaggagcagggcgccctcaaccgcatgaacgaagtgctggccgaaatcccgcgtgtgcgtgaagacctcggcttcccgccactggtcaccccgacctcgcagatcgtcggcacccaggcgttcttcaacgtgctggcgggtgagcgctacaaaaccatcaccaatgaggtgaagctgtacctgcaaggtggctatggcaaggccccgggtgtggtcaacgagcaactgcgtcgccaggctatcggcagcgaagaagtgatcgatgtgcgcccggctgacctgctgaagccggaaatggccaagttgcgtagcgacatcggtgccctggcccgttgcgaagaagacgtgctgacctttgccatgttcccggacattggccgcaagttcctcgaagaacgcgaagctggcaccttgacgcctgaagttctgctgccgattccggaagccggtgccgtggctgccccaggcggtgaaggcgtgccgaccgagttcgtgatcgacgtacacggcgaaacctaccgcgtcgacatcaccggtgtgggcgtgaaggccgaaggcaagcgtcacttctatctgtcgatcgacggcatgccggaggaagtggtattcgagccactcaacgagttcgtcagcggtggcggcagcaagcgcaagcaagcgaccgaccctggccacgtgagcaccaccatgccagggaacatcgttgatgtgctggtcaaggaaggtgacatggtcaaggccggccaggcggtcctgatcaccgaagccatgaagatggaaaccgaagtgcaggcggccatcgccggtaaggtcgtggccatccatgtggccaagggtgatcgcgtgacgccgggtgagatcctgattgagatcgagggc

SEQ ID NO: 31567 - DNA, 243 bp, Pseudomonas putida
atgggtatcattggaaccatcttcatcggcctcatcgtcggcctgctggcccgcttcatcaaaccgggcgatgacagcatgggctggatcatgaccatcctgctgggtattgccggctccttgttggctacctatggcggccaggcgctgggtatataccaggctgggcaggcggcgggcttctttggtgcgctggtcggtgccgtggtcctgctggtgatctacggattcatcaagaaacgc

SEQ ID NO: 31568 - DNA, 1680 bp, Pseudomonas putida
atggatattaaacgcacgatcctgatcgccgcgctggcagtcgtgtcctacgtcatggtcctgaagtggaacgatgactacggccaggctgccctgccgactcagaatactgctgccagcactgttgctccgggcttgcccgatggcgtgccggccggtaacaacggtgccagcgccgatgtaccgagcgccaacgccgaatcgagccctgccgaactggcaccggtcgcactcagcaaggacctgatccgagtcaagaccgacgttctggaactggctatcgatccggtcggtggtgacatcgtccagctgaacctgccgaagtacccacgccgtcaagaccacccgaacattccattccagttgttcgacaacggtggtgagcgtgtttacctggcacaaagcggtctgaccggtaccgacggcccggatgcccgcgccagcggccgtcccctgtatgccgccgaacagaagagctaccagctggccgatggccaggaacaactggtggtagacctgaagttcagtgacaacggtgtcaactacatcaagcgtttcagcttcaagcgcggtgagtacgacctgaatgtcagctacctgatcgacaaccagagcggccaggcctggaacggcaacatgtttgcccagctcaagcgtgatgccagcggcgatccgtcctccagtactgccaccggcaccgcgacctacctgggtgctgccctgtggacagcttctgagccttacaaaaaggtctcgatgaaggacatcgacaaaggtagtttgaaagaaaatgtgtccggcggctgggttgcctggctgcagcactacttcgtgaccgcctggattccggccaagtcggacaacaacgttgtccagacccgcaaggatagccagggcaactacatcatcggctacaccggcccggttatcagcgtaccggctggcggcaaggtcgaaaccagtgccctgctgtacgccggcccgaagatccagtccaagctgaaagagttgtccccaggcctggaattgaccgtcgactacggcttcctgtggttcatcgcccagccgatcttctggctgctgcaacatatccacagcctgctgggtaactggggctggtcgatcatcgtgctgaccatgttgatcaaaggcctgttcttcccgctgtcggctgccagctaccgctccatggcgcgtatgcgtgccgttgcacctaagctcgccgcactcaaggaacgcttcggtgacgatcgccagaagatgtcccaggcgatgatggagctttacaagaaagagaagatcaacccactgggcggctgcctgccgatcctggtccagatgccggtattcctggccctgtactgggtattgctggaaagcgtggaaatgcgccaggccccgtggatcctgtggattaccgacctgtcgatcaaggatccgttcttcatcctgccgatcatcatgggcgccaccatgttcatccagcagcgcctgaacccgactccgccggatccgatgcaggccaaggtgatgaaaatgatgccaatcatcttcaccttcttcttcctgtggttccctgccggtctggtgctgtactgggttgtgaacaactgcctgtcgatttcgcagcagtggtacatcactcgccgtatcgaagcagctaccaaaaaagctgctgct

SEQ ID NO: 31569 - DNA, 1866 bp, Pseudomonas putida
gtgatcgtcatcggcggcggccatgccggtaccgaggctgcgcttgcgtctgcacgcatgggtgtgaaaaccctgctgctgacccataacgtggaaaccctcggtcacatgagctgcaaccccgccatcggcggtattggcaaaagccatctggtcaaagagatcgatgcgctcggcggcgccatggcgctggccaccgacaagagcggcatccagttccgcgttctgaacaaccgcaagggcccggccgtacgtgccacccgtgcgcaagccgaccgcgccatctacaaggcagtggtacgtgaaatcctggaaaaccagccaaacctgtggatattccagcagtcctgcgacgacctgatcgtcgagcaggaccaggtcaaaggcgtggtgacccagatgggcctgcgtttctttgccgaatctgtggtgctgactaccggtaccttcctcggcggccttatccacattggtctgcaaaaccattccggtggtcgcgccggtgatccaccttcgattgccctggcccaccgcatgcgtgaactgccgttgcgcgtcggccgcctgaaaaccggtaccccgccacgcattgacggccgctcggtggacttctcggtaatgaccgaacagccaggcgatacgccgatcccggtgatgtcgttcatgggcaatgccgaaatgcacccgcgacaggtgagctgctggattacccacaccaatgcgcgcacccacgagatcattgcgtcgaacctcgaccgttcaccgatgtactcgggcgtgatcgaaggtgtcggtccgcgctactgtccgtctatcgaagacaagatccaccgctttgccgacaaggaaagccaccaggtgttcatcgagccggaaggcttgaacacccatgagttgtatcccaacggtatttccacttcgctgccgttcgacgtgcagttggagctcgtgcgttccatccgtggcatggaaaacgcccacatcgtgcgccccggctacgccatcgaatacgactacttcgatccccgcgacctcaagtacagcctcgagacgaaagtcatcggcggcctgttcttcgccgggcagatcaacggcaccaccgggtacgaagaagccggcgcccagggcctgctggccgggactaacgccgcacttcgggcgcagggccgtgacagctggtgcccgcgccgcgacgaggcatacatcggcgtactggtggacgacctgattaccttgggtactcaggagccgtaccgcatgtttacctcgcgtgccgagtaccggctgatactgcgcgaagacaacgccgacctgcgcctgaccgaaaagggccgtgaactgggcctgatcgatgaccagcgctgggccgcattctgcgccaagcgcgacggtatcgagcgtgaggaacagcgcctgaaatcgacctgggttcggcccaataccgagcaaggccaggccattgtggataaattcggcactccgctgagccacgagtacagcctgctcaacctgctggcgcgccccgaaatcgactacgccggcctgatcgaagcgactggcggtgaagcgatcgatccacaggttgccgagcaggtcgagatccgcaccaagtacgccggctacatcgaccgccagcaggatgaaattgcccgactgcgcgccagcgaagacacacgcctgcctgtggatatcgactacacgacgatttccggcctgtccaaggagatacagggcaagctgagccagacccgtccgcagacgctgggtcaggcttcgcgtatcccgggtgtgaccccggcggcgatttccctgttgctgattcacttgaaaaaacgcggcgctggccgcgaattggagcaaagcgct

SEQ ID NO: 31570 - DNA, 753 bp, Pseudomonas putida
atgggcttctgggcgttccacctggacaccctgggttggtccgtcgcgctgggtctgatcttcctgttgatcttccgcatggcggccaagaaggcgacttccggccaacctggcggtctgcagaacttcgttgaggtgatggtcgacttcgtcaacggcagcgtgaaggactccttccacggccgtagcccggtaatcgcaccactggcgctgaccattttcgtctgggtattcctgatgaacgccgtcgacctgataccggtcgactggattcctcagctggccatcctgatttccggtgacccgcacattccgttccgcgccgtgtcgaccaccgacccgaacgcgaccctggccatggccttctgcgtcttcgccctgatcatcttctacagcatcaaggtcaagggactgggcggcttcatcggtgagctgaccctgcacccgtttggcagcaagaatatcttcgtgcagatcctgctgattccagtcaacttcctgctggaattcgtcaccctgatcgccaagccgatctcgctggcactgcgtctgttcggcaacatgtatgctggcgagctggtgttcatcctgatcgctgtaatgttcggctccggcctgctgtggctcagcggcctgggtgtggtgctgcaatgggcgtgggctgtgttccacatcctgatcatcaccctgcaagctttcatcttcatgatgctgaccatcgtctacctgtcgatggctcacgaagataaccat

SEQ ID NO: 31571 - DNA, 843 bp, Pseudomonas putida
atggagttgaccatgcagcaagattcccacacccatggcatcgacatgtctgccctgggccgcaacaagcagagcctgcggatggctgaagaaaccgtggccatcgaagtgccgggcctgagcctgttctatggcgacaagcaagcgctgttcgacgtgcagatgaacatcccgaagcagcgcgtgaccgccttcatcggcccatccggctgcggcaagtcgaccctgctgcgcaccttcaaccggatgaacgacttggttgacggttgccgtgtggaaggtgccatcaacctgtacggcaacaatatctaccgcaagggcgaagacgttgccgaactgcgccggcgtgtgggcatggtgttccagaagccgaacccgttccccaagaccatctacgagaacgtggtctacggcctgcgcatccagggcatcaacaagaagcgcgtgctcgatgaagccgtcgagtgggcgttgaagggcgcggccttgtgggacgaggtcaaggaccgcctgcacgagtcggcgctgggcctgtccggtggccagcagcagcgtctggtcatcgcccgcaccattgccgtggagccggaggtgctgctgcttgacgaaccgtgctcggcgctggacccgatctcgaccttgaaggtcgaagaactgatctatgaattgaaatccaagtacaccatcgtcatcgtgacccacaacatgcagcaagcggcgcgtgtttcggattacaccgcgttcatgtacatgggcaaactggtcgaattcggggataccgataccctgttcaccaacccggcgaagaagcagaccgaagactacatcaccggtcgctacggc

SEQ ID NO: 31572 - DNA, 894 bp, Pseudomonas putida
atgaaacgccacaacgctcctcctgctggccaggtggggcgttgtgcctgttggagaacttttatgtttcctgcgatgttgaacgttggcctaggcttgcgtcgcggcctgttgccggaactgctggccatggaggcgggtgcagtggactttctggagtgtgcgccggaaaactggattgccgtgggcggcgcctatggcaagggcttggcccagttggcggagcgctttgctgtcacctgtcatgggttgtctttatcgctgggtggcagtgccccgctggaccgacatttccttgagcagacccggcagtttctcgaccgataccaggtgcgactgtacagcgagcacctgagctactgcagtgatgacgggcacctgtacgacctgatgcccatcccgttcaccgatgaagccgtacgccatgtggccgcgcgcatacgccaggctcaggagcagctggagcggcgcattgccgtggagaacatcagctactatgccgcgccgtatcaggcgatgagcgagctcgacttcatccaggcggtgcttgaagaagcagattgtgacctgctgctggacgtcaacaatgtctatgtcaacgcctgcaaccatggctacgacgcccagcaattccttgcaggcttgcctcaggcgcgcgtggccgggatgcacgttgccgggcattacgatgaagcgccggacctcaaagtggatacccatggggcagccgtgaaggaggatgtctgggcgctgtacgccagcgcttgtgcgcgctttggcgtacagccgacggtgcttgaacgtgatttcaactatccgcccttggccgaactgttggccgagacggcgcgtatgcgtgccgtgcaatgcgctgccggagggcaagcagatgaa

SEQ ID NO: 31573 - DNA, 1920 bp, Pseudomonas putida
atgcccgttattactcttcccgatggcagtcaacgttcgttcgatcacgccgtatccgtagccgaagtagccgcttccatcggcgctggcctggccaaggccaccgttgccggcaaggtcgacggcaagctggtcgatgcgtgtgacctgatcagcaacgacgccaccctgcagatcatcacccctaaagatgaagagggactggagatcattcgtcactcgtgcgcccacttggttggccacgccgtgaagcagctgtacccgaccgccaagatggtgatcggcccggtcattgacgaaggcttctattacgacatcgcctacgagcgccccttcaccccagaagacatggccgccatcgaaaagcgcatgatggagctgattgaaaaagactacgacgtggtcaagaaaatgaccccgcgcgccgaagtcatcgatgtgttcaaggcccgtggcgaagactacaagctgcgtctggtcgaagacatgccggatgaacaggccatgggcctgtactaccacgaagaatacgtcgacatgtgccgtggcccgcacgtgccgaacacccgcttcctcaaggcattcaagctgaccaagctgtccggcgcctactggcgtggcgatgccaagaacgagcagcttcagcgcgtgtacggcacggcctgggctgacaagaagcagctggctgcgtacatccagcgcatcgaagaagccgaaaaacgcgaccaccgcaagatcggcaagcagctcgacctgttccacctgcaggaagaagccccgggcatggtgttctggcacgccaacggctggaccgtctaccaggtactcgagcagtacatgcgtggcgtgcagcgcgaaaacggctaccaggaaatcaagaccccgcaggttgtcgaccgcatcctgtgggagcgttccggccactggtccaactatgccgaaaacatgttcaccacttcgtcggaaagccgtgactacgcggtaaaaccgatgaactgcccgtgccacgtgcaggtgttcaaccagggcctgaaaagctaccgcgacctgccgctgcgtctcgccgagttcggtgcctgccaccgtaacgagccgtccggcgccctgcacggcatcatgcgcgtgcgtggcttcgtacaggacgatgcgcacattttctgcaccgaagatcaggtgaagaaagaggccgccgacttcatcaagctgaccctggacgtgtacaaggacttcggtttcagcgacatcgccatgaaactgtccactcgtccggccaagcgtgtcggttccgaagagctgtgggatcgtgctgaaacagcgctggccgacgccctgaacgaatccggccttgagtgggaataccagccgggcgagggtgccttctacggcccgaaaatcgagtttaccctgcgcgactgcctcggccgtaactggcagtgcggtaccctgcagtacgacccgaacctgccagagcgtctggatgccagctatatcgccgaagataacagccgagttcgcccggtcatgctgcaccgcgccatcctcggttcgttcgagcgcttcatcggcatgctgatcgagcactacgcgggcgtgttcccggcgtggctggccccaactcaggcggtgatcatgaatatcaccgacaagcaggccgatttcgccctcgaggttgagaaatctctgaacggaagcggtttccgtgccaagtcggacttgagaaatgagaagatcggctttaaaatccgcgagcatactttgctcaaggtcccgtaccttttggttataggggaccgcgaagtcgaaacgcaaaccgtcgctgtgcgtactcgcgaaggcgcagacctgggctccatgcccgtcgcccaattcgttgagttgctgacacaagcggtttcccggcgtggtcgccaagaatcggag

SEQ ID NO: 31574 - DNA, 207 bp, Pseudomonas putida
atgcggagttccaacatgccaaaaatgaaaaccaagagcggtgctgcgaagcgcttcctgaagacagcttcgggcttcaagcacaagcacgctttcaagagccacatcctgaccaaaatgtcgaccaagcgtaagcgtcaactgcgcggtgccagcttgctgcacccgtccgacgtcgcaaaagtcgagcgcatgctgcgcgttcgt

SEQ ID NO: 31575 - DNA, 1014 bp, Pseudomonas putida
atggaaaacctggatgcgctggtctcccaagccctagaggccgtggaacgcgctgaagacatcaacgccctggaacagatccgggttaattatctcggcaagaagggcgagctgacccaggtgatgaagaccctgggcaacctgccagccgaagagcggccgaaagtcggcgcgctgatcaacgacgccaaagagcgcgtcaccgttgtgctcaatgcccgcaaggctgcctttgaagaagccgagctcagcgctcgcctggctgccgaatgcattgacgtcaccctgccaggtcgcggccaggccaccggtggcctgcacccgatcacccgtacactcgagcgcatcgagcagttcttcacccacattggctacggcattgccgaaggcccagaagtggaagacgactaccacaacttcgaagcgctcaacatccctggccaccacccggcgcgggcgatgcacgacaccttctacttcaatgccaacatgctgctgcgcacccacacctcgccggtgcaggtgcggaccatggagtccacccagccgcccattcgcattgtgtgcccgggccgcgtataccgctgcgactcggatatcacccactcgccgatgttccaccaggtcgaaggcctgctgatcgatcgcgatatcaacttcgccgacctcaagggcaccatcgaagaattcctgcgcgtattcttcgagaaagaactggcggtccgtttccgcccatcgttcttccccttcaccgagccgtctgcagaagtcgacattcagtgcgtgatgtgttccggcaacggctgccgcgtgtgcaagcaaaccggctggctggaagtgatgggctgcggcatggtgcacccgaatgtgttgcgcatgtccggcatcgacccagaagagttccagggcttcgccttcggcatgggtgccgagcgcctggccatgctgcgctatggcgtcaacgatttgcgtctgttcttcgacaacgacctgcggttcctagcccaattccgc

SEQ ID NO: 31576 - DNA, 2379 bp, Pseudomonas putida
atgaaattcagtgaacagtggctgcgcggttgggtcaacccgcaagtctcccgtgacgaactggtcgcccgcctgtccatggccggcctcgaagttgacagtgttacccccgctgccggccagttcagcggcatcgtcgtgggcgaaattctcgccaccgaacaacacccggacgccgacaagctgcgcgtgtgccaggtaagcagcggccaggaaaccttccaggttgtgtgcggcgcccctaacgcccgcccaggcatcaagatcccgttcgccatgatcggtgccgaactgccaggcgacttcaagatcaagaaggccaagctgcgcggtgtcgagtccttcggcatgctgtgctcggctgccgagctgcagatcagcgaagaaaacgacggcctgctggagctggctgccgacgctccggttggcgaagacattcgcacgtacctgagcctggatgatgccagcatcgaaatcggcctgaccccgaaccgcggcgactgcctgtccatcgccggcctggcccgcgacgtcagcgccctgtacgacaccccggtcacccgcccggtggtgccagccgtagcggccgcccatgacgaagtgcgcccggtcgaagtcagcgccccggctgcctgcccgcgctacctgggccgcgttatccgtaacgtcgacctgagcaagccaaccccactgtggatggtcgagcgcctgcgccgcagcgacgttcgcagcatcgacgccgccgtcgacatcaccaactacgtgatgctcgaactcggccagccgatgcacgccttcgacctggcagaaatcaacggcggcatccgcgtgcgcatggccgaagagggcgaaaagctcgtcctgctcgacggccaggaagtggccctgcgcgccgacaccctggtcatcgccgaccacacccgcgccttggccatcgccggcgtcatgggtggcgagcacagtggtgtgaacaccgaaaaaacccgcgacctgttcctggaaagcgccttcttcgagccgatttccgtcgccggtaaagcccgttcctacggcctgcacaccgatgcatcgcaccgctacgagcgcggcgtcgactcgcaactggcccgcgaagccatggagcgcgccacccagttgctgctggacatcgttggcggcgaagccggccctgtggtcgaagcggtcagcgaacagcacctgccacaagtagccccggtcaccctgcgcgccgaacgcatcacccagatgcttggcatggaaatggacccagcccaggtcgagcagttgctcaacgccctcgagctgaccacgaccaagagcggggaagggcagtggaccgtcagcgtaccaagccaccgcttcgacatcagcctggaagtggacctgatcgaagagctggcccgcctgtacggctacaacaacctgccggttcgttacccgcaagcccgcctggccccacagggcaagccagaaacccgcggtgacctgccgaccctgcgccgcctgctggttgcccgcggctaccaggaagccatcacctacagcttcatcgacccgaaactgttcgaactgttcagcccgggcgtagagccgctgctgctggccaaccccatctccagcgacatggccgccatgcgcgcctcgctgtggccgggcctggtcaaggctctgcagcacaacctgaaccgccagcaagaccgcgtgcgcctgttcgaaagcggcctgcgttttgtcggccaactgggtgatctgcagcagcagccaatgattgccggcgtcatcaccggcagccgcctgccagaaggctgggccaacggccgcgacggcgtcgacttcttcgacgtgaaagccgacgtggaagccctgctgggttactccggcgccctgagcgacttcaccttcagcgccggcaaacacccagccctgcacccaggccagaccgctgtcatcgagcgtgacggcaagctggtcggctacctcggcgccatccacccggagctggccaaagccctgggcctggaccgcccggtgttcctgttcgagctggtgctgggcgacgtggtcgaaggccgcctgccgaaattcagcgaactgtccaagttcccggaaacccgtcgcgacctggctttgatcgcaggacgtgatgtagcttctagcgcggtgcttgaattaattcgtgacaatgcaggcgaatggctcacagacctcaggctgtttgatgtgtaccaaggtaaaggcattgatcctgatagaaaaagccttgccgtcggcttgacctggcagcatccatcgcgcactcttaacgacgatgaggtgaacactaccctgcaaaacatcctcacctcgctcgaacaaaggttgaacaccacgttaaggaaa

SEQ ID NO: 31577 - DNA, 1032 bp, Pseudomonas putida
atgccccaatcaaagctaatcaatcggcgcgtcgttctggcctcacgtccccacggtgcgcctctcgaagcgaattttcgcattgagcaaagccccattcctgagccagcagaagggcaggttctgttgcgtaccgtttacctctcacttgacccttacatgcgtggtcgcatgagtgatgcaccgtcctatgctgcgccggtggaaatcggtggagtgattgtgggtggcactgtatgccgtgtggaggcttcgaaaaacccggcctacaaggtcggtgactgggtgctgtcctttgctggctggcaggactacacgctgtccgatggaagcgatctgaccgcgttgggtgagtcgccggcgcatccttcttatgccttgggcatctttggcatgccgggcttcaccgcttatatgggcttgctcgatattggccggccgcaggcgggtgaaaccctggtggtggcggcggccaccgggccggtcggcgcgactgtggggcagatcggcaagatcaagggctgccatgtggtcggtgtcgccggtggcgcggaaaaatgccggcatgcggtcgaggtgctgggttttgatgcctgtctagatcaccgtgcgccggacttcgccgagcaactggccaaggcctgcccggcaggtatcgacatctacttcgagaatgtcggcggcaaggtcttcgatgcggtgctgccgctgctcaataccaaggcccgagtgcccgtctgcggcattattgcgcactacaacgataccgctttacccaacgggccagatcgtttgcctgctttgatgggcagcattctgcgcaagcgtattcatgtgcagggtttcattatttttgatgattacggccaccgctacaacgagttctttaacgatatgtcgagctggtttgcgcagggccggattaaataccgtgaagaattagtgagtggtctggaggaggcgcctaaggcctttatcggcctgctcgaggggcgaaattttggcaagttagtggttcgcgtcagtgaggac

SEQ ID NO: 31578 - DNA, 1197 bp, Pseudomonas putida
atgaacggacccatacccacacacctgccgcccacaacgggcagcggcagctggctgagcgtcatcgccctggccttggcggccttcattttcaacaccaccgagttcgtcccggtggccctgctcagtgacattggccgcagcttcgacatgagcactgcccaggtcggcctgatgctgaccatctacgcctggatcgtggcactggcctcgttgcccatgatgttgctgacccgcaacatcgaacggcggcgtctgctgctgttcgtgttcctggtgttcattgtcagccacttgctgtcctggctttcgcaaagcttcgccatgctgctggtcagccgcatcggcattgccctggcgcatgcggtgttctggtccatcaccgcctcgctggcggtgcgtgtggcgccgccgggccagcaggccaaggcgctgggcctgctggccaccggtactaccctggccatggtcctgggcatcccgctgggccgtgtggtgggcgaggcactgggctggcgtatcacgttcctgagcattgccggggtagcgctagccaccatgctttgcctgatcaaatcgctgccgctgctgcccagccagaactccggttcgttgcgcagcctgccggtcctgttcaagcgcccggcactggtcattacctacttgctggtgacgctggtcattaccgcgcagttcacggcctacagctatatcgagccgttcgccctgcacgtagcgcagatcggcggcgaccgcaccacgctgttgctgctgttgttcggcggtgccggggtttttggttcattgttgttcagccgttacagcgaacgcttcccgcatggcttcctggtaggttcgatcggggtactcgccgcgtgcctgttgctgatgttgccgctgtcgggcaacttctatgtgtttgcagtgctgagcatgttctggggcgtggcaattctcagcttcagcctggcgctgcagtccaagaccctgaagctggcgtccgacgccaccgatgtggccatggcgctgttctcgggtatctacaacatcggcattggcggtggtgcgctgctgggcagtatcgtcagcagccagatggatgtggcggatatcggcctggtgggcggcagcgtggcagtggtcgggctggtactggccgttgccagtacccggcgctttcgcgaggcgttgacacgt

SEQ ID NO: 31579 - DNA, 1032 bp, Pseudomonas putida
atgctgtattcgcttcaggcactgcgggcgttcgccgcctgggtggtggtctgccaccatttcatgcagatcttcttcgacttccacgccaccggccccatcggccaactgctcaccgaccgtggcgccgtaggcgtcgacatcttcttcgtcatcagtgggctggtcatctacctgtcgacccgcgacaaaaccgtcgagccgcgccagttcctgctcaatcgggcgctgcgcatcgtccctgcctactggttctacacagccctgatggccatattgctactggcattcagccaatggatgccacatcagtcgtttgactggcggcacctgttcctgtcgctgctgttcatcccggcggaaaacccaggtggctatggcctgtacccgaccctgaacgtgggctggacgctgaacttcgagatgttcttctacctgctgttcggcctggccttcctggtacgccaacggcatcacctgctgctggtgactgccgctctgttgctggtcagtgaggtactggggcgcatgggcgtggtcagccgcttctacaacaacgacatcatctacgagtttctgctgggcattggtgtcggtgtactgtaccgccgcgggctgatccgccagggccggtggttgccgctggcgttgctgggtgtggcgggcatggcgatctactgtctggacgcttcccagcgcttgctgcactgggggttaccgagtgcgatgatcgtcctggccttcgtggccatggagccgctgttccagggcaatcggctgctcaaggcccttggcgactgttcctactcggtgtacctgatacatgtgctggtgctgtatgccggttggttcgccagtcagcgcctgcatctgaacccgttcctgacatttgccctgtgcgtgccgtccattggactaatgtcgtggttcagctaccagtggctggagcgcggcctgtaccggcgaatgcaggcctggctggcggcgcaacgggggccggcccctgaatatgcgctttcccgagtcaattgc

SEQ ID NO: 31580 - DNA, 957 bp, Pseudomonas putida
atgaagctgccgttccccggtcgtctgctggccctcgctgtcatttcctcgcttagcctcgccttgccattgtctgccgcccacgctgaagacaagcccaaggtcgcccttgtcatgaagtcgctggccaacgagttcttccgcaccatggaagacggcgccaaggactaccagaaaacccatgccgacgagttcgagctgatcgccaacggcatcaagaacgagaccgacactggcgagcagatccgcatcgtcgagcagatggtcaatgccggcgccaaagcgctggtgattgccccggctgattccaaggcgcttgtgtcggcggtgaagaaggccatggaccagggcgtggtggtgatcaacatcgacaaccgtctggaccctgatctgctaaagagcaaaggcatcagcgttcccttcgtcggccccgacaaccgcaagggcgcgcgcctggttggcgattacctggccagccagaagctcaaggccggcgaccaggtgggcattatcgaaggcgtgtcgaccaccaccaatgcccagcagcgcaccgccggcttcaaggacgccatggacgccgcgcagatgaaaatcgtctcggtacaaagcggcaattgggagatcgacaaaggcaacgccgtcgccgcctccatgctcaacgaataccccgacctgaaggccttgctggccggcaacgacagcatggccctgggcgctgtgtccgccgtgcgtgccgctggcaagaccggccaggtgcaagtggtgggctatgacaacatcaatgccatcaagccaatgcttgaagacggtcgggtgcttgccaccctcgaccaggcggccagccagcaggcggtgtatggcattcaggcggcgctgaaaatggtcaagggcgaaaagcctgatgtggatgccgacaacgtcatccagaccccggtcgaactcatcaccaagaagccc

SEQ ID NO: 31581 - DNA, 1551 bp, Pseudomonas putida
atgcctgcattggccaatgaagtggtgcttgccgccagcggcctgggcaagacctatgcccagcccgtactcggcgaggtcagcctgagcctgcgcgcgggcgaagtgctggccctgaccggcgagaacggcgcaggcaagagtacgttgtccaagcttatcagcggcctggaggtgcccaccaccggtcacatgacctaccgcggccaggcctacgcgcccggcagccgcggcgaggccgaacgccttggggtgcgcatggtcatgcaggagctgaacctgctgccgacgctgaccgtggcggaaaacctgtttctcgacaacctgcccagccgcttcggctggatcagccacaagcgtttgcgccagctggcaacggctgccatggctcgggtcgggctcgacgccattgacccggacacccctgtcggcgaactgggcatcggccatcagcaaatggtcgagattgcccgcaacctgatcggtgactgccatgtgctgatcctggacgagcccactgccatgctcactgcgcgcgaggtggcgttgctgttcacccagatcgagcgcctgcgcgcccgcggcgtggccatcgtctatatctcgcatcgcctggaagagttgcagcgcgtggcccaacgcatcgttgtgctgcgcgatggcaagctggtgtgcgacgagccgatccagcgctacagcagcgccgagctggtcaacctgatggtcggccgcgagctgggcgagcatatcgacctgggtcgacggcagttgggtgcaccgctgctcaaggtcgacaaactgtgccgtggcgacaaggtgcgcgaggtgtcgttcgaagtcagggcaggggagatttttggcatctccggcctgatcggcgccggccgtaccgagctgctgcgcctgatctacggtgccgatcgcgccgacagcggcggtatcgcgctcggccagccgccacaggcggtcagcatcgactcgcccaaggctgcagtgcgtgccggtatcgcgctgataaccgaagaccgcaaaggcgagggcctgctgttgacgcagtcgatcagcgccaacattgcgttgggcaacctgggcgcggtatcgcgcgccggtgtgctcgatagcgaagcggaaaaggccttggccgaacgccagatccaggccatgcgcattcgcagtgctggcgcgcagcaagtggtgggcgagctgtctggcggtaaccagcagaaggtggtgatcggccgctggctggagcgcgattgccaggtgctgctgttcgacgaacccacgcgtggcatcgatgtgggcgccaagttcgacatttatggcctgctggccgagctggcgcgccaaggcaaggccttggtggtggtgtccagtgacctgcgcgaactgatgctgatttgcgaccgcatcgccgtgctgtccgctggccgcctgatcgacaccttcgcgcgtgatcattggagccaggaccagttgcttgccgccgccttcgccggttatcagaaacgtgacgcgctgctgcatgatgcagcccccaggatggatgca

SEQ ID NO: 31582 - DNA, 1020 bp, Pseudomonas putida
atggcaaccatcaaagacgtcgcggcactggcgggtatttcctacaccaccgtgtcccatgtactcaacaagacccgtccggtcagcgagcaggtgcggctgaaagtggaagccgccatcatcgaactggattacgtgcccagtgcggtggcgcgctcgctgaaagcgcgcagcacggccaccatcggcctgttggtgcccaacagcgtcaacccgtacttcgccgagctggcgcggggtatcgaagacgcctgcgagcgcaacggctattgcgtgatcctgtgcaactccgacgacaacccgcagaagcagcgcagctacctgcgcgtgctgctggaaaagcgcatcgacggcctggtagtggcctcggtgggccaggacgacgacttgctgcaaagcctggccagtgtgcgcacgccaatggtcatcgtcgaccgtgagctggaaggcgtcgatgccgacctggtgcgcattgaccacgagcagggggcgtacctggccacccggcatctgctggagcttggccatcgcgacgtcgcctatatcggcggccccgccgaaaccggggttacccagctgcgcctgagcggcttccgccgtgccatggccgaagccggtgcgcccgtgccgggcagccgtgtactgcactgcgacttcaccagcccgggtggccatgcagcggcggcgcaggtgctggaaggcaagcggccctcggcgatttttgccggcaacgacatgatcggctttggtgtgctgcgcgctgcagccgaacgcaatatcagcgtacccggcgagctgtcggtgatcggcttcgatgacatcgaactgagccgctacgtgtacccatcactgaccaccgtgggccagtcgatccgcgaactgggcgagagcgctgcctcgttgctgctgacgcgtatcgctacgccccggcaaggcgcggcggagcagcgcattgtcgccccgcgtatcgtcttgcgtgagtccaccgggccgcgcccggacctgttcaatgattaccgc

SEQ ID NO: 31583 - DNA, 1008 bp, Pseudomonas putida
gtgccacccatgctcaagtccctgctacaaggagtcgtcttcatggccgcagcctccaccctccaggccgcacccatcgatctgatcatcgacaccgatcccggcgccgacgatgtggtggcgctgtttctggccatggcttcgccccacgaactcagtatccgcgccatcaccaccgtggccggcaacgttcgcctggacaagacctcgcgcaatgcccgcctggcccgcgaatgggcggggcgtgaagacatcccggtgtacgctggtgccggccgcccattggtgcgcacgccgatctacgccgccgacgttcatggcgaagaaggcctcaccggcgtacaggtgcacgagccgaaagcgcccctggcccagggcaatgccgtgcaatacctggtcgataccctcggcgcagccgaaccacacagcatcaccgtcgccatgctcggcccgcagaccaacctggccctggcgctgatccagcgcccgagcatcgtcaaaggcatcaaggaggtggtggtcatggggggagcgcatttcaacggcggcaacatcaccccggtggcggagttcaacctctacgccgacccgcacgccgccgaagtggtgctggccagcggcgtgcagctgacctacctgccgctggatgtcacgcacaagctgctgaccagtaacgcccgcctgaagcagttggcagccgtgaacaaccaggcgagcaagcgcgtggtggatatcctcaatgcctacatcacccacgacatggacgtgtatggcatacctggcggccctgtgcacgacgccagcgtcatcgcctacctgttaaagcccgagctgttcagcggccggcgtatccacatgagcatcgacagccgcgaaggacccactttcggccagacaattgcagactggtacggtgtgctcaagcggccggcgaatgtgctgtgggtggagcagggtgatgcccaggggctgttcgacctgctcagtgcccgtctggcgcgattggaa

SEQ ID NO: 31584 - DNA, 10857 bp, Pseudomonas putida
gtgtcatctccggacagatcgagggcaactgcaatggccaatttcagcaagtcggaccttgaattcattctcaaacagatcttcatcgctgaggcacacgccgatggcgccagcctgatcgacctgttgcccaacagccaggtaccctttggcctgcgcacggtggatggcagctacaacaatctggtcaccgggcagagcgagttcggcgcagccgacaactcgttcctgcgcctgctcgaagcgtcttaccgcgccaactatgtcggcaccggcaatgtcgtcgattcgcaaccgcgcaccatcagcaacctgatcgtcgaccagacagccaacaacccggccgcagtcgaggccaacggcggtgccgcgccggtgatgagcccgggtatcgacggcgtatttggcaccgctgacgacaagcctgtgttcttcatccccaatgtgtcaccagacgccgggctgactgccggcttcaacgcctggatgaccttctttggccagttcttcgaccacggcctggacctggtcagcaagagcagcaccgacatcgtgttcatcccgctgcgcccggacgaccctctgttcgtggccggcagcccgaccaacttcatggtgctgtcccgcgccgtgcgcaccgccggcgccgatggcgtggtgggtaccgccgacgatagccagcccaacaccacctcgcccttcgtcgaccagagccagacctacagttcacatccctcgcaccaggtgttcctgcgcgaatacacggtcaacgccgcaggtgacccggtggctaccgggcgcctgatcaccaaccgtgatctgggcgccgatggcaagttcggcaccgccgacgatggcaacggcgaaagcggtggcatggccacctgggcggtggtcaaggcccaggcccgcgacctgctgggtatcaacctgaccgatgccgacgtgcatagcgtgccgctgctggccaccgatgcctacggcaacttcctgcgcggacccaacggcatgccgcaggtggtcatgcgcgtgaacaacggcgccgatggcattgctggcaccgccgatgacgtcacccagctggtcgagggcgaccgcaatgcaccgatcagcctggccaatgccgtgagcaccgggcatggcttccttgacgatatcgcccacaatgccgcaccggtggtggtcgggggggcgctgcaggcggacgccgacaccctggtgggtaacgcgcagccggtcgggcagggtggcaacaacctgacctacgacaacgaattgctcgacgcgcactacatcgccggtgacggccgggtgaacgagaacatcggcctgaccgccgtgcaccatgtgttccactccgagcacaaccgcctggtgcagcagaccaaggacaccctgctggccgcgggcgacctggcgttcctcaatgagtggctgatcgacgacgtaaccgccatccccaccacgcctgccgacatcgccgcgctggtgtgggatggcgagcggctgttccaggccgccaagttcggcaccgagatgcagtaccagcacctggtgttcgaagagttcgcccgcaccatccagccgcagattgacgagttcctcgcccccaacggctacgacacctcgatcaacccggcgatcctcgctgagtttgcccatgtggtgtaccgctttggccactcgatgctgaccgaaaccgtcgaccgctacgacccggcgttcaacccggtttctgccgacccggccaaccccgaccagcagttgggcctgattgccgcgttcctcaacccgctggcgttcgccggtagcggggccacggccgatgaagcggcgggcgcaatcatccgcggcgttacccgccaggtgggcaacgagattgacgagttcgtcaccgaagccctgcgcaacaacctgctcggcctgccacttgacctgcctgcgctgaacatcgcccgcggtcgtgataccggcatccccagcctgaacgaggcccgccgcgagttctatgccgccaccggcgacagccagctcaagccctacatgagctgggtcgactttgccgaccacctcaagcacccggcgtcgctgatcaacttcattgccgcctacggcacccacagcagcattaccggggccaccaccgaggccgccaagcgcgccgccgccgtggcactggtacttggcggtgacggcgcacccctcgaccgcctcgacttcctcaacggcaccggtgcctatgccaacgtgacgctggccggtgcggacggcatcgccggcacggccgacgacattgccggggtgaccgtgaccggggtcgacgccatcgacttctgggtcggcggcctggccgagaagaaaatgccgtttggcggcatgctcggctccagcttcaactttgtcttcgaaacccagctggaagcgctgcagaacggtgaccgcttctactacctgtcgcgcacggcaggcatgaattttggtacggagctggaaaacaactcctttgccaagctgatcatggccaactccgacgtcacccacctgtccaacaccgtgttcctcactcccacgttcaccctggaagtgaaccaggccaaccagttcaccgggctgggtgccgacggcaaggccgaccccactggcggcatcgagatcaacggggttgaaatcgtcccattggtgatccgcgataaccccgataccgtcgggccagacagcaacttcctgcattacaccggtgaagaccatgtggtgctgggtggcaccgcgggcaacgacatcatcatctccagcgaaggcgacgacaccctctatggcgatgccggtgatgacctgctcgaaggcggcgccggcaacgacgcggtgctgggtggcgcgggcgacgacatcatcaccgattcgttcggcgacaaccgcctggaaggcaatgccggcaacgacgtgatcgtcgctggcagtatgggggttgccggtaacctgatcctgggcggcgatggccaggacttcatcatcaccaccgaggacatcagcaccaccttcggtggcctgggcgacgacttcatcctcggcgccaagaccaacctgccacctaccggtaacgagggtgacgactggatcgagaagggtacccaggacggcgcacctggcgacaacttcgcacccttgctgggtgacgaagtcattggcaacgacatcttcgtcgggggcggcggcttcgacgaaatgatcggtgagggcggcgacgatatcttcgtcggcagcgatgcccaagacaaaatggatggcatgtccggtttcgactgggtcaccaacaagaatgatcgcgtcggtgtcaccgtggacctcagcctggccgccttggctcagccccatggcaacgcgcctaaccagaacgctggcgtgttcaacccggtgggcgcttcgcctgcctcgattctggacaggttcgctgaggtcgaaggggtgtccggttcggcctacgccgatgtgctcaagggcgacgacgtcgatgccgtgaccattctcaaccatggcggcgccaccggcagtgcgctgaccaacgtggcgctgatacgtgggctgcagcagttcctggcggatgccggcttgcccaccaccggctttgccaccggcaacatcatgctcggcggcaatggcagcgacctgatcgaaggccggggtggcgatgacctggtcgatggcgacaagtggctcaacgtgcgcatcgccgtgtacgcccctggcgacgtcaaccacaccggcccggaaatcgccagcttcgacagcatggccgacatgattccgttcatgcttgaccgcacctacaaccccggccagctcaaggccgtgcgcgaaatcctgcccggcacttcgaccggcggggccgccttcgacacggcagtattctctgggctacagagcgagtacgtggtgacccagaacaccaagggcaccgccgatgttgccgatgacgtctggaccgtgaccgataccgtggccggccgcgatggcgtcgataccctgttgcacatcgaacgcctgcagtttgccgatagccagcgcgtactggtggagggggtgaacgcacaacccaccggcagcccgaccctgctcgacggcaacggcggtgagattaccgtgggtgacatgcttacggtgagcgtggccgccgtgcgcgacgccgacaatatcagtgcgggcaacccggctgggtcgctcgccgaccgttcggtgtcctactactggcagttcgaggccgacccgggcagcggtgtgttccaggacatcatcctgctaccggccggcgacctggccttccagagcgctgatggcacttcgttcaaggtgtcgccagacctggccgggctgagcctgcgggtcaaggcgatctatcaggatgcccatggcaccaccgaagtgctgtactcgcagcctaccaccgtggtgcaaccgggcgcgcccgtggtgccgacagtggccaccccggtggtggatgccagtgacggcggtgccggcctgcacatggtgcgctccgacctgaacttcatcctcgcgcaaatcaagattgccgaggccgatgccgccgggcaggacatcctctcgctgatccccaacgtccgtgcagccatgggcctgcgtgcggtggatggctcgaacaacaacctgatgaacctgaacggcaacaacaacacccaatacggtgccgccgacaacgtcttcccgcgcgtgaccgacccggtattcaacccggccgaaggtgcgccagccggtttcttcggcccaggttcccccgcgatcccgggctcgtcgtaccagcagaccagcggcccggtgttcgattctcagccacgtaccatcagcaacctgattgtcgaccagacctccaacaacccggcagcctatgccaccgcgtatgacccgggtgccgatggcgtgctcaacttcggcgccgcaggcaacgacgacgtgctcaaggatggcgtgcgcatcgtcgccagcccgggcatggacggccagttcggcaccaccgacgaccatgacgtgtacctgttcgagaacaccgctgccgatgccgggctgtctgcgccgttcaacgcctggatgaccttcttcgggcagttcttcgaccatggtctggacctggtcaccaagggcggctccggtaccatctacatcccgctgcaaccggatgacccgctgtacgtggagggtggcttcaccaacttcatggtggtaactcgtgccaccaacctgcctgggccggacggcatcctcggcaacgccgacgacatccgcgaacacaccaacaccaccacgccgttcgtcgaccagaaccagacctacagctcgcatccctcgcaccaggtgttcctgcgcgcctatgtcatgactgacgacggcccggtcgccacgggccggttgatcaccaatcgcgacctgggcgctgatgggcggttcggcacggccgacgacaccgagatcggcggcatggccacctggaaggtggtcaaggcccaggcccgcgacctgctcggcatcaacctgaccgatgccgacgtcgacaacgtgccgctgctggccaccgatgcctacggcaacttcatcaaaggccccaacggctacccgatggtggtgatgaaaggcctggacggtattgccggcaccgctgatgaccaagaggtcgaaggcaacccgctggcaccgctcgacttgaccaacgccgtgcgtaccgggcaccagttccttgccgacatcgcccacaatgccgtgccggtgttcagtggcggcgtgctggcgccggatgccgacaacgtggccggcaatgccgtgccggtcaacccgcagaccggtgccaacctggcctacgacaacgaactgctggacgcgcactacatcgccggtgacggccgggtcaacgagaacatcggcctgaccgccgtgcatgcgatcttccactccgagcacaaccggctggtggcgcagaccatggacaccgtgctcgactcgggtgacctggccttcctcaacgaatggctgctcaacccggtcagcgccttgccggtcaccccggccgagatcggtgccctggtgtggaatggcgagcggttgttccaggcggccaagttcggcaccgaaatgcagtaccagcacctggtgttcgaggagttcgcccgcaccgtgcaacctcgggtcgacctgttctttgccccgacccaggtatacgacgtcgacctcgatgcctcgatcgtggccgagttcgcccacaccgtataccgcttcggccactcgatgctgaccgagactgtcgaccgcttcgacatcgacttcaacgtcatccaggacccggccagcgccaaccccgaccagcaactggggctgatcgcggccttcctcaacccgctggcttatgccgccagtggcgttacccccgaggacgccaccagcgccatcgtgcgcggggtcacccgccaggccggtaacgaaatcgacgagttcgtcaccgaggcgctgcgcaacaacctgctcggcctgccactggacctgccagcgatcaacatcgcccgtggccgcgacgtcggtatcccttcgctgaacgctgtgcgccgcgaaatctacgggcaaaccggcgatacccagctcaagccgtacaccagctgggtcgacctggtgcaacacctgaagcacccagagtcgctgatcaacttcatcgcggcctacggcacccacagcaccatcaccaatgccaccaccctgttggaaaaacgcgccgcggccatggccctggtgttcggtggcgatggcgcacccgccgaccgcatggacttcctcaacagcagcggcgcctgggccaacgtgaccctgcccggcaaggacggtgtactgggtactgccgatgacctcaaggcagtcaccgtgaccggtgtcgatgccatcgacctgtggatcggcggcctggcggaagcaaaagcgccatttggcggcatgctcggcagcaccttcaacttcgtgttcgagaaccagatggaaaaactgcaggacggcgaccgcttctactacctggagcgcacggcgggcctgtcgatgaacgccgagctggaaagcaactcgttcgccaagctgatcatggccaacagctcggccacccacctgccaggcctggtgttctccgaccctggcttctacctggaactggaccagaccaagcagtacaacgagggccttggcagcgccgatccgctgggcgaaaacggcgagcaggtggtgttccgcgacagcccgctgacggctggcccagacacccactacatccgctatgccggtgccgagcacatcgtgctgggcggcaccaacggggacgatattctggtctccagcgaaggcgacgacacggtctggggtgatgccggcaacgaccgcatcgagggtggcgacggcaacgaccagctgcgcggtggggccggcgacgacatcatcagcgacatgggcggtgacgacaacatccagggcggcgacggcaacgatgtgttgcacggcggtaatggcgtcaacctgatcatcggcggtttcggcaatgacttcatcgtcaccggtgaggacgcctccgaagccatcggcggccaaggcaatgacttcatcctcggcagcaaggccaacgagcaggacatgggcaacgaaggtgacgactggatcgagaagggcacctcggacggcgcgcctggcgacaacttcgacccgctcggcaacgacccgatcatcggtaacgacgtatttgtcggcggcaacgagaacgacaagttcaacggtgaaggcggcgacgacatcatggtcggcagcctggggttcggcgaccgttacattggtggctcgggctacgactggtcaaccttcaaggacctggcccagggcgtgtccatcgacatgagcgaccgcttcttcgatgtgccaccggtaccgggttcgggcgcttcgacgctggtgcggttcgacatcatggaaggcctgtcggggtcggcgcatggcgacttcctgcgcggtgacagcgaagacgccacctcgctgcctactgcaggcgctaccggcagcgtgctgaccaacatcagcctgatcgacggcctggccggcctgctggcggccggagcgaccttctatgacggcggcaacatcatcctcggcggcagcggcagcgacttgctcgaaggccggggtggcgacgatatcctcgacggcgacaagtggctgaacgtgcgcatcagcgtacgcgccaaccctgatggcaccggcccggaaatcgccagcttcaacagcatggagccgatggtgccgttcatgctcaatggcacctacaaccccggccagctggtgatcgtgcgggagatcctcagcggcaccgaccactacgacacggcggtgtactctggggtgtccaccgactacagcgtggtggtcgatggcaactcggtgaccgtcactgacctggtggccggtcgcgatggcgtcgaccacctgaccggcattgagcgcctgcagttctctgacagttcgcaggcctctggcgtcggtacggcagtcaacgccggccccaccggccacctggcgattctcgatgctaccaccggcctgcgcgatgatacgccagtcagtggccagctgctgagggtcagcaacctcgccgtgcatgacgcggacaatgtcagcgcaaccaatgcgaccggtgcggtgaacggccccgtggcctactactggcaagtcgaggcgctgccgggttccggggtttatgaagacatcacggtagtggccgctggtgaagcgacacgggccaccggtacgacctaccgcgtcacggacgatgtcgccggcctgaacatccgcgtgcgtgcggtgtaccaggatgccaagggcacgctggaaatcgtcgattcgtcgccgaacagcgcgccgagcgccgggccgaccgtgaccgggctgctggtgcagaaccagacgctcaccgccaacccggccaccatcgtcgatgctgacggcctgagcaaccctcagttcagcttccagtggcagtccaaccggggtgtcggttgggtcaacatcgctggcgccatcagcagcacgttcgtcctgacccaggcgcaagtggggcagaacatgcgcgtgatggtcagctacgtggatgactttggcgtgcaggaaagcgtggcctccgacatcctcgacccggtggccaacgtcaacgatgcgccgaccggtgcgttgctgatcagtgacaccacacccgaccagggccaaacgctgactgcgctcaccggcgcaattgccgacatcgacggcctgggggccttcagcttccagtggcagcaaggtaccggcggcaccttcgccgatatcgccggggctacggcggccaccttcacccctggcttcgcccagggcaaccagcagctgcgggtgatcgtgcgctacaccgacggcttcggcacactggagtcgctgacctcggcggcgaccgccgcagttaccgtgccaccgggtgtagtcctggttggcaccaatgcggccaacaccctgaccggtacaacaggcaacgacgtgatttcgggcctgggtggcaacgacacgctcaacggcctgggcggcagcgaccagctgttcggtggcattggcaacgacatcctcaatggcggtgacgaccccgacttcctcaatggcgaggatggcaacgacaccctcaacggcgggcttggcgcagatgccatgaacggcggcgccggcaacgataccttcctggtcgacaatgccggggataccgtcactgaggcactcaatggtggcacggaccaggtgcagaccagcctggccagctacaccctgggcgccaacgtcgagaacctgacctataccggcagcagcgcctttaccggtaccggtaacgcgctggccaacaccctaacgggtggtgccggcaacgacctgctcaacggcggtgcgggtgctgaccgcttggtgggtggcgtgggcaacgacacctatgtggtggatgacgccggggatgtggtggtcgaggcgacgggggccggtacggaccttgtgcgtaccacgctggccagccacaccatggcggccaacgtcgagaacctggcctataccggggtgggcaacttcaccggcacgggtaacgggctggccaacatcatcgacggtggggcaggtaatgacacgctcagcggcgacggcggtaacgatgtgctcaacggcaatgccggcaacgacaccctcaacggcgacgccgggaacgaccagctgttcggcggcctgggtgacgaccaactgcgcggtggagggggggacgacagcctcgatgccggtggcggcaacgacacgttgctgggggaggccggtaacgacaacctgaacgggggcgctggcgatgacagcctggatggcggcaacggcaatgacaccctgcagggcggcgatggtaacgacacattgttcggcgacgtgggtaccgacaccctgatcgggggggccggcaacgacttcctcaacggtgcggcaggtaacgatacggtggtgggtggggccggtaacgacaccatgatcgccaccgatggaaacgatgtgttccagttcgctgcaggctttggcaacgacctgatcatcaatttcgatgccattgcggcgggtggccaggaccggctggatatcaccgccctcaacatcaccgcagccacctttggtgccagtgtgaccatcgccgatgttggtgcggacaccttggtaagcatcggtgctgccgactccatacgtttggtgggggtggcagatgcaaccacggtgaccgccgcagacttcatcctggccggt

SEQ ID NO: 31585 - DNA, 852 bp, Pseudomonas putida
atgcgcctgatcatcgtcagcggccggtccggctccggcaagagcaccgccctcgatgtcctggaagacagcggtttctattgcatcgacaatctgcccgccgggctactgccgcagttggcggaaaatgcactgatcaacaccgaattgctgcagcccaaggtggcggtttcgatcgacgcgcgcaacctgcccagccacctgatgcgttttcccgagctgcttgaagaagcccgcgcacggcacatccagtgcgacgtgttgtacctggatgccgatgaagaggtccttctcaagcgtttctcggaaacccgcaggcggcaccccctgaccaacgccaaccgctcgctcgcggaagcgatccgcgtggaaagcgacttgttggggccaattgccgacctggccgacctgaagatcgacaccaccaatctgaacctgtaccagttgcgtgactcgatcaagctgcgcctgctcaaccagcccgagcctggcacagcgtttctggtcgagtcgttcgggttcaaacggggcatgccggtcgacgccgacctggtttttgacgtgcgctgcctgcccaacccctactggaaaccggaactgcgtgagcactcgggcctcgatcaacccgtgatcgactacctggccgcacaaccggatgtcgaagatatgtacaacgacatctccagctacctgctcaaatggttgccccgcttcgctgccagcaaccgcgcctacgtaaccattgccatcggctgcaccggcggacatcaccgttcggtgtacatcaccgagcgccttggtcgacagctgcagcaaaccctgaaaaacgtccaggtccgccatcgcgacctc

SEQ ID NO: 31586 - DNA, 270 bp, Pseudomonas putida
atgcccgcccgcgaaatcaccatcatcaacaagctgggtctgcatgcccgggcggcagccaagttcgtcggtgtggccggccgcttcccctgccaggtacgggtgggtcgcgccccggacaagctggtggatggcaagagcatcatggcggtgatgatgctggccgcaggcaaaggcacccaggtgcacctgcataccgagggcgagcaggacagcgacgccatggacgcgctggtcgagctgatcaacaatttctttgacgaaggcgaa

SEQ ID NO: 31587 - DNA, 519 bp, Pseudomonas putida
atggttgattcaaacgacgacgccttcgacggcgaaaaaagcaaaacccagatcaagcgcgaactgcatgcgctggtcgaactcggcgagcggcttaccacgctcaaggccgataccttggcgcgcctgcctttgaccgacgagctgcgcaaggcactggctgaggccagcaagcacaccgctcatggcgcccgtaaacgccacatgtcgttcgtcggcaagctcatgcgcgtgcaagacctcgatgccatccatgccttgctcgaacagatggacagctcgactcgccagtacaacgaacgtttccacagcctggagcgctggcgtgaccggttgatcgacggtaacgacgaagacctcgagcgcttcgtcaacgagtaccccgacaccgaccgccagcagctacgctcgctggtgcgccatgcccagcacgagaaggcgcgaaacaagccgcctgccgccgcgcgcaaggtgttcaagtacatccgcgacctcgacgagttgcagcgcgggttgcgc

SEQ ID NO: 31588 - DNA, 651 bp, Pseudomonas putida
atgagcctgctcgacacgttcgcccacctcgactgggcccaggtgctgcaactgacctggcagcacatcatgctggtcggcatcgccgtcggcctggcgatcctcgttggcgtgccgctgggcatcctgatgacccgcttcccggcagtggccggcccgctgcaggccagcgccacagtgctgctgaccatcccatcgattgcgttgttcggccttctgctgccgttctactccaagttcggccaagggctgggccccttgccggcgatcactgccgtgtttctttattcgctgctgcccatcctgcgcaacacctacctggccctgaccaatgtcgagcccggtatccgtgaagccgcgcgtggcattggcatgaccttcggccagcgcctgcgcatggtcgagctgcccatcgccgtaccggtaatcctcgccggcgtgcgcaccgccgtggtgatgaacatcggcgtcatgaccattgccgccaccatcggcgccggcggcctcggcgtgctgatccttacctccatcagccgcagcgacatgtcgatgctgctggtcggcgccgtactggtcagcctgctggcgatcatcgccgacctgctgctgcaaaccctgcaacgtgccctgactccagaaggactgcgctca

SEQ ID NO: 31589 - DNA, 1155 bp, Pseudomonas putida
atgatcgaactgaagaacctcagcaaaaccttcaacgtcaacggcaaggacgtcaaagccgtcgactcggtaagcctcaccgtcaatgaaggggaaatctgcgtgttcctcggcccgtcgggctgcggcaagagcaccacgctgaaaatgatcaaccgcctgatcacgcccacctcgggccaggtgttcatcaatggcgaagacaccaccgggctggacgaagttaccctgcgccggcacatcggctatgtgattcagcagatcggtctgttccccaacatgaccatcgaggagaacattaccgtggtcccgcgcctgcttggctgggacaaacagaaatgccacgagcgggctcgcgagctgatgcacatgatcaagctcgaacccaagcagtacctgcaacgctacccacgcgagctgtctggcggccagcaacagcgtatcggcgtgattcgcgccctggcagcagatgcacccgtgctgttgatggacgagccgttcggcgcggtcgacccgatcaaccgcgagatgatccagaacgagttcttcgaaatgcagcgggcgctgaacaagacggtaatcatggtcagccacgacatcgacgaagcgatcaaactgggcgacaagattgccattttccgtgccggcaagctgttgcagctggatcacccggataccctgttggcgcacccggcggatgatttcgtcagcaactttgtgggccaggacagcaccctcaaacgcctgttgctggtgcgtgccgaggatgcagcggacaacgcgccgtcggtgagcccggaaacaccggtgggcgacgcgctggagctgctcgatgagcacgaccgccgctacgtggtggtgaccgatgcgcagaacaaggcgctgggctatgtgcgccggcgcgacatgcaccgccagcaagggacgtgtggcgatttcctgcggccgttcaatgccaccgcgtcgcacgatgagcatttgcgcatcctgttgtcgcgcatgtacgagttcaaccgcgcgtggttgccagtgttggatgccgagcaggtgttcctgggcgaggtgacgcaggagtcgattgccgcgtacctgagctcggggagatcgcggggggcgaagagcagtatcgtttcgccggccgaggcggtggtttcg

SEQ ID NO: 31590 - DNA, 285 bp, Pseudomonas putida
atggcgcttgaacgctgcgacgtggaaaagatcgcccatctggcccgcctgggcctgaatgatggcgaactgccacgcattaccgacgccctgaacagcattctcggcctggtcgaccagatgcaagcggtcgataccactggcatcgagcccctggcccacccgctggaggccagccagcgcctgcgtcctgaccaagtcaccgaaagcaaccagcgcgatgcctaccaggccatcgcgccgtcgaccgaaagcggtctgtacctggttcccaaagtcatcgag

SEQ ID NO: 31591 - DNA, 1188 bp, Pseudomonas putida
atgaatacacccgccctacgtattaccctggtcagcgaaaccttcccacccgagatcaatggcgtggccaacacccttggccgcctcagtgatgggttgcgccaacgcggccatgaggtcgaggtggtgcgcccgcgccaggccggcgaagggcacgtgcacaacgatccgcagctgatgctgtgccgtggctgggcgctgccgggctacccgggtttgcagtggggcgaggtgtcgatgcacaagctgttgcgccgctggcgccggcagcgcccggatgtactgtacatcgccaccgaggggccgctggggctcagcgctctacgcgcggcccgacgcctgggggtggcggtggtcagtggctttcacaccaacttcccgcagtattccggccagtacggcctgggcctgctggcgcgcctgctcactcactacttgcgctggttccatcggcgcacggcaatcaccttggtgccgagtgccagccagcgcctggagctggagcgtcgcggtttcgaacgcctggagttgctggcccgaggggtcgatgcctgcctgttcaatccggcccggcgcagccaggccctgcgcgaaagctgggggctaggcccggaggacatcgccgtactgcatgtcgggcggctggcggcggaaaagaaccttggcttgctacggccttgcttcgaggcattacgcaagacgtatccacaaaagcgcctgcgcctgatcatggtcggcgacgggcctcagcgcaccaagctcgaacaagagataccggacgccgtgttttgcggcgcccagcgcggtgaacgactggccgagcactatgccagcggcgacctgttcctgttcccgagcctgaccgagaccttcggcaatgtggtgctcgaagccatggcctcagggttggcggtagttgcttatgacgaggcggccgccgcgcagcatattcgccatggccacagtggcgcgctggcgatgccgggggaccaggcggcgtttgtcgatgcagcgtgctggttgctggaagaagtggagaccttgcgcagggtgcgcctgaatgcgcgacagcatgccagccgccagggctggccggcgattgtcgaacagttcgaggggtatctgaacagcgcatgccggcaacctggtgctacggctgggcgttctgcgcaatgtttgcagcgcctg

SEQ ID NO: 31592 - DNA, 984 bp, Pseudomonas putida
atgaagagtcaggaggccttttcgatgaaacagcacggtaccgatgccgtccgcgagcaggcggccgcatggttcgcccgcgtgcaggacgcacctcgggatgccgggctgcacaagcagttgcatgcctggctggcgagcgacgagcaccaccgggaagaatatgagcatctctgccgcgtgtggcaggccgccgacttcattccacgccagcacctggaggcgctgtgccggccagacccggtgcagcaactgccacgacggcgtttcatgcgccaggcgttggccgccagtgtcgcggtagtggcgctgggcctgggctggagcggctggcaccacctgcaactgaaccatcagggcagcctgcagacggccttcaatgagcgccgtcaggtcgaactgccggatggctcgcatctggagctcaatggcaacacgcagttgcaggtcgagttcagcgccggccagcggcacgtgcgcctgaacgctggtgaagtgatgttcagcgtcgcccatgacagtaaccggccgtttgtggtcgacactgcccagggcagtgtgatcgtcacaggtacccgctttgacgtccgcctggacccagccagcacccgtgtggcggtggaacaggggtcggtgcgggtgcagggcaagggcgactcgccggcgcaactgacggccgggcaggggtcgcatatagatgcacagggcctggtcgccgcaccctatgcggtcaacaccggcgccattaccgcatggcgacagggcaagctggtgttcgacaacgcaaccctcgccgaagtagtggccgaaacctcgcgctaccgtcgccagccattgcgggtcgcccctgggaaagtcgcgcggctgcgcctgtccggcaccttcagtaccaacgatacagacgctctgctgcgggccttgccgagcatcctcccggtggccatcaaagcccatgaagacggctccagcgaaataatcgccaaa

SEQ ID NO: 31593 - DNA, 2070 bp, Pseudomonas putida
attgcgccgaccgactttggtgtcggcctgacttcgatcagcctgggcctggtgcgcaccttggagcgtgccggcctgaaggtcggcttcttcaagcctatcgcccagccccacccgggtgacaccggccccgagcgctccaccgaactggtcgcccgcactcacggcatcaagccaccggtcccactgagcctggcccacgtcgagcgcatgctcggcgatggccaactggacgagctgcttgaagaaatcatccgcctctaccagcaagcctgcgtcggcaatgacgtggttgtggtcgagggaatggtgcccacgcgccacgccagctacgcagcgcgggtcaacctgcacctggccaagagcctggatgccgaggtaatcctggtatcggccccggaaaacgaagtgctcagcgagctgtctggccgggtcgaactgcaggcccaactgtttggcggcccacgcgacccgaaagtgctgggggtgatcctcaacaaggtgcgtaccgacgagagcatggcggacttcgccacccgcctgcgcgagcactcgccattgctgcgcggtaatgacttccgcctgcttggctgcatcccctaccagcccgagctgaacgccccgcggacccgcgatgtggccgagctgctcggcgcccaggtgctcaatgccggcgattacgagcagcggcgcatgagcaagatcatcatctgtgcacgcacggtggccaacacggtcccgctactgacctcgggcaccctggtggtaaccccgggcgaccgcgacgacatcatcctcgctgtcagcctggcagcgatcaatggcgtccccctggccggcttgctgctgaccagcgacagcaagcctgacgtgcgtatccttggcctgtgccgcggtgccctgcaggccggcctgccgatcctttcggtcagcaccggctcgtacgacaccgccaaccagctcaactcgctgaaccgcgaaatcccggtggacgaccgcgagcgtgccgagttcattaccgacttcgtcgccagccacctcgacgcggcctggctgcaccagcgctgcggcacgccgcgcgaactgcgcctgtcaccggcagtgttccgctaccagctgatccaacgtgcgcagcaggccaacaagcgcatcgtcctgccagaaggcgccgagccactgttggtgcaggccgcagccatctgccaggcccgcggcatcgcccgctgtgtgctgctggccaaacccgaagatgttgacgccgtggcccgcgcccagggcatcacgttgccgccagggctggagattctcgaccccgaactgattcgcgggcgctacgtggaacccatggtcgagctgcgcaaaagcaagaacctcaacgcaccgatggccgagcagcagctggaagacccggtggtgatcggcaccatgatgctggccctggacgaagtggacggcctggtctcgggcctggtgcactccacggccaacaccatccgcccggccctgcagctgatcaagaccgcacccggctcgagcctggtctcgtcggtgttcttcatgctgttccccgagcaggtgctggtgtacggcgactgcgtgatgaacccgcacccaagcgctgccgagctggcggagattgcccaacagagtgccgcctcggcgcaggccttcggcatcgcgccacgggtggcgatgatcagctattcaagcgattcggccagcgatgaagaggtcgagaaagtgcgcgaagcgacacgcctggcacaggacgcggcgcaggagctactgatcgatgggccgttgcagtatgacgcagcggccaacccggcgatcgcccgagagctggcgccggctagcccggtggccgggcgcgccacggtgttcgtgttccccgacctgaataccggcaataccacgcacaaggcggtacagcgcagtgccgacggggtcagcctggggccgatgctgcagggtttgcgcaagccggtgaacgacttgccgcgaggggcgcaggttgacgatatcgtgcataccatagccctgacggcgattcaggccagcgtggcgcgc

SEQ ID NO: 31594 - DNA, 927 bp, Pseudomonas putida
atgcgtatcgttgttgcattgggcggcaacgccctgcttcgtcgcggcgagcccatgaccgctgacaaccagcgcgccaatatccgcaccgccaccgaacagatcgccaagattcaccctggcaacgagctggtcatcgcccacggcaacggcccgcaagtgggtctgctgtcgcttcaggccctgtcgtacaagccagacgaggcctacccgctggacgtgctgggtgccgagaccgagggcatgatcggttacatgatcgaacaggaactgggcaacctgctggccttcgaggtgccgttcgccaccttgctcacccaagtggaagtggacgccaacgaccctgccttcaaggacccgaccaagttcatcggcccggtctacagcaaggaagaggccgagcgcctggccaaggaaaagggctgggtggtcaaggccgacggcgacaagtaccgccgcgtggtagccagcccgaaacccaagcgcatcttcgaaattcgcccgatcaagtggctgctggaaaaaagcagcatcgtgatttgcgcaggcggtggcggcatccccaccatgtacgatgaaaaccgcaagctcaaaggcatcgaggcggtgatcgacaaagacctgtgctcggcgctgctggccgagcaattggaagccgaccttctgattatcgccaccgacgtcgatgcagcctacattgactggggcaagccgacgcggaaggccatcgcccaggcccacccggacgcgttggaaacgctggggtttgccgccggctccatggggccgaaggtgcaggccgcctgcgactttgcccgcaacaccggcaaggtggcggtgatcagttcgctggagaacatcgaagacatcgtcaaaggcaaagccggcactcgggtttccaccgagaagccggggatcagctaccgt

SEQ ID NO: 31595 - DNA, 1443 bp, Pseudomonas putida
atgcaatgggaagttgtgatcgggctggaaatccacactcagctcgccacccagtcgaagatcttctccggcagcgctaccacctttggctccgagccgaatactcaggccagcctggttgacctgggcatgcccggcgtactgccggtgctgaacgagcaagccgtgcgcatggcgtgcatgttcggcctggccatcgatgccgagatcggcaagcgcaacgtgttcgcacgcaagaactacttctaccccgacctgcccaagggctaccagatcagccagatggacctgccgatcgtcggcaagggtcacctggacatcgcgctggaagacggcaccatcaagcgcatcggtgtaacccgcgcacacctggaagaagacgccggcaagagcctgcacgaagacttcagcggttccaccggcatcgacctgaaccgtgccggcaccccgctgctggaaatcgtctccgagcctgacatgcgcagcgccaaggaagccgtggcttacgtcaaggcgatccacgcgctggtgcgctacctgggcatctgcgacggcaacatggccgaaggttcgctgcgctgcgactgcaacgtatcgatccgcccgaaaggccagaccgagttcggcactcgctgtgaaatcaagaacgtcaactcgttccgcttcatcgagcgcgcgatcaacagcgaaatccagcgccagatcgacctgatcgaagacggtggcaaagtggtgcaggaaacccgcctgtacgacccgaacaaggacgaaacccgctccatgcgcagcaaagaggaagccaacgactaccgttacttccccgaccccgacctgctgccggtggtcatcgaggacagcttcctcgaaaccatccgcgccggcctgccggagctgccgccacagaaggtcgagcgcttccagactcagtacggtctgtcggcctacgacgccaacgtgttggcttccagccgcgaacaggctgactacttcgaagaagtggtgaagattggtggtgatgccaagctggcggccaactgggtcatggtcgaactgggtagcctgctgaacaagctgggtgtcgaaatcgatcaggcgccggtcagcgccgcgcaactgggcggcatgctgctgcgcattcgtgacaacaccatcagcggcaagattgccaaaaccgtgttcgaggccatggccgccggtgaaggcgatgccgacagcatcatcgagagcaaaggcctgaaacaggttaccgacacgggtgcgatcgacaagatgctcgacgaaatgctggcagccaatgccgagcaggtcgaacagtatcgcgcagccgatgaggccaagcgcggcaagatgttcggcttcttcgtcggccaggccatgaaagcctccaaaggcaaggccaacccggggcaggtgaaccaattgctcaaagccaagctcgaaggg

SEQ ID NO: 31596 - DNA, 1140 bp, Pseudomonas putida
gtgatcggttggaaacatgcagcagtgctgaccctggccgtactggccgcaggttgcagcagcaacagcaagaaggaactgcccccggccgagctgaccaagttcaccgaggaagtggtgctgaagaagcagtggagccgttcgatcggtgacggccagggtgaaacctacaacaccttggtaccggccatcgagaacgaccgtatctacgcttccgacgtcaacggcgaagtcttcgccctcgaccgcatcaccggtgacgtggtgtggaagaaggacctggagctgcaggtttccggtgcagttggcgtaggctatggcctggtcatgctcggtaccctcaagggtgaagtcattgccctggactccagcaccggtgaggagcgttggcgctcgcgcgtgaccagcgaagtgctggccccacctgccaacaacggtgacgtggtggtggtgcagacccaggacgatcgcctgatcggcctggatgccgccactggcgaccgccgttggatctacgaaaactcgccggccgtgctgacgctgcgtggcaccggtgcgccgatcgccaccaaccgcctggcggttgccggcctgtctaccggcaaggtagtggcggtggacatcaacaacggtgtgccggtgtgggagagccgcgtggccatcccgaagggccgttccgagctggaccgtgtggttgatatcgacggcggcttgttgctgtctggtggtaccctgtacgtcagcacctaccagggccgtgtagcgggcctggacctggaaagcggccgcgagctgtggcagcgcgatgcttccagctatgtgggtgtcgcccagggcttcggtaacgtctacgtcagcgaagcctcgggtaccgtggaaagtgtggatgagcgctcttccagtgccctgtggagcaacgacagcatggctcgccgccagttgaccgcccctgaagtgttcagcagctacgtggctgtgggtgactttgaaggttacctgcacctgctgagccaggtggatggccgcttcgtaggccgtgagcgtatcgacagcgatggcctgcgcgcccgcccacttgtggtcggcgacaccatctatgtcttcggcaacagcggcaagctcgaggcactgaccatccgc

SEQ ID NO: 31597 - DNA, 1287 bp, Pseudomonas putida
gtgagcaaatcgctgcaagccatccgtggcatgaacgacatcctgccagaacagtcgccgctgtggcgctacttcgaaggcacagtggccgggctgctggacacctatgggtacagccagatccgcacgccgatcgtcgagttcaccgagctgttcaaacgctcgatcggtgaagtgaccgacatcgtcgaaaaagagatgtacaccttcgaggaccgcaacggcgattcgctgaccctgcgccctgaaggcactgcggcttgcgtgcgagcggtgcttgagcacggcatcaccggcaacggtcaggtgcagaagctgtggtacatcggccagatgttccgccacgagcgtccacagaagggccgctaccgccagttccaccagattggcgtggaagtgttcaacctggacggcccggacatcgatgccgagctgatcatgctgacctggcgcctgtggggcctgctgggcatccaggacgcggtcaagctggagctcaacagcctgggcaccagtgaagcccgcgcacgctaccgtgacgcgctggtcgagttcctctcggcgcgcctggagcaactggacgaagacagccagcgccgcctgaagagcaacccgctgcgcatcctcgacagcaaggaccagaacacccaggcggtgctggtcggagcgccgaagctggaagactacctggacgaagaatcgcgcgtgcacttcgagggcctcaaggcccgcctggacgctgccggtattccgttcgtgatcaacaccaagctggtacgcggcctggactactacagcaagaccgtgttcgagtgggtaaccgacaagctcggtgcccagggcacggtgtgcgcgggtggccgttacgacggcctggtcgaacagatgggtggcaagccgaccactggcgttggtttcgccatgggcatcgagcgcctgatcctgctgttggaaaccctgggcaaggtgccggagtccatcagccgccagatcgacgtttacctgtgcgcctttggcgaacaggcggagctggccggcctgcgcctgtccgaaggcttgcgcgaccgcttgccgggcctgcgcctggcagtcaacgccggtggtggcagcttcaagagccagttcaagaaagccgacaagagcggtgcactgttcgccctgatcctcggcgacgacgagctggccaagcaagaaatcggcttgaagcccctgcgtggccagggtgaacaacagaacattgcctgggatgctcttgcagagcacctggaaaccgcgatcgcgcaagcg

SEQ ID NO: 31598 - DNA, 996 bp, Pseudomonas putida
atggacccgcgcagtgaagtgttgctccgtcaggcagagctgtttcaggggccgctgctgatcgccggcgcccccgccgacgacctgctcggccagttgcctcaggcccaggcctggacctggcatgccggcgatcaggccatgctcgaaagccgcttcgcaggccgcagccattacggcgtcgaggcccctgaagcagcattcgacagcgccgtgctgttcctgcccaaatcccgcgagctggccgcctatctgctcaacgccctggcatcgcgcctggctggccgcgagctgtacctggtcggcgagaagcgcggtggcatcgagggcgcggccaagcagctgcaggcctttggcaagccacgcaaactcgacagcgcccggcactgccagctgtggcaagtgaccatcgaccaggcaccgcaggcaaaaccgctggaaagcctggccgagcgcttcgagctggccctcgaagacggcccgttgcaggtggtcagcctgcctggggtattcagccatggccgactcgaccgaggtaccgccctgctcctgaagcatcttgacggactgcccggtggccacatgctggactttggctgcggtgccggggtactgggtgccacgctcaaacgccgttacccacaaagccgggtgaccttgctggacgtggatgccttcgccgtggccgccagccgcctgacgctggctgccaacggcctggaaggcgaagtgatcagcggcgatggcatcgacgccgcccctaccgaactgagccttatactgagcaacccgccattccacaccggcgttcataccaactatcaggcttcggaaaacttgctgaaaaaatcggccgttcatctacgaaaaggtggcgaaatgcgcttggtcgccaacagtttcctgcgctaccaaccactgatcgaaggggcgttgggcaactgccaggtacgtgacgaggccgacggtttccgcatctaccaggcaactcgcgga

SEQ ID NO: 31599 - DNA, 1506 bp, Pseudomonas putida
atggcgcagaacgaatcggttgatgtggtactggtaggcgcgggcatcatgagtgccaccctggccgtactgctcaaggagcttgacccgaccctgaagcttgaggtcgtcgaggcgatggactccggggccgcggaaagctccaacccctggaacaacgcaggcaccggccacgccggcctgtgcgagctgaactacacgccgcaggccgccgatggcagcatcgacatcaagaaggccgtgcacatcaacacccagttcgaggtttcgcgccagttctgggcctacctgaccaagaagggcaacttcggctcggcgcgtgccttcatcaaccctgtcccgcacctgagctatgtcgagggtgacaagggtgtttccttcctcaagaagcgcttcgagctgctcaagcagcaccacgccttcgccgagatggaatacaccgaagacaaggccgtgatgaacgactggatgccgctgatgatgcctggccgcccggccgaccagcacatcgccgctacccgcgtggccaaaggcaccgacgtcaacttcggcgcactgaccaacaagctgctcaagctgctgggcgactcgccggacgcgcaggtcaagtacagcaagaaggtggtcggcctgcgccgtaacggcagcggctggaccgtgagcatcaaggacgtcaacagcggcggcagccgtgaagtcgacgcccgcttcgtcttcctcggcgctggcggcgcggccctgccgctgctgcagttgtccggcatcccggaaagcaaaggcttcggcggcttccctgtcagcggccagtggctgcgttgcgacaacccggaaatcgtcaagcagcaccaggccaaggtctacagccaggccgctgtcggcgccccgccgatgtcggtgccgcacctggacacacgcgtcgtggacggcaagacttcgctgctgttcggtccgtatgccggtttcactaccaagttcctcaagcacggctcgctgatggacctgccgctgtcggtgcgcatgggcaacatcggcccgatgctggccgtggcccgcgacaacatggacctgaccaagtacctggtcagcgaagtgatgcagtcgatggagcagcgtctggaagccctgcgtcgtttctatccgcaggccaaggccgaggactggcgcctggaagtggcgggtcagcgcgtgcagatcatcaagaaagacccgaaaaaaggcggcgtgctgcagttcggtaccgagctggtctcggcccaggacggcagcctggctgcactgctcggcgcatcgccgggtgcttcggtaaccgtatcgatcatgctggaactgatcgagcgctgcttccccgagcaggccaagggtgcctgggctgccaagctcaaggaaatcttcccggctcgcgagaagaccctggcaaccgatgctgcgctgtaccacaagatcagtgccgataacgacgcggccctggacctggcagagagcagcccggcggccaagcactacgct

SEQ ID NO: 31600 - DNA, 636 bp, Pseudomonas putida
atgcccactcgtgagatccgccatccgctgatccgccacaagcttggcctgatgcgccgtgccgatatcagcaccaagaattttcgcgaactcgcccaggaagtcggcgcgctcctgacgtatgaagccacccaggacctgcccctcgaaacctacgagatcgacggctggtgtggcaaggtctcggttgaaaaaatcgccggcaagaagatcaccgtagtaccgatcctgcgcgccggcatcggcatgctcgacggcgtgctcagcctgatcccgggggccaaggtcagcgccgtcggcgttgcccgaaacgaagaaaccctcgaagcccacacctatctggaaaagctcgcgccggacatcaaccagcgcctggccctgatcatcgacccgatgctggccaccggcggctcgatggttgccaccatcgacctgctgaaaaaggccggctgcaaagagattcgcgccatggtgctggtcgccgcaccagaaggcatcgaggtggtggaaaaagcccacccggacgtgaagatctacaccgcctcgatcgaccagcgcctgaacgagcacggctacatcgtgccaggcctgggtgatgccggtgacaagatcttcggcaccaagcaaaaggacgcc

SEQ ID NO: 31601 - DNA, 546 bp, Pseudomonas putida
atgctcgggaatcgcatactcgcacacatcctgaaactcccgtggtacccaatagccatgcgactgactaccaaaggccgatacgccgtgaccgccatgctcgacctggcgttgcacgcgaagcatgggccggtgtctttggccgatatttccgagcgccagggcatttccctctcttatctggagcagctgttcgccaagctgcgccgcagcagcctggtttccagtgtgcgcggtccaggcggtggctaccagctgtcgcggggcatggaaaccatccaggtggcccaggttatcgacgcggtcaacgaatcggtcgacgccacccgctgccaggggctcggtgactgccatgccggtgatacctgcctgacccaccacctgtggtgcgacctcagccagcagatccatgaattcctcagcggcataagcctggccgacctcgtcaagcgccgtgatgtgcaggaagtcgcccagcgccaggacctgcgccgtgtcgcaggacgaaccgcccagctggacaagattgagacgtctgccgtcgat

SEQ ID NO: 31602 - DNA, 783 bp, Pseudomonas putida
atgttcgaacgcctgcgtgaagatattcaaagcgtattccaccgtgacccggctgcacgcaatgccttcgaggtgctcacctgctaccccggcatgcatgccatctggctgcaccgcctgggcaatgcgctgtggaggcgtgatttcaaatggctggcccggctggtgtcgaacttcggtcgctggctgaccggtatcgaaatccaccctggcgccaccattggccggcgctttttcatcgaccacggtatgggtatcgtcattggcgaaaccgccgagatcggcgatgacgtcaccctgtaccagggggtgacgctcggtggcaccagctggaacaagggcaagcgccaccccaccttggaaaacggcgtggtggtaggggcgggtgccaaggtgctggggcctttcaccgtcggcgccggggccaagatcggttccaatgcggtggtcaccaaggcggtgccggccggggctacggcggtaggcattccggggcggatcatcgtcaagagcgaggacaccgaagtcgaagccaagcgtaaggcaatggccgagaagatcggcttcgacgcctatggtgtcagtggcgacatgcccgacccggtggcgcgggccatcggccagatgctcgatcacctgcaggccgtcgacgaacggttggagggtatgtgtggcgcgctgaccaagatgggcagtgactattgtgccaaggaactgccggccttgccggaggacgacttcagcgaggctgcccaagtggcccagcgcgacactcagccgcat

SEQ ID NO: 31603 - DNA, 1374 bp, Pseudomonas putida
atgtcactgagcgtcttcgacctgttcaagatcggcatcggcccctccagctcccacacggtcggcccgatgcgcgccgctgcgcggtttgccgaagggctgcgccgtgacggcctgctggcccgcaccgccagcgtcaaagccgagctgtatggctcactgggcgccacaggcaaaggccacggcagtgacaaagccgtgctgctgggccttgaaggcgaacacccggacattatcgacaccgacagcattcccgcccgcctgcaggtcatccgcgacagcggacacatcaacctgctgggcgaacacagcattgcgttcatcgaaaagcagcacctggcgatgatccgcaagccgttggactaccaccccaacggcatgatcttccgcgcgttcgacgacgcaggcctgcaaatccgaagccgcgagtattactcggtaggcggtggtttcgtggtcgacgaggacgctgccggccatgaccgcatcgtcgaagacaccacggtgctggcctatccgttcaagaccgccaaggcgctcctcggccactgcaccgcgcatgacctgtcggtgagccaggtgatgctggccaatgagtccgcctggcgcccagaagcagaaacccgggccgggctgctgcgcatctggcaggtgatgcaagattgcgtcgcggcaggttgccagcatgagggcatattaccgggagggctcaaggtcaagcgccgcgcgccggccctgtaccgccaactgagcggccacccggaagccagcctgcgtgacgccctgtccgtgctcgactgggtcaacctctacgccttggcggtgaacgaggaaaacgcctacggcggtcgtgtggtcaccgcccctaccaacggcgcagcgggcatcgtcccggcagtccttcactactacatgcgcttcgtcccgggggccagcgaggatggggtggtgcgctttctgctcaccgccgcagccatcggcatcctgtacaaggagaacgcctccatctccggcgccgaagtgggctgccagggcgaggtcggcgtcgcctgctcgatggccgccggggcgctgtgcgaagtgatgggcggcagcgtgcagcaggtggagaacgccgccgaaataggcatggaacacaacctgggcctgacctgcgacccgatcggcggcctcgtacaggtgccctgtatcgagcgcaatgcgatgggctcggtgaaggccatcaacgcggtacgcatggccctgcgcggcgacgggcagcactacgtgtcgctggacaaggtcatccgcaccatgcgccagaccggcgccgacatgaaaagcaaatacaaagagaccgcccgtggcggcctggccgtcaacatcatcgaatgt

SEQ ID NO: 31604 - DNA, 1356 bp, Pseudomonas putida
gtgctcaagcgcggcgacctggccggtaagccgggccagaccctgctgctacagaacctttcgggcctgaaagccgagcgcgtgctgctggtgggcagcggcaaggaagaagccctgggcgaccgcgcctggcgcaaactggtggccagtgtcgctggcgtgctcaagggcctgaacggcgctgacgcagtactggccctggacgatatcgcggtcagcaaccgcgacgcccattacggcaagtaccgcctgctggccgaaaccctgctggacggcgaatatgtgttcgaccgtttcaagagccagaaagcagagccgcgcgcgctgaaaaaggtcaccctgctggccgacaaagccggccaggccgaagtcgagcgtgcggtcaagcatgccagcgccatcgccagcggcatggccttcacccgcgacctcggcaacctgccgcccaacctttgccacccaagctacctggccgaacaggccaaggagctgggcaaggcgcacaaggccctcaaggttgaagtgctggacgagaaaaagatcaaggacctgggcatgggcgcgttctacgccgtgggccagggcagcgaccagccgccacgcctgatcgtgctcaattaccagggcggcaaaaaggccgacaagccattcgtgctggtgggtaaaggtattaccttcgacaccggcggcatcagcctcaagccaggcgccggcatggatgaaatgaagtacgacatgtgcggcgccgccagcgtgttcggcaccctgcgtgcagtgctcgagctgcaactgccgatcaacttggtgtgcctgctggcctgcgccgagaacatgccaagcggcggtgccacccgcccaggtgacatcgtcaccaccatgagcggtcagaccgtggaaatcctcaacaccgacgctgaaggccgcctggtgctgtgcgacaccctgacctacgccgagcgcttcaagccgcaggcggtcatcgacatcgccaccctgaccggcgcctgcatcgtcgccctgggcagccacacctccggcctgatgggcaataacgacgacctggtcgggcagttgctcgatgccggcaagcgcgccgacgaccgtgcctggcagttgccgctgttcgaggaataccaggagcaactggacagcccgttcgccgacatgggcaacatcggtgggccgaaggccggtacgatcaccgcgggttgcttcctgtcgcgcttcgccaaagcctacaactgggcgcacatggacattgccggtaccgcctgggtcagtggcggcaaggacaaaggcgccactggccgcccggtacctctgctgacccagtacctgctggaccgcgctggcgcc

SEQ ID NO: 31605 - DNA, 426 bp, Pseudomonas putida
atgagcaaagtcgacttctacattctgcccaccgactcgctgtcggcgcggctcgatttcgcctgcaaactgtgcgagaaagcttggcgcctcggccaccgggtctatctgcactgccaggatgccgaacagcgcagtgaactggaccagcgcttgtggcgcttcaagggcgaggccttcgtgccccacgacctcgccgaggtgcatgccgatgctgacgtggttctgggcctggctgacaacgccggcgagcaccacggtctgctgatcaacctcggcgccagcgtgccgggctttgtcgggcagttcgagcgggtggccgaaatcgttgttgaagagccggctatccgccaatcagcccgtgagcgattccgtttctaccgcgaacagggctatgctctgcaagaccaccgcttacagcgactt

SEQ ID NO: 31606 - DNA, 738 bp, Pseudomonas putida
atggaactggtagtgatggccgacgccttccgccgctcctcagcatcccgaatcaccgccgtgattccctacttcggatatgcccgccaggaccgccgtccgcgttcggcacgtgtagccatcagcgccaaagtcgttgctgacatgctcactgtcgtaggtatcgaccgtgtactcaccgtcgacctgcacgctgaccagattcaaggcttcttcgatatccccgtcgacaacatctacggctcgcccgtactggttgacgacatcgaagaccagcgtttcgagaacctgatgatcgtctccccggacatcggtggtgtcgtgcgcgcacgcgctgtcgccaagtccctgggcgtcgatctgggtatcatcgacaaacgccgcgaaaaggctaaccactccgaggttatgcacatcatcggcgacgtcgaagggcgcacctgcatcctggtagacgacatggtcgacaccgccggcaccctgtgccacgcggccaaggccctgaaagagcacggcgctgccaaggtttacgcctattgcacgcaccctgtcctgtcgggccgcgcaatcgagaacatcgagaagtcggtactggacgagctggtggtgaccaacaccgttccgctgtctgccgctgctcaagcctgtgaccgtatccgccagctggatatcgcaccggttgtcgctgaagcggtacgccgcatcagcaacgaagaatcgatcagcgcgatgttccgc

SEQ ID NO: 31607 - DNA, 591 bp, Pseudomonas putida
atgactgaattcactctgaacgcccaagcgcgtactgacctggggaaaggtgcgagccgccgcctgcgtcactccgcgaacatcccagccgttgtctacggtggtaaccaggacgcccagtccctgaccatcctggccaaggaaatcaccaaactgttcgaaaacgaggctgccttcagccacgttctggaactgaacgtcgacggtgccaagcaaaacgtcgtggtcaaggccctgcagcgccacccggccaaaggcttcatcatgcacgccgacttcgttcgcgtcgttgctggccagaagctgaccgccaaggttccggttcacttcatcaacgaagaagccccggtcaagaaaggcggcgagatctcccacgttgagtccgagatcgaagtttcctgcgaagccaaggacctgcctgagttcatcgaagtcgacctggccaacgctgaaatcggcaccatcatccacctgtcggacctgaaagctccgaaaggcgtagagttcgtcgctctggcccacggtgatgacaaagctgttgccaacgttcacgctccacgcgttgctccagaagcagaaggcgctgccgag

SEQ ID NO: 31608 - DNA, 1098 bp, Pseudomonas putida
atgggtttcaattgcggcatcgtcggcctgcccaacgtcggcaagtccaccctgttcaacgccctgaccaagtctggcatcgcggcggagaatttccctttctgcaccatcgagccgaacagcggcatcgtgcccatgcccgacgctcgcctggctgcgctggctgaaatcgtcaagccaaaccgcatcctgccgaccaccatggaattcgtcgacatcgccggcctggttgccggtgcctcgaaaggcgaaggcctgggcaacaagttcctcgccaacatccgcgagaccgacgccattgcccacgtggtgcgctgcttcgaagacgagaacgtgatccacgtttccaacagcgtcgaccccaagcgtgacatcgagatcatcgacctcgaactgatcttcgccgacctcgacagctgcgaaaagcaactgcagaaggtagcccgcaacgccaagggcggcgacaaggacgccttggcgcaaaaggccattctggaaaagctgattccacactttaccgaaggcaagcctgcgcgcagcctgatgaagcacatggctgacgacgaaaaggccgtcatccgtggcttccacttgctgaccagcaaaccggtgatgtacatcgccaacgtggccgaagacggcttcgacaacaacccgcacctggacgtggtcaaggccattgccgaggaagaaggcgcggtagtggtgccggtgtgcaacaagatcgaagcggaaatcgccgagctggaagacggtgaagagaaggacatgttcctcgaggccctgggcctggaagagcctggcctgaaccgcgtgatccgcgccggttacgagttgctgaacctgcagacctacttcactgccggcgtgcaggaagtacgcgcctggaccgttcgcgtcggtgccactgccccgcaggcagccggcgttatccacaccgacttcgaaaaaggcttcatccgcgctgaagtggtggcctatgacgacttcatccagttcaagggtgaagccggtgccaaggaagccggtaagtggcgtctggaaggcaaagactacatcgtcaaagacggcgacgtgatgcacttccgctttaacgtc

SEQ ID NO: 31609 - DNA, 18930 bp, Pseudomonas putida
atggacaacatcgtcgtcgccgataagcaatccgaagtcgccactcagagcgcctggggcaatatcaatctaaacgcaccaagcgtcgtgcaggtaccggtttctccagacaaagtggccacggtcacccagcgcgggcaggacctgatcgtcaccctgaagtcgggggaaaagatcaccatcggtaacttcttcgccgtggaccaggccggggtcggcagcgatatggtcttcgtcggcgaagacggcaccctgtggcatgcccagtacgatgcggcagcgttcaccggtttcaccttcgaagaagtggcctcgctggacgaactggtcgcaggcatcggtactgcaggcagtgccatgccaacttgggcgattgccgggctcagcctgctgggcgtgggcggcgcagcagcagcggcggacaatggaggcgggggcagcagcggcggttccgaccccgacaccagcgcaccggccacaccgatcgacctgctggtttcgccggatggcttgcgtctgaccggccgtggcgaagcaggcaccacggtgaacatccgcgacgccgccggcaacctgatcggcagcggcacagtgggtgccgacggcaacttcaacgtgacgttgaatgcgccgcagatcaacagcgaaaaccttgatgtcaccctgactgacgccgccggtaatgtctcggcgcctggcgctgtcactgcaccggacgcaactgcaccactggcgccgaccgacctggctatcaatgagcagggtaacacccttaccggtcgtgccgagcccggctcgacggtttccgtgcgaggcgcaggtggcgtattgctgggcactgcggtggccggtgcggacggccagttcagcattaccctgcaaccgccacaaagcgacggccaggccctggagatcagcgccgcagacgcggctggcaatatctcgccagttgccagcatcacggcgccggacgtcgacaacccagataccacagcccctgaacaaccgaccgacctggccctggccgatggcgtcactttcaccggacgcggtgagcctggtgctaccgtgcaggtgcgcgatgctgccggtaacctgattggcaccggtgtcgtcggtgccgatggcctgttcagcctcaccctgtcgcctgcccagaccaatggtgaagcactcgacgtgcgtctggtggatgccgccggcaacagctctgccccattgcaattcgatgcgccggacatcacaccgcctgacgcagtaaccaatattacagttggtgctgacggcctggccctgagcggtcgcggcgagccaggtgccactgtcgaagtgcgcgatgccaatggcactgtgatcggcacgggtgtcgtgggtgccaacggcaccttcctgatcgacctcgccccagccgcacagccgggcgagcagttgagcctggtgcagaccgacccaagcggtaatgcttcagtggctaccgagtacgatgtaccactgaccaccgcgcccgacagcccgagcaatctggccatcgatgctgatggcaccaccctcaccggtaccgcgccggctggcagccgtgtggaggtgcatgacgccaacggcacgctgattggcagtgccattgccaacgccgatggcagcttcagcatcgaactgaatcccgcacaagccaacggcgaactgctggacgtggttgccatcgatgacggcggcgtttcctcgctgcccgcacagatcaccgcgcccgacatcaccgcccctgccgcaccgaccgaactggcggtgagcgcggacggcagcgttatcaccggccgtgccgaaccgggcagcaccgtgcgcatcgtggctgccgacggaaccgaactgggcactgccgtggtcggcccgaccggcgtgttcagcctcaacctcaacccgccacaagttgacggcgaagtgctgcaagccacggcgaccgatgccgctggcaacacatcgccaagcagcgcagttaccgcaccggatatcgacggggtcgataccacgccaccggcagccccgactgacttggtgatcggcctcgccggcagccaactcagtggtcgaggcgaagccggctctaccgtgcaggtacgtgacgcggcaggcaacatcctcgcgaccggcaccgtcgccgcggatggcaccttcactgtcaccctggcccctgccgtgaacgacggcagcaccttgcaagtcaccctcaccgatgccgccggcaacgtatcccaaccgggctcggtcacctcggccgacttgctgccgcccgcacaaccgactgacctggccctgaccgatggcatcaccttcaccggtcgcggcgaacccggcgctacagtgcaggtacgcgatgccggcggtgctgtcatcggtactggtgtcgtcggggccgacggcctgttcagcctcaccctgtcgccggcccagaccaatggtgaagcactcgacgtgcgtctggtggatgccgccggcaacagttcgataccgctggagttcacagccccggatatcacaccgcccgatgcggtcaccgatatcctggtcggcccaggtggtacggccctgagcggtcgcggcgaaccgggtgccactgtcgaagtgcgtgatgccaatggtaccgtgatcggcacgggtgtcgtgggtgccaacggcaccttcctgatcgaccttgccccagccgcacagccgggcgagcagttgagcctggtgcagaccgacccaagcggcaatgcttcggtggctaccgagtacgatgtaccactgaccaccgcgcccgacagcccgagcaatctggccatcgatgctgatggcaccaccctcaccggtaccgcgccggctggcagccgtgtggaagtgcatgatgccaacggcacgttgattggcagtgccattgccaacgccgatggcagcttcagcatcgaactgaatcccgcacaagccaacggcgaactgctggacgtggtcgccatcgatgacggcggcgtttcctcgctgcccgcacagatcaccgcgcccgacatcaccgcccctgccgcaccgaccgaactggcggtgagcgcggacggcagcgttatcaccggccgtgccgaaccgggcagcaccgtgcgcatcgtggctgccgacggaaccgaactgggcactgccgtggtcggcccgaccggcgtgttcagcctcaacctcaacccgccacaagttgacggcgaagtgctgcaagccaccgcgaccgatgccgctggcaacacttccgttaccagctcggtcaccgcgccggatatcgatggcggcgataccaccccgcctgaagcaccgaccaatctggtgatcggccttgccggcagccagctcagtggtcgaggcgaagccggcactaccgtgcaggtgcgtgacgcggccggcaacatcctcgcgaccggtaccgtcgccgcggatggcaccttcaccgtcaccctgaatcctgccgtgaacgacggcagcaccttgcaagtcaccctcaccgatgccgccggcaacgtatcccaaccgggctcggtcacctcggccgacttgctgccgcctgcacaaccgactgacctggccttggccgatggcgtcactttcaccggtcgcggcgagcccggcgctaccgtgcaagtgcgcgatgctgccggcaacctaattggcaccggcgtcgtcggtgccgacggcctgttcagcctcaccctgtcgccggcccaggccaatggtgaagcactcgacgtgcgtctggtggatgccgccggcaacagttcgataccgctggagttcacagccccggatatcacaccgcccgaggcggtcaccgacatcctggtcggcccaggtggcacggccctgagtggtcgcggcgagccgggtgccactgtcgacgtgcgtgatgccaatggcaccgtgatcggcacgggtgtggtcggtgccaacggcaccttcctgatcgatctcgccccggccgctcagccgggcgaacaattgagcctggtgcagaccgacgcaagcggcaatgcttcctcggcactgcaattcgaagtcccgctcaccactgcgcccgccagccccagcgacctggtattcgccgaagacggcagcagcatcagcggtaccgcacctgccggcacccgtgtggaagtacatgacgccaacggcacgctggttggcactgtggtggctggccccgacggcagcttcaccgtaaccctcgacccgcctcaggccaacggcgaactgctggacgtggtggccattgatgacggcggtgtttcctcgctgcccacccaaatcaccgcaccggatatcaccgcccctgccgcaccgaccgaactggtgatcaatgccgacggcagcgtggtcaccggccgtgccgaaccgggcagcaccgtacgcgtgctggccgccgacggcaccactgtgctgggtagcgtggtagttggcgctaccggcagcttcagcatcaccctcgacccgccacagatagacggtgaagtgctgcaggtgacggccaccgacgcggcaggcaacgcctccaccgccagtaaccttaccgcgccggacattgacggcggcgataccaccccgcctgaagcaccgaccaatctggtgatcggccttgccggcagccaactcagtggtcgaggcgaagtcggctctaccgtgcaggtacgtgacgcggccggcaacatcctcgcgactggcaccgtcgctgcagatggcaccttcgtcatcgccctggaccccgccgtgaacgatggcagcaccttacaagtcaccctcaccgacgctgccggcaacgtatcccaaccaggctcggtcacctcggccgacttgctgccgcccgcacaaccgactgacctggccctagccgatggtgtcaccttcaccggtcgtggcgaacccggcgctaccgtgcaggtacgcgatgccggcggtgctgtcatcggtactggtgtcgtcggtgccgacggcctgttcagcctcaccctgtcgcctgcccaggccaacggcgaagccctcgacgtacgcttggtggatgctgacggcaacgcctctgcgccgctgcaattcgatgcgccggacattaccccgcccggtgcggtgagcaacattgccgtcggcgctgacggcctggccctgagcggtcgcggcgaacccggcgccactgttgaggtgcgcgatgccagtggcaccgtgatcggcacgggtgttgtgggagccaacggcaccttcctgatcgacctcgccccagccgcgcagccgggcgagcagttgaccctggtgcagaccgacccaagcggcaacgcttcctcggcactgcaattcgaagtcccggtcaccactgcgcctgccagccccagcgacctggtattcgccgaagacggcagcagcatcagcggtaccgcacctgccggcacccgtgtggaagtgcatgacgccaatggcacgttgattggcactgtggtggcgggccccgacggtagcttcaccgtcaccctcgacccggcccagaccaacggcgaactgctggacgtggtggccattgatgacggcggtgtttcctcgctgcccacccaaatcaccgcaccggatatcaccgcccctgccgcaccgaccgaactggtgatcaatgccgacggcagcgtggtcaccggccgcgccgaaccgggcagcaccgtacgcgtgctggccgccgacggcaccactgtgctgggtagcgtgatagttggcgctaccggcagcttcagcatcaccctcgacccgccacagatagacggcgaggtgcttcaagtcacggccaccgatgcggcaggcaacgcctccaccgccagcaaccttaccgcgccggacatcgacggcggcgacaccacgccaccggaagccccgaccaacctggtgatcaaccccgccggcagccagctgaccggtcgcggtgaagccggtaccagcgttcaagtgcgcgatggcgcaggcaccgtagttgccacaggcacggtcaacccggatggcaccttcgccatcaccttgaacccggccatcaccgatggcagtaccctgcaagtgaccctgaccgacgctgccggcaatgtctcgcaacccggctcggtcgccacgccagacctgctggcccccacgcagccaaccgagctggccttgatcgatggtgtgaccttcaccggccgcggcgagcccggagccaccgtacaggtccgcgatgccaccggcagcctgatcggcacaggcctggtcaacgaagacggcaccttcagcgtcacgctgttccccgcccaggccaatggtgaagcactggacattcgcgtggtagacgccgccggcaacagttcaacgccgctggcgttcactgcaccggacgtcacgccgccagctgccgtcagcaacgtcgtggtgggcgccgatggcctggtgctcagtggccgtggcgaggccggtgctaccgtacaggtacgtgatgccaacggctctgtcataggcaccgccacagtcggcgccaacggaaccttcttggtcgacctcaccccagccgcgcaaccgggcgagcaattgagcctggtgcagaccgatgcgagcggcaacgcctctgaagccctgcaatatgaaatcccggcaaccacgaccccagccagcccaagcgacctggtggtggctgcgaacggcgccagcatcactggtacagccccgacgggcagccgtgtggaagtacacgatgccaacggcacactggtcggcagtgtggtggtaggtgccggtggcaccttcaccgtcatcctcaacccggcccaggccaacggcgaactgctggacgtggtggccatcgatggcaccggcgcttcgtccctgccggtgcaaatcgctgcgccagacatcaccccgccggtcaccccgagcgagctagcgatcagtgccaacggcagcgaggtcaccggccgcgccgaagtgggcagcaccgtgcgtgtgctggccgccgatggcaccaccgtgctgggtagtgtggtggtcgacgccactggcagtttcagcatcaccctcgacccgccgcaggtgagtggagaggtactacaagtcaccgccaccgacgccgccggcaacacctccacggccggcgacatcaccgcgccggacatcgacggtggcgacaccacaccaccggatgccgcaaccaacttggtagttggcctggccggcgcccagctcaatggccgcggcgaagccggggccagcgtgcaggtgcgcgatgcccagggcaatgtactggccaacggctcggtcaacccggacggcaccttccagatcacccttgacccaccggtgaaagatggcagcaacctgcaagtggtgctgaccgatgccagcggcaatgcttcggccccggcgtcggtggttaccccggacttgcaggccccggcccaaccgaccggcgtggccttggccgacggcgtgaccctgagcggcaacggcgagccaggcgcgaccgtgcaggtacgcgatgccttgggcaacttgctcggcactggcctggtcactgaaaccggcagtttcagcatcaccctgtcgccggcccaggccaatggcgaaatcctcgacatccgtctgatcgatgccgccggcaatatctcttcacccctgcaattcgaggccccggacatcaccgtgcctgccgtagtcagcagcattgtcgtcggcgccgacggcctgaccttgggcggtcgcggcgaagccggtgctaccgtcgaggtgcgcgatgccaatggcacgctggtcggtaccggcacagtgaccgcgaacggtactttcctgatcgacctcgacccggctgcgctgccgggtgaacgcctgagcctggtacagaccgacccgagcggcaacgcctctgaagcgctgacctacgacgtgccactggtggtcacgccgaccagcccgagcgaactggtcgtcgctgccgatggcagcagcatcagcggttctgctcctgctggtagccgcgtggaagtgcatgatgccaacggcacgctggtcggtagcatcgtggtgggtgccgagggcaccttcaccgtggtgcttataccggcccaggccaatggcgagttgctggacgtggtggcgatcgacaacaacggcacctcgtcgttgccggtgcaggtcgccgcaccagacatcaccgcgcctgtggcgccaagcgatctggcaatcagtggcgacggtaccgtcgtcagcggccgcgccgaagcaggcagcaccgtccgtgtgctggccgccgatggcaccactgtactgggcagtgtcgtggtgggggccagcggcgccttcagcatcggcctcaccccgccacaagtggcaggcgagcagttgcaggtgacggccaccgatgtcgcaggcaacgcctccacggccggcagcgtcaccgcaccgatagtggacaacggcggcgacaccacaccgccggaacccgctaccgagctggccatcagtaacgatggccgcacagtctccgggcgcggcgaagcgggtgccaccgtggaggtgcgcaacgatcaggggcaagtgctggtgagcggcaccgttcagcccgatggcagcttcaatgtgcaactgccgactccggtggtggatggctcgtccctgcaagtgaccctgaccgacgccgccggcaacgtctctacacctagcccgctgacggcgcccgaccaggtagcaccgctgcaaccaaccgacctggtgctgagcaatggcgacagcctggccggtactgcagaagggggcgcacgagtagaggtcaaagatgcctcgggcaacctgatcggcagcgccattgccgagccggatggcagtttcagcctgaccctcgacccgccacaggccaatggcgagaccctgtccatcaccgtgaccgatgcggcaggcaacacttcggtgccgctgagctacgtggccccggacatcaccgcgccagcgatcgtcgccgacgtggtggcaagcgatggcagcctggccgtgtctggccgtggcgagcccggtgccacagtggaagtgcgtgatgcccagggcgcagtcatcggtactggcaccgtggcgccaaatggcaccttcgtgattgacctggaggcaccgctggccgcaggtgagaacctcgtgctggtgcagaccgatgccgccggcaatacctcggcaggggtcagcgtgaccgttgccgatacaccgctgcccgaaagcccgagcggcgtggtggtggccggtgacggctccagcgtttccggtaccgcaccggcagatacccaggtggaagtgcgtgacgcgcagggcaatgtcctgggcagcgcccaggccggtccggatggcagcttcaccgtcggcctgaccccggcccaggccaacggcgagaccctggatgtcgtggcggttgacggcgctggcaacagttcgctgcctacccagatcaccgcccccgatatcaccccgcccaatgaagccagcgaactgcaactgagtgccgatggcagcctgctcaccggtcgcggcgaaccgggcaccaccgtgcaggtcatcagcgccgacgggactgtgctgggcaacgcccaggtcggtgccgacggtgtgatcagcgtggtcctgaacccagcgcagaccgacggccaggaattggacgtggtcctgcgcgaccccgctggcaacacctcgaccgccaacatcgtcgcgcccgataccgacggcccgctgcaaccctccgggctggccatcgataccgctggcattcaccttaccggccagggtcaaagcggctccatcgtcaccgtgcgtgacgccgacggcaatgtgctgggcactgcaaccgtgggcggcgacggccgtttcgacgtcaccctcaacgcgccacagcgcaatggcgaaagcctgaccgtcgaagcgaccgacaacctgggcaatagcgcagggccggtggacttcaccgcccccgactctaccccgccgcaagtggtcaccaacccggccatcgacggcatcggtaccacgatcaccggcaacggcgaaccgggcgccactgtgaccgtgcgcgggccggatggcagcgtgctgggcagcacggtggtcggcgcgggtggcgctttcgaaattaccctcgacgagccgcaaaccaacggccaggcactgaccgtggagcaacgcgacgcggccggcaacctgtcggcggcggtcgatttgtcggcaccggatacccaggcacccgatagccccaccgggctggtcctggctggcgacggcagcagcctgagtggcagcggtgagccgggtgcgcaggtgaccgtgaccggcactggcggcgcagtactgggcaccgcaacggtccagcccgatggcaccttccaggtggcaatcgacccgccacagctcaatggccagacgctgtctgtcactcaggcggacaatagcggcaacggctcgcccgctggcactgtgatcgcacctgacttcgaggcaccgctgccggcgcaagggctgggccttgatcctaccggcacactgctcagcgggcagggcgaggcaggcagcaccgtagaggtacgtaatgccgcaggcaacctgctaggcaccatcccggtgaatgcagacggtacgttcgaagtggcactctccccggcccagaccaacggtgaagtgctgtcggtggtgctgatcgatggcggcggcaatgcctcgccgtcggccacgttcaccgctgacgacagcaccgcgccagctgcgcctgccggcctcacgatcaccccgggcggcagtgccatccagggtagcggtgaagctggctccacggtggaagtgaagcttgccgacggcacgttggtaggcaccgtcgtcgtgcccgcaggcggcagcttcacggtcccactatcgcccgcccagttggacggccaggctctgaatgtgacgctgaccgatgcggccggcaacatttcgcagcccagccagatctttgcacctgacatcacgccaccggcactgcccaccgacgttgcagtcagcagcgatggcacggctgtgaccggtaatgcacctggcgccagttcggtgaccgtgagcgatggggccggcaatgtgatcaccgttgcggtcaacccggatggcagtttcagcgtgccgctggatacaccgcagaacaacggccagaccgtaaccgtggtagtgaccgacgcagccggcaacgactcggcgccggtctctgtcaccgcgccggacacgaccaacccagaaccggcgaccggccttaccgtaagcccggatggcagcacggtcggcggcacagccgagcctggcagcacagtggaagtccgcaacccggatgacaccgtgcgcggcactgtaactgcagggccggacggcaccttcgtgataccggtcgccccaccgctggcatcaggcgaaaccgtcgatgtggtggtgatcgaccctgccggcaacgagtcgcctgaaataccactgactggcccgaccggtaccgaagtggccacgccttcggcccttgccatcagcgtcgacggtttcctgctgactggccaaggtacggtcggctcgctgattaccgtgacctccggtggcaccacgctgggtagcgccacggtcggcagcgacggcaccttccgtgtgttcttccagaacgcccagctcaacgcccagatcttgcaggtcagtgccaaggctaccgtcgatggccagccttcggtgccggccattatcgtggccaatgacaccacggcaccggacgcgccgacacaggtaaacctcaacgccaccggtagtacgctgaccggccaaggcgaggtgggtgcaaccgtgcgcgtgacagacctacaaggcaccttgctggggactgcaaccgtcgacagcaatggcctgttcagtgtcagcttctcgccggccgtggccaatgggcaaaacctgatcgtcacccaggctgatgctgcaggcaatgtttcgctcgcggccaccctgcaagcgcccgacctgcaggcaccgctggcagccagcaacctcagcctcaacagcgcagccaccgtgctcagcggccagggcgaagccggtgccagcgtcaccgtgcgcgacgccagcggcgccatcctggccaccggcaccgtcaaccagagcggccagttccagatcaccctgcccagcgcgcaggtcaccggtagcccgctacaggtcaccctcagtgatgccgcgggcaatgtgtccggcccggccagcctggccacgccagaccacacgccgccagcggccatcagtaacccggtgctgagccaggacggccggcagctttccggcagcggtgaagcgggcgccacggtacaggtacgcaacgccgccggtgccttgctcggcaccgccacggtgggcaccgacggtcgcttcacggtgaccttcgacacgccgcaagccaacggccaggtcatcggcgtgacgcaaatggatgccgccagcaatacctcgccggcgatcaacgtgacaaccccggacctgaccccacccgcaccgctgaccaacgtggtgctgaacaacaacggcctgaccctgaccggcctgggcgaagccggtgccacggtcaccgttcacggcccggacgggaccatcatcggcaccggcctggtggcagccaatggcagctttaccctcaccctgaacagcgcccagctcaacgcccagctcctgagcgttacgcagaccgacgcgggcaacaacacctccaccgccgtggcggtcaccgcgccggacttcaccccgcctacggcaccgacagcactcgcgctgtccggtaccgggctgcaactgaccggtaacgccgaagccggcagcaccgtgaccgtgcgcgatgccagcggcaacgtgctgggcacagcggtagccggtggcaacggcaccttccaggtcaccttgaacagtgcccagaccaatggccagatactgcaggtgaccgccaccgacgcagccggcaacgtgtcgccggccgcaccttacaccgcagcggacaccacgccgccggccgccgtggccaacctggctgtctccgccaatggcgccaccctgacaggcgatggcgaagcaggcgcaaccgtgacggtacgagcaccggacggtaccgtgctgggcaacgctacagtggccgccgacggtcacttcagcgtgtccctgtcaccggcagcgatcacgggtgaaagcctgagcgtggtccaggccgatgccgcacagaatgtctcccctgcgcaaaacgtgacggcgccgggcgcgctggcaccggccacgccggacaacctgatactggccgccgacggcctgtcggtgagcggcaccgccgaggcgggcagcacaatcaaggtgtacggccccaacggcgtattgctgggcagcagcccggtcaccaacgacggcacgttcactgtcaatctcggcagtgcacaggccaatggcgaagtgttgcaggtcagcgcaacgggccccgatggcaccgtatcgctgcccgctaccctacaggcaccggacaccacggcaccgcaaccactgaccaacctggtgttgtccaacgacggcctggtactcagtggccgcggtgaagcaggtgccaccgttaccgtgcttggcgaaggcggtatcgaactgggcactgccgtggtcgatgccaatggcgacttcaacgtcgacctgagcgtcgctcaaatcaacggcgaacagctcagcgccagccagtccgatgtggccggcaacgagtccaacagcgtcagcctcacagcccctgaccgcgtcgcgccggatgctgccggcaacctggccttcgccgggggtggcagcttgctgaacggtaccggcgaagcaggtgccgccgtgcgtgtgctcgccgccgatggttcggtgctgggcagtgccactgtgcgcgccgacggcaccttccaggtcaacctcgtatcgcctcaggccaacggccaacaggtgcaagtggtgctggccgatgcggcaggcaaccagtctgccgccagcgctatcaccgcacccgataccacaccgccatcggcacccggcgaactggccgtttccggtgatggtgtcaccctcaccggccgcggcgaagtgggcgcacgggttaccgtgaccaacccggcaggcgaggaaatcggcagcgccaccgtcgatgccagtggccacttcaccatcacgctgagcccggcactgggcaacgccgagctgctcagcttcacccaggccgatgcggccggcaacgtgtcggcagtggctaccctgcaaaccccggacttcaccccgcccgacccactcacccaagtggtgatcaacgccgacggcagcgtggtcagcggcctgggcgaggccggcgccacggtaatcgtcagtaacgcggccggtaccgtactgggcacgggtatcgtactggctgatggcagcttcagcgtcgaactgtcacccgcacaaatcaacaaccagacactgtcggtactgcaggccgatccacccggcaacgtcagcctgccggtcaacgtgcaagcgccggacctcacgccgccagcggcagcaaccgagctgcggctcaatgcggcaggtgacgagctgggcggtgtcggcgaagtgggcgccaccgtgcgcgtgtacgtcggtaccacgcagatcggtaccggcacagtaggcgccaacgggaccttcatcgtcgagctggatgcagcacagctcgatggccaggtgctgcaggtcaccctgaccgatgcaaccggcaacatctcgccaatcagttcggtcacggccgtggacaccacaccaccggccaccgtggtcgccaccatcaacgacagcggtacccaggtgatcggtactgccgaagccggcacccgcgtcacggtggtcaacaacaatggcgacctgctgggccaggtaacggtggagccggatggcaccttcgtccttgacctgaacctcccgcaaatcaacggcgaaacgctgaccatcatcgcccaggacgccactggcaacccgtcggtaccgctggcagtgactgcgccagacctgacgccaccggtgcagccgaccgacctgctgctcaacgcagccgggacgtcgatgacgggtacggccgaagccggcagcaccatcacggtgcgcggcccggacaacaacatcgtgggcacggtggaagtgggtgagaacggccagttcactgtgccgatcagcccggcacagaacaacggccagttgctgacggtggtgtccaccgatgatgccggcaacgcttcggtggctgtcccttaccagaccaacgacacctcgccacccgacctggtgaccaacctggcgatcaacaacaccttcaacgtgctgactggcaagggcgaagccaatgccacggtcaccgtcagcttcgacggagacgtgatcggtaccggcgtggtggatggcgctggcaacttccaaataacactggtgccagcggtgggctcgctcgccactctggaagtgacacagtccgacggcatcaatacgtctgcggtcgcgacctacctcacaccgttgatcgcaccacccgtgccgccaaccgacgtgaccttgggcagcgacggcctgaccctgacaggcagtgcacccagcggtgtgggcattcgcgtgtacgacgctgcaggcaacctgatcggtacaggggtcgcaagcctgaacggctccttcaccctgacgctggacgcagcccagctcaatggcgaacacatttcggtgacagcggtggcgctgataggcggcgaatcgcagccgaccttcctgcaagcggccgacatcacgccaccgaccaacccggtggtcaccagcctgtctgtcaatggcctggtgctgaccggcacgggtgaagccggtgccacggtgacagtacgtgatgccggcaacaacgtgctcggtacggcggtggtgaatggcggtggcgtgttcaccgtcaacctgaacgccgcgcagctcaacggccaggtactgggcgtgagccaggctgacactgcaggcaatgtgtccggcagcacaagctacaccgccgcagacctgcagccacctgcagcgcccaccaacgtcgccatcaacggcaccggtaccgtgcttaccggtagcggtgaggcgggcgctaccattaccgtccaaggcccgaacggccaggtgggtaccggtgtggtacaagccaacggcaccttcagcattaccttgacctcgccacagaacgacgggcaactgctggtggtacgccaggccgatgctgccggcaacctgtccgccagcaccagcctgaccgcgccggacaccaccccgccagccgccccgctggccaccatcaacgccaacggcacctcggtcagtggttctggccaggtcggcagcacggtcaccgtgcgcaacagcgccggtaccgtactgggtaccgcaacggtgggcagcaacggcctgttcgtggtcagcctgactgcggcgcagatcgacaaccaggcgctcagcgtcaccctcaccgacagcgccggtaatgtgtccacaggcactgcgctgaccgcaccggacctgaccccgcctgcggctgccggcaacctgctgttcagtgccgacggcggtaccctcaccggtactggcgaagtgggtgccaccgtcaccgtacgcagcgccggcggtaccgtgctgcagaccgcgacggtgcaggcggacggcaccttcaccgtgaccctgagcccgcctcaggacaacggccagatcctttcggtgaccctcagcgacccgcgcggcaacgtgtcgggcaacgtcaacgtcactgcaccggatgtggatgccaacgcgccggtcatcgccagcgacaacctggccacggccacagtcaacctggcagcggtcagcgccacgaagacctacaccgacagcttcaccacgctactgtcggggttctccaagacctacacctggacggtggcagcaggcaccacggccgaccctaccctcacactgaccaccaacagcgtgctggcactgctcaacaacaccagcttcaccctgcaggtgaaagacgccagcggcgcctgggtgaccatcgccaccggcaacacccaaggcctgctcgacctgatcgtgctgccaatcggcttgcaggtggacatcggcgtgctgcaagccggtgattaccgactgaccgtgggcagtggcggcatcggcctgatcaccgaagtgagcaccacgctggacatcgtctccaccagcctgacccaattcaccggcaccggcattgccacctctggcaacgtcattaccgacgtgggtaccgatggcgcagtggatgcccgtggcccggacagcgccgccgtgctgcaagtgctcaaagacggcagctacgtctcggccgggaccgccacgacggttcagggccagtacggcaccctggtgatccgtgcggacggcagctacacctacacgccgaacggcagcccgaacagtgtcggcaaggtggacgtgttcagctaccaactggtgcaccctaacggcctgtccgatgccgccaacctgtacgtgcgcatcgacagcccgcaagccacggaggtctggagcgacaccaactacggtgcaccggccacggtggtcgacgcagtcaacgacgttggtaccagccaggtcaccctggacaaccgcgtggactccagcagcagtacgctgggctcgctgaacctgccagtgatcggtacccgccaggccacctacaccaccacggttgccgccaataccacggccgacctgcaggtggtggtcaactccaccaacctgttgagcctgctcaacggcaccaccatcgagctgctcaagctcaacccggccaccggccagtacgtgctggtacagtcggtgccaggtggttcgctggtcagcatactgggcggcggcgccgggtataccttcgagaaccagggcgccggtacctaccacgtacgtgtcaccgccggcggcatcggcttgctcagctccatcaccaccagcctgaacaccaccacaacgtacctgaccgagttcgtggtcagtggcgcgacagccgccaccggcaacctgctggctgacgacaacgtcggttcggccctgaccgtgctgagcgtgctgacagcggccaacacctacaccatcccgggctacaacggggtaagcgtggccggcacctacggcacgttgctggtgcatgccgacggcagctacacctacaccctcaacgcagggctcacctcggcggtggtaggccagcacgacaccttcacctacgagctaagccacccgaacggcacgaccgacaccgcaaccctcaccatcaacgtggacagcgccgccggcctcaccgccaccacatcgctgctggccgatactggcgacgagtccgcggcactcgccagcctggcagcggccaccgatgtgatcgccggcactgacggcaacgaccacctcgatggcagccagggtggccacatcaccctgcagggtggtgcgggtgacgacacgctggtggtggtcgaccagaactttgccagcgtcgacggtggctcgggaaccgacaccctgctgtggggcggcggtgatgccagcattgacctgggcaacctggccgggcgcgtacacgacatcgaaatcctcgacctcaacgacaccagttcggtggcgctcaccctcaacctggcagatgtggtggccatcaccgaaaccgctaccgacacactgatcatcaagggggacgacaaagactcggttcacatgacggacaactggacgctggtcgggaaccaaactgccgacggcatcgactataaccagtacacggcccaggaggatccaagccatcacctgtgggtacagaacggtatccatgtggtt

SEQ ID NO: 31610 - DNA, 723 bp, Pseudomonas putida
atggcaaccctcaaagcccagcacctggcaaagagctacaaggggcggcaggtagtacgtgatgtcagcctgtctatcgacagcggccagatcgtcggcctgctcggccccaacggcgccggcaagaccacttgcttctacatgattgtcgggctggtccaggccgaacagggccgggtactgatcgacaacctcgatgtcagccaccagcccatgcacggccgcgcccgtgccggaatcggctacctgccgcaggaagcctcgatcttccgcaagctgtcggtcgccgacaacatcatggccatcctcgagacccgcaaggacctcgatcgggacggccgccgcaaagagctggaaagcctgctgcaggagttccacatcagccacatccgggacaacctcggcatgagcctgtctggtggtgaacgccgccgcgtcgaaattgcgcgcgccctggcgaccgcacccaagttcatcctgctggacgaaccgttcgccggtgtcgacccgatttcggtcggcgacatcaagcagatcatccaccacctcaaggccaaaggtatcggcgtactgattaccgaccacaacgtgcgtgaaaccctggacatctgcgaaaccgcttatatcgtcaacgatggccgactgatcgccgaaggtgacgctgaaaccatcctggcaaacgaactggtcaaagaagtttacctgggtcacgagttccgcctc

SEQ ID NO: 31611 - DNA, 1623 bp, Pseudomonas putida
atgctcaaacacgcagtcattccgttcctgctgggtgcaggcttgctcagcggcgcaccgtcggccgttgccgcatccaacctggtgttctgctccgaaggcagcccggccggcttcgatccggggcagtacaccaccgggaccgacttcgatgcctcggcagagaccgtgttcaaccgcctgacccagttcgagcgcggcggcactgcggtcatcccgggcctggcgaccaaatgggaagtgtccgacgacggcaagacctacaccttccacctgcgcgaaggggtcaagttccacaccaccgactacttcaagcccagtcgcccgttcaacgccgacgacgtgctgttcaccttcaaccgcatgctcgacaaggacaacccgttccgcaaggcgtaccccaccgagtttccatacttcaccgacatgggcatggacaagaacattgccaaggtggagaagcttgacgagcacacggtgaagttcaccctcaacgaggttgacgccgcgttcatccagaacctggccatgagctttgcctcgatccagtccgccgaatacgccgaccagctcctaaagaacggcaaggccgccgacatcaaccagaagccgatcggcaccggcccgttcgtgttcagcaaataccagaaggacgcgcagatccgcttcaagggcaacaaggactactggcagcccgaggacgtgaagatcgacaacctgatctttgccatcaccaccgacgcctcggtgcgcatgcagaagctcaagaagaacgagtgccaggtcaccctgttcccacgcccggccgacatcgagccgctaaaagccgacaagaacctgcaaatgccgcagcaggccggtttcaacctcggctatatcgcctacaacgtgatggacaagatcaagggcagcaacgaggccaaccccatggcccagctgaaagtccgacaggcgctggacatggccgtggacaagaaaaagatcatcgagtcggtgtaccagggcgccggccagctggcggtcaacgccatgccgcccacgcagtggtcctatgacgacagcatcaaggacgccgcctttgaccccgagaaagccaagcaactgctcaaggaagccggcatcaaggaaggcaccgaaatcaccctgtgggccatgcccgtgcaacgcccgtacaaccccaatgccaaactgatggctgaaatgctccagtccgactgggccaagatcggtatcaaggcgaagatcgtcagttatgaatggggcgagtacatcaagcgctccaaaggtggcgaacagggtgccatgctgattggctggagcggtgacaatggtgacccggacaactggctgggtaccctctacggttgcgatgccgtcgatggcaacaacttctccaagtggtgctacaagccctacgacgacctgatcaagcaggccaaggccacgtccgaccaggccaagcgcaccgagctgtaccagaaggcgcagcatatactcaaggagcaggtaccgatcaccccgatcgcccactccactgtctaccagcccatgagcgccaaggtgaaggacttcaagatcagcccgttcgcgctgaattccttctacggcgtcagcgtggacaaa

SEQ ID NO: 31612 - DNA, 2166 bp, Pseudomonas putida
atgagtgattcgatcgatgtgaccctgcccaaccaggcgcccgcgccggagcaggccgccgcccaccggccagaccttggcccctggcttgaggtgatgttgcaggtggcacaccactaccgcctggacgtatcaccccagcgtattcgcctggccgctgcggaggatgcccgcccgttgaatgaaatcctccgccacatggcacgtcaggcggggctggcattgcgcttcgtgcacttcgatgccaagggcctgcggcaatggcgcacgccgctggtgctggagctggacgatgggcagctggcggtggtcgagtcggtgaccgaagaggacgacctggcagtggtgttcgccggtgaccagggcctgacttcgcgcctgccccgcgacaccctcaaaggccgtatcagccgcgtggccctgctgcgcccggcccggccactgcgcgatgtgcgcaccgacgactacaccgcgccttacgaccgccactggttcgcccgcatcgtactgcgtgacttgcgcccttatgggcaggtgatgatcgcttcactggtggccaacgtgctggcgctggccggcgtgctgttctcgatgcaggtgtacgaccgagtgataccggccgaatccctacccactctctacgtcctgtttggcggtgtggtgttggcactggtgttcgacttcagcatgcgcctgctgcggctaaaggtgaccgacctgctcggcaagcgcgccgacctgcgggtgagcgacctggtctacggccatgccctgcgcctgcgcaactcggtgcggcccaagtccaccggctcgttcatctcgcagttgcgcgagctggagtcgatccgcgacctgatcacgtccagcaccgcgacggtgctggccgacctgccgttcttcctgctgttcctgttcgtgttctggctgatcggcggcgtactggtgttcatcccgctggtcgcgctgctggccatggtgctgcccgggttgcttgcacaaaggcgcctggcacggttggccaatgcctcgatgcgtgagtcggcgctgcgcaacgccatgctggtggaaagtatccagggcctggacgagatcaaggcactgcaggcagaggcacgcttcgaacggcagtggaaccagtacaacgcggcctgcgcgcacaccaacctgcgcctgcgcaccctcaccaacggcctggtgacctggacgcagaacgtgcagggtgccgtgtttgccgtggtcatcgtgatcggcgctcccatggtcatcgccggcgacctcaccacgggtagcctggtggcggcatccatgctttcatcgcgaatgatggcgccgttggcccaactgacccatgtgctgacccgctggcagcaggccaaggtcgcgctgcaaggcctggacaagctgatgcagtcgccggtcgatcaccccgaaggcgaagcccgcgtgcacctgccggccattcacggcgagtaccgcctgcgccaggccaacttccgctacagcgaagactacccgccagtgctgaacattggccggctggatatccagccgggcgagcgcattgccgtgctgggccgcaacggcgccggcaaatcaaccttgctgcaggcgctgggtggggccatggatctggtgcagggcgagatcagcctggacggcatcgccatggcccacctcgaccctgctgacctgcgccgtgacgtcggcctgctgccgcagtacgcgaggctgttccacggcaccctgcgggaaaacctcaccctcggtgccggccaggccagcgaccaggaactggtggccgcgctggccgccactggcgcactggacttcgtccgccgcctgcccaagggcatggaccacttgatcctcgaaggaggcctgggcttgtctggcggccagcgccaagccctggtgctgtcgcgcctgctggtacgccagccgcaggtgctgttgctggacgagccgaccgcgtcgctggacgacatgaccgagcgcaagctgctggataacctggagcgcttctgtcagggccgtacactggtgatcgcaacccatcgcctgagtgttctgcagcgggtcgaccgcatcctggtgctggacgccgggcgcatcgtcatcgatgacgcgcgcgatgccgcgctggccaaactgcagggagcccaggca

SEQ ID NO: 31613 - DNA, 948 bp, Pseudomonas putida
atgcctgatggtacgcccgcacaggcgcaggtcgatcaggccatcgactggctggtgaagctgcgtttcgacacccccagcccgcgcaccgagcagcagtttcaacactggctggccagccacccacacaaccgcctggcctggcagcgagtcagtaatctgggtgatgaattggccgggctgcccaaggacctgagccggcgcaccctggacgctagccagcacccaaaagccagccgcagggaccacctgaagttgctggggctgttggccgtgggcggcagcctgggctgggccgcgcgcgaaccgctaggcctgccacagctgctggccgacaccagcactgccacaggcgaacggcgccaatggcaaggcagtgacggcagccgtctgcagctcaacaccgccagtgccatcgacttgcactacagcgcggagcaacgccagctgaaactgatccatggcgaggtcagcctggagagcaaccccaacgacaaccgcccgttccacgtcgccacccgtgtcggcccgctgaccaccttcgatggccagctgttgctgcgcgaaaacagccaagggctgctgctgtcggtgcgtcgtggtgaagtcacgctgttccctgcctcggcctcagcgaggcaagtgctgcccggtgaaaccttgcaagtcacagccgacggcagcattcaggccagaacactgcacaacgacccctggggttggaccgaaggtgtactcagcgtgcagcagatgccgcttgccgagtttgccagcgaactcggccgctaccgaccgggcctgttgcgctgcgctccagaagtggcgggcttgaaggtttcaggcacctatcagttggctgacaccgggcaaatcctgcaactgctcacccgcagcctgcccgtgcgggtcgagtacaggacacgctattgggtaagcatcggcgcggcg

SEQ ID NO: 31614 - DNA, 717 bp, Pseudomonas putida
gtgaccgtgctgaacctgctgtgcctgccgtactccggggccagcgccatggtctacagccgctggcggcgcaagctgccggcatggttgcaggtacgcccggtagagttgcctgggcggggggcgcgcatggctgagtcgctgcacaccgacatgcaagtgctggctcggcaactggccagcgagcagcgactggcggcaagcgctccttatgcgctgctcggccacagcctgggtgcactgctggccttcgagctggcccatgagctgcaggcattgggctgcccggcgccgctggccttgttcgcctgcggcaccgcggcacctacccggcgtgaggactacgacggcaacaactggcgcgagcccaagagcgacgccgagctgatcagcgagttgcgcgcgctgcagggcacgcctgaggaagtgctggccaacgctgagctgatgagcctgaccttgccgaccttgcgcgccgattttctgttgtgcggcacttacacctaccggcagcgaccggcgttgcagtgcccactgcatgtgctgggtggagtggaagaccgggccagcgatgagcaactgcgggcatggcgcagtgaaacccaaggcgcgttctcgctgcagatgttcccaggtggccatttcttcatccatgagcaggaagaccgtgtgctcgctgcgctgaccgcgtcgctgcaaccgcttcggctgtccgcc

SEQ ID NO: 31615 - DNA, 654 bp, Pseudomonas putida
atgaacgacaacaaacccatcctgcgctacaacgccaacgagcgtagcaaccactgggcggtggcgatcctgttcatcctggctgggctgtcggggcttgcgctgttccatccggcgctattctggctcagcaacctgttcggcggcgggccgtggacgcgcattctgcatcccttcatcggggtggcgatgttcgtgtttttcctcggcctggtattacgcttctggcgggccaacttcatcaccgccaatgaccgcctgtggctgcgccgggtggaccgggtaatgcgcaacgaggaggagggcgtaccgccgatcggcaagtacaatgccgggcagaagctgctgttctggaccctgctggtgtgcatgctggtgctgctggtcagtggcgtggtgatctggcgcgcatacttcagccattggtttggcatcgatgccattcgcttgtctgcgctgctgcatgcgctggcggccttcgtgctgattctcagcatcatcgtgcacatctacgccggcatctggatcaagggctcgatcggcgccatgctgcatggctgggtcagccgcgcctgggcccgcaagcatcatgagttgtggtaccgcgaagtgaccggcgacaagacgccgggtgatcacggacgaaaagaagga

SEQ ID NO: 31616 - DNA, 954 bp, Pseudomonas putida
gtgatcacggacgaaaagaaggatgagcgcttgagcatcatacttgaacccgggcagatcgaagcgtcggcagtcacgccgccatttctgcacctgcccgccgccaacctgtttgaactgcgtgccgcgcgcctggagcaactggcagagggcaacgcgcttggcgactacctgaggttgattgcgcggttatgccgcatccagcagcagcttgtggataacccgcccggcggcatgccggtggccgaggcgcgtcagcgcctgtgcatggatcatggtttgccgccgctggcggctgacagcctggtgcgtgaagggccatggctggtctggttgcaggcactgctagagcacctcagcggcgaaacccgtggcccgatgggtgaggccctgcaggtgctacgaggcagtgatgacaatcagcgcaagggctggggcattgctttgctggcaggccagtacgatggtgtgcctgcagcactggtgccgtttctcggggccgcgttgcaggcggcctggtccagctggttgctggcgctgcccgcacaccagctcaagcctgccggtagcctggcccaatgtccggcttgtggttcgccggcgatggccggggtggtgcgcaaccgtggaaagcacaacggcttgcgttacctggcctgttcgttgtgtgcctgtgagtggcatgtggtgcgggtcaagtgtgtgtactgcgagtcgagcaaggatttgcgttacaccagccttgaggatgatcgccatgcgccaggcaaagcgccgctgcgcgcggaatgctgccccgggtgcgacagctacctgaagcagaactacctggagaacgatgcggcggccgagccgctggccgatgacctggccagcctggccctggatatacgtctggacggggagggcttccatcgcctggcgcccaacctgatgctcgcgcccggtggcggg

SEQ ID NO: 31617 - DNA, 918 bp, Pseudomonas putida
atgatcaccggtgctgcccagatggacggcgcgatcctggtttgctcggccgccgatggtccgatgccacaaacccgtgagcacatcctgttgtcccgtcaggtaggcgttccgtacatcgtggtcttcctgaacaaggctgacctggtagacgacgctgagctgctggagctggtcgagatggaagttcgcgacctgctgtccacctacgacttcccaggcgacgacactccgatcatcatcggttccgctcgtatggcgctggaaggcaaagacgacaacgaaatgggcactaccgctgttaagaagctggtagaaactctggacagctacattcctgagccagttcgtgctatcgaccagccgttcctgatgccgatcgaagacgtgttctcgatctcgggtcgtggtaccgttgttaccggtcgtatcgagcgtggcatcgtccgcgttcaggatccgctggaaatcgttggtctgcgtgacaccaccaccaccacctgcaccggtgttgagatgttccgcaagctgctggacgaaggtcgtgctggcgagaactgcggcgttctgctgcgtggtaccaagcgtgacgacgttgagcgtggccaggttctggtcaagccaggttcggtcaagccgcacaccaagttcaccgcagaagtctacgtcctgtcgaaggaagaaggcggccgtcacactccgttcttcaaaggctaccgtccacagttctacttccgtaccactgacgtgaccggtaactgcgaactgccggaaggcgttgaaatggtaatgccaggtgacaacattcagatgactgttaccctgatcaagaccatcgcaatggaagacggtctgcgcttcgctatccgtgaaggcggtcgtaccgtcggcgccggcgtcgtagcaaaaattattgaa

SEQ ID NO: 31618 - DNA, 366 bp, Pseudomonas putida
atgacccccaaaactgaagcccaagaatcgcgttttgatctgttcaagtggctggctgtagtggctttggtggttgttggtgttgtgggtaatcaatattactccggctctccaatcctgtatcgcgttcttgtacttctcgtccttgctgctgtcgcgggctttgtggctctgcagactgcgaagggcaagtcgttctttgcgctggcgaaggaagctcgtaccgagattcgtaaagtcgtgtggccgacccgccaggaaaccacccagaccacgctgattgtcgtggctgtcgtgctggttatggcactgctgctgtgggggctcgactccctgctcggctgggcggtctccttgatcgttggc

SEQ ID NO: 31619 - DNA, 429 bp, Pseudomonas putida
atggctaagaagattcaggcttacatcaagctgcaagttaaggccggccaggccaacccaagcccacccgttggtccagcactgggtcaacatggtgtgaacatcatggaattctgcaaggccttcaacgcccgtacccagggtcaagaagccggcctgccgactccagtgatcatcactgtctacagcgaccgtagcttcaccttcgagaccaagagcacccctgcctcggttctgctgaagaaagctgctggcctgaccagtggttcggctcgcccgaacaccgttaaagtcggtaccgttacccgtgctcagctggaagacatcgcgaaagccaaacaggctgacctgactgccgctgacctggacgctgctgtacgcaccatcgctggctctgcccgcagcatgggcctgaacgtggagggtgtg

SEQ ID NO: 31620 - DNA, 693 bp, Pseudomonas putida
atggctaagctgaccaaacgccaaaaggcaatcgccgagaaaatcgaagcaggcaaggcctacaacttcgaagaagcggcaactctgctggcctcgctgcctgctgccaagttcgtcgagtcctacgacatcgccgttaacctcggtgttgacccgcgtaaatccgaccaggtcgtacgtagcgctaccgtgctgccacacggcactggcaagaccgttcgcgttgctgtcttcacccagggtccagcagctgaagctgctctggctgccggcgctgatcgcgtaggtatggacgatctggctgccgaaatgaaaggcggcgacctgaactatgacgtcgttatcgcatcgcctgatgccatgcgcgttgtaggtcagctgggtcaggttctgggtcctcgcggcctgatgcctaacccgaaagttggtaccgtgaccccagacgtagccactgccgtgaaaaacgccaaggctggtcaggttcgctaccgtaccgacaaaaacggtatcatccacacctccgttggcaagatcggctttgaagctgacaagctgaaggaaaacgttgaagccctgatcgctgacctgaagcgtatcaagccagcttcctcgaaaggtatctacgttaagcgcgttaccctgagcaccaccatgggcccaggtctggtcatcgatcagagctcgctgaacgtg

SEQ ID NO: 31621 - DNA, 585 bp, Pseudomonas putida
atggtgctcccgattcgttaccgaatcagacaccaaaacgacatccggcctcggccagatgaaacggtaaaaaccaggagtaaacccgtggcaattaaactcgaagacaagaaggccatcgtcgctgaagtcaacgaggctgccaaagtcgctctgtccgctgtcgtggctgatgcccgtggtgtgactgtaagcgcaatgaccggactccgtaaagaggcccgcgaagctggcgtatacgtacgtgtagtgcgtaataccctgctcaagcgcgctgttgaaggcaccgaattctcgatcctcaacgacgcgttcaaaggcccgaccctgattgctttctccaacgaacacccgggcgctgctgctcgtctgttcaaagagttcgccaagggtcaggacaagttcgagatcaaggcagctgcgtttgacggcaatttcattgcagcgaaccagatcgacgtgttggctaccctgccgacccgcgacgaagctattgcacgactgatgagcgttattcaaggcgccaccagcaagctggctcgtactctggcagccattcgcgaccagaaagaagctaccgccgcc

SEQ ID NO: 31622 - DNA, 363 bp, Pseudomonas putida
atgtctctgactaacgaacaaatcatcgaagcaatcggccagaaaaccgttctggaagttgttgagctgatcaaagcaatggaagaaaccttcggcgttaccgctgctgttgccgctgctggcccagctgctgctgctgccgttgttgaagagcagaccgagttcaacgttgttctggttgaagccggcgacaagaaagtgaacgtgatcaaggccgttcgcgaactgaccggtctgggcctgaaagaagccaaagagaaagtcgatggcgctcctcaggttgtagctgaaggcgtttcgaaagaagccgctgaagacgctaagaagaagctggaagaagcaggcgctaaagtcgagctgaag

SEQ ID NO: 31623 - DNA, 1134 bp, Pseudomonas putida
gtgaacatgcccagccaagccgccatccttgacgcccactacatggcccgtgcgctggagctggcgcgtaaaggcctgtacaccacccacccgaacccgcgcgtaggctgcgtgatcgtgcgtgatggcgaagtggttggcgaaggctggcacgttcgcgccggcgagccccatgccgaagtgcatgccctgcgtcaggccggtgaacttgcccgaggtgcttgtgcctatgtcaccctggaaccatgcagccaccatggccgtacgccgccgtgtgccgaagcgctggtcaaggccggtgtggcgcgtgtagtcgcagccatgcaggaccctaacccgcaagtggcgggacagggcctgcggcgcctggccgaagccggaatcgaagtggccagcggggtgctcgaagccgaggcccgcgccctcaacccaggcttcctcaagcgtatggagcacggcctgccgttcgttcgcgccaagctggccatgagcctggacggccgcaccgccatggccagtggtgaaagccagtggatcaccggcccggccgcccgctcagccgtgcagcgcttgcgcgcccgctccagcgtggtgctgaccagcgccgccagcgtgctggcagacaacgcacgcatgaccgtgcgtggtgccgagctgggcctggatgccgaaactactgccctggctcttagccgcacacccttgcgggtgctggtcgatggccgtctgcgcctgcccctggcggcgccgttcttccaggccggcccggctctggtggtgactgctgtcgcagatgacccgcgctatgccgctgccggccacgaattgctcagcttgccgggcgacaatggccaggtcgacctgggggcgctgcttcacgctctggccgcccgcggcgtcaacgaaatcctgctggaagccggtgccggcctggtcggtgccttcgcacggcaaggcctggtcgacgaataccagctgttcgtcgctggcaccttcctcggctcccaggcccggccgctactggactggccgatggacaagatgagcgaagcaccacggctgaaaattaccgaaatgcgcgcagtgggcgatgactggcgggtcacggccatccccctgccagcgcccggcgta

SEQ ID NO: 31624 - DNA, 663 bp, Pseudomonas putida
atgttcaccggcatcatcgaatccattggcaccatccgcagcctgacccccaagggtggtgacgtgcgcgtctacgtagaaaccggcaagctcgacctgggggacgtcaagctcggcgacagcatcgccgtcaacggtgtatgcctcacggccgtagaactgccgggcgacggcttctgggccgatgtcagcgtcgaaaccctcaagcgcaccgccttcatcgacctcaagagcggcagcaaggtcaacctggaaaaagccctgacccccactacccgcctgggcgggcacctggtcagcggccacgtcgacggggttggcgaaatcatttcgcgcagcgataacgcccgcgccatccagttccgcgtgcgtgcaccgaaggaactggccaagtacatcgcccacaagggttcgatcaccgtcgacggcaccagcctgacggtcaatgaggtcaatggcgccgaattcgagctgaccattgtcccgcacactctgtccgaaaccatcatggccgattaccgtgcagggcgtcgggtaaaccttgaggtcgacctgctggcccgttacctggagcgcttgctgctgggtgacaaggccgccgaaccgagcaagggcagtggcattaccgaaagcttcctggccgccaatggcttcttgaaatcc

SEQ ID NO: 31625 - DNA, 474 bp, Pseudomonas putida
atgaccctgaagaccatcgaaggtaccttcatcgcccccaaaggtcgctatgctttggtggttggccgcttcaacagcttcgttgtcgaaagcctggtaagcggtgccgttgatgccctggtacgccacggtgtcagcgaaagcgacatcaccatcatccgtgccccgggtgcattcgagatcccgctggtggcacagaaggtcgcccagcaaggcgcctacgacgcgatcatcgccctgggcgccgtgatccgtggcggtaccccgcacttcgaatacgtggcgggcgagtgcaccaagggcctggcccaggtgtccatggagttcggtgttccggtggccttcggcgtactgaccgtcgactccatcgagcaagccatcgagcgttctggcaccaaagccggtaacaaaggtgctgaagctgccctgtccgcactggaaatggtcagcctgctggcgcagttggaggccaag

SEQ ID NO: 31626 - DNA, 973 bp, Pseudomonas putida
atgggtgagttcgagctgatcaaccattacttcgccgcagcgccctgtgcgcagggcggcgagggcgtggcgctgggtatcggcgacgactgcgccctgctggaccttccccccggtgagcaactggcggtgtcgaccgacaccctggtcgccggggtgcactttcctgctgtttgcgatccgttgctgcttggccagcgttcgttggctgtggcggccagtgacctggcagccatgggcgcgactgcaatcggcttcaccctcgcactgaccctgcctgacgttggccctgactggctggcggcctatgccgacggccttggtcgcatggcccaccgttgccgcatgagcctgatcggtggtgacaccacgcgcggcccgttgagcatcaccgtgaccgtgttcggccgcgtgccggctggccaggccttgcgccgcagcggtgcaaggccgggtgatctgttgtgtgtcggtggttcgctgggcaaggccgccggtgccttgccgctggtgctgggtgagcgcgaggcgcctgccgcgcaggccgagccgctgctggctcattactggtcaccgatgccgcagctcaccctcggggctctgctgcgtggcaaggccactgcggccctggacatttccgatggcctgctcgctgactgcgggcatatcgccaaggcctccggcgtggcgctggaggtgaacctggcgcaggtgccagtgtctcctgccttagaggcattcctcgggcgcgaagcggcgttgcaggcagcactcaccggtggcgacgactatgtactggccttcaccttgccgcccgaagcgctggcgcccctggctggcctcggttgcatcgaggtacatatcattggtcgtgtgctcgaagggcagggtgtgaccttgcgcgactcacagggccaggacataacccccgtccagcggggctatcaacactttagggagagaccgtgaccga

SEQ ID NO: 31627 - DNA, 810 bp, Pseudomonas putida
atgcgactgctacctggcctgctggcgttgttcgcctgcaccgtactggctgcagaaccgctacgtgtcgtcagtctggccccctcgatgagcgagatcatgcttgagctgcaggccgacgacctgctggtgggcgtgctcgatggcggcgaacggccggctgcactgcgccacttgccttcggtcgggcgccaagggcaactggacatggagcgcctgctcagcctgcgccccgacctgttgctgctgtggccaggcagtgtgccgccggcccagcgcgaccaactcaagcgcctgggtatcgccaccttcagcgccgaaccccatgacatcagccagctgatcgagcagatcgaggccattgccgagcgtgtcgggcgtgccaagcagggtcattcatacgcgcgagccctgcgtgagcggctgcagcagctgcgccagcagtatcggcgtgacgaacccttgcaggtgttttatcaagtctgggatcggccgttgtacacgctcggtggccgccaggtggtgaccgacgccctggccgtgtgcggggcgcgcaatgtgttcgccgaccttggccagccggcgccacaggtgaatgtagagtccgtgctgctgcgtaatccgcaggtcatcctggccgctgatgaggcgcaactggccagctggaaggcctggccgcagattcgggcggtggctgatgggcgtctgctggtggtgccggacaaagggctggagcgccccagcgggcagatgatcgaagccaccgcccgcttgtgtgcgttgctggacgctaaagcgccggtgtccagg

SEQ ID NO: 31628 - DNA, 2238 bp, Pseudomonas putida
atggtacaggtgagagtgcaccagccggtcaacactgacggcagtatcaatctcgaagcatggttggaccatgtggtaagcgtcgattcggcactggatcgcgcagcgctgaaagaagcctgcgagtttgctcttgaggtagagaaaaagggcaacccggccaagcattcctgggcggatggtacgtccagcttccaggcaggcctggaaatcgccgaaattctggctgacctcaagctcgaccaggactccctggtggctgcggtcatctaccgctcggtgcgcgagggcaaggtcaccctcgccgaggtcagccagcggtttggcccggtggtgtccaagctgatcgacggtgtgctgcgcatggccgccatcagtgccagcctcagcccacgacagtcgctggtgctgggctcgcaggcgcaggtagagaacctgcgcaagatgctggtggccatggtcgacgacgtgcgcgtggcgctgatcaagctggccgaacgcacgtgcgcaatccgggcggtcaagtccgccgatgacgagaaacgcctgcgtgtcgcgcgtgaagtgttcgacatctacgcgccgctcgcgcaccgcctgggtatcggtcacatcaagtgggagctggaagacctgtccttccgctacctggagcccgaccagtacaagcagatcgccaagctgttgcatgagcggcggctggaccgcgagcgcttcatcagcgacgtgatgaaccagctgcagaacgagttgctcgccactggcgtgaaggccgacatcagcggccgggcgaaacatatctattcgatctggcgcaagatgcagcgcaaaggcctggagttcagccagatctacgacgtgcgtgcggtgcgcgtgctggtgccggaaatccgcgactgctacaccgcgctgggcatcgtgcacaccttgtggcggcatattcccaaggagttcgacgactacatcgccaaccccaaggagaacggctaccgctcgttgcacactgcggtaatcggccccgagggcaaggtgctggaggtgcagatccgtacccacggcatgcacgaagaggccgaacttggcgtatgcgcccactggcgctacaagggcaccgacgtcaagcccagctccaaccactacgaagaaaagatttcctggttgcgtcaggtgctggagtggcacgaagagctgggcgacatcggtggcctggccgagcagttgcgggtcgacatcgagcctgaccgggtttatgtgttcacccccgacggccacgccatcgacctgcccaaaggcgccacgccattggacttcgcctaccgcgtgcacaccgagatcggccacaactgccgcggcgcgaagatcaacggccgtatcgtgccgctgaactacagcctgcagactggcgagcaggtggagatcatcaccagcaagcacggcaaccccagccgtgactggttgaactccaacctgggctacgtcaccacctcgcgggcgcgggccaagatcgtccactggttcaaattgcaggcccgcgaccagaacgttgctgccggcaagaccttgcttgagcgcgagctcagtcgtctgggcctgccgcaggttgatttcgagcgcctggccgagaagaccaacgtcaagaccgccgaggacatgtttgcctcgctcggtgctggcgacctgcgcctggctcatctggtcaacgctgcccagcagttgctggagcctgagcgtatcgagcagatcgagctggtgccgcgcaagcctaccgggccgcgtaccggcaagcgtggcgacattcagatccagggtgtcggcaacctgctgacacagatggccggctgctgccagccgctaccgggcgatgccattgtcggttacatcacccagggccggggcgtgagcattcatcgccaggactgcgcctcggtactgcagctggcgggcaaagagccagagcgcatgatccaggtgagctgggggccgatcccggtgcagacctacccggtcgacatcgtcatccgcgcctacgaccgcccgggcctgctgcgcgatgtgtcgcaggtgctgctgaacgagaagatcaacgtgctggcggtgaacacccgttcgaacaaggaagacaacaccgcgctgatgtcgctgaccatcgagattccaggcctggacgcgctggggcgcctgctggggcggatctcgcagttgccgaacatcatcgagacgcggcgtaatcgtacccct

SEQ ID NO: 31629 - DNA, 4071 bp, Pseudomonas putida
atggcttactcatacactgagaaaaaacgtatccgcaaggactttagcaagttgccggacgtcatggatgtgccttacctcctggccatccagctggattcgtatcgcgaattcctgcaagcgggagcatccaaggatcacttccgcgacgtcggcctgcacgcggccttcaaatcggtattcccgatcatcagctactccggcaatgctgccctggagtacgtaggctatcgcctgggcgaacccgccttcgatgtgaaggaatgtgtcctgcgtggcgtgaccttcgcggtcccactgcgggtcaaggtgcgcctgatcatcttcgacaaggaatcgtcgaacaaagcgatcaaggacatcaaagagcaagaagtctacatgggtgaaatccccctgatgactgagaacggtaccttcgttatcaacggtaccgagcgtgtgatcgtttcccagctgcaccgttcgcctggtgtgttcttcgaccacgaccgtggcaagacccacagctcgggcaagctgctgtactccgctcgcatcatcccttaccgcggttcctggctggacttcgagttcgacccgaaggactgcgtgttcgtgcgtatcgaccggcgccgcaaactgccggcctcggtgctgctgcgcgccctgggttacagcactgaagaagtgctgaacaccttctacaccaccaacgtgttccacatttccggcgaaaaactcagcctggaactggtaccgcagcgtctgcgtggtgaagttgcagtcatggacatccatgacgaaaccggcaaagtcatcgtcgagcaaggccgccgtattaccgcgcgccacatcaaccagctcgagaaggccggcgtcaagcaactggacgttccaatggaatacgtcctgggccgcactaccgccaaggctatcgtgcatccggctaccggcgaaattctcgccgaatgcaacaccgagatgactaccgagctgctgatcaaggtcgccaaggcgcaggttgtccgtatcgagaccctgtacaccaacgacatcgattgcggtccgttcatctctgacactctgaagatcgacaccaccagcaaccaactggaagcgctggtcgagatctaccgcatgatgcgtccaggcgagccgccaaccaaggacgcagccgagaccctgttcaacaacctgttcttcagtgccgagcgttacgatctgtccgccgtaggccgcatgaagttcaaccgtcgtatcggtcgtaccgagatcgagggttcgggcgtgctgagcaaggaagacatcgtcgaggttctgaagaccctggtcgatatccgtaacggcaaaggcatcgtcgacgacatcgaccacctgggtaaccgtcgcgtacggtgcgtcggcgagatggccgagaaccagttccgcgttggcctggtgcgtgtcgagcgcgcggtcaaggaacgcctgtcgatggcggaaagcgaaggcctgatgccgcaagacctgatcaacgccaagccggtagcggcagcggtgaaagagttcttcggttccagccagctgtcccagttcatggaccagaacaaccctctctcggagattacccacaagcgccgcgtctccgcactcggccctggcggtctgacccgtgagcgtgccggcttcgaagtccgtgacgtacacccgacccactatggccgtgtgtgcccgatcgagacccctgaaggtccgaacatcggtctgatcaactccctggcggcctatgcccgcaccaaccagtacggcttcctggaaagcccgtaccgcgtggtgaaggaaggcgttgtcagcgacgacatcgtgttcctgtcggcaatcgaagaggcagatcacgtcatcgcacaggcttcggccgcgatgaacgacaagaagcaactgatcgatgagctggtagcagttcgtcacctgaacgaattcaccgtcaaggcgccggaagacgtcaccctgatggacgtttcgccgaagcaggttgtttccgttgcagcgtcgctgattccgttcctcgagcacgacgacgccaaccgtgcgttgatgggttcgaacatgcagcgtcaggctgtaccgaccctgcgtgccgacaagccgctggtaggtaccggcatggagcgcaacgttgcccgtgactccggtgtctgcgtggttgctcgccgcggtggtgtgatcgactcggtcgacgccagccgtatcgttgttcgcgttgccgacgacgaagtggaaaccggcgaagcgggtgtggatatctacaacctgaccaagtacacccgttcgaaccagaacacctgcatcaaccagcgtccgctggtgagcaagggtgacaaggttcagcgtggtgacatcatggccgacggcccgtccaccgacatgggtgagctggctctgggtcagaacatgcgcatcgcgttcatggcgtggaacggcttcaacttcgaagactccatctgcctgtccgagcgtgttgttcaggaagatcgcttcaccaccatccacattcaggaactgacctgtgtggcgcgtgacaccaagctcggcccagaggaaatcactgcggacatcccgaacgtgggtgaagccgcactgaacaagctggacgaagccggtatcgtttacgtaggtgctgaagttggcgctggcgacatcctggttggcaaggtcacgccaaaaggcgaaacccagctgactccggaagaaaaactgctgcgcgcaatcttcggtgagaaggccagcgacgttaaggacacctccctgcgtgtgccaaccggcaccaagggtactgtcatcgacgtacaggtcttcacccgtgatggcgtggagcgcgatagccgcgcgctggccatcgagaagatgcagctcgacgagatccgcaaggacctcaacgaagagttccgcattgttgaaggtgcgaccttcgagcgtctgcgttctgccctgaacggccaggtagttgatggtggtgcgggcctgaagaaaggcaccgtgatcactgacgaggtgctggacggtctggagcacggccagtggttcaaactgcgcatggctgaagatgcactgaacgagcagctggaaaaggctcagcagtacatcgtcgaccgtcgccgtctgctggacgacaagttcgaagacaagaagcgcaagctgcagcagggcgatgacctggcaccgggcgtactgaagatcgtcaaggtttaccttgcaatccgccgccgcatccagccgggtgacaagatggccggtcgtcacggtaacaagggtgtcgtctcggtcatcatgccggttgaagacatgccgcacgatgccaacggtactccggttgacgtcgtactgaacccgctgggtgtaccttcgcgtatgaacgttggtcagatccttgaaacccacctgggcctcgcggccaagggtctgggcgagaagatcgaccgcatgctcgaagagcagcgtaaagccgctgagctgcgcgtgttcctgaccgaggtctacaacgagatcggcggtcgtcaggaaaacctcgacgagttcaccgacgaagaaatcctggccctggctaacaacctgaagaaaggcgtgcctatggctaccccggtcttcgatggtgccaaggagcgcgagatcaaggccatgctgaagctggccgacctgccagagagcggccagatggtgctgttcgatggccgtaccggcaacaagttcgagcgtcctgtgaccgttggttacatgtacatgctcaagctgaaccacttggtggacgacaagatgcacgcgcgttccactggttcctacagcctggttacccagcagccgctgggtggtaaggcgcagttcggtggtcagcgtttcggggagatggaagtgtgggcgctggaagcatacggcgcggcatacaccctgcaagaaatgctcacagtgaagtcggacgacgtgaacggccgtaccaagatgtacaagaacatcgtggatggcgatcaccgtatggagccgggcatgcccgagtccttcaacgtgttgatcaaagagatccgttcgctcggtatcgatatcgatctggaaaccgaa

SEQ ID NO: 31630 - DNA, 4233 bp, Pseudomonas putida
ccgctccctgctccgccaggaggaaaggccttgaaagacctactgaatttgctgaaaaaccagggtcaagtcgaagagttcgacgccatccgcatcggtctggcgtcgcctgaaatgatccgttcgtggtcgttcggtgaagttaagaagccggaaaccatcaactaccgtacgttcaagcctgagcgtgacggcctgttctgcgccaagatctttggcccagtcaaggactacgagtgcctgtgcggcaagtacaagcgcctcaagcaccgcggcgtaatctgcgagaagtgcggcgttgaagttgccctggcgaaggttcgtcgtgagcgcatggcgcacatcgagctggcctcgccggttgcccacatctggttcctgaagtcgctgccgtcccgtatcggcttgctgatggacatgaccctgcgtgatatcgagcgcgtgctctacttcgagagctatgtcgttatcgacccgggcatgactaccctggaaaagggccagctgctgaacgacgagcagtacttcgaagcgctggaagagttcggtgacgacttcgatgcccgtatgggggccgaggctgtccgcgagctgctgcacgctatcgacctggagcacgagatcggccgcctgcgcgaagaaattccgcagaccaactcggaaaccaagatcaagaagctttccaagcgtctgaagctgatggaagctttccagggctcgggcaacctgcctgagtggatggtcctgaccgtcctgccagtgctgccgccggacctgcgtccgctggttccgctggatggtggccgtttcgcgacttccgacctgaacgacctgtatcgccgggtgatcaaccgtaacaaccgtctgaagcgcctgctggatctgtcggcgccggacatcatcgtgcgcaacgaaaagcgcatgctgcaggaagcggttgacgctctgctggacaacggccgtcgtggtcgcgccatcactggctcgaacaagcgtccgctgaagtccctggccgacatgatcaaaggtaagcaaggtcgtttccgtcagaacttgctcggtaagcgtgttgactactccggccgttcggtaattaccgtaggtccgaccctgcgtctgcaccagtgcggtctgccgaagaagatggccctcgagctgttcaagccgttcattttcggcaagctggaaatgcgtggtctggcgaccaccatcaaggctgccaagaagatggtcgagcgcgagctgccagaggtgtgggacgttctcgctgaagtgattcgcgaacaccccgtactgctcaaccgtgcaccgacccttcaccgtctgggtatccaggcgtttgaacccgtactgatcgaaggtaaggctattcagctgcacccgctggtctgtgctgcgtacaacgccgacttcgacggtgaccagatggccgttcacgtgccgctgaccctggaagcccagctcgaagcgcgtgcgctgatgatgtcgaccaacaacatcctgtcgccagccaacggtgagccaatcatcgttccgtcgcaggacgttgtactgggtctgtactacatgacccgggaagccatcaatgccaagggcgaaggtcgcgtgttcgccgacctgcaggaagtcgaccgcgtattccgcgccggcgaagccgccctgcacgcgaaaatcaaggttcgtatcaacgaaaccgtgaaagagcgtgatggctcggtggtcaagaacacccgcatcgttgacaccaccgtcggccgtgcgctgctgttccaggttgtgccggcaggtctgccgtatgacgtggtcaaccagccgatgaagaaaaaggcgatctccaagctgatcaaccagtgctaccgcgtggttggtctgaaagagaccgttatcttcgccgaccaactgatgtacaccggtttcgcatactcgaccatttccggcgtttccatcggtgttaacgacttcgttatcccggacgagaaagcccgcatcatcggtaacgctaccgatgaagtgaaggaaatcgagagccagtacgcctccggcctggtaacccagggcgagaagtacaacaaggtcatcgacttgtggtcgaaggcgaacgacgaagtgtccaaggcgatgatggccaacctctcgaaagagaaggtcatcgaccgcgaaggcaaggaagtcgagcaagagtccttcaactcgatgtacatgatggctgactcgggtgcgcggggttccgcagcccagatccgtcagctggccggtatgcgtggtctgatggccaagccggacggttccatcatcgagacgccgatcaccgcgaacttccgtgaaggtctgagcgtacttcagtacttcatctcgactcacggtgctcgtaagggtctggcggataccgcactgaaaaccgctaactccggttacctgactcgtcgtctggtggacgttgcccaggatctggtagtgaccgagatcgactgcggcaccgatcagggcctggtgatgacgccacacatcgaaggcggcgacgttgtagagccactgggtgagcgtgtattgggtcgtgtcatcgcccgtgacgtattcaagccaggcaccgaggacgttatcgttccggccggtaccttggtcgacgagcagtgggtcgagttcatcgagctgaacagcatcgacgaagtgatcgtgcgttcgccgatcaactgcgaaacccgctacggcatttgcgccaagtgctacggtcgtgatctggctcgtggtcaccaggtgaacatcggtgaggctgtcggcgttatcgctgcccagtcgatcggtgagccgggtacccagctgaccatgcgtacgttccacatcggtggtgctgcaagccgtacctcggctgccgacagcgtccaggttaagaatggcggtatggtgcgtctgcacaacctgaagcaggttgagcgtgccgacggtaacctggttgccgtatcgcgttcgggtgagttggcgattgctgacgagttcggtcgtgagcgtgagcgctacaagctgccttacggtgcggtgatttcggtcaaggaaggtgaaaaggtcgaagctggcgccatcgtcgccaagtgggacccacacacccacccgatcgttaccgagctgaaaggtaccgtgaccttcgtgggcatggaagaaaacatcaccatcaagcgtcagaccgacgaactgaccggcttgaccaacattgaagtactggacgtcaaggatcgccctgccgcaggcaaggaaatccgtccggcaatcaagatggtcgatgctgcaggcaaggatctgtacctgccaggtactgacgtacctgcccagtacttcctgccggccaacgcccttgtcggtgtggctgacggtgctcagatcggtgttggtgacgttatcgcgcgtatcccgcaagagacgtcgaagacccgtgacattaccggtggtctgccacgcgttgccgacctgttcgaagcgcgtcgtccgaaagaagcctcgattctggctgaagtcagcggcaccatcgcattcggtaaagagaccaagggcaagcgtcgcctggtgatcactccgaccgacggtagcgaaccgtacgaagagctgattccgaagtggcgccacctgaacgtcttcgaaggtgaacaggtaaaccgcggtgaagttatctccgacggcccgagcgatccgcatgacatcctgcgtctgctgggtgtgagtgcgctggcgaagtacatcgtcaacgagatccaggacgtttaccgtctgcaaggcgtgaagatcaacgacaagcacatcgagaccattctgcgtcagatgctgcgcaaggttgagatctccgagtcgggcgattccagcttcatcaagggcgaccagatggaactgacccaggtgctggtagagaacgagcgtctcgctagcgaggacaagttcatctccaagttcacccgagtgctgctgggtatcaccaaggcctcgctgtccaccgagtcgttcatctccgcggcttccttccaggaaacaacccgcgtactgaccgaagcggcggtaaccggcaagcgcgactacctgcgcggcctgaaagagaacgtggtcgtgggtcgtctgatcccggccggtactggtctggcctaccacagcgagcgcaagcgtcgccgtgatgccgacaaaccgctgcgtgtaagcgccagtgaagtggaagctgcactgaccgaagcgctgaattccagcggtaattaagta

SEQ ID NO: 31631 - DNA, 2145 bp, Pseudomonas putida
atggctcgtactacagcaattaaccgctaccgtaacattggtatctgtgcccacgttgacgcgggcaagaccaccactaccgagcggatcctgttctacacaggtctgagccacaaaatgggcgaggtgcatgacggcgccgcgaccaccgactggatggtgcaggagcaggagcggggtatcaccattacctccgctgccgttaccaccttctggaaaggttcccgtggtcagtatgacaactaccgcgtaaacgttatcgatacccctggccacgttgacttcaccattgaagtagagcgttcgctgcgtgtactcgacggcgcggtcgttgtgttctgtggcacctccggcgttgagccgcagtccgaaaccgtatggcgtcaggccaacaagtacggcgttccgcgtgttgtttacgtgaacaagatggaccgtgctggtgcaaacttcctgcgcgtcgtaggtcagatcaagaaccgtctgggtcacactccggttcctgttcagctggccatcggttcggaagataacttccagggtcaggttgacctgatcaagatgaaggctatctactggaacgacgacgacaagggtactacctaccgcgaggaagaaattcctgcggatatggtcgagctggctaacgaatggcgcaacaacatggttgaagccgccgccgaagccaccgaagagctgatgaacaagtaccttgaagaaggtgagctgtccgtcgaagagatcaaggcaggcctgcgcgcgcgcaccctggccagcgagatcgttccggctgtctgcggttcgtcgttcaagaacaagggtgttcccctggttctcgacgccgttatcgacttcctgccagctccgaccgagatccctgcgatcaagggtatccaccctgacctgatcgacgtgcctaaggacgaagtcaagccagagcagttcgacgagcgtcatgctgacgacgacgagccgttctcggccctggccttcaagattgccaccgacccgttcgttggtactctgaccttcgttcgcgtttactcgggcttcctgacctccggtgactccgtcatcaactcggtcaaaggcaagaaagagcgcgttggtcgtatggtccagatgcacgccaaccagcgtgaagagatcaaagaagtacgtgcaggcgacatcgctgctctgatcggcatgaaggacgtcactactggtgataccctgtgcaacgccgacaagccgatcatccttgagcgtatggacttccctgagcctgtgatttcgctctctgtagagccgaaaaccaagcaggaccaggagaagatgggtatcgcactgggcaagctggctcaggaagacccatcgttccgcgtcaagaccgatgaagaaaccggtcagaccatcatctccggtatgggtgagctgcacctggacatcctcgttgaccgcatgaagcgcgaattcaacgtcgaagccaacatcggcaagccgcaggtttcgtaccgcgagaagatcaccaaatccaacgtcgagatcgaaggcaagttcgttcgtcagtcgggtggtcgtggtcagttcggtcactgctgggttcgcttctccgagccggacgtggacgacaagggcaacatcacagaaggtctggtgttctccaacgaagtcgttggtggtgtgattcctaaggaatacatccctgcgatccagaagggtatcgaagagcagatgaaaaacggcgttgttgccggttatcctctgatcggcctgaaggccgcggtattcgacggttcgtaccacgacgtcgactccaacgaaatggcgttcaagatcgctgcttcgatggcgaccaagcaactggcccagaagggcggtggcgtggttctcgagccgatcatgaaagtcgaagttgtaaccccggaagactacctgggtgacgtgatgggtgacctgaaccgtcgtcgtggtctggtccagggtatggatgagtcggtctctggccgtgtcgtccgtgctgaagtaccgctcggagagatgttcggttacgcaaccgacgttcgttccatgtctcagggtcgcgcaagctactccatggaattctccaaatacgccgaagctccgtcgaacatcgtcgaagcactcgttaaaaaacaaggc

SEQ ID NO: 31632 - DNA, 1191 bp, Pseudomonas putida
gtggctaaagaaaaatttgatcgttcccttccccacgttaacgtcggcaccatcggccacgttgaccacggtaagaccactctgaccgcagctctgactcgcgtctgctccgaagttttcggttcggcagtcgttgagttcgacaagatcgactcggctccggaagaaaaagcgcgcggtatcaccatcaacaccgctcacgtcgagtacaactcgaacattcgtcactacgctcacgttgactgcccaggtcacgctgactacgtgaagaacatgatcaccggtgctgcccagatggacggcgcgatcctggtttgctcggccgccgatggtccgatgccgcaaacccgtgagcacatcctgctgtcccgtcaggtaggcgttccgtacatcgtggtcttcctgaacaaggccgacctggtagacgacgctgagctgctggaactggtcgagatggaagttcgcgacctgctgtccacctacgacttcccaggcgacgacactccgatcatcatcggttccgctcgtatggccctggaaggcaaagacgacaacgaaatgggcactaccgctgtcaagaagctggtagaaactctggatgcctacatccctgagccagttcgtgccatcgaccagccgttcctgatgccgatcgaagacgtgttctcgatctcgggtcgtggtaccgttgttaccggtcgtatcgagcgtggcatcgttcgcgttcaggatccgctggaaatcgttggtctgcgtgacaccaccaccaccacctgcaccggtgttgagatgttccgcaagctgctggacgaaggtcgtgctggcgagaactgcggcgttctgctgcgtggtaccaagcgtgacgacgttgagcgtggccaggttctggtcaagccaggttcggtcaagccgcacaccaagttcaccgcagaagtctacgtcctgtcgaaggaagaaggcggccgtcacactccgttcttcaaaggctaccgtccacagttctacttccgtaccactgacgtgaccggtaactgcgaactgccggaaggcgttgaaatggtaatgccaggtgacaacattcagatgactgttaccctgatcaagaccatcgcaatggaagacggtctgcgcttcgctatccgtgaaggcggtcgtaccgtcggcgccggcgttgtggccaaaatcatcgag

SEQ ID NO: 31633 - DNA, 282 bp, Pseudomonas putida
ttgaaggctttcgaccatcgcctgatcgaccaatccacccaggaaatcgtggaaaccgcgaaacgtactggtgcacaagtgcgtggtccaattccactgcctacccgcaaagagcgtttcaccgttctggtctccccgcacgtcaacaaagacgcgcgtgaccagtacgagattcgcactcataagcgtgttctggacatcgtccagccaacggataaaaccgttgacgcgctgatgaagcttgatctggcggcaggtgtggaagtacagatcagcctcggc

SEQ ID NO: 31634 - DNA, 600 bp, Pseudomonas putida
atgcaacttaatgtaaatgacgctcaggcgatcgaagtttccgaactgactttcggtggcgaattcaacgagacgctggttcaccaagcagtcgtggcctacatggccggcggccgtcagggcaccaagcagcagaagacccgttccgacgtggctggtggcggtaagcgcccatggcgtcagaagggtactggccgtgctcgtgctggtaccactcgtggtccgatctggcgtggcggtggtgtaaccttcgcagctcgccctcaagatcactcgcaaaagctcaacaagaagatgtatcgcgcagctctgcgctccatcctcgctgagctggtgcgtagcgaccgtctggtcgtggttcaggacttcgctgttgaagcaccgaaaaccaaagatctgctgaacaagctgaacggcatgggtctgagcgatgtactgatcgtttccgacgctgttgatcagaacctgtacctggctgctcgtaacctgccgcacgtcgacgtacgtgacgtccaaggttccgacccggtcagtctgatcgcatacgagaaagtgttgatcactgtctcggccgtgaagaaattcgaggagctgctggga

SEQ ID NO: 31635 - DNA, 822 bp, Pseudomonas putida
atggcaatcgttaaatgcaaaccgacttcccctggccgccgtttcgtggtcaaggtggtcaacaaggagctgcacaaaggcgctcctcacgcaccgctgatcgagaaaaaatcgaagtctggtggtcgtaacaacaatggccgcattaccactcgtcacgttggtggtggtcacaagcagcattaccgtctggtcgacttccgtcgcaacgacaaagatggcattccagccactgtcgagcgtatcgaatacgatccaaaccgtactgctcacatcgccctgctgtgctacgcagacggtgagcgtcgctacatcatcgcgcctaaaggcgtgagcgctggcgaccagctgatcgcaggtgccctggccccaatcaaggccggtaactccctgcagctgcgcaacattccagtaggtagcaccattcacggcatcgaactgaagccgggtaaaggtgctcagatcgctcgttccgctggtgcttcggctcagctgatcgctcgcgaaggtgtctacgtgaccctgcgtctgcgctctggtgaaatgcgtaaagtcctggctgagtgccgtgcgaccctgggcgaagtctcgaactccgagcacagcctgcgttcgctgggtaaagctggtgccaaacgctggcgcggcgttcgcccaaccgttcgtggtgttgccatgaacccggttgaccacccacacggtggtggtgaaggtcgtacctccggtggtcgtcatccggtatcgccatggggcttcccaaccaagggtgctaaaacccgtggtaataagcgtaccgacaacatgatcgtccgtcgtcgcaag

SEQ ID NO: 31636 - DNA, 330 bp, Pseudomonas putida
atggaagtagccgctaagttgtcgggcgctcgcatctccgcccagaaagcccgcttggtcgccgaccagatccgcgggaagaaggtgggcgaagcgctcaacctgttggccttcagcagcaaaaaagccgctgaaatcatgaagaaagtcctcgagtcggccgtagccaacgccgaacacaacgaaggcgcagacgttgatgacctgaaggtctccaccgtcttcgtcaacgaagggcgttcgctgaagcgcatcatgccacgtgccaaaggccgtgctgatcgcatcgtcaagcggtcttgccatatcactgtcaaggttgcggacaag

SEQ ID NO: 31637 - DNA, 711 bp, Pseudomonas putida
ttgcggacaagtaacggagtcgatcagatgggtcagaaagtacatcccactggcattcgcctgggaatcgtcaaggagcacacctccgtctggtacgcagacggtgctacttacgcagattacctgttgaaggatctgaaaacgcgtgagtacctccaagacaaactaaaaagcgcgtccgtaagccgtatcgatattcatcgtccggctcaaactgcacgcatcaccatccacaccgctcgtcccggtatcgttatcggtaagaaaggtgaagatgtcgagaagctgcgtcaggacctgaccaagcagatgggtgtgcctgtgcacatcaacatcgaagagatccgcaagccggaactcgacgctatgctggttgcgcagagcgtagctcagcagctggaacgccgtgtaatgttccgtcgcgccatgaagcgtgcggtacagaacgccatgcgtattggtgccaagggcatcaagatccaggtgagcggtcgtctcggcggtgctgagattgctcgtaccgagtggtatcgcgaaggtcgtgtgcctctgcacaccctgcgtgccgatatcgactacaacacctacgaagctcacaccacttacggtgtgatcggtgtgaaggtttggatcttcaaaggcgaagttattggtggtcgccaagaagaactgaaaccacaagcaccagcgcctcgtaaaaaagctgctaag

SEQ ID NO: 31638 - DNA, 411 bp, Pseudomonas putida
atgttgcaaccaaagcgtacaaaattccgcaagcagatgactggccacaaccgtggtctggcactgcgcggtagcaaagtcagcttcggcgaattcgccctgaaagctgttgctcgcggtcgcctcaccgctcgccagatcgagtccgcacgtcgtgcgctgacccgtcacgttaagcgtggcggtaagatctggatccgtgtgttcccggacaagccgatctccaaaaaacctcttgaggttcgtatgggtaaaggtaagggctccgtggaatactgggttgcccagattcagccaggcaaagtcctgtacgagatcgagggtgtttctgaagagctggcgcgcgaagctttcgccctggctgctgcaaagctgcctctcgccacctcctttgttaagcggacggtgatg

SEQ ID NO: 31639 - DNA, 270 bp, Pseudomonas putida
gtgatcatggctgaagctgaaaaaaccgtccgtacgctgactggccgtgtcgtcagcgacaaaatggacaagaccatcaccgttctgatcgagcgtcgcgtaaagcacccgatctacggtaaatacgttaagcgttcgactaagctgcacgcgcacgacgaagccaaccagtgcaagatcggcgacaaggtttccatccgtgaaacccgtccgctggccaagaccaagtcctgggcactggttgaagtcctcgaacgcgctgttgaagtc

SEQ ID NO: 31640 - DNA, 312 bp, Pseudomonas putida
atgcaaaagattcgtcgtgacgacgagatcatcgtgatcgccggcaaagacaaaggtaagcgcggtaaggtgctgaaggttctggctgatgaccgtctggttatcggtggcgtgaacctggtcaagcgtcataccaagcctaacccgatggcgggcgtacagggcggtatcgtcgagaaagaagcgcctctgcacgcttccaacgttgccatcttcaacggtgaaaccaacaaggctgaccgcgttggtttcaaagtagaagacggtaaaaaaattcgtgtcttcaagtcgacccaaaaagcggttgatgct

SEQ ID NO: 31641 - DNA, 537 bp, Pseudomonas putida
atggcacgactgaaagagatttaccggaacgaaatcgctcctaagcttaaggaagaacttaagctgtcgaacgtgatggaagttccgcgcgttaccaagatcaccctgaacatgggtctgggcgaagcgatcggcgacaagaaagtcatcgagcacgctgttgctgacctggaaaagatcaccggtcaaaagccggtcgtgactttcgctcgcaaatccatcgctggcttcaaagtccgcgaaggctggccgatcggcgtcaaggtgaccctgcgtagcgacaagatgtacgaattcctggaccgcctgctggcgatctccctgcctcgggttcgcgacttccgcggcctgaatgccaagtccttcgatggtcgtggcaactacagcatgggcgtgaaagagcagatcatcttcccggaaatcgactacgacaagatcgatgctctgcgcggtttggacatcaccctgaccaccactgctcgttcggacgacgaaggccgcgctctgctgcgtgctttcaagttcccgttccgcaac

SEQ ID NO: 31642 - DNA, 531 bp, Pseudomonas putida
atgtctcgcgtcgctaagaaccccgttaagctgccatccggtgtcgaagtcaaattcgccggtcagcagctttcggtgaagggtgccaaaggtactctcgaactgaacgttcactcgtctgttgaagttaccgaagagtctggtgagctgcgtttcgtcgctcgcaatggtgaccagcaagctcgtgccatggccggtaccacccgcgctctggtcaacaacatggtccaaggcgtaagccaaggcttcgagcgcaagctccagctggtcggtgttggttacaaggcacaggctaaaggcaccgtcctgaacctggccctgggcttctctcacccagtggactacgaactgccagccggtatcaccgctgaaacacctagccagaccgacatcctgatcaagggtatcgacaagcagctggtaggtcaggtggccgctgaaatccgcgacttccgtccgccagagccttacaaaggtaaaggtgtgcgttacgcggacgaagtagtccgtcgtaaagaagccaagaagaag

SEQ ID NO: 31643 - DNA, 348 bp, Pseudomonas putida
atgaccgacaaaaaagttattcgactgcgtcgcgctcgcaaagcacgtctcaagatgcacgaactcgaagtcgtgcgcctgtgcgtgttccgctcctcgcagcacatctacgcccaggtcatttcggccgacggcagcaaggttctggcaagcgcctcgaccttggacaaagacctgcgtgatggcgccactggcaacatcgacgcggccactaaggttggcaagctggtagctgagcgtgcgaaagccgccggtgtatctcaagttgcctttgaccgttccggcttcaagtaccatggccgcgtcaaagcgctggctgatgctgctcgtgaaggcgggctggagttc

SEQ ID NO: 31644 - DNA, 498 bp, Pseudomonas putida
atggcaaataacgatcaaaagcgcgacgaaggctacatcgagaagctggttcaagttaaccgcgttgccaaaaccgtaaaaggcggccgtatcttcaccttcaccgcgctgaccgtggttggtgatggtaaaggtcgtgttggcttcggccgtggcaagtcgcgcgaagtaccagccgcgatccagaaagccatggaagctgctcgccgcaacatgatccaggttgacctgaagggcaccaccctgcagtacgccaccaaggctgcccacggcgcctcgaaggtttacatgcagcctgcctcggaaggtaccggtatcatcgccggtggcgcaatgcgtgctgtcctggaagttgctggtgttcagaacgttctggccaagtgctacggttcgaccaacccagtgaacgtggtttacgccaccttcaagggtctgaaagccatgcaatctcctgaatccattgccgccaagcgtggcaagagcgtcgaggagatcttc

SEQ ID NO: 31645 - DNA, 432 bp, Pseudomonas putida
atgaaactcaatgatctgagtccagcgccgggttcccgtcgcgagaagcatcgtccaggtcgtggtatcggtagcggtctgggtaagaccggcggccgtggccacaaaggtcagacttcccgttcgggtggttcgatcgctcctggcttcgaaggcggtcaacagccgctgcaccgtcgcctgccgaagttcggcttcgtttccctgaaagccatggaccgcgctgaagtgcgtctgtccgagctggccaaagtggaaggcgacgtgatctccgtgcaatccctgaaggatgccaacgtgatcaaccagcacattcagcgtgtgaaaatcatgctgtctggcgaagttactcgcgcagtcaccatcaagggtatcgcagccaccaagggtgcgcgtgcggctatcgaagcagctggcggcaaattcgaggaa

SEQ ID NO: 31646 - DNA, 354 bp, Pseudomonas putida
atggcccgtattgcaggcgtcaacattccagataacaagcatactgttatctcgctgacctacatctatggtgtcggtcgcacaactgcacagaagatttgtgcagacgctggtgtaaacccagccgctaagatcaaggatctgagcgacgagcaaatcgaaaccctgcgtggcgaagtcgcgaagttcaccaccgaaggtgacctgcgtcgtgacatcaacatgaagatcaagcgcttgatggacctgggttgctaccgcggcctgcgtcatcgtaaaggtctgccggttcgcggtcagcgcaccaagaccaacgcacgcacccgtaagggcccgcgtaagccgatccgcaag

SEQ ID NO: 31647 - DNA, 387 bp, Pseudomonas putida
atggcaaaacctgctgctcgtcctcgtaagaaagtcaaaaagacagtggttgatggcatcgcccacatccatgcttctttcaacaacaccatcgtgaccatcaccgaccgtcagggcaatgctttgtcctgggcgacctccggtggttcgggtttccgtggttcgcgcaaatccaccccgttcgcagctcagatcgctgctgagcgtgctggtcaagctgcgctggaatacggtctgaagaacctcgacgttaacgtcaagggtccaggtccaggtcgtgagtccgccgttcgtgcattgaacagctgcggctacaagatcgccagcatcaccgacgtgacgccaatcccgcacaacgggtgccgtccgccgaagaagcgtcgcgtg

SEQ ID NO: 31648 - DNA, 999 bp, Pseudomonas putida
atgcagatttcggtaaatgagttcctgactccccgccacattgatgtgcaggtagtcagtccgacccgcgccaaaattacgctcgagcctctcgagcgtggtttcggccataccctgggcaacgcgctgcgccgcatcctgttgtcctccatgcctggctgtgcagtagtcgaggccgagatcgatggcgtactccatgagtactccgcgatcgaaggtgttcaggaagacgtaattgaaatcctgttgaacctgaaaggtctcgctatcaaactgcatggtcgtgacgaagttacgctgaccttgtcgaaaaagggttcgggggtggttaccgctgccgatattcagctggatcacgatgtcgagatcgtcaaccccgatcacgtaatcgcgaacctggcgtcgaacggcgctctgaacatgaagctcactgtagctcgtggtcgtggttacgagccggccgactcccgtcaaaccgacgaagacgaaagccgtagcattggccgtctgcagttggacgcctccttcagcccggtgcgtcgtatcgcctatgtggtcgagaacgcccgtgttgaacagcgtaccaacctggacaaactggtcattgatctggaaaccaacggcaccctggatcctgaagaggctatccgccgcgctgcgaccattctgcaacagcagttggccgcgttcgtcgacctcaaaggtgacagcgagcctgtcgtagtcgagcaggaagacgagatcgatccgatcctgctgcgtccggttgacgacctggaactgactgtacgttcggccaactgcctcaaggcggagaacatctactacatcggcgacctgattcagcgtaccgaagtagagctgttgaagactcctaacctgggtaagaagtccctgactgaaatcaaggacgttctggcctctcgtggtctgtctctcggcatgcgcctcgacaactggccgcctgcaagtcttaagaaagacgacaaggcgaccgcc

SEQ ID NO: 31649 - DNA, 384 bp, Pseudomonas putida
atgcgtcatcgtaaaagtggacgtcacctgagccgtaccagctctcaccgcaaggctatgttccagaacatggcagtgtcgctgatcgagcacgagctgatcaaaaccaccctgccgaaagccaaggaactgcgccgcgttgccgagccgctgatcaccctggccaaggaagacagcgttgctaaccgtcgtctggccttcgaccgtacccgttcgaagtccgctgttggcaaactgttcaacgacctgggcaagcgttacgccacccgtcagggcggctacctgcgcatcctgaagtgcggtttccgcgctggcgacaacgcgcctatggcgtatgtcgagctggttgatcgtccggtcggcggtgctgtagaagctgctgag

SEQ ID NO: 31650 - DNA, 1452 bp, Pseudomonas putida
atgacgaccctcatggtgcaaggcaccacctccgacgcaggcaagagcacactggtgaccgcgttgtgccgctggctgttgcgccagggcgtcgctgtggtgcccttcaagccacagaacatggcgctgaacagcgcggtgacggctgatggcggtgaaatcggccgggcccaggcggtgcaggcccaggcctgccggctacaaccgcacaccgacatgaacccggtgctgctcaagcccaacagcgacaccggcgcccaggtcatcatccacggtcgcgcggtcaccagcatgaatgcagtggcctaccacgactataaaaccactgccatgcaagcggtgctggcgtctcaccatcggctgagtgccgcgtacccggtggtcatggtcgagggggcggggtcgccggcagagatcaacctgcgtgccggcgatatcgccaacatgggctttgccgaagcggtggactgcccggtgatcctggtggccgacatcaaccgcggtggtgtgttcgcccacctggtgggcacgctggaattgctgtcgaccactgaacaggcgcgggtcaaaggttttgtcatcaaccgcttccgtggcgacattgctctgctgcagccagggctggactggctggaacaacgcaccggcaaaccggtactgggcgtcctgccttacgttaccgacctgcacctggaagccgaagatggcatcgatgtgcgccaaggcgtcaagcacgagcgagtgctaaaggtgatcgtgccagtgctgccgcgcatcagtaaccacaccgacttcgacccgctgcgcctgcacccgcaggtggacttgcagttcattggcccaggccagccgattccggctgccgacctcatcatcttgccgggctccaagagtgtgcgcggcgacctggcacaactgcgcgagcgcggttgggacaaggccatcgagcggcacctgcgctatggcggcaagctgatcggtatctgcggtggcctgcagatgctggggcgggaagtgcatgacccgctggggctggagggggccgcaggctcaagccaggggctcggtctgctcgactatgccacggtgctcgaagccgagaagcaactgcgcaatgtggccggcacgctgagccttgaagcggcaacggtaaccggttatgaaattcatgctggcgttacgacggggcctgcgctggcgcaacccgcggtccaactggctgatggccgccatgatggtgctgtcagtgccgatggccagatcctcgccacctacctgcatggcctgttcgaaggcagccagtcgtgtgctgcgctattgcgctgggccgggctggaggatgtgcaggttatcgactacgaagcgttgcgcgaacacgacatcgagcgcctggccgatctggtggaaaagcaccttgacaccgtgcagttgcgccaactgtgtggggtagcc

SEQ ID NO: 31651 - DNA, 564 bp, Pseudomonas putida
atgatcctcgacttgctgcgccatggtgaaacggaacagggcggcctgcgtggcagccgtgatgatgccttgaccgacaagggctgggcgcaaatgcgcggcgccgtggcagacgccggcccgtggcaggtgctggtcagctcgccgctgcaacgctgtgggcgctttgccgatgagctgggtgcgcagttgaacctgcctgtgcagcgtgagcccgccctgcaggaactgcacttcggtgattgggagggccaaagtgccgcgcagatcatggagcaccaggccgatgcactgggccgtttctgggccgacccttacgccttcacaccgcccaatggcgagccggtcgaggcgtttgccgaacgggtgctggcggctgtcgagcgtttgcgccttcagcatgccggcaagcgcgtgctgctggtgacccatggcggcgtgatgcggctgttactggcccgtgcccgtggcttgcccagggagcagttgctgcaggtcgaggttggccatggcgcgttgatgcggctggtgccgggtggcgatgggcaactggtcgaggcgccc

SEQ ID NO: 31652 - DNA, 543 bp, Pseudomonas putida
atggcccgtggggttaacaaagtcattctggtcggtacctgtggccaggatcccgaagtccgctacctgcccaacggtaacgccgtgaccaacctgagcctggccaccagcgagcagtggactgacaagcagtcgggccagaaggtcgagcgtaccgagtggcaccgtgtgtcgctgttcggcaaggttgccgaaatcgctggcgaatacctgcgcaagggttcgcagtgctacatcgaaggcaagctgcagacccgcgagtgggaaaaagacggcatcaagcgctacaccaccgagatcatcgtcgatatcaacggcaccatgcagctgctcggcggtcgtccgcagggccagcagcagggcggcgacccgtacaaccaaggtggcggcaattatggtggtggccagcagcaacagtacaaccaggcaccgccacgccagcaggcccagcgcccgcaacaggcccctcagcgcccagcgccgcaacagcctgcgccgcagccggcggctgacttcgacagcttcgatgacgatattccgttc

SEQ ID NO: 31653 - DNA, 1263 bp, Pseudomonas putida
atgaaaaaagtaatgctcaaaacctccctcggcgtagccgttgcgcttgcttccagccaactgttcgccagcggcttcgcgctcaacgaacagagcatcagcagcatggggacaggtttcgcgggacgttcttcctctgccgaagatgccagtaccgtattcggcaacccggccggcatgtcccgcctcaagcgcgaacaattcaccgtgggcggcgctgccgtcatcgccaaaaccgacatatcgggcccaggcagcaacctcgggggggaaaccgatggtgacatggtgcctgtcgttggcgtacccatgggttactacgtaaaaccgatcgatgaccactggagcgtcggtttcggtatctacgtaccgttcggcctggtaaccgactatggcagcgatgatgccgcgcgttactggggcaagaagagccacgtacaggttgtcaccttccagccgactgtcagctatgccttcaacgacaaggtctcgatcggttttggcccaaccatcaaccgcatcgaaggcgaactgggctctagcctgatcaacccgttcaccccgggccgcaacgacggcgaagtgaagatcaagggcgacgatacagccgttggctacaacatcggcatcctggtacaggccaccgaccgcacccgcgtaggcctcacctaccactcgatggtcgactacgagctcgagggcaagacccgtgtcagcaccccgctgatcgggccattcaacggcaacaagtttgacgccagcctgaagatcaagacgccagaatccgtcgacctttcggttacccatgagctggatgaccagtggaccctgtacgcaggcagcacctggacgcgctggagccgcctggaaaacatcaccgtgcaaaacgatgtcccggcgccactggcaggttcggcgttccagaccatcaccgaagagcagaactggcatgacacctgggctcacgccattggtgcatcgtacaaggtcaacaaggagtgggtactgcgtaccggcttcaccgtcgaccagtcgccaaccaacaaccacgaccgctcgccgcgcatcccgactggcgaccgccggattttcagcctcggggccggctggagcccgaacgacgacatgaccatcgacgtcgcgtactcctacctgtgggaggaagacaccaaggtcaatcaggtcagcgcaaccaaaggcagctaccaggccaagtacgagaacagcgctcacggtatcggtgcatccctcacctaccgcttc

SEQ ID NO: 31654 - DNA, 1176 bp, Pseudomonas putida
atgctcgccgccataaaacgctacccgcacaccgttcgcctgctgctcaccaccaccttcacgcttaccgtcgcccgcgccctcaccctgccctacctggtggtttacctggctgacaatttccagctgccgatcagccagatcggcctgctgatcggtggcgcgctgatcgttgcctcgctattgagtctgtacggtggtcatctggtcgacaccttgagcaaccacacgctggtcagcgccagtaccctgctgttcgccctggccttcgtcggcgcggtcgccagccgttcggcactgccgttcttcttttgtctggtgttgatcaacctggccctggcagtggtcgacatcgccgccaaggcaggcttctgcgcgttactgccggtggatgagcgggccgaggtattcgccatcaagtacaccctcagcaacgtcggctacgccgccggcccgttgctgggcgtggccatgcttgaactgaacgaccatgtgccgttcctcgcctctgcgctgcttggcctggccatgtgcctggcttattggcgcctgggtgatcgcagcctgcaggccagcgcgccggacaaacctgcggccggcttcggccaagtggcgctggggctggcgcgggatcgtcggctggtgtgctttaccgtgggaggggtgctgagcgcggtggtgttcggccagttcaccgcctacctgtcccagtacctggtggtcaccagcaacccggccgaagcggcacggctgatcggctatctggtcaccaccaacgccgtgacggtcattgccttgcagtacctgattggccggcgtatcagccgccagcgcctgatgccgtggctgttggccggcatgggcctgttcatcgccggcttgctgggttttgcgctggcaggctcggtactggcctggtgcctggcgatgctggtgttcacgctgggcgaaatcatcgtgatcccggccgagtacatgtttatcgacctgatcgcaccggagcacttgcgcggggtgtattacggcgcgcagaacctgtccaacctgggggcggcgctgggcccggtgatggtgggttttgcactggtacacctgtggccgggggcagtcttctacctgctggtgttgtcggtgatactggcaggggtgttctattggttgggtacccgaaggggt

SEQ ID NO: 31655 - DNA, 1329 bp, Pseudomonas putida
atgtccaccacgcccgccacccccaaggtaggtttcgtaagcctgggttgcccaaaagccctggtcgactccgagcgcatcctgacccagctgcgcatggaaggctatgaagtcgtacccacctacgaggacgccgacgtggtggtggtcaacacctgcggcttcatcgacagcgccaaggccgaatcgctggaagtgatcggcgaagccatcaaggaaaacggcaaggtgatcgtcaccggctgcatgggcgtcgaagaaggcagcatccgtgacgtgcacccaagcgtgttgtcggtcactggcccgcagcagtacgagcaggtagtcaacgccgttcacgaagtggtgccgccgcgtcaggaccacaacccgctgatcgacctggtgccgccacagggcgtcaagctgaccccgcgccactatgcctacctgaagatctccgaaggctgcaaccacagctgcagcttctgcatcatcccgtcgatgcgcggcaagctggtcagccgcccggtgggtgaagtgctgagcgaggccgagcgcctggtcaaggccggagtcaaggaaatcctggtgatttcccaggacaccagcgcctacggcgtcgacgtcaagtacaagaccgacttctggaacggccgcccggtcaagacccgcatgctcgagctgtgcgaagcactgagcagcctgggcgcctgggtacgcctgcactatgtgtacccttacccgaatgttgacgacgtgatcccgctgatggctgccggcaagatcctgccgtacctggacatcccattccagcacgccagcccgaaagtgctcaagtcgatgaagcgcccggccttcgaagaccgcaccctggcacgcatcaagaactggcgcgagcaatgccctgagctggtgatccgttccaccttcatcgtcggcttcccgggcgagaccgaggaagacttccagtacctgctggactggctgaccgaagcccagctcgaccgcgtgggctgcttccagtactcgccggtagaaggcgccccggccaacgacctgggcctggccgaagtaccggacgacgtcaagcaagagcgctgggaccgcttcatggcccaccagcaggccatcagtgctgcccgcctgcaattgcgcatcggcaaggaaatcgacgtgctgatcgacgaagtcgaggaacaaggttcggttggccgcagcttcttcgatgcaccggaaatcgacggcagcgtgttcatcgatggcgaccatggtttcaagccaggcgacaaagtgcgttgccgtgtggtggatgccgacgagtacgacatgtgggctgaacccatc

SEQ ID NO: 31656 - DNA, 1999 bp, Pseudomonas putida
atgcccagccgtcgtgaacgtgccaacgccattcgtgccctcagcatggatgccgtgcaaaaggccaacagcggccacccaggtgcccccatgggcatggcggatatcgccgaagtgctttggcgcgactacctgaagcacaacccgagcaacccgagcttcgccgaccgtgaccgcttcgtgctgtccaacggccacggctcgatgctgatctactcgctgctgcacctgaccggctacgacgtcaccatcgatgacatcaaaggcttccgccaactgcacagccgcaccccgggccacccggaatacggctacaccccaggcgttgaaaccaccaccggcccgctcggccagggtatcgccaacgccgtgggcttcgccctggccgaaaaagtactggctgcccagttcaaccgtgacggccacaatatcgtcgaccacaacacctatgtgttcctcggcgacggctgcatgatggaaggcatctcccatgaagtcgcctcgctggccggcaccctgggcctgaacaagctgatcgccttctacgatgacaatggcatctccatcgacggcgaagtgcacggctggttcaccgacaacaccccggcgcgcttcgaagcctacaactggcaggtgatccgcaacgtcgacggccacgatgccgaagaaatcaagatggccatcgagaccgcccgcaagagcgatcgcccgaccctgatctgctgcaagaccaccatcggtttcggttcgccgaacaagcagggcaaggaagactgccacggtgccccgctgggcaacgacgaaatcgccctgacccgccaggccctgaactggaaccacggcccgttcgaaatcccggccgacatctacgccgagtgggatgccaaggccgccggtgccaaggttgaagccgagtggaaccagcgcttcgacgcctacgccaaggcctacccggagctggctgccgagttcaagcgccgtgccagcggcgagctgccggccgacttcagcgaaaaggcccaggcctacatcaacgaagtggctgccaaaggcgaaaccatcgccagccgcaaggccagccagaacgccctgaacgccttcggcccgctgctgcccgagttcctcggcggttcggcggacctggccggctccaacctgaccctgtggaaaggttgcaagggcgtcgaagccaatgacgccagcggcaactacgtgttctacggcgtgcgcgagttcggcatgaccgccatcatgaacggcgttgccctgcacggtggcctggtgccttacggcgcgaccttcctgatgttcatggaatacgcccgcaacgccgtgcgcatgtcggccctgatgaagcagcgcgtgatccacgtgtacacccacgactccatcggtctgggcgaagacggcccgacgcaccagccgatcgagcagctgaccagcctgcgcagcaccccgaacctggacacctggcgcccggccgacgcggtggaatccgccgtgtcctggaaaaacgccctggagcgcaaggacggcccatcggcgctgatcttctcgcgccagaacctgcagcaccaggatcgcgatgcccagcagatcgccgacatcagccgcggtggttatgtgctcaaggactgcgccggcgagcctgaactgattctgatcgccaccggttccgaagtgggcctggctgttcaggccttcgaacaagctgaccgagcaaggccgcaaggtgcgcgtggtttccatgccatgcaccagcgtgttcgatgcccaggacgctgcctacaagcagtccgtgctgccgctggaagtcggtgcgcgcatcgccatcgaagctgcccacgccgacttctggtacaagtacgtcggcctggaaggtcgtatcatcggcatgaccacctacggtgagtcggcgccggcttcggcattgttcgaagagtttggcttcaccctggagaacatcctcggtactgccgaagagctgctggaagactga

SEQ ID NO: 31657 - DNA, 1161 bp, Pseudomonas putida
atgaccgtgttgaagatgaccgacctcgacctgcaaggtaagcgcgtactgatccgcgaagacctcaacgtgcctgtgaaggacggtgtggtagccagcgatgcgcgtatcctggcagcgctgccgaccatcaagctggccctggagaagggcgcagcggtaatggtctgctcgcacttgggccgcccgaccgaaggcgaattctctgccgagaacagcctcaagccggtcgccgattacctgagcaaggccctgggccgcgacgtgccgctggttgccgactacctggacggtgtcgcggtacaggccggtgaactggtgctgttcgagaacgtgcgcttcaacaagggcgagaaaaagaacgccgacgagctggcgcagaaatacgcagccctgtgcgacgtattcgtcatggacgctttcggcaccgcacaccgcgccgaaggctcgacccatggcgtcgccaagttcgccaaggtggccgctgccggcccactgctggcagccgaactggatgccttgggcaaggccctgaaagccccggccaagccaatggcggccatcgttgccggctccaaggtttccaccaagctggacgtgctgaacagcctcagcagtgtttgcgaccagctgatcgtcggtggcggtattgccaacactttcctggccgctgccggccacccggtgggcaagtcgctgtacgagcctgacctggtggacaccgccaaggccattgccgccaaggtcagcgtgccgctgccagtcgacgtggtggttgccaaggagtttgccgagagcgccgaagccaccgtcaaggccattgccgacgtagctgccgacgacatgatcctggacatcggcccgcaaaccgcggccaatttcgccgagctgctgaaatcgtcgaaaaccattctttggaatggcccggttggcgtgttcgaattcgatcagttcggcaacggcaccaaggtactggccaaggccatcgccgacagcgccgcgttctccatcgccggtggcggtgacaccctggcagccatcgacaaatatggcgtcagcaaggaaatctcctacatttctaccggtggtggcgccttcctcgagttcgtcgagggcaaggtcctgccagctgtggcaattctggaagagcgggccaaggcc

SEQ ID NO: 31658 - DNA, 1049 bp, Pseudomonas putida
atggcactcattagcatgcgccagatgctggaccacgccgccgagttcggctacggcgtaccagctttcaacgtcaacaacctcgagcagatgcgcgccatcatggaagcggccgacaagaccgactccccggtgatcgttcaggcttcggccggtgcccgcaaatacgcgggtgcgccattcctgcgccacctgatcctggctgccatcgaagagttcccgcacatcccggtgtgcatgcaccaggaccacggtaccagccctgacgtctgccagcgctcgatccagctgggcttcagctcggtcatgatggacggttcgctgggtgaagacggcaagaccccgaccgactacgagtacaacgtccgcgttacccagcagaccgttgccatggctcacgcctgcggcgtttcggttgaaggcgaactgggctgcctgggctccctggaaaccggcatggccggtgaagaagacgggatcgcgccgaaggcgtgctggatcacagccagatgctgaccgacccggaagaagccgccgacttcgtcaagaagacccaggtcgacgccctggcgatcgccatcggtaccagccacggtgcctacaagttcaccaagccaccaaccggtgacgtgctggccatcgatcgtatcaaggaaatccacaagcgcatccccaacacccacctggtgatgcacggttcgtcctcggtaccgcaagagtggctggcgatcatcaaccagtacggcggcgacatcaaagaaacctacggtgtaccggttgaagaaatcgttgaaggcatcaagcacggcgtgcgcaaggtcaacatcgataccgacctgcgtctggcctctaccggtgccatgcgccgtctgatggcgcagaacccgagcgagttcgacccacgcaagttcttcggtgaaaccatcaaggccatgcgcgacgtgtgcatcgcgcgttacgaagccttcggcaccgcgggcaatgcctcgaagatcaagccgatctctctggaaggcatgtaccagcgctacctgaaaggtgaactggcc

SEQ ID NO: 31659 - DNA, 444 bp, Pseudomonas putida
gtgaacctgctgcgcgagcgctatcgagttgacctggtcgggctgcaggcagcctgcgaggccaactatgcccggctgatgcgcttgttgcccgacatgcgcaccacccagagctcgcgccgcatcggcatgacccagggtgaccagatgcttggcgtgctggtgctcgacgtggtgctggcctgcccgtataccaccaccctgcatgtgcgccaggaacacagcctgccgtggttgccagtgccacacctggaagtgcaggtgtatcacgatgcgcgcatggccgaagtggtcagcgccgaacacacccggcgcctgcgcagcatctacccgtatccgaacgatgccatgcaccagccggacgaaaaggcccagctcaacctgttcctgggtgaatggctcagccactgcctggcctgcggccacgaactggcaagtgttcgc

SEQ ID NO: 31660 - DNA, 654 bp, Pseudomonas putida
gtggccgatagctggccaccgttcaccgatgccaagatgccgggcggtggccttgcgaccagcatcgttaccacggcactggcgcgtgccggctacgccagcggctatgaagaggtgccgtgggcgcgtgcgttgctgggggtaggtgaagggcgctacgacgtgctgatcaatgcctggtacaacgactcgcgcgccaatatcgggcaattctccagcgcctacctgagtaatcgtattcgcctgctgcagcgtaagggcgaggcgtttagctacaagcgtctgtctgacctttatgcctatagcattgccgtagtgcgtgattacgcctattcaccggaattcgacggggatccccgtctgcacaaagtgccggtgcgcaacttttcttctgcggtacgcatgttggcggcagggcgggtaagcctggcggtggaagacgagtacgtggcccgctacaacctgcagcgtgagccgcaggacgtgcgtgatggggtgatgctggtggatccgccgctgggggagaacaccctgcatattctggtcagcctgaagcacccggagcatgatcggatcgtcgagcgcttcgagcaggcgatagcggcgatgaaggccgatggcagctatgcccggctgctgcgtcagtacggcttt

SEQ ID NO: 31661 - DNA, 798 bp, Pseudomonas putida
ttgtcgccgccagaccaatcccgccccgtgcatgtggtgcaactgaccgatgcccacctgttcgccgacccggctggcagcatgctgggcctcaagacccgagacagcctgcgccacgtgttggcccaggtgcggcgcgagcagccgcttgtcgacttgctgctgtgcacgggcgacctgtcccaggatgccagcgtggcatcctatgaagcgtttcgggagctgaccgcaccgtttgccgtacccactcgctggctgccgggcaaccatgacgaggctcaggtgatggcgcaggtggcgcctgaactggtgcaggcggtgactgatatcggcgcgtggcgggtggtcatgctcaacaccgccgtgcagggtgctacccacgggtttctgcaagatgaccagctggccgtactggaagccgccttgaaagaggccggcgagcggcattgcctggtgtgcttccaccatcagccagtggacatcggctgcgcctggatcgcgccgatcggcttgcgcaatgcccaggcgctgttcgatatcgttgaaggatatccacaggtacgggctttgctatgggggcatgtgcatcaggaatgggatgaggttcgagaggggcggcgcctgttggccacgccgtcgacctgcattcagttcgcggcgcgcagcgaagacttccaggtgagcgaagagcatccggggtaccgctggttgcgcctgcatgccgacgggcggctggagaccggggtggagcgggcgctggatttcgaggtgcagctcgacttcgacagcccagggtat

SEQ ID NO: 31662 - DNA, 576 bp, Pseudomonas putida
atgttgaaaaagacttttgccgctctggcgctcggtaccgctctgctctctgctggccaggccatggctgccgagtacaagatcgacaaggaaggccagcacgcgttcgttgactggaaaatcagccacctgggctacagcttcatccacggtactttcaaggatttcgacggcaacttcagctgggacagtgccaagcctgaagccagcaagatcagcgtcgacttgaaaactgccagcctgtggtcgaaccacgccgagcgtgacaagcacatcgccagcgccgacttcctcgacgtgaagaagtacccggacgccaaattcgtctccaccagcgtcaagtctactggcgacaagacggctgacgtgactggcgacctgaccatgcacggtgtcaccaagccggtgacgttcaaggctaccttcaacggtgaaggcaaggacccatggggtggcgagcgcgctggcttcaacgccaccaccacgctgaacctgaacgacttcggcatcaaaggcccgggtgctacttcgcagaccctggacctggatatcagtgtcgaaggtgtgaagcagaag

SEQ ID NO: 31663 - DNA, 834 bp, Pseudomonas putida
atgaactatcgtcacgccttccacgccggcaaccacgccgacgtcctcaaacacatcgtgctgacccgcctcatcgccctgatgtcgcgcaaggagcagccgttcgcctatatcgatacccacgcagggctcggcctgtacgacctgcaaggcgaccaggcaagccgtaccggcgagtacctggaaggcgtagcccgcctgtggaatcgcgatgacctgccggccatggccgacgactacctgcgcatcatcaagcgcctgaatgccgatggcgagctgcgctactacccggggtcgcccgaactggcccgtcgcctgatgcgccagcaggaccgcgccctgcttaacgaaaagcaccccgaagacgggccgctcctcaaggaaaacatgaaaaaagacccgcgcgtgaccgtgcacctgggtgaaggctggcatgtgccgcgggccttgctgccggtgcaggaaaagcgcgcgatcatgctgatcgacccgccgttcgagcaggccgatgagctcaaacgctgcaccacggccatgaaagaggcgatcggccgcatgcgccagaccgttgcggccatctggtacccgatcaaggaccagcgctcgctgacccgctactaccaggacctgacaagcactggcgcgccaaagctgctgcgggtcgagctgtatgtgcatcaccaggacagcccgcagggcctgaatggttcgggcttggccattgccaacccaccatgggggctggaggatgaactcaaggagctgctgccatggctggccaaagagctggcacagaccgccggtagttaccgcatggactggctgatcgccgag

SEQ ID NO: 31664 - DNA, 1806 bp, Pseudomonas putida
atggccgaaacaccgcgaccagcggagcacacctccagcctgaagatctacttccggctgttgagctatgtgaaaccctatgtcggcattttcctgctgagcattgtcggtttcgtgatctttgcctcgacccagccaatgctggccggcatcctcaagtacttcgtcgatgggctgagcaaccccgaagcggtattgttccccaacgtcccctacctgcgcgacctgcaactgctgcaggcggtgccgctgctgatcatcctgatcgctgcgtggcagggcctgggctcgttcctcggcaactacttcctggccaaggtctctctgagcctggtgcatgacctgcgggtggcattgttcaacaagctgctggtgttgcccaaccgctacttcgacaaccacaactccgggcacctgatttcgcgcatcaccttcaatgtgaccatggtcaccggcgccgctaccgacgccatcaaggtggtgatccgcgaaggcctgaccgtggtgttcctgtttgcctacctgctttggatgaactggcacctgaccctggtgatggtcgccatcttgccggtgattgcggttatggtcagcatcgccagcaagaaattccgcaagcagagcaagaaaatccaggtagccatgggcgacgtcacccacgttgcctcggaaaccatccagggttaccgcgtggtccgtagcttcggtggcgaggcctacgaacagcagcgattcggccaggccagccagagcaacaccgacaagcaactgcgcatgaccaagaccggctcgctgtacacgccgatgcttcagctggtgatctacagcgccatggctgcgctgatgttcctggtgttgttcctgcgcggggactctactgctggtgacctggtggcgtatatcaccgctgccggcctgctgcccaagccgattcgccagttgtcggaagtcagctcgaccatccagaagggcctggcaggtgccgagagcatcttcgagcaactggacgaagcgcctgaagtggacactggtacggtcgagaaggaacgcgtggaagggcgcctggaagtgcgtaacctgagctttacctacccgggtaccgagcgtgaagtgctgagcgatatcagttttgtcgccgagcccgggcagatgatcgccctggtcggccgctccggcagtggcaagtccaccctggcggcgctgatcccgcgcttctatcaccacgacaaggggcagatcctgctcgatggcgtggagatcgagcactatcgcctgcgtaacctgcgtcgccatgtttcgcaagtcacccagcatgtcaccctgttcaacgacaccgtggccaacaacatcgcttatggcgatctggccggcgcgccgcgcgcagacatcgaagccgccgcggccgatgcctatgccaaggaattcgtcgaccggctgccaaagggcttcgataccgaagtgggtgagaacggtgtactgctttccggtggccagcgccagcgcctggcaattgcccgtgcgctgcttaaaaacgcgccgttgctgatcctcgacgaagcgacttcggcgttggataccgagtccgagcggcatatccaggccgccctggaccacgtgatgcaaggccgtaccacgctggtgattgcccatcgcctgtcgaccatcgagaaggctgaccagatccttgtcatggaccagggccgcctggtcgagcgcggtactcacaccgagctgcttgcggctaatggccattatgcccgtttgcatgccatggggctggatgagccggccaaggccgatatcacc

SEQ ID NO: 31665 - DNA, 1407 bp, Pseudomonas putida
atgccgcgtttcgatcaagccccggtactggtggtcggcgatgtcatgctcgaccgctactggcatggcggtacttcgcgtatttcgcctgaagcgccagtcccggtggtcaaggtcgatcagatcgaggatcgccccggcggcgcggccaacgttgccttgaacattgctgcgctgggcgcgccggcttcgctgatcggcgtcaccggccaggatgaggctgctgacagcctggccaacagcctgcaggctgccggtgtccgttcggtgttccagcgcatcgcgcaccagccgactatcgtcaagctgcgggtcatgagccgtcaccagcagctgctgcgtatcgatttcgaagagccgttcgccaccgacccactgtcgctgggcgcggaggtcgacagcctgctcgaaggcgtcaaggtgctggtcctgtccgactacggcaaaggcgcactgaaaaatcaccaaaacctgatccaggcggcgcgggccaagggcattccggtgctggccgaccccaagggcaaggacttttccatctaccgtggcgctagcctgattaccccgaacctcagcgagttcgagaccatcgtcggccgttgcgtcgatgaggccgaactggtcgccaagggcttgcagttgctgcaggacctggacctgggcgccttgctggtcacccgcggtgagcatggcatgaccctgttgcgtgttggtcagccggcgttgcacctgcctgcgcgggcacgcgaagtgttcgatgtgaccggtgccggcgatactgtcatttccacccttgccgcggccattgccgcgggtgaggacctgccccatgcggtggccctggctaacctggcagcgggcattgtggtcggcaagctgggtacggctgccatcagcgcccctgagctgcgccgggccatccagcgtgaggaaggctccgaacgcggcgtgctgggccttgagcaactgctgctggccattgatgacgcgcgggcgcacaacgagaagatcgtctttaccaatggctgcttcgacatcctgcatgccgggcatgtcacttacctggagcaggcgcgggcccagggtgatcgcctgatcgttgcggtaaacgacgatgcctcggtaagccgcctgaaagggccgggccggccgatcaacagcgttgaccggcgtatggccgtgctggccggtctgggcgcggtggactgggtgatcagtttcccggaaggcaccccggaaaacctgctgagccaggtcaagccggatgtgttggtgaaggggggcgactatggcatcgaccaggtggtgggtgctgatatcgtcaagggctatggcggcaccgtgaaggtgctggggctggtcgagaacagctcgaccacggcgattgtcgagaaaattcgcaagaac

SEQ ID NO: 31666 - DNA, 813 bp, Pseudomonas putida
atgcacagctggatcgacggccagccggcgactgcactcaacctgcagaaccgcggcctggcctatggcgatggcctgttcgaaaccatcgctgtgcgaggcgcccggcccagcttgctggacggccacctcgcacgcctggcactgggctgccagcgcctggcgatcaacgccgatctggcgctggtgcgcgacgagctgctgcgctacgccagccagctgggtgagggtgtcgtcaaactcatccttacccgtggcgatagccagcgtggctatgcgccagctgtcgatgcagcgccgcggcgtatcctgcaaggcagcccattaccccgttatcctgtcgagcatgctgagcatggcgtgcgtttgttcccttgccatacccggcttggggaacaaccactgctggccggcctcaaacaccttaaccgcctggagcaggtgctggcccgtgccgaatggcaggacagcgaccatgccgaaggcctgatgcgtgacgcgcagggcagggtgatcgaaggggtatacagcaatctgtttctggtgcgcgatggcgtgctgcttaccgccgaccttagccgttgtggcgtggcgggcgtgatgcgtgccgcactgctggaacaggccccgctgctgggtattgcggtacaggtctgcgacctgtcgttcgaggcgctggagcaagcgaatgaagtatttgtttgcaatagcgtttacggcatttggcccgtgcgtggcgtagccgcgctaaactggtcgccgggcccgctcactcgtaaactgcaggccgttgcccgtacgttactggaaacc

SEQ ID NO: 31667 - DNA, 366 bp, Pseudomonas putida
gtgagcggcttgtttattactttggaaggccccgaaggcgcgggcaagagcaccaatcgcgactacctggccgcgcgcctgcgcgagcacggcctggacgtggtgctgacccgtgagccaggcggtacgccgctggcggaaaaggtgcgtgaactgttgctgacgcccagcgacgaaggcatggcggccgacaccgagctgctgctggtgttcgccgcccgcgcccagcacctggcgcaggtcatccgcccggcgctggcccgcggggctgtggtgctgtgtgaccgtttcacgcaggggctatattcttttaatgctcaaggtaaacatgaagagaaatttgatggtgagctaggtttggtcgcc

SEQ ID NO: 31668 - DNA, 462 bp, Pseudomonas putida
atgcgcgtcctgttcgtgtgcctgggcaacatctgccgctcgcccaccgccgaaggcgtgctgcgccatcaattgcacgccgccgggctcgctgacaaggtgcaggtggcttctgccggcaccggcgattggcatgtcggcaaggcgccagacagccgcacctgcaaggcggcgctggcgcgcggttacgacctgtcgcagcaacgcgcccaacaggtcaaggcatcgcacttcgccgaatacgacctggtgttggccatggatgagcacaacctgcgcgatctgcgcgccctgcgcccgtccacggcagtgggcgaactcgacctgttcctgcgccgctacggtgcagccctggatgaagtgccagacccgtactacggtggcgccgacggcttcgagcaggtgctggatctggtggaagcggcttgccaggcgctggtactggaaatcaaggggcgtcta

SEQ ID NO: 31669 - DNA, 1092 bp, Pseudomonas putida
atggccgccttgaagacctgttgccttaggcatttcgccgatgaagtgcttaaatgtgaccgcttggtctgtgtttccatccaagttttcagattccgcgcctggcctcgggcctggcgcacactatccgacgacaagatcataagggcttgttcaatgtctgcatccctcgcattcgtctttcccggtcaaggttcccagtcgctgggcatgctcgccgagctcggcgccgagaagccagtgatcatcgaaaccttcaaggaagcgtccgaagcgctcggctacgacctgtggaagctggtccaggacggcccggaagagcaacttaaccagaccgacaagacccagccggcgatccttactgcgtccatcgcactgtggcgcctgtggctggaagagggcggtgccaagccggccttcgtttccggtcacagcctgggcgaatacagcgccctggtcgccgccggcagcatcagcctgaaagatgccgttcgcctggtcgagcgccgcggtcagctgatgcaggaagccgtaccggccggtcacggcgccatggctgccattctcggcctggacgatgctgtggtcgtggaactctgcgccgaagccgctgaagatgaagtggtcagcgccgtgaacttcaactcgcctggtcaggtggtcatcgccggtaacaaggcggcggtagaccgcgccatggagctgtgcaaggccaaaggtgccaagcgcgccctgccactggcggtgagcgtcccgtcgcactgcgccctgatgaagccagccgccgagcgctttgccgaatcggtcaatgccatcgaatggaaggccccgcagattccggtggtgcagaacgtcactgcagccgtcgccgccgacctcgatgccctcaagcacgacctgctggcacagctgtaccagccggtacgctgggtcgagtgcgtgcagaccctggccgccaacggtgcggtcaacctggtcgagtgtggcccgggcaaggtgctggctggccttaacaagcgttgcgccgacggcgtgaccacctacaacctcaacacccctgacgccgttgctgccacccgcgcggcactggcc

SEQ ID NO: 31670 - DNA, 984 bp, Pseudomonas putida
gtggctgaggcctacccttggcagcaggcgctgtggcagcaactggccggtcgcagccgccacgcccacgcttacctgctgcatgggccgcagggtattggcaagcgagccatggccgagcgtctgatggcgcgcctgttgtgccagcagccgcagggcctggacgcttgtggggcgtgtaagtcgtgcctgttgctcaaggccggcagccacccggacaacttcgtcctcgagccggaggaggctgacaagccgatcaaggtcgaccaggtacgcgagctggtggcctttgtggtgcagaccgcgcagttaggcgggcgcaaggtggtgttgatcgagccggtggaggcgatgaatgtcaacgcctccaacgccctgctcaaaagccttgaagaaccttccggtgataccgtgttgttgctggtgacgcaccagcccagccgtctgttgccgacgatcaagagccgctgccagcaggtggcctgtccgcagcccagtctggcccagagccaggcatggctggctggcgcgttacccgactgcgacgaggtcgagcgcgatgagctgctgacgctggcggcaggttcgccattgatggcggtcagcctgcaggcgcagggggttcgcgagcaacgcgcgctggtaaccgacggggtgaagaagctgctcaagcagcagcaatcgcccagccagctggccgatgcctggagcggtgtgccgttgttgctgctgttcgactggttctgcgattggacgcacctgatcctgcgctaccagttgacccaggacgaagaagggttaggcttggccgatatgcgcaaggtcgtgcaatacctggcgcagaagagccgccaggccaaggtgctggaggtgcaggcatggatcctcgaacagcgccagaaggtactgggcaaggccaacctcaaccgcgccttgttgcttgaatcgctgctggctcactggctgcaactgccgggtgcccgc

SEQ ID NO: 31671 - DNA, 234 bp, Pseudomonas putida
atgagcaccatcgaagaacgcgtcaagaaaatcgtcgccgagcaactgggcgtcaaggaagaagaagtgactgttgagaagtccttcgtcgatgacctgggtgccgattcgcttgacaccgttgaactggtgatggctctggaagaggaattcgagaccgaaatccctgacgaagaagccgagaagatcactaccgttcaagctgccatcgactacgtcaaagcccaccaggcc

SEQ ID NO: 31672 - DNA, 1242 bp, Pseudomonas putida
gtgtcgcgtagacgcgtcgtggtcaccggtatgggtatgctgtcgccactgggtaccgatgtaccgagcacctggcagggcattctggctggccgcagtggcatcggtccgatcgaacacacggacctgtctgcctactccacccgttttggcggctcggtgaaaggcttcgaggttgagcagtacctgtcggccaaagaggcccgcaagctcgacctgttcatccagtacggcctggcggctggtttccaggccgtgcgtaatgccggcctggaggtcaccgatgccaaccgcgagcgtattggcgtggccatgggctcgggtatcggtggtttgaccaacatcgaagaaaccagccgcaccctgcacgattcagggccgcgccgcatttcgccgttcttcgtgccgggttcgatcatcaacatgatctccggtttcctgtcgatccacctgggtctgcaagggccgaactatgccatcgccactgcgtgcaccactggcacccattgcatcggcatggccgcgcgcaatatcgcctacggtgaggctgacgtgatgatcgccggtggcgccgaaatggccgcttgtggtctgggcatgggcggttttggcgcttcgcgcgcactgtctacccgcaacgatgaacccagccgggccagccgcccgtgggacaagggtcgtgacggctttgtattgtccgacggtgccggagccctggtgctcgaggagctggagcacgccaaggcccgcggtgcgactatctatgccgagctggttggctttggcatgagcggcgacgcctaccacatgacctcgccacccgactctggcgagggcgctgcccgctgcatggccaacgccttgcgcgatgccggtatccagccggaagaagtcagctacatcaacgcccacggcacttctaccccggcgggcgatgtggccgaagtggcggcgatcaagcgcgtgttcggcgagcatgcctacaagctggcggtcagctcgaccaagtcgatgaccggtcacttgctgggcgccgcgggcgcggtggaggcgatcttcagcgtgctggccatcaatagccagatggccccgccgaccatcaacctggacgagccggacgaggggtgtgacctcgacttcgttccccaccaggcgcgcagcatgccgatcgacgtggtgctgtccaactcgttcggctttggcggcaccaacggctcgctggtattccgccggtttgccggc

SEQ ID NO: 31673 - DNA, 1359 bp, Pseudomonas putida
atgaccattacttccttcggcccggccaaccgcatcgcgcgctcggccgaaacccacccgctgacctggcgcctgcgtgacgacggcgagccggtctggctggccgagtacgaatcgaagaacggctacgccgcagcccgcaaggcgctggcgcaaatgtccgccgacgacatcgtgcagagcgtcaaggactccggcctcaaaggccgtggcggtgcaggtttccccactggcgtgaagtggggcctgatgcccaaagacgaatccatgaacatccgctacctgctgtgcaacgcggacgaaatggagccgaacacctggaaggaccgcatgctgatggagcaacagccccatctgctggtcgagggcatgctgatcagcgcccgcgccctgaaggcctaccgcggctacatcttcctgcgtggcgagtacaccaccgcagcgaaaaacctcaaccgcgccatcgatgaagccaaggccgccggcctgctgggcaagaacatcctgggcagcggtttcgatttcgagctgttcgtgcacaccggtgcaggccgctacatctgcggtgaagaaaccgcgctgatcaactcgctggaaggccgccgcgccaacccgcgctccaagccgcccttccctgccgccgttggcgtgtggggcaagccgacgtgcgtgaacaacgtcgagaccctgtgcaacgtcccggccatcgtcgccaacggcaacgactggtacaagtcgctggcccgcgaaggcagcgaggaccacggcaccaagctgatgggcttctccggcaaggtgaagaacccaggcctgtgggaactgccatttggcgttaccgcccgcgaattgttcgaagactacgccggtggcatgcgcgatggcttcaagctcaagtgctggcagccaggcggcgccggtaccggcttcctgctgcctgagcacctcgatgcgcaaatgtacgccggtggcatcgccaaggtcggcacccgtatgggtactggcctggccatggcggtcgacgacagcatcaacatggtgtcgctgctgcgcaacatggaagagttctttgcccgcgaatcgtgcggctggtgcaccccatgccgtgacggcctgccgtggagcgtgaagatgctgcgcgcgctggaaaacggccaaggccgcgccgaggacatcgagacgctgctggggctggtcaacttcctcggcccgggccgtaccttctgtgctcacgcaccgggtgccgtcgagccgctgggcagtgccatcaaatacttccgctcggagttcgaggccggcgtggcgccagaaagcgctgccaccctgcgccccgacctggcgaagccgatcgtggtcggcgca

SEQ ID NO: 31674 - DNA, 468 bp, Pseudomonas putida
atggccgccagcagcgtattcgccgtagccgccgccaccgattggctggacggctacctggcccgtcgactgcagcagagcacgccgttcggcgccttcctcgacccggtggccgacaagctgatggtggcagtggccctggtgctgctggtgcagacccacgccaacttctggctgaccctgccggcggcggtcatcatcggccgcgagatcgtggtgtctgcgctgcgcgagtggatggccgagctaggcgcgcgggcgcatgtggcggtgtccaacctcggtaagtggaagactgcggcgcagatgctggcgctggtgatcctgctgggcaacccgccggtggtgaccttctgggtgatcctgggctacgggctgctgctggtggcagcggggctgacgctgtggtcgatggtgcactacctgctggccgcctggccgcacctgcgcgaaggctcggaaaaaaaa

SEQ ID NO: 31675 - DNA, 1323 bp, Pseudomonas putida
atggcactgacacgcgaacagcaaattgcagccctcgagaaagactgggccgaaaacccgcgctggaaaggcgtgacccgtacctacaccgccgctgatgtcgttcgcctgcgtggctccgtgcaacctgagcacacctttgcgcgtcagggcgcagaaaaactgtggaagctggtcaccgaaggtgcccacccgtccttccgccccgacaaagatttcgtcaactgcatgggcgccctgaccggcggccaggctgtacaacaggtcaaggccggcatccaggccatctacctgtccggctggcaggttgccgccgacaacaactcggccgagtcgatgtaccctgaccagtcgctgtacccggtcgactcggtaccgaccgtggtcaaacgcatcaacaacgcgttccgccgcgccgaccagatccagtggaaagccggcaagaacccgggcgacgacggctacatcgactacttcgcgccgatcgtggccgacgccgaagccggtttcggtggcgtactgaacgcctacgagctgatgaagaacatgatcgaagcaggcgccgccggcgtgcacttcgaagaccagctggcctcggtgaaaaaatgcggccacatgggcggcaaggtgctggtgccgactcaggaagccgtgcagaagctggtggccgctcgcctggccgctgacgtgtcgggtgtaccgaccatcatcctggcgcgtaccgatgccaacgccgccgacctgctgaccagcgactgcgacccgtacgaccagccgttcgtggttggcgagcgcacccgcgaaggcttctacaaggtccgcgccggcctcgaccaggccattgcccgcggcctggcctacgccccgtacgccgacctgatctggtgcgaaaccgccaagccggacctggacgaagcccgtcgcttcgccgaggcgatcaagaaggagtacccggaccagatcctgtcgtacaactgctcgccttccttcaactggaagaaaaacctggacgacgccaccatcgccaagttccagcgcgaactgtcggccatgggttacaagcatcagttcatcaccctggccggcatccacaacatgtggcacggcatgttcaacctggcgcacgactacgcccgcaacgacatgaccgcctacgtgaagctgcaggagcaggaattcgctgacgccagcaagggctacaccttcgtggcgcaccagcaggaagtgggcactggctacttcgacgacatgaccaccgtgatccagggcggcgcttcgtcggtgactgcactgaccggttcgaccgaagaagagcagttccac

SEQ ID NO: 31676 - DNA, 600 bp, Pseudomonas putida
atgagcttcagccctctcatccgccaactgatcgacggcctgcgcatcttgccaggtgtcggtcagaaaaccgcccagcgcatggccctgcaactgctcgagcgcgaccgcagtggcgggctgcgcctggctcaggccttgacccaggccatggaaggggtagggcattgccgccagtgtcgcaccctcaccgagcaggagctgtgcccgcagtgcgccgacccgcgccgtgacgacacacagctgtgcgtggtcgaggggccgaccgatgtgtatgcggtggagcagactggctaccgtggccgttacttcgtgctcaaggggcacctgtcgccgctggatggcctggggcctgaggcaatcggtattccgcagctgatggcgcggatcgaagagcagggcacctttaccgaggtgatcctggcgaccaacccgacagtggagggggaggcgacggcgcattacattgcccagttgctgagcgagaagggcttggtggcgtctcgcattgcccatggtgtgccactgggcggcgagctggagatggtggacggcggtaccctggcccatgcctttgcagggcgccggcccatttcgctc

SEQ ID NO: 31677 - DNA, 2073 bp, Pseudomonas putida
atgagttatcaggttcttgcacgaaaatggcgtccgcgctcgttccgcgaaatggtcggccagacccatgtgctcaaggccttgatcaatgccttggacaaccagcgcctgcaccatgcctacctgttcaccggtacccgcggggtgggcaagacgaccatcgcccgtattatcgccaagtgcctgaactgtgaaaccggcatcacctccacgccctgtggcacctgttcggtgtgccgggaaatcgacgaaggccgtttcgtcgacctgatcgagatcgacgccgccagccgtaccaaggtagaggacactcgcgaactgctcgataacgtgcagtacgcccctagccgtgggcgcttcaaggtctacctgatcgacgaagtgcacatgctctcgacccactcattcaacgccttgctcaagacgctggaagagccgccgccctacgtcaagttcatcctcgccaccaccgacccgcagaagctgccggccaccatcctgtcgcgctgcctgcagttctcgttgaagaacatgagcccggagcgggtggtggagcacctcagccacgtacttgccgccgagaacgtgccgttcgaggaagatgccctgtggctgctggggcgggcggccgacggctccatgcgtgatgccatgagcctgaccgaccaggccatcgccttcggtgaaggcaaggtactggccgccgatgtacgtgccatgttgggtagcctcgaccatggccaggtgtatggggtcttgcaggcactgctcgaaggcgatgccagggctttgctggaggccgtgcgtaatctggccgagcaagggccggactggtcgggcgttctggccgaaatgctcaatgtgctgcaccgtgtagccattgcccaggcgctgcccgaagcggtagacaacggccagggtgatcgcgagcgggtattggcgctggcttcggcgctgccggccgaggatgtgcagttctattatcagatgggcctgattggccgccgtgatctgccccttgcgccggacccgcgcggtggcttcgagatggtgctgctgcgtatgctggcgttccgcccggcagacacggacgacgcaccgaagccggtgctaaagccaacggggatcagccaggccacagctgatcctgcagggcaggtggcagctgcggcgccggtcgcgctttcaccgcctgtcgcggctgtgccggcggagcctgttgcgcaagccccgcagctggaggtgccagcacccgcgacggctgatcatgagccggaggccgaggcagatgttgagctgaaggccgaagccgaggccatctccgtacctgagccggtcgccgaagtggtcgacctgccgtgggaagagcctgccgttgcccccgcgccgttagcggctgaacctgcgcctgaaccggcacctgcgcccgagcctgttgccccggtggcgcccacacaggccgccccggcacacgacgagccgcctttcgacccgtctgcctacgctgccgtggggatggagcgcgacgatgagccgccgcttgacgaagactattacggtggcgaaagcgatccggcaggtttcagctacctggacgaattggccgaacatgttcaggaagacgtgtccaaaccggctgccgaaccgttgccggcagccaaaccggccaccggcctggccttgcaatggctggaattattcccacagttgcctgtgtccgggatgacaggcaacatcgcggcaaactgtacgctgattgccgccgatggcgacgactggttgctgcacctggaccctggccagggggcgctgttcaacgccacccagcagcggcgcctgaacgaagcgctcaaccagcacctggggcgcacgctgaacctgcgcatcgagctgatcctgccagagcaggaaaccccggctcaggcggcggcacgcaagcgagccgagcgccagcaggacgccgtcgcgtcgatcgagcaggatccgttgatccagcagatgatcaagttgttcggcgccaaggtgcggcaggatactattgagcctgtagaagccctggctagtcagggccag

SEQ ID NO: 31678 - DNA, 12951 bp, Pseudomonas putida
atgacggacgccttcgaactcccgctctcgctggtccaggccctggcgcaacgcgccgcgcagaccccggaaaggattgccctgcgctttctcgccgacacacccggtgagcaggccgtgctcagctaccgggacctcgaccagcgtgcacgcaccatcgccgccgccttgcaggggcgcgccagcttcggtgaccgtgccgtgctgttgttccccagcgggccagattacgtggcggcgttcttcggctgcctgtatgcgggcgtgatcgcggtgccggcctacccgccggagtccgcgcgccagcagcaccaggagcgtttgctgtcgatcatcgatgacgccgagccgcgactgctgctgaccgtggcggcgctgcgcgacagcctgcagggcctggaagccctggcggcggacaacgccccccaactgctggcagtggatggcttggacccggccctggctgcgaactggcgtgaacccgtgctcaagggcgatgacatcgccttcctgcagtacacctccggttccaccgcgctgcccaagggcgtgcaggtcagccatggcaacctggtggccaacgagcaactgatccgccaaggctttggcatcgacctcaaccccgacgatgtgatcgtcagctggctaccgctgtaccatgacatgggcctgatcggcggcctgctgcagccgatcttcagtggcgtgccttgcgtgctgatgtcgccgaggtacttcctggcccggccgttgcgctggttgcaggccatcagcgaatacggtggcaccatcagcggtggccccgacttcgcttatcgcctgtgcagcgagcgggtcagcgaggcttcgctggccgggctcgacctgagccgctggcgcgtggcctattccggctccgagcctatccgccaggacagcctggccacctttgccgacaagttccaggcctgtggcttcgacccgcagagcttcttcgccagttatggcctggccgaagccaccctgttcgttagcggcagccgtcgtggccagggtatcgccgcgcttgagctggatgccaaagccttcgccgccaaccgcgccgaacccggcactggcagcgtgctgatgagttgcggcttcccgcagccggggcacgcggtacgcatcgtcgagccgcaacagttgcaagtgctgggcgacaaccaggtgggggaaatctgggcaggcggcccgagcatcgcccggggctactggcgcaacccagaagccagcgctcgaaccttcgtcgaaatggacggccagacctggctgcgtaccggcgacctgggtttcattcgtgagggcgaggtgttcgttaccgggcgcctgaaagacatgctgatcgtgcgcggacagaacctgtacccgcaggacttggaaaaagccctcgagcgtgaagtccaggtgctgcgcaaaggccgtgtggcggtgttcgccgtcgagcaccagggcgaggagggcatcggtgtcgcggtggagatcagccgcaacgtgcaaaaggcactcaagccccaggacctgatcaagaccctgcgccaggtcgtcgccgacgcctgccgacaggccccggccgtggtcctgctgctgaaccccggcgcgctgccaaagacctccagcggcaagttgcagcgctctgcctgccggctgcgcatggacgatggcagcctggactgctatgcccgtttccctgaggtgagcgcagccggtatccgtgcaaccgctggcgacgagctgcaagcacgcatcgccgctgtgtggcgcgacatcctcaaggtagaggcggtggccgcggacgaccacttcctgctgctgggcggtaactccatcgccgccacccaggccacagcgcgcctggccgatgagttgggtatcgacctgagcctgcgtaccctgttcgaggcgccggtactggccgactacagcaaggctgtggcacagatcatcgccgatggcgctgcagccaccacggccatcaccacgctggagcgcgcccaggcgttgccccagtcgctggcgcaaaaccgcttgtggctgctgtggcagctggaaccgcaatcagcggcctacaacattcctgccggcttgcacctgcgtggcgagctggatgtcaacgctctgcacgtggccttccaggcactggtggcgcgccatgaatcgctgcgtaccgtgttcagcgaagagaatggccaggcgctgcagcgtatcctgccgcagcagccgctcagcctgcaccgcctggaccttgaagggcactcgcccgagcaggttgccgcgcagcgtgaaaccgaggcccgccagccgttcgacctcacccaggggccgctgttgcgggtaaccctggtgcgcctgggggacgaagagcatcagctgtgggtgaccctgcaccacatcgttgccgacggctggtcgctgaacatcctgctcgaagaattcgccaagctgtatgccgctcgctgccaaggcctggaggccaacctggcgccgctgccgctgggttacgccgactacggcagctggcagcggcaatggctggctgacggtgaagccgagcgccagttgcagtactggaaggcacaccttggtggtgagctgccggcgctcgacctgtgcactgaccacccgcgcgccagccagcgcgaacacagcgccgcgcgcttcagcctcaaggtgccagtcaggcttggcgaagcgctcaagggccttgcccaccagcagcaggccagcctgttcatggtcctgctggccggttggcaggcgctgctgcagcgctacagtggccaggccgatatccgcgtcggcgtgcccaacgccaaccgcccgcgcctggaaacccaaggcatggtcggtttcttcatcaatacgcaggtgctgcgcgcgcgattcgatggccgtcactcgtttacccagttgctgacccaggtacgtcaggccaccttgcaagcccaggctaatcaggacttgcccttcgaacagcttgtcgaagccctgcccgatgcgcgcgaacagggcctgttccaggtcatgttcaaccaccagcaacgcgacctgtcagccctgcggcgcctgccagggctgttggccgaagagctggcgtggcacagccgcgaagccaagttcgacttgcagttgcacagtgaggaggaccatctgggccgcctgagcctggccttcgactatgccgcggagctgttcgaagccagcaccgtcgaacgtctggcccatcacctgctggcgctgctggaacaggtgtgtgccgcgccgcagcaggcgctgggcgacgtgcaattgctggatgagcccggccgtgcgcagctgctgggttggggccaggcaccggccgccgcagcgcagcacctgttggtcgaacaactcaatgagcaggtacgcctgacgccgcagcgcaccgccctggtttgggacgggggcagcctggattacgccgggctgcaccagcaagccaaccgcctggcccactacctgcgtgacaaaggcgtcggccccgatacctgtgtggccattgccatcgagcgctcaccgcaattgctggtcggcctgctagccattctcaaggccggcggtgcctacgtgccgctggatgtcgattaccctgccgaacgcctggcctacatgctggccgactgcgacgcccgtttgctactgagccacagcagcctgctgggcaagctgccgcaggtcgacggtgtcagcgccattgccctcgaccagttgcacctggacagctggcccagccatgcccccggcctgcacctgcacggcgataacctggcctacgttatctatacctccggctccaccgggcagcccaagggcgtaggcaatacccatgcggcgttggccgagcgcctgcagtggatgcagacgacctatgcgctgaatgacagcgacgtgctgatgcagaaagcgccgatcagtttcgacgtctcggtgtgggaatgcttctggccgctggtcaccggctgcaagctggtgctcgccggccctggtgaacatcgcgacccgcagcgtatcgctgccctggtgcaggcttatggggtgactacgctgcactttgtaccgccgctgttgcaggtgttcgtccaggagccgcaggcaagtgcctgcagtagcttgcgctgggtgttctcgggtggcgaagcgttgtccgccacgctgcgtgaccgcgtgctgcaggtgctgccgcaggtgcaactgcacaaccggtatggcccgactgaaaccgccatcaacgtcacccactggcactgtcaggtggtggacggcgagcgctcgcccatcggccgcccgctgggcaatgtgctgtgccgcgtgctggacgatgagctggaactgagcgcccccggtgtgccgggcgaactgtacctcggtggcgcgggcctggcccgtggttacttgggccgccccggcctcactgccgagcgcttcgtaccccaggccgacggcaatggtcagcgtctgtaccgcagtggcgatcgcgcccgctggcaggttcagctggaggccctggaataccttggccgcctcgaccagcaggtcaaggtgcgcggtttccgcgtcgagcccgaggaagtgcaggcctgcctgctggcacaggcgggtgtggaacaggcgctggtgctgatacacaaggacgccattggcgcgcaactggtcggctattacagtggcagcgcccagcctgccgaggtgctggccgtactggctgagcaattgccagcctacatggtgccggcgcaactcatccctttggcacagatgccattgggccccagcggcaaggtcgaccgcaaggcactgcctgccccagtgtggcagcagcgtgagcatgtcgagccacgaaccgagctgcaacaacaggtcgcggccatctggcgcgacgtgttgaatctgccgcgcattggcctgcaggacgacttcttcgccctcggtggtcactcgttgctggctacccagatcgtttcgcgcacccgccaggcctgcgatgtcgagctgccgctcaaggccctgttcgaagccagcgagctgggcgccttctgtgccgagatcgcccgcctgcgcgcggccggcgagcgcaacctgcaaggtgcaatcacccgtgtcgaccgccgtcaggcagtgccgctgtcgtactcgcagcagcgaatgtggttcctctggcagatggagccggacagcccggcgtacaacgtcggcggcatggcacgcctgcgcggcaccctgcacgtggacgccttcgagcgtgcgctgcaggcgctgatcgtgcgccacgaaaccttgcgcaccacgttccccagcatcgacggcgtgccgtaccagtgcgtggccgaagacagcggcctgcatctggactggcaagacttcagcgctttgtcagacgatgcctgccagcaacgtttgcaacaactggccgacgaccaggcgcaccagcccttcgacctggagcgggggccgctgctgcgcgcctgcctggtcaaggccaacgagcgcgagcacttcttcgtgctgacgctgcatcacatcgtcaccgaaggctgggccatggacatcttcgcccgcgaactgggcgagctgtacgaagcctttgtcgatgaccgcgagtcgccactggcgccgctgccggtgcagtacctggactacagcgtgtggcaacggcaatggctggaaagcggcgagggcgctcgacaactggcctactggaagcaccgcctgggcgacgagcacccggtgctggcgttgcctgccgaccgcccgcgtccggcagtccagagccaccgtggcgagctgtaccgcttcgaactcgatccggcactggtggcccgtgtgcatgctttcaatagccagcgcggcctgaccctgttcatgaccatgaccgccaccctggccgccttgctgcaccgttacagtggccagcgcgacctgcgtatcggcgcgccggtggccaaccgcatccgcccggaaagcgaaggcctgatcggcgctttcctcaacacccaggtgctgcgctgcgagctggacggccagatgaccgccagcgcgctgctggagcaggttcgccaggctgccatcgaaggccagtcgcaccaggacctgccgttcgaccaactggtagaggccctgcagcccccacgcagcagtgcctacaacccgctgttccaggtgatgtgcaacgtgcagcgctgggccttccagcaaagccgcacgctggccggcatgcaggtggactacctggtcaacgatgccagcgccaccaagttcgacctgtacctggaggtgaccgacctggacggccggctgggctgctgcctgacctacagtcgcgacctgttcgacgcgccgcgcatcgcgcgcatggccgagcactggcaacaactgctggtcggtttgctcgacaacccgcaacaccgcctgtgcgaactgccaatgctgagcagtgccgagcaacaagtgcttacaggccagttgcagggcgaacacgatttcgaccttggccagaccctccatggtctgttcgccgcccaggccgcgcgcacgccacaggctggcgcgctgaccttcgccggccagcacttgacctacgccgagctcgaccagcaggccaaccgcctggcgcgtgccctgcgcgaacggggtgtcggcccgcaggtgcgcgtgggcctggcgctggagcgctcgctggaaatggtcgtcggcctgctggccatcctcaaggccgacggcgcctatgtaccgctcgaccccgagtacccgctcgaccgcctgcgctacatgatcgaagacagccgcatcggcttgctgctcagccagcgtgcgctgctgcacaccctgggcgagctgcctgaaggcgtggccagctggagcctggaagacgatgccgccagcctggcggcctacagcgatgcaccgctggacaacctcagcctgccgcagcaccaggcttacctgatctacacctcaggctccaccggcaaacccaagggcgtggtggtcagccatggcgagttcgccatgcactgccaggcggtgatcgccgcattcggcatgcgcagcgatgattgcgagctgcatttctattcgatcaatttcgacgctgccagcgagcgcctgtgggtgccgctgttgtgtggtgcgcgcgtggtactgcgcgcccagggtcagtggggcgccgaggacatctgccagttggtgcgcgagcagcaggtgagcattctgggcttcacccccagctacggcagccagctggcgcagtatctgggcgggcggggcgaacaattgccggtacgcctggtgattaccggtggcgaggcgctgaccggcgagcacttgcagcgcatccgccaggcctttgcgccgcagcagtgcttcaatgcctacggcccgaccgaaaccgtggtcatgccgctggcgtgcctggccccagaggccttgccagcagaccttggcagcgtaccgatcggccgcgtcatcggtagccgtacggcctacatcctcgacgaggatctggccttgttgccgcaaggcggtattggcgaactgtacgtcggcggtgccggcctggcccagggttaccacgaccggccaggcctcactgccgagcgctttgtcgccgacccgttcagtgccgaaggcgggcgcctgtaccgtaccggcgacctggtacgcctgggtaccgatggcctggtggagtatgtcggccgtgccgaccagcaggtgaagatccgcggcttccgcatcgaactgggcgaaatcgagagccgcctgctagcgcacgaggatgtcgacgaggccgtcgtgctggcgctggacttgccgggcggcaagcagctggtgggctatctggtgtgcaggcaggccaccgccggtaacgacgtgcaacaactgctgcgcgaagcggtgaaagccgatgcccgccagcacctgcccgactacatggtgcctgcgcatctggtgctgctcgacagcctgccgctgatgggcaacggcaagctcgaccgccatgcgctgccgctgccggaccttgagcaggcgcggcagcaataccaggcccctggcaatgaggtggaagcacagctggcgcagatctggcgcgatgtgctcaacgttgcccgggtcggcgtgcaggacaacttcttcgagctggggggcgactcgatcctgtcgattcaggtggtcagccgcgcccgccaggccggcttgcaattcaccccgcgcgacctgttccagcatcagaccatccagaccctggcaactgtggttcagctcagcgaagccgcgagcacggtggagcagggtctgcgccagggccaggccgggttgacgccgatccagcactggttcttcgacagtgacgtgccacagccgcaacactggaaccagaccgtgctgctggaggtgcgccaacccttggttgaggccacccttgaacaggcattggctgcgctggtgcagcaccatgacagcctgcgcctgcgcttcagcgacgcccagggccgctggcaggcccagtacgtgcagcctggcgccgagcaactgctgtggagcgccactgtcgccgatttcaatgattgtcaggcactctacaccgacgtgcagcgcagcctggacctgcaacaggggccgctgctgcgcgccttgctggtgcgtgacgggcagggcacccagcggttgctgctggcgattcatcacctggttgttgatggcgtgtcctggcgggtgctgctggaagacctgcaggcgctgtaccgtggccagcctctgccggccaagacccacgccgtcggcgactgggctgcgcgcctggccagctacgccggcagcgattcgctgcgtgacgaactggcctggtggcaaggccagctgggcggtgtgcgtcgcgaattgccgtgcgaccatccgcagggcagcaatttgcatcgccacgctcaaaccctggccatcggcctggacgtggagcaaacccggcagctgttgcaactggccccggcggcttaccacacccaggtcaacgacctgctgttgactgctctggcgcgggccttgtgccgctggagcggcgatgaagaagtgctggtgcagctcgaaggccatggccgtgacgggctgttcgaagacatggacctgacccgcagcgtcggctggttcaccaatgcctacccactgagcctgcgtccgctgccaggtgaagacgacgcggcgcgggccggttcgatcaagcgcatcaaggaacaactgcgccatgtaccgcacaagggcctgggctacggcgtactgcgctacctggcggatgccgccgggcgcgagcagatggcggccttgccgcaggcgcgcatcaccttcaactacctgggccagttcgaccagcagttcgacagtgcggccttgttccagcccctggaggcctcggccgggttggcgcatgacctcgatgcgccgttgcccaactggttgagcgtcgatggccaggtgtatggcggtgctctgcaactgcgctggaccttcagcgccgagcgctacgaccagcagaccatcgcgcgtctggctgagggctatcgtcaggagctgctggcgctggtcgcgcattgcctggccgatggcaatggcagcttcaccccatcggacttcccgctggcgcacctgactcaggagcagatcgacgcattgccggtcccggccgcgcagatcgaggacgtttacccgctgacgccgatgcaggaaggcatgctgctgcacaccctgctggagccgggcactggcctgtactacatgcaggaccgctaccgcatcaacagcgcgctcgaccccgagcgtttcgcccaggcctggcaggccgtggtggcgcgccacgaagcgttgcgcgcctcgttcagctggaacagcggcgaggcgatgctgcagatcatccacaagccgggcaacctggcggtggactaccaggactggcgcggcctggccgacgatgcccaggagcagcgcctgcaggccctgcacaagcaggagcgcgaggccggctttgccttgctcagcgaggcaccgttccacctgcgcctggtgcgcgtggccgaggaacgctactggttcatgatgagcaaccaccacatccttatcgatgcctggtgccgctcgctgttgatgaacgatttcttcgaggtctaccaggcccttggcgaaggccgtcaggcccaactgccggtgccaccgcgttaccgcgattacatcggttggctgcaacgccagggcctggacgacgcacgtgcctggtggcaggccaacctggccggcttcgaacgtgccacagccatcccgagcgaccgcccgctgcgccatgaccacgccggtagcggcatggtcgtcggcgattgttatacccgccttgagatgaatgatggcgtgcgtctgcgcgaactggcccaggcccatcagctcaccgtcaacactttcgcccaggcggcctgggccctggtgctgtcgcgctacagcggcgaccgcgacgtggcctttggcgtaaccgtggccgggcgcccggtgagcatgccgcagatgcagcgcaccgtcggcctgttcatcaacagcgtggccctgcgtgtgcagttgcctgcggcgagtgagcgctgcagtgtgcgccagtggctgcaaggcctgctgcaaagcaacatggagctgcgcgagtacgaatacctgccgctggtggcgatccaggcgtgcagcgagctgcccaagggccagccgctgttcgacagcctgttcgtgttcgagaatgcgccggttgaaaccgccgtgctcaatcacgcccagcacctgaacgccagctccgactcgggccgtacccacaccaacttcccgctgacggcggtgtgttacccgggtgatgacctgggcctgcacctgtcgttcgaccagcgctacttcgactacccgaccgtcgagcgcctgctggccgaattcaagcgcctgctgctggcgctggtacaaggttttgaaggggaggtgagcgagctaccgctgctgagcgcccaggagcaaggcttcctgctggaggactgcaaccggaccgagcgggtttatccgctggagcagagctacatcgcgcagttcgaagcgcaggttgtggcgcatccacagcgtaccgtggcccgctgcctggaggcatcctatgattacgccgggctgaacctggcggccaaccgcctgggccatgcgctggtggctgccggcgtctgcgtggaccagccagtggcactgcttgccgagcgtgggttgccgctgctgggcatgatcgtcggcagcttcaaggccggcgccggctacctgccgctggacccgggcctgccggcggcgcgcctgcaaagcatcatccagctcagccgcacgccagtgctggtgtgcagcgcggcctgcgccgagcaggggcggcagttgctcggtgagctggaggcttcgctgcggccgcaactgctggtctgggaagacgtccaggccaacccgatcgcaagccacaacccgggcatccacagtggcccggacaacctcgcctacgtgatctacacctcaggctcgaccggcctgccgaaaggggtgatggtcgagcagcgcggcatgctcaacaaccagctgagcaaggtgccttacctggcgctcagcgagcaggacgtgattgcccagaccgcctcgcaaagcttcgacatctcggtctggcagttcctggctgcgccgctgttcggcgccaaggtagagatcgtgcctaatgtcatcgcccatgacccgcagggcctgctggcgcacgtgcaggccaccggcatcaccgtgctggagagcgtgccgtccctgatccagggcatgctggccagcgaccaccaggccctcgacggcctgcgctggatgctgccgaccggcgaggtcatgccaccggagctggcggcgcagtggctgcagcgctacccgcagatcggcctggtcaatgcctatggcccggcggagtgctcggatgacgtggcgttcttccgcgtcgatgccgcctcgacccaaggcagctacctgccaatcggcacgccaaccgataacaaccgcctgtacctgttcggcgaggaccaggcgctggtgccgctgggggcggtgggcgagttgtgcgtggcgggtgcgggtgtaggccgtggctacgtcggtgacccggtgcgcacggcactggcgttcattcctcacccttacggggcaccgggagagcgcctgtaccgtaccggtgacctcgcacggcagcgcctggacggtgtgctggagtacgtcgggcgcatcgaccatcaggtgaagattcgcggctatcgcatcgagctgggcgaaatcgaggcccggctgcatgagcaggcggaaattcgcgatgctgctgtggcggtgcaggagggagtgaacggcaagcatctggttggctacctggtggcgcaccagggcgtcagtgccgatgccgcgttgctggagcaggtcaagcaacgactgcgtgccgagttgccggagtacatggtgcccttgcactggggctggttcgacagcttgccgcacaacgccaacggcaagctcgaccgcaaggccctgccagccatcgacatcggcggtcagtacagtcaggcctatctggcgccacgcaacgaattggaggacgtgttggcgggtatttgggccgatgtgctcaaagccgagcgggtgggagtgcacgacaacttcttcgagctgggcgggcattcattgctggccacgcagatcgcttcgcgggtgcagaagcagctacagctgaacgtgccgctgcgggcgatgttcgagtgcagcacggtggaggcgttggccgagtatgtacaggggctgcagggcagtgcgctggatgatgacaaggtcgaccggctcagtgacctgatggcggaactggaggggctg

SEQ ID NO: 31679 - DNA, 891 bp, Pseudomonas putida
atggaaatcggtctgcgcgagtggctgatcctcatcggcatcattgttatcgccgggattcttttcgacggctggcgccgcatgcgcggcgggaaaggcaagttgaaattccgtctggatcgcagttattccaacctgccggacgaagagggtggcagtgccgaagtgctcggcccgtcgcgagtgctcgatacccacaaggagcctgagctggacgaaagcgacctgccgtcgctcagcgcgtctgcgcgtgatcgcgagcgtgagcccaagccggtcaaggccagcaagcgcggcaagcgtgccagtgcggctgccgatgtgcaccagggtgacctgaacctgagcgccgagccgcgcgagcccgacctgttttccgacagcgatgacgactttgccgccgacaacaaccgtagcagcggcgcagcgcctgccagcaacagcgtcaaggagttgccgcctgccgaagaggtgctggtcatcagcgtgatctcgcgcgacgagggtggcttcaagggcccggcgctgctgcagaacatcctggaaagcggcttgcgcttcggcgaaatggacatcttccaccgccacgagagcatggctggtcacggcgaggtgctgttctcgatggccaacgcagtcaagcctggcgtgttcgacctggacgacatcgatcacttcagcactcgcgctgtgagcttcttcctcggcttgccgggcccacgtcatccgaagcaggctttcgacgtgatggttgccgcggcacgcaagctggcccacgaactgaacggtgagctcaaggacgaccagcgcagcgtgctgaccgcccagaccatcgagcactaccgccagcgtatcgtcgagttcgagcgccgtgcgctaacccagaagcgc

SEQ ID NO: 31680 - DNA, 3228 bp, Pseudomonas putida
gtgaccaccatgccaaaacgtacagacatcaaaagcatcctgattctcggcgctggcccgatcgtgatcggccaggcctgcgaattcgactactccggcgcccaggcctgtaaagccctgcgcgaggaaggtttccgcgtcatcctggtgaactccaacccagccaccatcatgaccgacccggccatggctgacgccacctacatcgagccgatcaagtggcaatcggtggccaagatcatcgagaaagagcgcccggacgccgtcctgccgaccatgggtggccagaccgccctgaactgcgccctggacctggagcgccacggcgttctggagaagttcggcgtggagatgatcggtgccaacgctgacaccatcgacaaggccgaagaccgttcgcgcttcgacaaggccatgaaggacatcggcctggagtgcccgcgctccggtatcgcccacagcatggaagaggccaatgcggtcctcgagaagctcggcttcccgtgcatcattcgcccgtcgttcaccatgggcggcaccggcggcggtatcgcttacaaccgtgaagagttcgaagaaatctgcacccgtggtctggacctgtcgccgaccaaagagctgctgatcgacgaatcgctgatcggctggaaggaatacgagatggaggtggtccgcgacaagaaggacaactgcatcatcgtctgctcgatcgagaacttcgacccgatgggtgtgcacaccggtgactcgatcactgttgccccggcacagaccctgaccgacaaggaataccagatcatgcgcaacgcctcgctggcggtgctgcgtgaaatcggtgtggaaaccggcggttccaacgtccagttcggcatttgcccgaacaccggccgcatggttgtcatcgagatgaacccgcgcgtgtcgcgttcgtccgccctggcctccaaggccaccggcttcccgatcgccaagatcgccgccaagctggccattggttacaccctcgacgagctgcagaacgacatcactggcggtcgcaccccagcgtccttcgaaccttcgatcgactacgtcgtcaccaagctgccacgcttcgccttcgagaaattcccgaaagccgacgcccgcctgaccacccagatgaaatccgtgggtgaagtcatggccatcggccgtactttccaggaatccctgcagaaagccctgcgcggcctggaagtcggcgcctgcggcctcgacccgaaagtcgacctggccagcccggaagccgccagcatcctcaagcgcgaactgaccgtgccgggtgccgagcgtatctggtacgtggctgacgccatgcgttcgggcatgacctgcgaagaaatcttcaatctgaccggcatcgacatgtggttcctggtgcagatggaagacctgatcaaggaagaagagaaggtcaagaccctggccctgtcggcaatcgacaaggactacatgctgcgcctcaagcgcaagggcttctcggaccagcgcctggcagtactgctgggtatcaccgacaagaacctgcgtcgccaccgccacaagctggaagtgttcccggtgtacaagcgcgtcgacacctgcgccgccgagttcgccaccgacaccgcctacctgtactccacctacgaggaagagtgcgaggccaacccgtcgacccgcgacaagatcatgatcctgggtggcggcccgaaccgtatcggccaaggtatcgagttcgactactgctgcgtacacgccgccctggcgctgcgtgaagacggttacgagaccatcatggtcaactgcaacccggaaaccgtctccaccgactacgacacttccgaccgcctgtacttcgagccgctgaccctggaagacgtgctggaagtctgccgcgtcgagaagccgaagggcgtgatcgttcactacggcggccagaccccgctgaagctggcccgcgctctggaagaggctggcgtgccgatcatcggtaccagccctgacgccatcgaccgcgccgaagaccgcgagcgcttccagcagatggttcagcgcctgagcctgctgcagccgccaaacgccaccgtgcgcagcgaagaagaagccatccgtgctgcgggcagcatcggctacccgctggtcgtgcgtccgtcctacgtactgggcggccgtgccatggagatcgtctacgagctggacgagctcaagcgctacctgcgtgaagcggtacaagtgtcgaacgacagcccggtactgctcgaccacttcctcaactgcgccatcgagatggacgtggatgcggtgtgcgacggcaccgacgtggtcatcggcgcgatcatgcagcacatcgagcaggccggcgtacactccggcgactcggcgtgctcgctgccaccttactcgctgagcaaggaagtgcaggacgaagtccgcgttcaggtcaagaaaatggcgctggagctgggtgtagtcggcctgatgaacgtgcagctggccctgcagggcgacaagatctacgtgatcgaagtcaacccgcgtgcctcgcgtaccgtaccgttcgtgtccaagtgcatcggcacgtccctggcgatgatcgcagcccgtgtcatggcgggtaaaaccctgaaagagctgggcttcacccaggaaatcatcccgaacttctacagcgtgaaggaagccgtcttcccgttcgccaagttcccaggggttgacccgatcctcggccctgagatgaaatcgaccggtgaagtgatgggtgtcggtgacagcttcggtgaagccttcgccaaagcccagatgggtgccagcgaagtgctgccgactggcggtaccgcgttcatcagcgtgcgcgacgacgacaagccacaagtggccggcgttgcccgcgacctgatcgccctgggcttcgaagtggttgccactgccggcaccgccaaggttatcgaggcggctggcctgaaagtgcgccgtgtgaacaaggtgaccgaaggtcgccctcacgtggtcgacatgatcaagaacgacgaagtgtcgctgatcatcaacaccaccgaaggtcgccagtcgatcgccgactcctactcgattcgtcgcaatgcgctgcagcacaagatttactgcaccactaccattgcggctggtgaagccatctgcgaagcgctgaaattcggtccggaaaagaccgttcgtcgcttgcaggatctgcatgcaggactgaaagca

SEQ ID NO: 31681 - DNA, 849 bp, Pseudomonas putida
atgagctcagtgcagtaccctacccggttgccttgcggcagccgggttcttgatttgtcgcatacccatgtcatgggtattctcaatatcacccccgattccttctccgatggcggtcgcttcagtcagcgcgacgaggccctgcgccacgccgaagcgatggttgccgccggcgcaacgttgatcgatatcggtggcgagtccacgcgcccgggtgcgcgtgcagtctcggtgaccgaggagctggagcgtgtggcgccaatggtcgaggccatcaacagtcgcctcgacgtggtcatttcggtcgatacctccacgcctgctgtcatgcgtgaagccgcgcgcctgggggccgggctgatcaacgacgtgcgggccctggagcgcgatggcgccctggacgctgcggcggataccggtctgccggtgtgcctcatgcacatgcgtggcgagccaggcaacatgcaggacgatccgcagtaccaggacgtgaccgccgacgtcacccgttatcttgaacagcggatggccgcctgcgccgcagcgggcattgatgctgacagaatcatccttgacccgggcttcggtttcgccaagacactggcgcacaatctgagcctgttcaagcacatggaagcgctctatcgccttgggcgcccactgctggtgggcgtttcacgaaagagcatgatcggcctgacgctggaacgtccggtcggcgagcgcttgtacggcagccttgcgctggcggcgttggccatgaccaaaggggcgagcatccttcgggtacatgacgtggccgaaaccgttgatgtggtacgcatgatcgctgcggtgcaaaacgccgaa

SEQ ID NO: 31682 - DNA, 2103 bp, Pseudomonas putida
gtgaacccggtaatcaagactttccagttcggtcaatcgaccgtcactctcgaaacgggccgtattgcccgtcaggcaaccggcgccgtgctggttaccgtcgacaacgacgtcaccgtgctggtgactgtggtaggcgccaaacaggctgatccaggcaagggtttcttcccgctgtcggttcactaccaggaaaagacctacgccgctggcaagatcccaggtggcttcttcaagcgtgaaggccgtccttccgagaaagagacgctgacctcgcgcctgatcgaccgtccgatccgtccgctgttcccggaaggcttcatgaacgaagtgcaggtcgtctgcaccgtggtttccaccagcaagaagaccgacccggacatcgctgcgatgatcggtacctcggctgccctggccatttccggcattccgttcgaaggcccgatcggcgctgcccgcgttgccttccacgaaagcactggctacctgctgaacccgacctatgagcaactggctgcctcgagcctggacatggtcgttgccggtacctccgacgctgtactgatggttgaatcggaagctcaagagctgaccgaagaccagatgctgggtgccgtactgttcgcccacgacgaattccaggctgttatccaggctgtcaaagagctggctgccgaagctggcaagccgacttgggactggaaacctgccgttgccaacaccgagctgttcaatgctatccgcgccgagttcggcgaagcggtttcgcagggttacaccatcaccgtcaaagccgaccgctacgcgcgtctgggtgagctgcgtgaccaggcggttgccaagttctccggtgaagaaggccagccttcggcttccgaagtaaaagagatcttcggcgaaatcgaataccgcaccgttcgcgaaaacatcgtcaacggcaagccacgtatcgacggccgcgacaacaagaccgtacgcccgctgaacatcgaagtgggtgtgctgccaaaaactcacggttcggcactgttcacccgtggcgaaacccaggccctggtcgttgcgaccctgggtactgcccgtgatgcccagctgctggacaccctcgaaggcgagaagaaagaccccttcatgctgcactacaacttcccaccgttctcggtaggtgagtgtggccgcatgggcggtgctggccgtcgcgaaatcggccacggccgtctggcccgccgttcggttcaggccatgctgcctgctgctgacgtgttcccgtacaccatccgcgtggtttcggaaatcaccgaatccaacggttccagctccatggcttcggtctgcggtgcttccctggccctgatggacgccggtgtgccgatgaaggcgccggttgccggtatcgccatgggcctggtcaaggaaggcgacaagttcgcagtcctgactgacatcctgggtgacgaagaccacctgggcgacatggacttcaaggtagccggtaccgccaaaggcgtcaccgcgctgcagatggacatcaagatcaacggcatcaccgaagagatcatggaaatcgccctgggccaagccctggaagcgcgcctgaacatcctcggccagatgaaccaggttattggccagtcgcgtaccgaactgtcggccaacgccccgaccatgatcgcgatgaagatcgacaccgacaagatccgtgacgtcatcggtaaaggcggcgccaccattcgcgccatctgcgaagagaccaaggcttcgatcgacatcgaagacgacggctcgatcaagatcttcggcgaaaccaaggaagcggcagatgctgccaagcagcgcatcctgggcatcaccgctgaggccgagatcggcaagatctacgtcggcaaggttgagcgcattgtcgacttcggcgccttcgtcaacatcctgcctggcaaggacggtttggtgcacatctccatgctgagcgatgctcgcgtcgagaaagtcaccgacatcctcaaggaaggccaggaagttgaagtgcttgtactggacgtggacaaccgcggccgtatcaagctgtcgatcaaagacgtccctgcggccaaggcctcgggcgtc

SEQ ID NO: 31683 - DNA, 267 bp, Pseudomonas putida
atggccctcagcgttgaagaaaaagctcagatcgttgccgaatatcagcaagccgccggcgataccggtagcccggaagtgcaggttgctctgctgaccgccaacatcaacaagctgcaaggccacttcaaggccaacgacaaagaccaccactcccgtcgtggtctgatccgtatggtcaaccagcgtcgtaagctgctggattacctgaagggcaaagacaccactcgttacagcgccctgatcggtcgcctgggcctgcgtcgc

SEQ ID NO: 31684 - DNA, 1803 bp, Pseudomonas putida
atgcctgactacaaagcccccttgcgtgatatccgcttcgttcgcgacgagctgcttggctatgaggcgcactatcagagcctgccgggctgccaggacgccacgcccgacatggtcgacgcgatccttgaagaaggcgcgaagttctgtgagcaggtgttgtcgccgctgaaccgcgtgggtgaccaggaaggctgcacctggagcgaatcgggggtgaaaaccccaaccggctttaaagaagcctaccagcagttcgtcgaaggcggctggccgagcctggcacatgacgtcgaacatggcggccaaggcctgccagagtcgctgggcctggccctgagcgaaatggtcggtggctcgaactggtcgtggggtatgtacccaggcctgtcgcatggcgcgatgaacactatttctgcgcatggcactgccgagcagcagcacacctacctgaccaagctggtgtccggcgagtggaccggcaccatgtgcctgaccgaaccgcactgcggcaccgacctgggcatgctgcgcaccaaggccgagccacaggccgacggcagctacaaagtgtcgggcaccaagatcttcatttcggccggtgagcacgacatggccgacaacatcgtccatatcgtcctggcccgcctgccggacgcaccggccggtaccaaggggatttcgctgttcatcgtgccgaagttcctgcccaacgccgagggcggcgtgggcgagcgcaacggcgtgagctgcggctcgatcgaacacaagatgggcatccacggtaacgctacctgcgtcatgaacttcgatgctgccaccggctacctgatcggcccagccaacaaaggcctgaactgcatgttcaccttcatgaacactgctcgtctggggaccgcgctgcaaggcctggcccacgccgaggtggcgttccagggtggcctgaagtacgcccgtgagcgcctgcagatgcgttccctgaccggcccgaaagcaccggacaaggccgctgacccgatcatcgtccacccggacgtgcgtcgcatgctgctgaccatgaaggccttcgccgaaggcaaccgcgcgatggtttacttcaccgccaagcaggtggacatcgtcaagtacagccaggacgaagaagagcgcaagaaggctgacgccctgctggcgttcctgaccccgatcgccaaggcattcatgaccgaagtcggtttcgaagccgccaaccacggcgtacagatctacggcggccatggcttcatcgccgaatggggcatggagcagaacgtgcgcgacagccgtatctccatgctgtacgaaggcactaccggtattcaggccctcgacctgctcggtcgcaaagtgctgatgactcagggcgaagcactgaagggcttcaccaagatcgtgcacaagttctgccaggcgcaggaaggtaacgaagcggtcaaggagttcgttgaaccgctggcggccatcaacaaggagtggggcgagctgaccatgaaagtgggcatggctgccatgaaggaccgtgaagaagtgggtgcggcttcggtcgattacctgatgtactccggctatgcctgcctggcctacttctgggccgacatcgcccgcctggccgccgagaaactggcagccggcaccagcgaggaggcgttctacaccgccaagctgcagactgcgcgcttctacttccagcgcatcctgccacgtacccgtacccatgtggcgaccatgctgtcgggcgccaacaacctgatggcgatggacgaagagcacttcggcctgtcgtac

SEQ ID NO: 31685 - DNA, 1056 bp, Pseudomonas putida
atgagcgccagcacaactgcaacaacacgtcacgattgggccctggccgaggtcaaggcgctgttccagcaaccgttcaatgacttgctgttccaggcgcagaccgtgcaccgcgcgcatttcgaccccaaccgcgtgcaggtttcgacgttgctgtcgatcaagaccggcgcctgcccggaagattgcaaatattgtccgcagtccggtcactacaacaccggcctggagaaacagaagctgatggaagtgcagaaggtgctggaagaagctgcccgcgccaaagccatcggttctacccgtttctgcatgggggcggcgtggaagcacccgtcggccaaagacatgccctacgtgctggagatggtcaaaggcgtcaaggccatgggcctggaaacctgcatgaccctcggcaaactcgaccaggagcagaccaaggccctggcccaggctggtctggactactacaaccacaacctcgacacctcgccggagttctacggcagcatcatcaccacgcgtacctacagcgagcgcctgcagaccctggcctacgtgcgcgacgccgggatgaaaatctgctctggtggcattctgggcatgggtgaatcgctggatgaccgcgccggcctgctgatccagctggccaacctgccggaacacccggagtcggtgccgatcaacatgctggtcaaggtggccggcacgccgctggctgaggaagaggacgtcgacccgttcgactttatccgtatgctggccgtggcccggatcctcatgcccaagtctcacgtgcgcctgtccgccggccgcgagcagatgaacgagcagatgcaggccctggccttcatggcgggcgccaactcgatcttctacggcgaaaagctgctgaccaccgccaacccccaggccgacaaggacatgcagctgttcgcacgcctgggcatcaagcccgaagcgcgtgaagagcacgccgacgaagtgcaccaggcagccatcgagcaagcgctggtcgagcagcgcagcagcgagatgttctacgacgccgcgacagcc

SEQ ID NO: 31686 - DNA, 972 bp, Pseudomonas putida
atgtcccaccccttcgacaccctcacccccgacctggtcctggacgcagtggaaagcctgggctttctcagcgacgctcgggtgctggcgctgaacagctacgagaaccgcgtgtaccaggtgggcatcgaagacgcgcagccgttgattgccaagttctaccgcccaggccgctggagcgatgcagccatcctcgaagagcacgccttcacggccgaactcgccgactgcgaagtcccggtggttgcgcccatgcagcacgatgaccgcaccttgttcgaacacaagggcttccgcttcacgctgttcccccgtcgcggcggccacgcccccgaacctggcaacctcgaccagttgtatcggctgggccagttacttggccgcctgcatgccgtgggcgccagcaagccgttcaagcaccgtgaggcactggctgtggacaactttggccacgcctcgctgaacaccttgctggagggtaattttgtcccacatgaactgctgccggcgttcgagtccgtggcccgcgatctgctcaagcgggtggaggacatctacgctcgcacaccacaccagctcatccgcctgcacggcgacctgcaccccggcaacctgatgcaccgcgatgaggtgtaccacgtggtcgacctcgacgattgccgcatgggcccagcggtgcaagacctgtggatgatgctggccggcaaccgcgaggagcgcctggggcaactggccgagctgatcgacggctacaacgagttccacgacttcgacccgcgcgaactggccctgatcgagcccctgcgcgccctgcgccagctgcactatagcgcctggctggcaaggcgctgggacgacccggcgttcccgcccagcttcccttggttcggccagccacgctactggggcgaccagattctcgccttgcgcgaacagatggctgcgctggatgaagctccgctgaaattgttc

SEQ ID NO: 31687 - DNA, 1638 bp, Pseudomonas putida
gtgagcgaactcattcgcgtacctgacatcggcagcggtgaaggtgaaatcatcgagctgttcgtcaaggtcggtgaccgtatcgaggctgaccagagcctgctgaccctggagtccgacaaggcctccatggaaattccggcgcccaaggctggcgtgatcaaggaactgaaggtcaagctgggcgaccgcctgaaagaaggcgacgaactgctggtcctggaagccgagggcgccgctgctgcggcccctgaggcgccggctgctgccgctgctccggctgcggcgccagcgccagccgctgaagccgctcctgctgctccggccgcagccccggctgctgccagcgtgcaggacatccacgtgccggacatcggttcgtcgggcaaggccaagatcatcgaagtgctggtcaaagtcggcgacaccgtcgaagccgaccagtcgctgattaccctggagtccgacaaggcctccatggaaatcccgtcgccggctgccggcgtggtcgaagaagtgctgtgcaagctggaagacgaagtcggcactggcgacctgatcttcaagctgaaagtggcgggtgccgccccggctgccgcgccggcaccggctgctgctcctgcaccagccaaggctgaggctgctccggctgccgcacctgccgctgccgccccggctgctgcccctgcaccggctgctaccgcaccggccgctggcagcaatgccaaggttcacgcaggccccgctgttcgtcagctggcccgtgaattcggtgtcgagctgggtgcagttgctgccaccggcccgcacggtcgcatcctgaaagaagacgtgcaggtctacgtcaaggccatgatgcagaaggccaaggaagcgccggcagccgccggtgcgaccggtggtgctggcatcccgccgatccctgccgtggacttcagcaagttcggtgaagtggaagaagtggccctgacccgcctgatgcaggtcggtgctgccaacctgcaccgcagctggctcaacgtgccgcacgtgacccagttcgactctgccgacatcaccgagctggaagccttccgcgttgcgcagaaggccgtggccgagaaggctggggtgaagctgaccgtgctgccactgctgctcaaggcctgcgccttcctgctcaaggaactgccggacttcaacagctcgctggcgccaagcggcaaggccatcatccgcaagaagtacgtgcacatcggcttcgccgtggacaccccggacggcctgctggtccctgtgatcaagaacgtcgaccagaagagcctgctgcaactggctgccgaagccgctgcactggccgagaaggcgcgcaccaagaagctgtcggctgacgagatgcaaggcgcctgcttcaccatctccagcctcggccacattggcggcaccggcttcacgccgatcgtcaatgcgccggaggtggctatcctgggcgtctccaaggcgaccatgcagccagtctgggatggcaaggccttccagccaaagctgatgttgccgctgtcgctgtcctacgatcaccgtgtgatcaacggcgctgccgccgcgcgcttcaccaagcgcctgggcgacgtgctgggcgatatccgcaccatgctgctg

SEQ ID NO: 31688 - DNA, 516 bp, Pseudomonas putida
ttgtcttctgcacaaagcccacacgccgatctggtcggtgcgctgtaccgcgaccaccgcggctggctgctcgcctggctgcaacgcagcatggcctgccgccagcgtgctgaagacctgagccaggacaccttcgtgcgcctgcttggtcgtgagcaactggacaccccccgcgaaccccgcgcgtttctggccgccgtggccaaggggctgatgttcgaccacttccgccgcgccgcgctggaacaggcctacctggccgagctggcactgatccctgaagccgaacagccctcgccagaaatgcagcacctgatccttgaagacctcaaagccatcgaccgcctgctcggcaagctgtcgagcaaggctcgcgcggcgtttctgcacagccgtctggacggcatgggccatgccgaaattgccgagcgccttggcgtttcggtatcgcgggtgcgccagtacatcgcccaaggcatgcgccagtgctacgtggccttgtacggggagccgacg

SEQ ID NO: 31689 - DNA, 909 bp, Pseudomonas putida
atgtacatccaggttctcggctccgccgccggtggcgggttcccgcagtggaactgcaactgcgtcaactgcaagggctaccgtgatggcaccctgaaagccacggcgcgcacccagtcatccatcgccctgtccgacgacggtgtgcactggatattgtgcaatgcctcgcccgacatccgcgcccaactgcaggcctttgcgccgatgcagccggcccgggcactgcgcgacaccggtatcaacgccatcgtcctgctggacagccagatcgaccacaccaccggcctgctcagcctgcgcgaaggctgcccgcatcaggtgtggtgcacggacatggtccaccaggacctgaccaccggtttcccgctgttcaacatgctcagccactggaacggtggcctgcagtggaaccgtatcgagctggaaggcagcttcgtgatcgacgcctgccccaacctcaagttcactcccttccccctgcgcagcgccgcgccgccttattcgccacaccgcttcgacccgcacccgggcgataaccttggtttgatggtcgaagacacccgcaccggcggcaagctgttctacgccccgggcctgggccaggtagacgaaaagctgctggcgatgatgcacggtgccgactgcctgctggtcgacggcaccctgtgggaagacgacgaaatgcagcgccgtggcgtgggcacccgcaccggccgcgagatgggtcacctggcccagaacggccctggcggcatgctggaagtgctcgacggcttcccgcgccagcgcaaggtacttatccacatcaacaacaccaacccgattctcgatgaaaactcccccgagcgcgccgaagtcctgcgccggggcgtcgaagttgccttcgatggcatgagcatcgagttg

SEQ ID NO: 31690 - DNA, 396 bp, Pseudomonas putida
atgaaaaagctctttatgctgtgttgcgcatccctgcttgcagcctgctccagccaaaccccacccaaccaggccagcctggacggtgaagtcttctacctgcagcgcattgccctgccgcctgccgccaccctgagcgtggaactgcaggatgtgtcgctgatggacgcccctgccgtgaccctggcgcgccaggccggcccggtcaaaggcaacgtgccgctgccgttccatctcacctatgaccccgcgcaggtcaagcctggccaccgctatgcggtaagtgcgcgcattgagctgaatggcaagttgctgttcatcaataccgaacaccacggtgtcgcgctcgatggcagtgacccgcaatcggtacgcatcaaggtagaccaggttcgc

SEQ ID NO: 31691 - DNA, 2700 bp, Pseudomonas putida
atgccccaggtggaccccgagctgttcgaccgtggccagttccaggcggaactggccctcaaggcgagccccatcgccgccttcaagaaagccatccgcctggccggcgaggtgctcgacaaacgttttcgcgccggcagcgacatccgaccgctgatcgaggcccgcgcctggctcgtcgacaatatcctgcaacaggcgtggaaccagttcgactggggcgaccagagcggcattgccctggttgcggtgggcggctacgggcgcggtgaactgcacccgcactcggacatcgacctgctgattctgctgggcgctgccgagcacgagcagtaccgcgacgccatcgagcgctttctgaccttgctgtgggacattggcctggaagtcggccagagcgtgcgcaccgtcgacgaatgcgccgaacaggcccgcgccgacctgacggtgatcaccaacctgatggaaagccgcaccatcgccggccccgaggccttgcgccagcgcatgctggaagtcaccagcaccgcgcacatgtggccgagcaaggagttcttcctggccaagcgcgccgaactcaaggcccgccaccacaagtacaacgacaccgagtacaacctcgaacccaacgtcaagggttcgccaggtggcctgcgtgacatccagacggtcctgtgggtggcccgccgccagtacgggacgctcaacctgcatgcactggccggcgaaggcttcttgctggaaagcgagaatgaactgctggcttcgtcccaggacttcctctggaaagtccgttacgccctgcacatgctggccggacgcgccgaagaccgcctgctgttcgaccaccagcgcagcatcgccacgctgctgggctacagcgatgaaaaccccaagcgggcgatcgaacagttcatgcagcagtactaccgggtggtgatgagcatcagccagctgtgcgacctgatcatccagcacttcgaagaggttatcctcgccgatgaggaaagtggcagcacccagccgctgaatgcgcggttccgcctgcatgacggctatatcgaggccacccacccgaacgtgttcaaacgcacgccattcgccatgctggaaatcttcgtgctgatggcccagcaccccgagataaagggcgtgcgtgccgataccgtgcgcctgctgcgcgaacaccgccacctgatcgacgacacgttccgcaccgatatccgcaataccagcctgttcatcgagctgttcaagtgcgaaatcggcatccaccgcaacctgcgccggatgaaccgctacggcattcttggccgttacctgccagagttcggcctgatcgtcgggcagatgcagcatgacctgttccacatctatacggtcgatgcgcataccctcaacctcatcaagcacctgcgcaagctgcaatacacgccggtgtccgagaaattcccgctggccagcaagctcatggggcgcctgcccaaacccgagctgatctacctggccgggctgtaccacgacatcggcaagggtcgccagggcgaccactcggaaatcggtgcagtggacgcgcagaagttctgcgaacggcaccagttgccggcctgggacagccgcctgatcgtctggctggtgcagaaccacctggtgatgtcgaccaccgctcagcgcaaggacttgtccgacccgcaggtgatcaacgactttgccctgcacgtgggcgacgagacgcgccttgactacctgtacgtactgaccgtggccgacatcaacgccaccaacccgagcctttggaactcgtggcgggccagcctgctgcgccagctgtacaccgagaccaagcgtgccctgcgccgcggcctggaaaacccgctggaccgcgaagagcagattcgccagacccagtcctcagcgctggacatcctggtgcgcgagggcaccgacccggacgacgtcgagcagctatgggcgcaactgggcgatgactatttcctcaagcacaccgccgccgacgtggcctggcacacggatgcgatcctgcagcaaccggccgatggcgggccgctggtgctgatcaaggaaaccacccagcgcgagttcgaaggcggcacgcagatcttcatctatgcccccgaccagcacgatttcttcgccgtgacggtggcggccatgtcgcagttgaacctgaacatccacgacgcgcggatcatcacgtcgagcagccagttcaccctcgacacctacattgtgctggacaacgacggtggctcgatcggcgacaacccacagcgggtcaagcagattcgcgatggcctgaccgaagcgctgcgcaaccccgaggactacccgaccatcatccagcgccgggtaccgcggcagctcaagcacttcgacttcccgccgcaagtgaccatcctcaacgatgcccagcggccggtgaccatcctcgaaatcaccgcgccagaccgcccgggcctgctggcccggctggggcggatcttcctggagttcgacctgtcactgcaaaacgccaagatcgccaccctcggcgagcgggtagaagacgtgttcttcattaccgatgccgacaaccagccgctgtcagacccgcagctgtgcagccgcctgcaggaagccatcgtgcagcaactgcaggccggccaaggtagcgacaccagccagacccgcgtgaccttt

SEQ ID NO: 31692 - DNA, 750 bp, Pseudomonas putida
atgaccatctactttatcggtgccggccccggcgacccggagctgatcacggtcaagggccaacggctgattcgccagtgcccggtgatcatttatgccggttcactggtacccgccgccgtgctcgaaggccaccaggccgaaaccgtgatcaacagcgccgaactgcacctggaacagatcatcgccgccatgcgcagcgcacatgaaaaaggtcaggatgtggcccgggtgcacagcggcgaccccagcctgtacggcgccatcggtgagcagattcgccacctgcaagcgctgggcatcgattaccagatcatccccggcgttaccgccacggcagcgagcgccgccctgctcggctgcgagctgacgttgcctcaagtggcgcagaccgtgatcctcacccgctatggcgacagctcgcccatgccgccgggtgagcagttgggtgacctggcgcgccatggcagcaccctggcaattcatctgggggtcaagcacctgtcgcgcattgtcgctgagttgatgccgcactacggcgcgcactgcccggttgcggtggtgcatcgggccacctggccagaccaggattgggtgtgcggcaacctcggcgatatcgtcgaacgcgtagcggccaaggatttccggcgcacggcgctgattctggtaggccacgtcctgggggatacaccgttcgccgaatcggcgttgtaccgtgccgggcatgcccacctgtaccgacctggcgac

SEQ ID NO: 31693 - DNA, 1350 bp, Pseudomonas putida
atgttcggactggctactgataccttcctgctgctcgacgcgctggttaccatcgtcgggctgatcctgctgatcacccacttcaaggttcaccccttcgtcgccctcaccctcgcggccggcttcctgggcctgacttccggcatgccggtggccaaggtcatgaaatcgttccaggacggttttggcggcgtactcggcttcgtcggtatcgtgctcgccctgggcaccatgctcggcaagctgatggccgactccggtggtgccgaccagatcgcgcaaaccctcatccgcgccttcggcaagaagaacgtgcattgggcgatgatgttcgccgccttcctggtgggcatcccgctgttcttcgaaatcggctttgtgctgctgattccactggtgttcatcgtcgcccggcgctcgggcgtctcgttggtgaaaatcggcattccgctgctggccggcctgtcggtggtgcacggtctggtgccaccacacccgggccccttgctggcgatcggcattttccacgctgacattggcaagaccatcttctacggcctgatcgtcgcactgcccaccgcgatcatcgccggccctctgttcggtaacttcatttcccgctacatcccgggcaacccgtcccaggagctgatggaccagatcgccaaggactccgatcagggcaacctgccaagcttcagcattaccctggtcactgtactgctgccggtcgcgttgatgctgctgaaaacgttcgccgacgtggtgctgcctgccgagcacatcgtgcgccagtggatggacctgatcggtcacccgatcaccgccctgctcgccgccctgttactggccttctacaccttcggctcggcccgcggcttcaaccgccagcagatcatgaagatgctcgaccagagcctggcaccgactgccgccatcgtgctgatcgtcggcgctggcggtggcttcaagcaaatgctggtggataccggcgtaggcaacgtgatcgggcagatggctgtccaggcagaaatttcgccgatcatgctggcatggctggtggcggcggtgatccgcatcgcgaccggctccgccacggtcgccaccatcaccggcgcgggtatcgtggcaccggtgatcgacctcgtgccgggggtgaaccgtgagctgttggtactggccaccggtgccggctcgctgatcctgtcgcatgtgaacgatgccggtttctggctggtgaagcagtacttcaacatgaccgtggcagaaaccttcaagacctggagcatgatggagacgatcctgtccatcgtcggcatcattttcatcatgttgctgtcgctggtggtg

SEQ ID NO: 31694 - DNA, 3177 bp, Pseudomonas putida
atgaacttctcgaaattcttcattacccggccgatcttcgccgcggtgctgtcgctggtgctgctgatcgcgggttccatctcgctgttccagctgccgatcagcgaataccccgaagtggtgccgcccaccgtggtggtgcgcgccaacttccccggcgccaaccccaaggtcatcggcgaaaccgttgccgcgccgctggagcaggccattaccggtgtggagaacatgctgtacatgtcctcccagtccactgcggacggcaagctgacgctgaccatcaccttcgccctgggtaccgacctggacaacgcccaggtgcaggtgcagaaccgcgtcacccgtacccagcccaagctgcccgaggaagtgacccgtatcggtatcaccgtcgacaaggcctcgcctgacctgaccatggtcgtgcacctgacctcgccggacaaccgctacgacatgctctatctgtccaactacgccatcctcaacatcaaggacgagctggcgcgcctgggcggcgtaggcgacgtgcagctgtttggcatgggcgactactcgctgcgcgtctggctggacccgaacaagaccgcttcgcgcaacctgacggccagtgatgtggtcgcggcaatccgcgagcagaaccgccaggtggccgccggccagctgggcgcgccgcctgccccaggctcgaccagcttccagctgtcgatcaatacccaaggccgcctggtcaacgaggaagagttcgaaaacatcatcatccgcgccggtgccgatggcgagatcacccgcctgaaagacatcgcccgggtcgaactcggctccagccagtacgccctgcgctcgctgctgaacaaccagccggcggtggccatcccgattttccagcgcccaggctccaacgccatcgagatctccgacgaagtgcgggcgaaaatggccgagctgaaaaaggacttcccggaagggatggactacagcatcgtctatgacccgaccatcttcgtgcgcggctccatcgaagcggtggtgcacaccctgttcgaagccctggtgctggtggtgctggtggtgatcctgttcctgcagacctggcgcgcctcgatcatcccgctgctggcggtgccggtctcgctgatcggtaccttcgcggtcatgcacctgttcggtttttcacttaacgcgctgtcgttattcgggctggtgctcgccatcggtatcgtggtggacgatgccatcgtcgtggtggagaacgtcgaacgtaacatcgggctgggcctgaaaccgctggaagccacgcaaaaggccatgagcgaagtgaccggcccgatcatcgccaccgccctggtgctgtgcgcggtgttcgtacctgcagcgttcatttccggccttaccgggcagttctacaagcagttcgccctgaccatcgccatctcgaccgtcatttcggcgttcaactcgctgaccctgtcgccagccttggccgcggtgctgctcaaggatcatcacgcacccaaggaccgtttctcgcggttcctcgacaagctgctgggcagctggctgttctcccctttcaaccggttcttcgaccgggccagccacagctacgtcggtggcgtgcgccgggtcatccgctccagcggcatcgccctgttcgtgtatgccggcctgatgggtctgacctacctcggcttctcgtccacgccgaccggtttcgtgccggcccaggacaagcagtacctggtggccttcgcccaactgccggacgcggccagcctcgaccgtaccgaagcggtgatcaagcgcatgagcgaaatcgccctgaagcagcctggcgtggccgactcggtagccttcccgggcctgtcgatcaacggtttcaccaacagccccaacagcggcatcgtgttcaccccgctcaaaccattcgatgagcgcaaggacccgagccagtcggcggcagccatcgcagccgcgctgaatgcccagttcgccgacatccaggacgcctacatcgccatcttcccaccgccgccggtacagggcctgggcacgattggcgggttccgtctgcaaatcgaagaccgtggcaacctgggttacgaagcgctgtacaaggaaacccagaacatcatcgccaagagccacaacgtcccagagctggcaggcctgttcaccagctaccaggtcaacgtgccacaagtcgatgccgccatcgaccgggaaaaggccaagacccacggtgtggcgatcaccgacatcttcgacaccctgcaggtttacctgggctcgctgtacaccaacgacttcaaccgctttggccgcacttaccaggtcaacgtccaggccgagcagcagttccgccttgatgccgagcagatcggccaactgaaagtgcgcaacaaccttggcgagatgatcccgctggcgaccttcctcaaggtcagcgacacctccgggccggaccgggtcatgcactacaacggcttcatcactgccgagatcaacggcgctgccgccccgggctacagctctggtcaggcggaagctgcgatcgagaagctgctgaaggaagaactgcccaacggcatgaccttcgagtggaccgacctgacctaccagcagatcctctcgggcaataccgcattgctggtgttcccgctgtgcgtactgctggcgttcctggtgctggccgcccagtacgaaagctggagcctgccgctggcggtgatcctgatcgtgccgatgaccctgctgtcggccatcaccggtgtgatcgtatcgggtggcgacaacaacatcttcacccagatcggcctgatcgtactggtgggcctggcgtgcaagaacgcgatcctgatcgtcgagttcgccaaggacgaacaggccaagggcctcgacccgctggctgcggtactggaagcctgccgcctgcgcctgcggccgatcctgatgacctcgatcgccttcatcatgggtgtggtgcccctggtgttcagctccggcgcaggttcggaaatgcgccatgccatgggggtggcggtgttctcggggatgatcggcgtgaccgtgttcggcctgttcctcaccccggtgttcttcttcctgatccgccgtttcgtcgagcgtcgccaggcccgcaaggctgaacacgctcaagtgctggagaaccacgca

SEQ ID NO: 31695 - DNA, 2114 bp, Pseudomonas putida
atgtgctgcaggcacagcgtcagaacgccgccctggcattgccagacaccgacatccgtagtttctccctcggcaacgcactgggcagcatggagggttacaacgccacgcacagccaggtggcgaccaagaccagcatgcccttggtggagacatcccaatcagtctcggtagttactcgccagcaaatggatgatcagggctctcagaccgttgcccaagcaatgcgctacacgcctggagtactgaccaacccgtacggtgccactcatcgctatgactatgtagccatgcgcggcttcaacgacggctcggtggacaacatctacgtcgatgggctcaagtcaatgggagacaacggcacctacagcaccatgcaggtagacccatacttccttgagcgcatcgacattctcaagggaccgtcttcggtactgtacgggcgaagctcgccgggtggcctggtagccctgaccaccaagaagccactctttgctccttaccatcaggttcaggccactatgggtactcagggccagcgtggcgtgggcttcgacttcagtggtcctgtggatgacgacaaacgcattgcgtatcgcctgacgggtttggcggacgcttccgacactcagttcgaccacaacaaggaagaacgttacgccatcgcccctgctatcagtgtcgacttcaccgaagacacctcactcacgctgcaggcctatttgcagcacgaccctaacggtgggtaccacggcggcaaccctgcagacggtatgctgcacaagcgcaacggcttgcgcctgtcagaccatttcttcgaaggcgagccgagcatcgacaactacgagcgcacgcagcaatccttcagctaccagtttgagcaccgcttcaatgatgtgttcaccgcgcggcagaactttcgctatcaggattccgacgtgtcgatggaccaggtgtactccgccggctgggcagatgtggacagcaataggctaaaccgcgcctataccggcggcgacgagcgcctgcattcatacatcattgataacatgctgcaggcagagttttttactggggcagccaagcacaccctgctcttgggggctgactaccagcggcgcaaagccgacgtgacatggcgttatggcaccgtcgacccgctggatgctggcaatccgcagtacggcaatggcaaccttcaggtactgggcgagaaccgctaccagcggcgtttgcaacaaacgggcgtgtacctgcaggatctggtggagctggaccagtggcgcttttccttgggactgcgccaggactgggtgaaggtgtccgaagagaaccgtgacagcgacagcaaggtcagtgatcaacgctccaggttcacctcccgggctggagtgctctacctgttcgagaacggcattgcgccctacatcagctactcggagtcgttcaacccgaacaccgtgtccgaccagcaaggccggccgctggcgccgacggagggcactcagtgggaagccggcatcaaatatcagccaccagggagcgacaacctgttcaccgcatcggtgttccgcatcgagcaggagaatttggcgtctaaacagcctgacgaagacttctaccgccctgtcggtgaagtccgctcgcaagggctggagctggaggcccatgtgcaactgaccgacagcctcaaactgctgggtggctataccttcaccgatatcgagtattcgaagtcaatgccgagccttgtgtcgggcgacttggacaacaagggtaattcgccgactcaggcgccgaaacagatgctctcgctgtgggccgactataacttccgccagggggcactggatggcctgcggctgggcggtggggtgcgatatgtggggtacagctgggtcgatgcggaaaacagcatgaaggtgccttcctacaccctgttcgacgcctcgatcggctatgacctgggcaagctcggcctgacgggtgtggatgtgcgcttgaacgccaacaaccttaccaatgaaagctacatcacctcatgtgccagcctgaactactgctacatgggtgaagagcgcaatgtgagcgccacggtcagctatcagttctaa

SEQ ID NO: 31696 - DNA, 987 bp, Pseudomonas putida
atgcgccgccccctcttccaccgggccctgctttaccccagcctgctgtcgggcgccctggcgctggccagcagtcacaccatggctgccaccgcctgggtctccaacgagaaggacaacagcctcagcctgatcgacctgcaaacgctggaagtcaccgaaaccctgccggtgggccagcgcccgcgtggcttgctgctgtcacacgacagcaagctgctgtacatctgcgccagcgattcggaccgggtgcaggtgatggacgtggccacccgcaagatcatcaaggagttgccttccggcaaggaccccgagcagttcgccctgcaccccaacgaccgctggctgtatgtatcaaacgaggacgatgcgctggtgacggtgatcgacaccgtcaccgacaaggtgctcgggcagatcgaagtcggcatcgaacccgaaggcatggcggtcagccccgacggcaagtgggcggtcaacaccagcgaaaccaccaacatgctgcactggatcgacaccagcacccagaccctggccgacagcacgctggtcgaccagcgcccgcgcttcgtcgagttcagcaaagacggttcgcgcctgtgggcctcggcagaaatcggcggcacggtgaccatactcgacgtgaccacgcgccaggtgctgaaaaccctgaacttccagatcaagggtgtgcacccggacaaagtccagccagtgggcatcaagctcagcgccgatggcaagtacgccttcgtcgccttgggcccggccaaccacgtggcagtgatcgatgccaagacctttgatgtgctcgactacttgctggtcgggcggcgggtctggcagctggcattcaccccggatcagagccagttgctggccaccaacggtgtcagcggtgacgtttcggtcatcgatgcgaagcagctcaaagtgctcaagtcggtgaaggtcgggcgctacccctggggcgtggtggtgacacca

SEQ ID NO: 31697 - DNA, 855 bp, Pseudomonas putida
atgagcgactaccctacccctccattcccatcccaaccgcaaagcgttcccggttcccagcgcaagatggatccgtatccggactgcggtgagcagagctacaccggcaacaatcgcctcgcaggcaagatcgccttgataaccggtgctgacagcggcatcgggcgtgcggtggcgattgcctatgcccgagaaggcgctgacgttgccattgcctatctgaatgaacacgacgatgcgcaggaaaccgcgcgctgggtcaaagcggctggccgccagtgcctgctgctgcccggcgacctggcacagaaacagcactgccacgacatcgtcgacaagaccgtggcgcagtttggtcgcatcgatatcctggtcaacaacgccgcgttccagatggcccatgaaagcctggacgacattgatgacgatgaatgggtgaagaccttcgataccaacatcaccgccattttccgcatttgccagcgcgctttgccctcgatgccaaagggcggttcgatcatcaacaccagttcggtcaactctgacgacccgtcacccagcctgttggcctatgccgcgaccaaaggggctattgccaatttcactgcaggccttgcgcaactgctgggcaagcagggcattcgcgtcaacagcgtcgcacccggcccgatctggaccccgctgatcccggccaccatgcctgatgaggcggtgagaaacttcggttccggttacccgatgggacggccgggtcaacctgtggaggtggcgccaatctatgtcttgctggggtccgatgaagccagctacatctcgggttcgcgttacgccgtgacgggaggcaaacctattctg

SEQ ID NO: 31698 - DNA, 657 bp, Pseudomonas putida
atgaattacctgcccttgaccttgctgctggcgctatcccctgccctggcagtgaacgccgacgacgccggcaccgatacccccttgaccatcaacggctgcgtgattgccgaagccagccagtgcccgggggccaacctgcgcggcgccaacctggccaaccaggacctgcgcaagatgaacctggccggtgccgacctgcgcgatgccgacctgcgtcatgcccagctggacctcgcaaatctggaaaaagcccgcctgcaaggagccaacctgacccgcgccagcctgcaacagagcaatctgcgcctggctgacctgagcaacagcaggctggtggccattcaaggctggggcttgttcgcccagggcgcacagtttgaaaaggcggacctgcgcgcagcctatctgcagttcgccaggctgtccggggcaaagctgcagcaggccaacttgcaggcggcggacctggagatggcctggttgagcaaggctgacctgcaagaggccaacctgggggatgccaacctgcaggaggccaagtttggccagagcaacctggcacacgccgatttacgcggggcacggcagcattacgggaattttcaggaggccaacatggaggggtgcaaggggtgccctgagacctgggacaaa

SEQ ID NO: 31699 - DNA, 633 bp, Pseudomonas putida
gtgatgtcgatggaagtatggttaggcttttttgccgcctgctgggtgatcagcctttcacccggtgccggggcaattgcctcgatgtccagcggcctgcaatacggcttctggcgtggttactggaacgccctgggcctgcagctgggcctgatcatgcagatcgccatcatcgccgccggcgtcggtgccgtcctggctgcctcggccacggcgttccaggtcatcaagtggtttggcgtcggctaccttgtgtacctggcctacaagcagtggcgtgccctgccgatggacatgagcgatgaatcaggcgtgcgcccgatcggcaagccgctgagcctggtgttccgtggtttcctggtcaacatcagcaaccccaaggcgctggtgttcatgctggcggtgctgccgcagttcctcaatccccatgcgccgctgctgccgcaatatgtggcgatcaccgtgaccatggtcacggtcgacctgctggtgatggcgggatacaccgggttggcttcgcatgtgttgcgcatgctgcgcacgcccaaacagcagaagcgtttgaaccgcacctttgccgggttgttcattggtgcagccaccttcctcgcgaccttgcgccgcgcgccggtc

SEQ ID NO: 31700 - DNA, 939 bp, Pseudomonas putida
atgtccactcgcgaaatccgcattgccacccgtaaaagtgctttggccctgtggcaggccgaatacgtcaaggcccgcctcgagcaggcccacaccggcctgcaggtgaccctggtacccatggtcagtcgcggtgacaagttgctcgacgcgccgctggcaaaaatcggcggcaaggggctgttcgtcaaggaactggaaaccgcgctgctggacaacgaagccgacatcgccgtgcactcgatgaaagacgtgcccatggacttccccgagggcctgggcctgtactgcatctgcgagcgtgaagacccgcgtgatgccttcgtttccaatacctttgacagcctcgaagcgctgcccgccggcagtatcgtcggtacctcaagcctgcgccgtcaggcccagttactggcgcgccgcccagacctgcaaatccgctttctgcgcggcaacgtcaacacccgcctggcgaagctggatgccggtgagtacgacgccatcatcctcgccgcggcgggcctgatccgtctgggcttcgaagaccgcatcacctccaccatcagcgtcgatgacagcctgccggcaggtggtcagggcgcggtgggcatcgagtgccgcagtgccgacgttgagatccatgcactgctggcgccactgcaccatgtcgacaccgctgaccgggtgatcgccgagcgcgcgctgaacaaacgcctgaatggtggctgccaagtgccgatcgcctgctacgcggtacttgaaggtgaccagctgtggctgcgcggcctggtcggccagcctagcggcgggaccttgctggtggccgatgcccgtgcaccccgtgctgctgccgaggccctgggcgtacaggtggccgaagacctgctggggcagggcgccgaggccattctgaaggaagtctacggcgaggccggtcacccg

SEQ ID NO: 31701 - DNA, 741 bp, Pseudomonas putida
atgaatgtcctgatcgttgatgacgaaccccaaggccgtgaacgcctcacccggctgctcggcgaactggagggttacactgtgctggagcccagcgccaccaacggcgatgaggccttggcgctgattgaaagcctcaagcccgatgtggtcctgctggacatcggcatgccaggcctggatggcctgcaggttgccgctcgcctgtgcgaacgcgaggcgccgcccgcggtggtgttttgctccggggatgatgaatacggtgcagaggcattcaaggacagtaccctcagccatgtgaccaagcccttccaggcccacgccttgcgcgatgccttgcgcaaggccgaaaaacccaaccgcgcccaattggcggcgcttacccggccggccaatgaaggcggcggcccacgcagccatatcagcgcccgcacgcgcaaaggcatcgaactgatcccgttaccccaggtgatctatttcattgccgaccacaagtatgtgaccttgcgtcacgaagccggtgaagtgctgcttgacgagccactcaaagccctggaagacgaatttggcgaacgcttcgtgcgcatccatcgcaatgcgttggtcgcccgcgagcgcatcgaacgcttgcagcgcaccccactggggcactttcagctgtatctgaaaggcctggatggcgatgccttgaccgtcagccgtcgccatgtggccggtgtgcgcaagatgatgcagaccctc

SEQ ID NO: 31702 - DNA, 1278 bp, Pseudomonas putida
atgtaccgatcttttacgctccgagcttttgtgtgcttgacgaccttggcccccgccaccgcactttacgcagccgccgacccacaagtcgaagcgctgaggcaggaactgattgaactcaaacgccgctatgaggcacagcaacaggcactgatggtgctggagcaacgtgtgcgccaggtcgaggaggcccctgctgccgcgcaacccaaacgcttggtcaagtctccggccgagggggtgaaaggtgctcagaccgtcgcttctggcgcaccgggcactacagggagctcctacggccaggcgctgacagccgattccgagccggcgcaaagcgtttccaacctgtatgacgaagccagcggattctttggcgggggcaagttcagcttcgaaaccggcgtcacctatacccattacgatacccgtgcgctaaccctcaatggctttctggcactggactcgatcttcctcggcagcatcaacctcgaccggatcaaggctgacaactggaccttggacatgactgcccgctataacctggcgcagcgctggcagttcgacatcaacgtccccgtagtttaccgcgagtccacctactcgtccggtggtgcggggggggccggggcaaccacttccgatgccagcgtgacccgcgacccggaaatcggcgatatcaacgtcggggtggcctacaaattcctcgacgaggacgaaacctggcctgacgcagtggccaccctgcgcatcaaggcaccgaccggcaaagacccctacggcatcaaactgcgcgaggtggacggcaacaacaacctcgcggtaccggaaagcctaccgaccggcaacggtgtatggtcgatcacaccgggcatctcgctggtcaagaccttcgacccggccgtgctgttcggcagcctgtcctacacctacaacatgcaagactcgttcagcgacatcagtccgcaggtgaacagcaaggtaccgggtgacgtcaagcttggcgactcgtggcagatcggcgggggcatcgcctttgcccttaacgaaaagatgagcatgtcgttctcggtatccgaccagttcgcccgcaagagcaagatcaaacctgatggcggcgactggcaatcgatctccaacagtgactacaacgccgccaacttcaatattggcctgaccttcgccgccaccgacaacctgaccatcgtgcccaacctgtccattggtctgaccgatgacgcacctgacttttctttcagcctgaaattcccttattacttc

SEQ ID NO: 31703 - DNA, 2199 bp, Pseudomonas putida
gtgaagaacctgtccgaccacccaagcacccggcttgccactttggcggctctggtgctggtgatcccactgggtacgcgcgccatgctgggttggtccaacccgttcggttacctgtccgatctcgccctcggcagcctgttgatagtgctgctacaccgcaggccgtggtggctggcgctgcccgtgctgctggcctgggcggcgctgtgggtggcctcggccgaactggtaagcgcagtgggccgactgcccaccagcgccgaccttaactacctgaccgacccgcaattcatggagaattcgaccggtggcggcctggcccatgcctggctgccctgggccctgggtggcggcctgctggcctggctggcctttgcgtggcgcagccgtgctcggcgtagccagccactgccgcgcaaagcctgggccatacccgtactgctgttcggcgcgcattggggcagccagcagttgctaccttccgatgccgaccagtggcggcaatacaacctcccccaccagttgatgtctgccggggtcggtaacctgcaacgccaggtcgaaggctggatgggccacacgcaaaccttcaccccgctggccagcagcggcctgactcaatccgacctgcatgggcaaaggctgcttgccggcccgggaagcgcccgcaacttgctggtgattaccctggaaggcatcccgggcgcctacctgcggcctaaccgccaggcgctgaacagccatttcaacgaagacttgatgcccaagctcagcaaatgggccgagcgcggcatgaacaccccagactacgtgctgcacacccaccagaccatccgtggcctgtatgcgatgctgtgcggcgattacgacaagctggccaacggcacgcccaagggcgtggaactgctgacccagaaccaacgcaaccaggcctgtctgccggcacaattacgccaggccggtttcaccacccactacctgcaaggcgcaggcctgcgcttcatggccaaggaccgcatcatgccgcacatcggtttcgatgcggtgcatggccaggagtggttcagcaacaagaactacctgcacttcccatggggcaaggatgaccgcgctttcttcgaaggcgccctgggctatgtgggccagttgcagaagcaggacaagccatggatgctgacgctgctcaccgtgggcacccaccagccctattcggcgccggccgagtacctcgagcgcttcgacacaccgaaacaggcagccgtcgcctacctggatgacgcagtcggggcatttcttgacaatctcgagcgccagggcgtcctcaaggacacactggtggtggtgacttccgacgagtctcacggcatcgatggcgtgcgcctggcctcgtcctggggcttcaaccttacattggcgccggagcaggcccaactgccaaccatcaagcgcggcacttacggccatatcgacctggccacctcgctgctcgactacttcgcactgcccattcccgtcgcgcttggcggtcgctcgctgtaccgcgactacgacagcggccgcgagatgatctcctacaccaacggcatgctgcgctaccacaacggccagggcctgttcaccgaatgtgacttccaacagcgctgccggcgttatgccagtgagggcttcatcgccgaccaggcccgctaccttgggccggccgacagcctgctgggccaacagatcggtgccttggccgtggtactcgaccaatccttgctgcaaaccccgctcaacctgcgctaccagttcggcggcccttcgccgatcaagttgcgcaagcgcattgacgatgactgggccgacaacctcattggcgcccagtatctggaaatgcccggaggctcgcacacccgcgtgcgggtcaaggtccgctcgctggaccccaaacgtgcggcctacatccggctcaaggccaagcagttggaacaggacgtgccgctgggcctgccagaagaggtaaaggtcaccaccgacgcgccactggagatggagttcagcttcgacaacccgaccgagcgcaaggcgttttccttccacttgctgggctatggcggcggcaaggtagaagtcagcgactttagcgtgatcaccgccctgcctggtgaggatgacggcgccgatgaacgggccgaggggcatatcgcccaatcgggc

SEQ ID NO: 31704 - DNA, 1119 bp, Pseudomonas putida
atggaaccgggcctgcgcgagcgcaccggtgaacacctgcggcaactcggcctggcccgcgtgttgatcgtgaccgatgccggggtcaaggcagcaggcctgctggacagcgtctacgccagcctcgacaaggccggtatcgcctacgaggaagtggcggacatcaaggccaacccgcgcagtgacgacatcaaccacaccgcccagcgctatcggggcacgggtatcgacggcctgctggccgtgggtggcggcagcgcgatggatgcggccaaggccatcagcctgctgctcacccacgacggccgtatcgaggactacgaagggtcgttcacgcttacccatgccatcccgcccatcgtcgccatcccgaccacggccggcaccggcagcgaagtgacctgcttctcggtgatcaccgacaccgcccgccacttcaaaatgaacgtgctggactatcgcatcggcccggtgctggcattgctcgactcccatatcaccgacacgctgccgccgtcgattgcagccgcaaccggcatggatgccctgacccatgccatcgaagcctacacctgccgcgtggcaaacccgatcagcgacggcctggcgctgcatgccatccgcctgatcagccagcacctcaaggcggccgtgcaggagcccgacaaccaggcggcccgggagcagatgctggtggccagcctgattgccggcatggccttcggcaacgccgacgtcggcagcgtgcactgcatttccgaagccatcggcggcatgtacgacacgccccacggtgtgggcaacgcgatcttcctgcccttcgtgttcggtcacaaccgtgatgccgatatcgtccgccatgcccaggtcgcctacgcgttggggatcgaccccacgctgtctccggtcgatgccgccgaggccgccgtcggccatctgttccagatgagcaaggacctgggcatcccccgcttcgccgaggtcaagggtgtgcgcgaggaagacttcccgaccattgccgagaagtccaagcagaacttctcggacgccagcaatgccaaggcgatgtccgtagaggcctaccacgacatcatcaccaccgcttaccacttcgtcgcg

SEQ ID NO: 31705 - DNA, 1101 bp, Pseudomonas putida
atgcagttgctgaccctccccccttcgccgtcactggcgacatcgatccgggcaaccgcacaggtctttgaagacgctagatcgcaggcgctgctcgcccacctgcaacaggtcgcccccagcgaagccagcgtcctgatcattggcgaaaccggcacaggcaaagagctggtcgcacgccacatacacaacctcagcggacggcgcaacggccccttcgtcgcggtgaactgtggcgccttttccgagtcgctggtggaggccgagctgttcggccacgagaaaggcgccttcaccggcgccctggcggctaaggccggctggttcgaggagggcaacggcggcacgctgttcctcgacgaaatcggcgacctgcccatggccatacaggtcaagctgttgcgcgtgctgcaggagcgtgaagtggtgcgcctgggctcgcgcaagagcatccccatcgacgtgcgcgtggtcgccgccaccaacgtgcaactggacaaggccatcgctgccggcaacttccgcgaagacctgtactaccgcctcaacgtggtcagcctgcaactctatccgctgcgagaacgcccgggcgacatcctgccgctgacccgacacttcatcaagacctactgcaaccgcctgggttacggcgaagtacgcctgtcccccgaggccgaacgcaagttggtgagctacgactggcccggcaacatccgcgagctggaaaacgtcatccaccacaccctgctggtgtgccgcaatggcctggtgcaggacgacgacctgcgcctgtcgcacctgcgcatcgagcgccaggacaagtcgccggtgagcaccgccgaaagcgccgaagaacagttgctgcgagcctttcagcgcctgttcgaggagcaggccggcggcctgcacgagaaggtcgaggacagcctgctacgcagtgcctatcgtttctgccactgcaaccaggtgcacacggccagcctgctgggcctgagccgcaacatcacccgcgcccgactgatcgccatcggcgaactggtggtcaatcggcgccggccagagccccagacgcgccctgagcgggcgatgcaactatcaatc

SEQ ID NO: 31706 - DNA, 1236 bp, Pseudomonas putida
atgcgtctgtttcatacctccgactggcacctgggccaaagcctgcacggccaggaacgcgacttcgaacacgcctgcttcctcgactggctgctcggccaactgcgcctgcgccagccggatgcgctgctgattgcgggcgacatcttcgacaccgtcaacccgcccgtcaaagcccaggaacgcctctacgacttcatcgtccaggcccacgagcaacagcccaagctggacatcgtgatgattgccggcaaccacgactccggttcgcgcatcgagctgccggccgcactcatgcgccgcctgcgcacccatgcgttgggccgtgtgcactggctggacgagggccagctggatgccgaacgcctgttgattccgctgaccaacggccgtggcaaggtggccgcctggtgcctggccctgccgttcctgcgcccggccgaagtgaccggcccgcagctgggtgacgactacctgcaaggcatcacccaggtgcatcagcaactgatcgccgccgccctgaagaaacgcaagaaagaccaggcgctgatcgccatcagccacgcgcacatggccggtggcgcggtatcggaagactccgaacgcagcctgatcatcggcaacgccgaggcgctgccggccaagctgttcgacaaggctatcagctacgtcgccctgggccatctgcacaagccgcagaaggtcaaccgcgaagagcgcatccgctacagcggctcgccaatcccgctgtcgttcgccgaaatcaactacccgcaccaggtcctggaagtggagttggacggtaacggcctggtcagcgtcgagccacgccccgtaccacgcgccgtggccctgcaacgggtgggcccggcaccgctgggcgagctgttgcagcaactggccgacctgcccgtggtcgacctgcttgaagaccccaaccgccagccctggctggaggtgcgggtgttgctcgacgagccgcaacccgacctgcgccagcagatcgaaaccgcgcttgaaggcaaggcggtacggctgattcgtatcagcgccgagtacgccggccgcaacaacgccgaagacgatgacctggcctttgtcgaactggcccagatgaccccgcaagacctgttcagccgcgcctgggaacaagcctacggcaaccccgccgacgatcaggcgctggccgacttcgccctgctgttgcaggacgtgcagcaggaagaggaacagcca

SEQ ID NO: 31707 - DNA, 1275 bp, Pseudomonas putida
atgcgttcaactcgccgggtcgcaatcctgggcggcaaccggatccctttcgcccgctccaatggcgcctacgctacggccagcaaccaggcgatgctcacggccgcgcttgaaggcttgatcgaacgctatcgcctgcacgggctgcggttgggcgaggtggtggccggtgccgtgctcaagcactcgcgcgacatgaacctgacccgcgagtgcgtcttgggttcgcgcctgtcaccgcagaccccggcctatgacatccagcaggcctgcggtaccgggctggaggctgcgctgctggtagccaacaagattgccctggggcagatcgactgcggtattgcaggcggtgtcgatagcacctccgatgcgccgatcgccgtcaacgaaggcttgcgccatatattgctgcaggccaaccgtggcaaaagccttggcgaacggttaaagcccttcctcaagctgcggcctcatcacctgaaacccgagctgccacgcaatagcgagccgcgtacggggttgtcgatgggcgagcattgcgagcgcatggcccacacctggcgcgttggccgcgccgagcaggacgaattggcgctgcttagccaccagaagctggccgctgcctatgccgagggttggcaggacgacctgttgacgccgtttctttcgctggcacgggacaacaacctgcgccccgacctgagtcttgaacagttggccagactcaaaccagcctttgaccgcagcgggcagggcacgttgacggcgggtaattccacgccgttgaccgatggtgcttcgctggtgctgttgggcagcgaggcgtgggcgcagcagcaggggttgcaggtgcttgcctatctggtcgatggcgaaaccgctgcggtggattttgtcacggggcgcgaagggttgttgatggcgccggtgtatgccgtgccgcgcttgctggcacgcaatggcctgacgctgcaggactttgactactacgaaatccacgaagcctttgcggcccaggtgctgtgcacgctcaaggcctgggaagatgccgattactgccgtgaacggttgggcctggaggcgccgcttggcgcgatcgaccgcagcaaactcaatgtcaggggcagttcgctggcggccgggcacccgtttgcggcaaccggtgggcggatattggccaacctggccaagctgttggcaacggcgggtaaggggcgcgggctgatttcgatctgtgcggcaggcgggcagggggtgaccgttatcgtcgagcgc

SEQ ID NO: 31708 - DNA, 1662 bp, Pseudomonas putida
atgcgtcctctggtcgtgcccctgatgttgctgctttgggcacttgctgcccacgccgacccgttgccggggtttctcgacagccatgaatacgagcggcgtctgcccagcgccaacctgccgatgacggactacgcccctgtgagcccccgcatacggttggcaggggcggctatcgacaaccccgactgggccccggccaacacccggctggtgctgcaaaaagtgcgcttcgagggcggcacggtgttccccttgggcgacctgcgcgaacactatcagccgctgatcgggcgcgaaaccacgttgggtgaattgcagcaatacacccagcgcctgacccaacgctaccggcagaagggctacttgctgtcgtatgcctacctgcctcctcaggatgtggccgatggcagggtcgacgtggtgctggtcgaaggttacgtacgtgattaccacgtggaaggcgatattggaccggccaatgagtatttgcagcagttgctggcgcgcattgaggccgagcgcccactgagccgcgaaacgctggagcgctatctgggcctggctacgcgcatgccaggggtcgtggtagaggccgaactggcaatggcacgggctgccgatggtgtcgcccagctgaccgtgcatgcgcggcgcaagcagctcagcgccgctgtgaccgtggccgactccagccgtgatgctgcacaggccctgatcaccgtagccagcaatgcccagacccgccatggcgaacgcgtcacggccagctggctgctgccccctggcaatgaccgggtctattaccagcgcctcgattacagccagtacctggacgccgccggtagccaactgctgctgtcggcgtcgcgctaccgcagcgagcccggcacgcgcatacgtttggacgatggccgcgatatcacccgcgagcacgacagtgagcgctatgcgatcggcctgcgtcagccggtggttgtcaggccgaatgagtggctggcggtgcagggccacctgtactcggtcagtgagcatgatgaagaccggatggccgagcagccaacgtctcgcaaatacgacacctatgtgcgggcgctgtcattcgaaggtgactggcgcaaggtggagcaggggcgtttgcgtatcgtcagtgccggggtccatcagggtctggactacctgggggcacgcagcgatgctgactacgatctcgacttcctgcgcttgcggctttccggtttgcagagcgacacgctgctggataactggcagggggtggtgtccggggcgttgtactggagtgatgatcgcttgcccgacagcgagcgtgcggggtttggcgggcagaatttcgggcgcggttacccgcgcgatcaggcggacggtgacaagggctggggtgtggcttacgagctcaactacagcgtgcgcagtagatggcttgcgcaggttcaaccctatgcggtggtggataccgctcaggcctggcataaccggggaccggtggaggacgcccatctggcttcgctggcgctgggtgttcggttagggggtgggcatgtgttcaatgtggcgctggaagtggccaagccgttggcggatgtggcgctggatagcctggaccgtgggcctcggctgtcgttgaacctggcgatccagttg

SEQ ID NO: 31709 - DNA, 2313 bp, Pseudomonas putida
ttgttgcgtgccacgctgatcagtctgctggtgctcggcggcctgttctggctggctgaccgtgtctggccgttgccgctgccgggtgacgacctggcccgggtagtgctggccgaagacggcacgccgttgtggcgctttgccgatgctgatggcgtgtggcgctaccccgtaagccctgaagaggtttcgccgctttacctgcaggctttgctgacttacgaggaccgttggttctacaaccacccaggggtcaacccgctggcattggcccgggcggcctggctgaacctgcgcggcgggcgtgttgtgtcgggcggcagcacattgtcgatgcaggtggcacggctgctcgacccgcacgaccgtaccctggtcggcaaactgcgccagctatggcgcaccttgcagctggaatggcacttgtccaagcgcgacatcctgcagatctacctgaaccgcgcacctttcggcggcacgcttcagggcgtggcggcagccagctgggcgtacctgggcaagtcgcccctgcacctgacacctgccgaagcggcactgctggccgtgctgccccaggcacccagccggctgcgcccggaccgccaccccgagcgtgcccagcgtgcccgggacaaggtgctgcagcgcctggctgagtaccaggtatggccggcccagcaaattcgcgaggcggccgaggagccgctggtgttggcgccacgccaggagccggccctggcgccattgttggcccggcgcctgaacagcgctgacagtccgccgctgatccgtaccacgcttgacgctgcgcttcagcggcgcctcgaagacttgctgctgggctggcgcgcacggctgccggagcgtacctcggccgccattctggtggtcgaggcgcagagcatggcggtgcgcgcgtacctgggctcgatagatttgtctgatgagcgccgctttggccatgtcgacatggtgcgctcgttacgttcgcccggctccaccctcaagccgtttctttacggcatggcgctggacgatggcctgatccattccgaatcgctgttgcaggatgttccacgacgctatggcgactatcgccctggcaacttctccatggggttcagcgggccggtgtcggccagctcggcgctggccctgtcgctcaacctgcccgccgtgcaattgctggaggcctacggcccgaaacgctttgccgcacaactgcgcatggcgggcatgccgttgatactgcccccccttgccgagcccaacctgtcgttgatcctgggcggtgccggcagccggctggaggacctggtcggcggctacgcggcgctggcgcggggtggcaacagtgcgcaggtgcgcttgcagccacaggcccccctggtggagcaccggttgctgtcaccgggggcggcgtggatcatccggcgtattctcagcggccaggcgcgcccggaccgcgacccgcacgccgaactggtgcagcgcccgctactggcctggaaaaccggcaccagctacggctttcgcgatgcctggtcgattggcgtggggccgcgctacctgatcggcgtatggattggccgccccgacggtacaccggtgcctgggcagttcggcctggcgtcggcggcgccgctgatgttgcaggtgcacgatctgttgagcaatcgcgacagccaacgcggcatcagcgtcccggtagcgccggtacctgcgaatatcggcgttgcagcgatctgttggccgctgggtcagccgatgagcaagcaggacaccaactgtcggcgtcagcgctttgcatggaccctggacggcaccacgccgccaaccttgcaggcagccgaccagccgctgggcctgggtttgcgcgaacaagtatgggtcaacgagcggggcttgcgggtcgatggcagctgcccgggcgccaaggcgcgtgacatcgccctgtggccggcgccgctggagccttggctaccccgtgtcgagcggcgcatggcgcgtttgccggccatcgacccggcctgcccgccgcaggcgccggccagtgcaccaccgctgtcgatcgtcggcgtgcgcccaggcgacaatctgcgccgcccggccaccagcactgagccgttgcaattgcaggtatctgccttgggtggtggtggacggcgctggtggttcctcaacggccagccgttgggtgaaacccaggggcaggacagcttgttgctgcgtttgccacaggtcgggcaggccgaactcagcgcgctggacgaaagcggtcagacggcgcgggtggcgttccaggtcagtgag

SEQ ID NO: 31710 - DNA, 948 bp, Pseudomonas putida
atgcagctggttcgaggtcttcacaacctgcgccccgagcaccggggctgtgtcgccaccattggcaacttcgacggggttcaccgcggccaccaggcaatcctggcgcgcctgcgcgagcgcggtcaggccttgggcctgccgacctgcgtggtgatcttcgaaccacaaccacgcgagtacttcgcacccgataccgcgccagcgcgcctggcccggctgcgcgacaagatcgagctgctggcgaccgaaggcatcgaccgggtgctgtgcctggcgttcaaccagcgtctgagcaagctcagtgccgatgccttcgtcaaggccatcctggtcgacggcctgggcgtgcgtcatctcgaagtgggcgatgacttccgcttcggctgcgaccgcgctggcgacttcgctttcctggtcgaggccggcaacgcgtacggctttaccgtcgaggccgccaacacggtcatccaggatggcctgcgggtcagcagcaccgaagtgcgcaaggccttgtccgagggcgacttcgaactggccgaacacctgctgggccgcccgtaccgcattacaggccgcgtgctgcacggccagaagctggcccgccagctcggcacaccaaccgccaacatccagctcaagcgccgccgcgtgccgctgtccggggtatacctggccagcatcgtgatcgacggcaaagcttggccgggtgtcggcaatatcggcgtgcgccccaccgttgccggtgatgggcgcccgcacctggagattcatcttctggactttgccggcgatctttacggccggcgcctgacggtggagttccaccacaagctgcgtgaagagcagcgattcgcctccctggaggcgctgaagtcggcgatcgatgcggatatcgccgccgcacgtgcacattggcacgctcaaccgctaacgaagagcctgaaa

SEQ ID NO: 31711 - DNA, 1002 bp, Pseudomonas putida
atgacacaccctttggatatcgccgtcgtcggcgccaccggcagcgtcggtgaagccttggtgcagatcctcgaagaactggcattcccggttgccactctgcacctgctggccagcatggaatcggcgggcagcagcgtgatgttcgctggcaagaaactgaaggtgcgcgaagtcgacagcttcgacttcgcccaggtcaagctggccttcttcgccaccggcgccgccgtcagccgcagctttgccggcaaggcgctgcaggcgggctgcacggtcatcgacctgtccggcggcctggacgacgccctggccctggtgccggaagccaacgccgaacgcctggccagcctgtcgttgccagcgcgtatcgtcagcccatgctcggccgcagtagccctggccgtcgcgctggcgccgctcaaaggcctgctggacatcgagcgggtgcaagtgatggccgcgttggcggtgtctgcgcaaggccgtgaagcggtcagcgagctggcccggcaaaccgccgaactgctcaatgcccgcccgctggagccgcgcttcttcgaccgccaggtggcattcaacctgctggcccaggtcggtgctgccgacgagcagggccataccgcgctggagcgccgcctggtcagcgaactgcgcgtactgctgggcctgcctgaactgaagatttccgtgagctgtgttcaagtcccggtgtttttcggcgatagcttcagtgtggccgtgcaaagccgtcgcccggtagacctggcagcggtcaaccaggccctggaggcagccgacagcatcgagcgggtggaaaacgatgattatccgaccccggtaggtgacgcagtgggccaagacgtggtctatgttggacgtgtacgtcacggtgttgatgaagaccagcaactcaacctctggctaaccaccgacaacgtgcgcaaaggcgccgcgctcaatgccgtgcaagtggcgcaattgttgattaaacacatgccg

SEQ ID NO: 31712 - DNA, 888 bp, Pseudomonas putida
atggagcaatttcgcaatatcggtatcatcggtcgccttggcagctcgcaggtgctcgacaccattcgccgactgaaaaaattcctcctcgatcgccacctgcacgtgatcctcgaggacaccattgccgaagtgctgcccggccacggcttgcagacgtccacccgcaagctgctgggcgaggtctgcgacctggtcatcgtggtcggcggcgatggcagcctgctgggtgctgcccgcgcgctggcccggcacaacattccggtgctgggtatcaaccgtggcaacctgggttttctcaccgacattcgtcccgacgagctggaacagaaggtcgccgaagtgctcgacggccactacctggtagaaaaccgtttcctgctgcaggccgaggtgcgtcgccaccatgaggccatcggccagggcgatgcgctgaacgacgtggtgctgcacccgggcaagtccactcgcatgatcgagttcgagatctacatcgacggccagttcgtctgcagccagaaggccgacggcctgatcgtcgccacccccaccggctccaccgcctatgcgctgtcggccggtggcccgatcatgcaccccaagctcgatgccatcgtcatcgtgccgatgtacccgcacaccttgtcgggtcggccgatcgtggttgacggcaacagcgagctgaagatcgtggtgtccaaggacctgcagatctacccgcaggtgtcctgtgacggccagaaccacttcacctgtgcccccggcgacaccatcacggtcagcaagaagccgcaaaagctgcgcctgatccacccgctggaccacaattactacgaggtctgccgcaccaaactgggttggggcagccgcctggggagcagtgacgac

SEQ ID NO: 31713 - DNA, 891 bp, Pseudomonas putida
atgagcaactggttagtcgacaaactgatcccttcgatcatgcgttccgaggtgaaaaagagctcggtgcctgagggcctgtggcacaagtgcccgtcctgcgaggccgtgctgtatcgtccggagctggaaaagaccctggatgtctgccccaagtgcaatcaccacatgcgcatcggcgcacgtgcgcgcatcgacatcttccttgacgccgaaggccgtgccgaactgggcgctgacctggaaccggtcgaccgcctgaagttccgtgatggcaagaagtacaaggaccgcctgaccgctgcgcagaagcagactggcgaaaaggacgcgctgatctccatgagcggcaccctgatgggcatgccgatcgtggttagcgccttcgagttctcgttcatgggcggctccatgggtgccatcgtcggcgagcgcttcgtccgtgcggccaactatgccctggaaaaccgctgcccaatggtttgcttctccgcttcgggcggtgcgcgcatgcaggaagcgctgatctcgctgatgcagatggccaagacctctgccgtgctggcgcgcctgcgcgaagaaggcatcccgttcatctcggtactgaccgacccggtgtatggcggtgtttccgccagcctggcgatgctcggcgacgtcatcgtcggtgagccgaaggccctgattggtttcgccggtccacgcgtgatcgagcagaccgtacgcgagaagctgcctgaaggcttccagcgcagcgagttcctgctggagcacggtgccatcgacctgatcatctcccgtggcgaattgcgcccgcgtctggcccgcctgctggcgcagatgaccggtcagcaaacgccggaagaagcgcgtgaggcggctgccgtcgcg

SEQ ID NO: 31714 - DNA, 1182 bp, Pseudomonas putida
atgtccgaacgactccccgaacccgatctcgactatctcaaacgcgtgctgctggaaatgctcgccatccccagccccaccggcttcaccgacaccatcgtgcgctacgtggccgaacgccttgacgaactgggcatccccttcgagctgacccgccgcggcaccattcgcgccaccctcaaaggccggcaggccacccccgaccgcgccgtctctgcccacctggataccatcggcgccagcgtgcgccaattgcaggacaatggccgcctggccctggcgcccgtcggctgctggtccagccgttttgccgagggcagccgggttagcgtgtttaccgataccggggtattccgtggcagcgtgctgccgctgatggccagcgggcatgcattcaacacggcgatcgaccagatgccgatcagctgggaccacgtggaagtgcgcctggatgcctactgcgccacgcgcgctgactgtgaggcactgggcgtgagcattggtgatttcgtggccttcgacccattgcccgagttcaccgaaagcggccacatcagcgcccgtcacctggacgacaaggctggcgtagcggcattgctggcggcactgaaggctgtggtggaaagcggccgccagccgctgatcgactgccacccgctgttcaccatcaccgaggagaccggctcgggtgcagccggcgccctgccctgggacgtcagcgagttcgtcggcatcgacatcgccccggtggcgcccgggcaggcttccagcgagcatgcggtcagtgtggccatgcaggactcgtcggggccttacgactaccacctgtcccggcacctgctgaaactggccggcgaccatgacttgccggtgcggcgcgacctgttccgctattacttcagcgatgcccattcggcggtgactgccgggcacgatattcgtaccgcgctggtggcgttcggttgcgatgccacccatggttacgagcgcacccatatcgacagcctggcagcgctgagccggttgttgtcagcctacctgctgagcccgcccgtatttgccagcgattcgcagccggccaatacgtcacttgagcgcttcagccaccagctggagcacgatgcgcagatggaaagcgacacgcgggtaccggccgtggacagcctggtcggaaacaaaggc

SEQ ID NO: 31715 - DNA, 738 bp, Pseudomonas putida
atgttcgactacaccgcccgccccgacctgctgcaaggccgggtcatcctggttaccggtgccggccgtggcattggtgccgcggctgccaaggcctatgccgcgctgggtgccaccgtgctgctgctgggcaagaccgaggccaacctgaacgaggtctacgaccagatcgaagccgccggccacccgcagccggtggtcatcccgttcaacctggaaaccgccctgccacaccagtacgacgagctggcggccatgatcgaaggccagttcggccgcctagatggcctgctcaacaatgcgtcgatcatcggcccgcgcacgccgctggagcagttgtcgggcgacaacttcatgcgcgtgatgcacatcaacgtcaatgccaccttcatgctcaccagcaccctgctgccgctgctgaagctgtcggaagacgcttcggtggtgttcaccagcagcagcgtggggcgcaagggccgggcttactggggcgcctatggcgtgtcgaagttcgccaccgaaggcctgatgcagaccctggctgatgaactggaaggcgtggcgccggtgcgcgccaacagcatcaacccaggcgccacgcgcacggcgatgcgggcccaggcctaccccggcgagaacccgcagaacaacccgctgcccgaagagatcatgccggtgtacctgtacctgatggggccggacagcacaggggtgaacgggcaggcgttcaacgcccaa

SEQ ID NO: 31716 - DNA, 1350 bp, Pseudomonas putida
atgagcgtgtctttgatcgcttccgaccaattccgcatcgttgtcggcctcggcaagagcggcatgtccctggttcgcttcctggcgagccggggcattgcctttgcggtcgccgatacccgcgagcagccgccggaactggaaaccctgcgccgtgattacccgcaggtggaagtgcgctgtggtgaactggacgtggacttcctgtgccgcgccaacgagctgtacgtgagccccggcctggccttggccacgccggccttgcagcaggctgccgcgcgtggcgtgaagctgtctggcgacatagagctgtttgctcgccatgccaaggcgccgatcgttgccatcagtggttccaacgccaagagcaccgtcacgacgctggtcggtgaaatggccgccaaggccggcaaacgcgtggccgtgggcggtaacctcggtaccccggcactcgacctgctggccgatgacatcgagctgtacgtgctggagctttccagcttccagctggaaaccactgaccagctcaacgccgaagtggcgaccgttctgaacatcagcgaagaccacatggaccgctatagcggccttccggcctaccacctggccaaacaccggattttccgcggtgcccgccaggtggtggtcaaccgccaggacgccctgagccggccgctgccggtggaaggccgtccatgctggaccttcggcctcaacccgcccgacttcaaagcgtttggcctgcgtgaagtggacggtgagaaatacctggcgttcgagttccagacgctgatgccggcgcgtgaactgaaggttcgcggtgctcacaaccagagtaacgccctggcggcgctggccctggggcatgctgccggcctgccgttcgagcccatgctggaggctctgcgcgaattcggtggcctggcccaccggtgccagtgggtacgcgagcgtaatggcgtgaactggtacgacgattccaaagccaccaacgtcggtgcagccctggccgccatcgaaggcctgggcgctgatatcgaaggcaagttggtgctgatcgccggtggtgacggcaaaggtgctgaattcactgcgctgcgcgagccggtcaagcgtttctgccgcgccgtggtattgcttggccgtgatgccgagcgcctggccgaggccttgggcgatgccgtgccactggttcgggtcaagacgcttgacgatgccgtacagcagtgtgccgaactggcccaggccggcgatgccgtgctgctgtcgccagcatgcgccagcctcgacatgttcaagaacttcgaggaacggggacgcctgttcgcccaggcagcgggaggtcttgca

SEQ ID NO: 31717 - DNA, 1080 bp, Pseudomonas putida
atgctgctgctgttggccgagtatctgcaacagttccacaaaggcttcgcggtctttcagtacctgtccctgcgcgggattcttggtgtactgaccgcgttgtccctggcgctgtggctgggcccctggatgatccgtaccctgcaaattcgccagatcggccaggccgtgcgtaacgacggcccgcaatcgcacctgtccaagtccggcaccccgaccatgggtggggcgctgatcctgtcggccatcgccgtcagcaccttgctgtgggccgacctgagcaaccgctatgtatgggttgtgctgattgtcaccctggcgttcggtgccattggctgggtcgatgactaccgcaaggtgatcgaaaagaactcgcgtggccttccgagccgctggaagtacttctggcaatcggtgttcggcctggcggcggcggtgttcctgtacaagacggcgccaaccagcgtcgagaccacgctgatcctgccgttcatcaaggatgtcaccattccgttgggcgtcggcttcgtcgtactgacctacttcgtcattgtcggctcgagcaacgcggtcaatctcaccgatggccttgacggcctggcaatcatgccgacggtgatggtcggcggcgcgctgggcatcttctgctacctgtcgggtaacgtgaagttcgccgaatacctgctgatcccctacgtgccgggctcgggcgaactgatcgtgttctgcggcgcgctgatcggtgccggcctgggctttctgtggttcaacacttatccggcgcaagtgttcatgggcgacgtcggcgcgctggcactgggcgccgcgctgggcaccatcgccgtcatcgtgcgccaggaaatcgtgctgttcatcatgggcggcatcttcgtggtggaaaccctgtcggtggtgatccaggtcgcctccttcaagctgaccggcaagcgcgtgttccgcatggcgccgattcatcaccactttgaactcaagggctggccagagcccagggtgatcgtccgtttctggatcatcaccgtgatcctggtactgattggccttgcaaccctgaaactgagg

SEQ ID NO: 31718 - DNA, 1488 bp, Pseudomonas putida
atgatgacaatgccattaagcaaacttttcgcccatgccagccgtgatccgttgattcgcgagctgaccctggacagccgtagtgtgcgcccaggtgacttgttcctggcggtgccgggtgccaaggtcgatggtcgcgagcatatcgccgatgccctggcccgtggtgctgctgccgtggcctatgaagagcagggcgccaacgtgctgccgctgaccgatgtgcccctgattccggtcaaaggcctgatcgctcagctgtcagatatcgccgggcgcttctacggtgaaccgagccgccagttgaatctggtcggtgtgaccggcaccaacggcaagacaagtgttacccaactggtcgcccaggcgctcgacctgcttggccagcgctgcggcctgattggcaccctgggtaccggtttctacggcgagttgcagagcggccgcctgaccacgcccgacccgattgccgtgcaatcgaccctcaacgacctcaagaaaggcggcgccagggccgtggccatggaagtgtcttcccatgccctggagcaaggccgggttgccgcactggaattcgacatcgcggtgatgaccaacctgtcccgcgaccacctcgactatcacggcagcatggaagcctatgaggccgccaaggccaagctgttcgcctggccgagcctgcgttgccaggtggtcaacctggatgatgactttggtcgtcgtctggcggccgacttcgcgcgtcgcccaagtgtcgaccatatcgaaacccggctgctgagctacagcctggaaagcccagaagcctcgttgttctgccgcgaagccgtattcagtgacgatggcgtgcgcgccaccctcgtcaccgcccaaggtgagcgtatcttgcgcagccaactgctgggccgcttcaacctgagcaacatgcttgccgctgtggcgaccctgctggcgctggactatgcgctggacgagatcctcaaggtcacgccgcaactgcaggggccggtaggccgcatgcagcgcctgggtggcggcgacaagccgctggtggtggtcgactatgcacacacgccggatgcacttgaaaaagtactcgaggccctgcgcccgcacgctcacggcaagctgttgtgcctgttcggctgcggcggtgaccgtgatcgcggcaagcgcccgctgatggccgaagtggccgagcgcctggctgaccgcgtactggttaccgacgacaacccgcgtactgaagatccgtcacgcatcttcgatgacattcgccccggtttcaccaggcctgacgacgtcgagttcgtcgccggccgtggcgaagccatcgcgcacctgattgccaccgctgctgccaacgatgtgatcgtgctggccggcaaggggcacgaggattaccaggagatcaatggcgagcgccatgatttctccgatttgaccgaagccgaaaaggcacttgcagcctgggaggctccacatgct

SEQ ID NO: 31719 - DNA, 945 bp, Pseudomonas putida
gtgaccatagatagcggcttcaaccacattaccgtcctgctcgacgaagctgtcgaggcattggccttgcgcgccgacggttgctatctggacggcactttcggccggggcggacacagccgtctgatactcagcaagctcgggccgcaagggcggctcttgggcttcgacaaagatccacaagcgattgccacggggcaagcgctggcggccgaagacggccgctttgtcattgtgcagcgcagttttgccgagctgggtgcggaagtggcagcgcgcggcctgcacggcaaggtcagtggtgtgttgctggacctgggcgtgtcctcgccgcagctggatgacccggagcgtggcttcagcttcctcaatgatggcccgctggacatgcgcatgaacccggaccagggcgtcagtgccgctgagttcatcgccactgcgcctgttgaagaaatcgcccgcgtcttcaaggagtacggcgaagaacgctttgccgggcgaatggcgcgtgcagtggtcgagcgtcgtgagaagcagcccttcacccgtaccgccgacctggcggaggtgctcaaagtggccaaccctgcatgggaaaagggcaagaacccggctacccgagccttccaaggccttcgcattcacgtcaacaacgagctgggcgacctggaggctggccttgaggctgcgctcgatgcgctcgaagtcggtggtcgcctggcggtcatcagtttccactcgctggaagaccgtatcgtcaaactgttcatgcgcaagctggtgaagggtgaggccgacaacctgccgcgtaacctgccggttcagcacaaggtcttcgagccgaaaatcaagctcatcggcaaggctcagttcgcctccgaggccgagctcaaggccaacccgcggtcgcgtagcgccgtgatgcgcgtggcggagaagctgcgg

SEQ ID NO: 31720 - DNA, 453 bp, Pseudomonas putida
gtgttccgcggagccaacgccgtcagcctcgatgccaagggccgtctcgccatgccgagtcggtaccgtgacgagctcgactcacgttgcaatggccaactgatcgtgaccattgacgccgtagacccctgcttgtgtgtttatcccctcgatgagtgggaacagatagaagccaagttgcgtgccttgccatcgttgcgtgaggaaaaccgccgcctccagcgtttgctgattggtaatgcggttgacctggagctcgatggcagtgggcgtttcctggtgccgccccgcctgcgtgagtacgccaagctcgacaagaaggcgatgctggtggggcaactgaacaaattccagctgtgggatgaagatgcctggaacgcggtttcggcagctgaccttgcagctattcaacaaccgggcgccatgcccgacgaattgcgtgacctgatcctg

SEQ ID NO: 31721 - DNA, 390 bp, Pseudomonas putida
atgtcggcgactcaaaattacggcactggccgtcgcaagaccgcaaccgctcgcgtattcctgcgtccgggtactggtaacatttccatcaacaaccgttctctggacgtgttcttcggtcgcgaaaccgctcgcatggttgttcgccagccgctcgagctgactgaatccgttgagaaattcgacatctacgtcaccgtttccggtggtggtgtcagcggtcaggccggtgcgatccgtcacggtatcacccgcgctctgatggaatacgacgaaaccctgcgtggcgctctgcgtcgtgctggctacgtcacccgcgacgctcgtgaagttgagcgtaagaaagtgggtctgcgtaaagcgcgtaagcgtcctcagtactccaagcgt

SEQ ID NO: 31722 - DNA, 426 bp, Pseudomonas putida
atgaaaacttttactgctaaaccggaaacagtaaagcgcgagtggttcgtagtcgacgccgctggccagaccctgggtcgtctggctaccgaaatcgctacccgtctgcgtggcaaacacaaaccagaatacacccctcacgttgacaccggcgactacatcgtcgttatcaacgccgagcaggttcgtgtgactggtgccaagtcttccgacaaaatgtactactcccactccggtttcccaggcggtatcaaggaaatcaacttcgagaagttgatcgccaaggcccctgagcgtgttatcgaaactgcggtcaaaggcatgctgcctaagaacccgctgggtcgcgacatgtaccgcaagctgaaagtgtacgcgggtgctgctcacccacacactgctcagcagcctcaagaactgaagatc

SEQ ID NO: 31723 - DNA, 1194 bp, Pseudomonas putida
atgttcgagctcgtagacaacgtcccgcaaagtccggtcattaaagtgatcggcgttggtggtggtggcggcaacgccgtcaatcacatggtcaagagcagcatcgaaggcgtggaattcatctgcgccaacaccgatgcccaggcgctgaaaaacattggcgcgcgcaccatcctgcaattgggcacgggtgtgaccaagggcctgggtgccggtgccaatccggaagtcggccgtcaggccgcgctggaagaccgtgagcgcattgccgaagtgctgcagggcaccaacatggtgttcatcaccaccggcatgggtggcggtaccggtaccggtgcagcgccaatcattgccgaagtggccaaggaaatgggtatcctcaccgttgcagtggtgacccgtccgttcccgttcgaaggccgcaagcgcatgcagatcgccgatgaaggcatccgcatgctggctgaaagcgtcgactcgttgatcaccatccccaacgagaagctgctgaccatcctgggcaaggatgccagcctgctgtccgccttcgccaaggctgacgatgtactggccggtgccgtacgcggtatctccgacatcatcaagcgcccaggcatgatcaacgtcgacttcgccgacgtgcgcaccgtgatgggtgaaatgggcatggccatgatgggtactggctgcgccagcggcccgaaccgtgcgcgtgaagccaccgaggcagctatccgtaacccgctgctggaagacgtcaacctgcagggcgcccgcggtatcctggtgaacatcaccgcaggcccggacctgtcgctgggtgagtactccgacgtgggtagcatcatcgaagccttcgcctccgaccacgcgatggtcaaggtcggcaccgtgatcgacccggacatgcgcgacgaactgcacgtgaccgttgtggccactggtctgggcgcacgcatcgagaagcctgtgaaggtggtcgacaataccctgcagactgcccagcaggcgtacgaagcgtccaatcctgcgccggtgcgccaggagcagccagcggtcaactaccgtgacctggagcgcccgaccgtcatgcgcaaccaggcgcatgcaggtgctgccgcagccgctaaactgaaccctcaggatgacctggactacctcgatatcccggcattcctgcgtcgtcaggctgat

SEQ ID NO: 31724 - DNA, 867 bp, Pseudomonas putida
atgcaaggcgcgatgatacgtcagcagcaacccgttaccggccgtagcaagccggtgccgcgtggtgccagccggctggtggccgacgagcccgtatcggcgcgcctgccccggccaagcctgggcggcctgaagcgcttgctgtggccggtgttgctggtggcggccggctttggtgcctacgagggcgccgttcgcctgatgccgtacgccgaccgcccgatcagcaagatcgatgtgcagggcgacctcagctacatcagtcagcaatcggtgcagcagcgtatcgcgccctacgtggcggcgagcttcttcagcgtcgacctgccggcgatgcgcgccgagctcgagcagatgccgtggatcgcccacgccgaagtgcgccgggtgtggcccgacgaggtggtgatccgccttgaagagcagctgccggtggcacgctggggggacgcagccctgctcaacaaccagggtcaggctttcaccccgcgcgagctggccaactatgagcacctgccgcagctggccgggccgcagcgtgctcagcaacaagtcatgcagcagtatcaggtattgagccagatgctgcgccccttgggcttttccatcgctcgcctggagctgcgcgagcgaggcagctggttcctgaccaccggtgcgagcagtgccgggccaggcatcgagttgctgctggggcgcgatcatctggtggagaagatgcgccgtttcattgccatttacgacaagacactcaaagaccagatcaccactatcgcccgcattgatctgcgttattccaacggacttgccgttggttggcgggaaccgattgcaccgacgacggcccaacccgccgttgcgaagaat

SEQ ID NO: 31725 - DNA, 285 bp, Pseudomonas putida
atgagcgatcacgaacacggccatcagcaccaaagtcatagcgatatcatcaaaaggttgaagcgtgcggagggccacctgcgcagcatcgtcagcatgatcgaagacagccgggcctgcgtcgacatcgctcagcaactgcatgccgtggaaaaagccgtctgccaggccaagcgtgtgcttatccaagaccatatcgatcactgcctggaacacaccgtcgaagcactcgcgacaggtgaacgcgcatcgctcgaagacttcaagcaaatcactaagtacctc

SEQ ID NO: 31726 - DNA, 1500 bp, Pseudomonas putida
atgaccgacaagcaaaccgcaccgcaacaggccggcgacctggtcgaagtggaaaacttcgcaccacagccctcgctgctcgacagcatcatttcgcaaagccgcgtggcccgctccgacaccgagcgcaaccgcacccgcgacctgattggcgaactggtgaaccaggtgctcgagggtgagatgaccccgagcaaggacctgatcgccgtgctcgattcgcgcatcgccgagatcgacgcgatgctctccgagcagatgaacgagatcatgcacgcccgcgagtttcagcagttggaagcctcctggcgcggcctgaaataccaggtagaccagaccgagaccagcaccacgctgaagatccacctgctcaatgcctcgaagaaagacctggtacgcgacctgaaggccgccagcgaatttgaccagagcgcactgttcaagaaggtctacgaagaagagtacggcaccttcggtggcgcgcctttcggcatgttgatcggtgactacgagttcaaccgcaaccctgaagacatgtacctgctcgaagagatctcgcacgtcgcggcggcggcgcacgcgccgttcatctcggccgcttcgtccgagctgttcggctgggactcgttcaccgagatgtccggcccgcgtgacctggcgaagatcttcgacaccgtggaatacgccaagtggaagtcgttccgcgcctcggaagactcgcgttacgtcggcctcaccctgccccacgtgctcggtcgcctgccgtatggaccggataccaccccggtggaagaattcaacttcgtcgaaagcgtcgatggccgcgaccacaacaagtacctgtggatgaacgccgcctacgccctcggcacccgggtcaccgatgccttcgcccgctacggctggtgcgtggccatccgcggcgtggaaggtggcggcctggtcgaaggcctgccgacccataccttcaagaccgacgacggcgaaatcgccctcaagtgcccgaccgaaatcgccatcaccgatcgccgcgaaaaagagctgtcggacctgggcttcatccccctggtgcactgcaagggcaccgactatgccgcgttcttcggcacccagtcggcgcagaaacagaagcagtacaacaccgacatcgccaacgccaacgcacgcctgtcggcccagctgcaatacatcttcgccacttcgcgcatcgcccactacatgaaggcgatcatgcgcgacaagatcggcagcttcgcctcgcgcatggatgtcgagcgcttcctcaaccagtggctggccagctacgtgctgctcgacgataccgccagccaggaggccaaggccaagttcccgctgcgcgaagcccgcgccgaggtgttcgaagtgcccggcaagccaggcgtgtacaaggccgtgacctacttgcgcccgcactaccagctggatgagctgaccgcctcgctgcggctggttgccgagctgccacagggcgcgcgcggc

SEQ ID NO: 31727 - DNA, 1839 bp, Pseudomonas putida
atgaccgccgacctgattctgttcaacggcaaactgcacaccgttgaccgagaaaagcccaccgcgaccgccgtcgccatcaaggacggccgcttcatcgccgtgggcagcgacgccgaggccatggcccacaagggtgccgcctcgcagatcatcgacctcaagcagcgcacggtgatcccgggcctcaatgactcgcacctgcacctgatccgtggcggtctgaactacaacctcgagctgcgttgggaaggggtaccgtcagtggccgatgccctgcgcatgctcaaggaccaggctgcgcgcacgcctaccccgcagtgggtgcgcgtggtcggtggctggaacgaataccagttcgccgaaaagcgcatgcccaccctggaggaaatcaaccaggccgcacccgacaccccggtgttcctgctgcacctgtacgaccgcgcgttgctcaaccgcgccgcgctcaaggccgtcggctacaccaaggaaacgccgaacccgccaggtggcgagatccagcgcgacaagttcggcaaccccaccggcatgctgatcgcccgccctaacgcgatgatcctctacgccacgctggccaaggggcctaagctgccgctggagtatcaggtcaactccactcgccagttcatgcgtgaactcaaccggctgggcctgaccagcgccatcgacgccggcggcggctaccagaacttccccgacgactactccgtgatccaggagctggccgacaacgatcaattgaccgtacgcatcgcctacaacctgttcacccagaagcccaaggaagaactggacgacttcaagaagtggacctccagcgtcaagctgcacagcggtaccgacttcttgcgccacaatggcgcgggcgaaatgctggtgttctctgccgccgacttcgaggacttcctcgagccgcgcccggacctgccgcagaccatggaagaagaactggagccggtggtgcgccacctggtcgagcagcgctggccattccgcctgcacgccacctacaacgaatcgatcacgcgcatgctcgacgtgttcgagaaggtcaaccgcgacattccattcaacggcctgccctggttcttcgaccacgccgaaaccatcaccccgcagaacatcgagcgcgtgcgtgcgctgggcggtggtattgccatccaggaccgcatggccttccagggtgagtacttcgtcgaccgctacggcgccaaggccgccgagcagaccccgccgatcaaacgcatgctcgagatgggcgtgccggttggcgcgggtaccgatgccactcgggtgtccagctacaacccatggacctcactgtactggctggtcagcggcaagacggtcggtggcatggagctgtacccggaaggcctgagccgtgacaccgcgctgcaactgttcacccagggcagcgcctggttctccagtgagcaaggcaagaaaggccagatcaaggtgggccagctggctgacctggcagcattgtcgctggacttcttcagtgtcgatgaagaggcgatcaagggcatcgagtcggtgctgaccatcgttgatggcaaggtggtgtacggtgctggcgagttcgacaagtttggcccaccgcaggtgccggtgctgccggagtggtcgccggtgaccaaggtgcctgggcactggcgtgtcggtacgccatcgttggcagccgcggtgcaccagtgcagcgggccttgtggtgtgcatgcgcacagccacgaaaaggcgcggcattcgagcgtgccggtaaatgacttccagggcttctggggtgcgctgggctgttcgtgcttcgctttc

SEQ ID NO: 31728 - DNA, 2652 bp, Pseudomonas putida
atgagtgactccgcccgcgccgatgcgctgttggccaacctcccacgcaccggccggggccggctgaaggtgttcctgggcgctgcccccggcgtcggcaagaccttcgccatgctccaggccgcacacgcccagcaacgccagggcgtgcaggtgttggccggggtggtcgaaacccatggccgcgccgaaaccgaagcgttgctcggagggctgcatcagcagcccttgttgcgcagccagtaccgtggcgtcacccttgaggaaatggaccttgacggcctgctgcgtgccgcgccggccttggccctggtggacgaactggcccacacgaacgcccccggcagccgccacgccaaacgctggcaggatgtgcaagaactcttggccgcgggcatcgacgtgtacaccacggtcaacgtccagcacctggaaagcctcaacgacaaggtccgcgacattaccggcgtgcaagtgcgcgagaccctgccggactgggtgctgcaggaagcgttcgagctggtgctgatcgacctgcctccgcgagagctgctcgaacgcctgcgtgaaggcaaggtgtacgtgcccgagcaggcaagggcggccatcgatgcgtatttttcgcaaaccaacctcaccgccctgcgcgagctggccatgcagaccgccgctgctcaggtcgatgccgacctggcccacggctatcgtcagcgcggccaggaggcgccggccttgcgcggccggttgctggtgggcatagacggtgacgaccaggccgaacgcctggtgcgccatgccagccgcgtggcccagcgccgccacctgccctggagcctggtgcatgtggacaacggccgcctgcgtgacgaaaccgcacggcatcgtttgcaagccgcgcagcaactggccgagcgactgggcggggaggtggtactgctgcgtgctggcgaagtggcccgtacgctgatccagcatgctgtcgagcggcgggccagcctggtgctggtcgggcagtcccgcaaccgcctgcgtaggcgtttgttcggcgcgggtgtggcggcgcggctgctgcgcgaaagccgtggcctggaaatcaacgtgctggaccgcgacgtgcagccgccagcgccgcgttcagccgtgcggcgggtgtgggtgtggcgtcattacctgcttgcgctgctggccaccgtgatggctgcgggtctggcctgggcggtgtccagtgtgctcgcgttgcccaatatctcgctggtgttcctggcggcggtgttgctggtcgcggtgcgcagtagcctgggacctgcgctggcttgcgccgcgctgtcgttcctggtctatgacttcctgttcataccgcccaacttctcgttcaccatccagcgcgaagaagacgtgctgacactggtgttctttctgttgatggctgcgcttaccggcaacctggccgcgcgccagcgtcgccagttgcaggcgctgcgcgagacccaggcacagaccagccagttgctcgacctgtctcgccggttgacggtagccaccgaccgccaagccatattcaaggctgccggccagcacctggacgggtggcaggacgcccaggtgtgcttgctggagcgcaacgccgaaggccagttgcaagtggccagcggggaagcctgcaccttcagcgacaccgaacgggcggctgccgattgggcctggcagcatgggcaggccgccggtcacggcagcgataccctgcctaatggccgctggtggtggtggccattggcggtagacgatcagccgctggcgctgctgggtgtgcgcccgcgcaacgggcagccgctcagcgacccacgccggcgcctgctcaccgccctaggccagcccctggcccaggccctggcccgcgcacgcctggctgaacagctggaagccgcacgcctgcacggcgaaaccgagcaactgcgcagcgccctgctggcttccgtatcccatgacttgcgcacgccgttgaccgccatgcgtggcagcatcgacagcctgttggcgttgggcgatgcgatcccggctgaagaccgccgcgagctgctggagggcacccgtaacgaagccgaacgcctcgatcgctacatccagaacctgctggacatgacccgcctgggccatggcggcctcaagctggcccgcgactgggtggccccggcggatatcgtcggcagtgcgctcaaccgcctgcgggtggtgctggcgccgctgcgtgtgcacacggacgtgccgaccgagctgccattgctgttcgtgcatgcggcgttgatcgagcaggcactggtcaacgtgctggaaaacgccgcacgcttttcgccggccaatggtcggcttgagctgcaggtggcggtgcatgacgaccaactgcgcttgaccgtcagcgaccagggccccggcattcctgaagccgaccgcgagaaaatcttcgatatgttctacaccgccgcccgtggcgaccgcggcgggcagggtaccgggctgggcctggctatctgccagggcatgatcggtgcccatggcgggcagattctggtgggcgaaggcattgatggccaaggcaccagcatcactctatgcttgccgctgcctcctcaacctgaagccgaaagcgaaacccca

SEQ ID NO: 31729 - DNA, 1602 bp, Pseudomonas putida
atgagtgaacagaacctgatcgaagtgcgggacctggccgtggagttcgtgaccggggaccaggtcaaccgggtggtggacggcgtcagcttcgatattcgcaaaggcgagacactggccctggtgggcgaaagtggctcgggcaaatcggtcaccgcgcactcgatcctgcgcctgctgccctatcccctggcccggcaccccagcggcagcatccgctacgaaggcaaggacctgctgcagcagagcgagaagaccctgcagcgcattcgcggcaaccgcattgcgatgatcttccaggagccgatgacctcgctcaacccgctgcattgcatcgaaaagcagatcaacgaaatcctcctgctgcacaagggcctgacgggcaaggaagcgactgcgcgcaccctggagttgctggatatggtcggcattccagagccgcgcaagcgcctcaaggccctgccccacgaattgtcgggcggccagcgccagcgggtaatgatcgccatggcgctggccaacgagcccgagctgctgattgccgacgagccgaccacggcgctggatgtgaccgtgcagctgaagatcctcgagctgctcaaggaattgcaggcgcgtatgggcatggccctgttgctgatcagccatgacctgaacctggtgcgccgcatcgctcaccgcgtgtgcgtgatgcagcgtgggcaaattgtcgagcaagccgaatgcgcgacgctgttcagctcgccacagcaccactacacacagatgctgatcaatgccgagcccagcgggctgccggcgcacaacccggtgggcgcgccgttgctggaggtggatgacctcaaggtctggttcccgatcaagaagggctttctgcagcgcacggtcgaccatgtgaaggcggtggacggggtcaacttcagcttgccccagggccagacgctgggcattgttggcgaatccgggtcgggcaagtccacattgggcctggcgatcttgcggctgatttccagccagggcggcattcgctttcatgggcagaacctcgaagggctgaaccagaaagccgtgcgccccctgcggcgggaaatgcaggtggtgttccaggacccgtttggcagcctgagcccgcgcatgtgcgtggcggacattgtcggtgaagggctgcgcattcaccgcattggcaccgcgcaggaacaggaagcggcgattatcgcggccctggaggaagtaggcctggacccgcgcacccgccatcgctacccccatgagttttccggcgggcagcgccagcgcattgccattgcccgggcgctggtgttgaagccagcactgattctgctggatgaacccacgtccgcactggaccgcaccgtacagcgccaggtggtggaattgctgcgtaacctgcagcaaaagtacaacctgacctacctgttcatcagccatgacctggcggtggtgaaggcgttgagtcaccagttgatggtgatcaagcatgggcatgtggtggagcaaggggacgcgcaggcgatcttccatgcgccgcagcatccgtatacccgacagttgctggaggcggcgtttttggaggttgggggt

SEQ ID NO: 31730 - DNA, 1050 bp, Pseudomonas putida
atggttaacaatgatcgcctgctggtccagattctgctggtggcattgctgggggccggcctgtgggtgatggcacccttcatatcggcattgctgtggggcgccatcctggcctttgccagctggccgttgatgcgctttcttacgcgcctgctgggcggtcgcgagacgctggccgccggcctgctgaccatggcctggatcctgatcgtggcactgccgctggtgtggctggggttcaacctggccgatcacattcgcgacgctacggcgttcgtgcgtgacgtgcaggtcgacggcctgcccgatgcaccggcctggctgggtggcattcctttcgttggcgagcgtctggtcaacggttggcaatcgctggaccagaaaggcgcagccttgcttacctcgatcaagccttactttgggcaggtgggcaactggttgctggcgcgcagcgcgcagatcggcagcggcgtgctggaactgaccctgagcctggtgttcgtgttcttcttctaccgcgacggaccacgcttggcggcattcgtgctgcgcttgctgcaccggctggtgggcgagcgcgccgagtattacctggacctggtagccgctaccgtgcagcgggtggtcaacggggtgatcggcacggcggccgcgcaggccctgctggcactgatcggcttcctgatcgccggggtgcccggggcgatcgtgctggggttggtcaccttcatgctcagcctgatccccatggggccgccactggcctggatcccggccaccgcttggctggtgtggaagggcgaatacggcatggcggtgttcctgggtgtgtggggcacgttcgtcatcagcggtgtggacaacgtgctcaaaccgtacctgatcagccgtggcggcaacctgccgctggtgatcgtgctgctgggcgtgttcggcggcttgcttgcctttggcttcattggccttttcatcgggccgaccttgctggcggtaggctacagcctgctgctggactggagccgtaacgcggcgcagcagccgccacaacaa

SEQ ID NO: 31731 - DNA, 1981 bp, Pseudomonas putida
cgcccggcgctggtgcaggcgttcgtcaagctcgacccgcgtcagctcaagcgctccccggtaatgctggtggtggccctgaccgcggtgctgaccaccgtgctgtgtttcgcccccggcggcggcgtgagcatcggcgttgcggtgcagattgccctgtggctgtggttcaccgtgttgttcgccaacttcgccgaggcgttggccgaaggccgtggcaaggcccgcgccgacagcctcaaggccggcagccagggcctgaccgcccagcgtcgtctgcgtgatggcagctacgagacggtggctgccagcgcgctgcgcaaggacgacgtggtacgcgtggtcgccggcgaaatgatccccggcgacggcgaggtgattgaaggcattgcggccgtcaacgaggccgccattaccggcgaatccgcaccggtaatacgcgaatcaggtggcgaccgctcggcggtgaccggcaatacgcggctggtctccgactggctgcttatccgcatcaccagcaacccgggcgagtcgaccctggaccgcatgatcgccctggtcgaaggtgccaagcggcagaagaccccaaacgaaatcgccctcgacatcctgctgatcggcctgaccctgattttcctgatcgtggtggtgaccttgcagccgttcgcccacttcgcgggtggcagcctgccgctgatcttcctggccgcgctgctggtgacgctgatcccgaccaccatcggcggcctgctgtcggccatcggtatcgccggcatggacaggctggtacggctgaatgtcattgcccgctcgggccgcgccgtcgaggcggccggggacgtgcatacgctgatgctcgacaagaccggcaccatcaccttcggtaaccgccgctgcagcgcactgcatgctgcaccgggcattaccgccaaggaactgggggagggcgccttgctggcctcgctggccgacgacaccgccgaaggcaagtcgattgtcgaatacctgcgccagttgcacgacttcgtcgacccgcctgccgggcagttcgaagcggtggctttcagtgccgagacacgcctgtcgggcatcgacttcgaacagcaccgctaccgcaagggcgccgtcgatgcggtgctggcattcgtcggtatgcaacgcctggaaatgccggcggcgctggctcgcgaagtcgaacgcatcgcgcagagtggcggcacaccgttgctggtgtgcgtcgacaagcgtttgctgggtgtgatccacctcaaggacgtggtcaagcctggtatccgcgagcgcttcgccgagctgcgcaagctgggcattcgcacagtcatggtgaccggcgacaacccgttgactgcggccgccatcgccgccgaagcgggggtcgatgacgtgctggccgaggccaccgcccgagaagaagctggcgcgcattcgccaggagcagaatgacggccgcctggttgccatgtgtggcgacggtgccaacgacgccccggcactagcccaggctgacgtaggcatggccatgaacgacggcactcaggctgcgcgggaggccgcgaacatggtcgacctggacagcgacccgaccaagctgctggacgtagtccaggtcggcaaggagctgctggtcacccgcggtgcgttgacaacgttctccattgccaacgacgtggccaaatacttcgccatcctgccggcgctgttcgcagccatctacccgcaactgggtgtgctcaacctgatgcaactggccagcccgcagagcgcgatcctgtcggcgatcgtgttcaacgcgctgatcattatcgtgctgatcccgctggcgctgcgtggggtgcgcgtgcaggcggccagtgcggcgcacctgttgcggcgcaacctgctgatctacgggctgggtggcattgtggtgccgtttgccgggatcaagctgatcgacctgctgctcaacgccctgaacctggtc

SEQ ID NO: 31732 - DNA, 545 bp, Pseudomonas putida
atgactgcttatctacgcccggcattgagcctggctttgttgatgaccctggtgacgggcgccctgtatccgctggcggtgaccggtattgcccaagtcgctttcccgaaccaggccaacggtagcctggtacgcgatgcgcaaggccaggtgcggggttcggcattgatcgcccaggacttccagggcgatggctggttccactcgcggccctcggcaggtgcctacgcgaccgtggccagcggcgccagcaacctgtcgccgagcaacccggcgctggctgagcgggtaaagggcgatgcggccacgttgtatcaggcgcagcaggggccagtgccgcaggcgctgctgaccacctcgggcagcggcctggacccgcacttgccaccggaggccttggcctatcagatcccgcgggtggcggcgcacggcagctgccggtcgagcgcttgcaagccttgctggaacaggccaccctccacccattgatcggcccgccggtggtcaacgtgctggcgttgaaccaggccttggaaaagctcgcc

SEQ ID NO: 31733 - DNA, 972 bp, Pseudomonas putida
atgagccgtatcttcgcagacaacgcccactccatcggtaacacgccgctggtgcagatcaaccgcatcgctccgcgcggtgtgaccatcctggccaagatcgaagggcgcaaccccgggtactcggtcaaatgccgcattggcgcgaacatggtctgggacgccgagagcagcggcaagctcaaaccgggcatgaccattgtcgagcccacctcgggcaacaccggcatcggcctggccttcgtcgccgccgcccgcggctacaagctgatgctgaccatgcccgcttcgatgagcctggagcgccgcaaggtgctgaaggcactgggcgccgaactggtattgaccgatccggccaagggcatgaagggcgcgatcgagaaggccaacgaaatcgtcgcctccgacccggagcagtacttcctgccgggccagttcgaaaacccggccaacccggccattcacgagaaaaccaccggtcctgagatctggaacgacacggacggcgccatcgacgtgctggtggcaggcgtgggcactggcgggaccatcaccggcgtgtcgcgctacatcaaacatacccagggcaaggccatcctgtcggtggcagtggaacccgtggcatcgccactgatcagccagaccctggccggcgaagaactcaagccaagcccgcacaaaatccagggcatcggcgccggtttcgtgccgaaaaacctcgacctgtcgattgtcgaccaagtggagacggtgaccgacgaagagtccaaggccatggcgattcgcctgatgcaggaagagggcatcctttgtggtatttcctgcggtgcggcaatggcggcagcggtgcgtctggccgaaaaaccggaaatgcagggtaagaccatcgtcgtaatcctgcccgattcgggcgagcgatacttgtcgagcatgctgttcagcgacatgttcagcgagcaggaaacccagcag

SEQ ID NO: 31734 - DNA, 774 bp, Pseudomonas putida
atgcacaacgacaagggagaccgcgtggtggaacgcctgctactcaattgcgacatgggcgagagtttcggcagctggcgcatgggcctggatgccgaggtcatgccttacatcgattgcgccaacatcgcctgcggctaccacgccggcgaccccggtatcatgcgccgcacggtgacgttggcgcttgagcacggggtgactatcggcgctcatccggcctacccggacctggtcggcttcggccgccgctccatggcctgcagcccggaagaaatccgtgacctgctgcattatcagatcggtgcgctggatggcatctgcaaagtgctgggtggtcgcgtggcctatgtgaagccccatggtgcgctgtacaacgacatgatggccgacccgctcaagctgcgtaccgtgctggaggccgtcgcggcctatgacagcaacctgccgttgatgctgatggccaccgccgacaaccgtgccgcccaggcactgggcgatgaaatcggcgtgccgctgtggttcgaggcgttcgcagaccgcgcatacactgccagcggccatctgctgtcgcggcgcctgccgggcgcggtgcatcacgacccggcgcgggtggtggagcaggcggtgcgtctggcccgaggcgaaacgctgttggctgacgatggcagcgccttgcagcttgccgcccgcaccctctgcgtgcatggcgacaacgacagttcggtggcggcggtgcggcagattcgccaggccctcgatgggctggaggtg

SEQ ID NO: 31735 - DNA, 1002 bp, Pseudomonas putida
gtggaacagaacagccgggccctgatcgacggcttcaaccggaaaatcgactacctgcggatgtcggtcaccgaccgctgtgacttccgttgcgtgtactgcatggccgaagacatgcagtttctgccgcgccagcaaatcctcagcctcgaagaactgttccaggtggccgaacgcttcgtcgcgctgggcacccgaaagatccgcctgacgggtggcgagccactggtacgccagggcatcgtcgacctgtgcgggcgcatcgccgccctgcccggcctgcgcgagctgtgcctgaccagcaacggctcgcaactcgggcgcctggctcagccgctgttcgacgccggggtgacacgcctgaacatcagcctggatagcctggatgccgaccgtttcaagcagctgacccgcaccggcgacctagcccaggtaatcgccggcatcgacgccgcacgccaggccggtttcaaacgcaccaagctcaactgcgtggtactcaaaggccgcaacgaccatgaactggtcgatctggtgcgctttgccatcgaacgcgagctggacatcaccttcatcgaggaaatgccgctgggggtgataagcgagcatgaacgtggcgaatcgttctgctccagcgatgaagtacgggcacgcctggccgagcagttcacgctggtcgaatcgaccgagtcgtccatggggccggcccgctactggcgcctggccgaagccgcgaacacccgggtcggcttcatttccccacacagccacaacttctgcgccacctgcaaccgcgtgcgcctcaccgtcgaaggccgcctgctgctgtgcctgggcaacgaacactcggtagacctcaagcacgtgctgcgcgcccacccgggcaaccccgaacgcctggaaaaggccattcgcgactcgctgcacctcaagccctatcgccatcatttcgaagtcggtggcgatgtgcagatcctgcgcttcatgaacatgaccggcggc

SEQ ID NO: 31736 - DNA, 897 bp, Pseudomonas putida
atgatcgtcccaccctccaccgatgtgttgcgcgtgctgttcaccctcaaggggtcgatcgtcaaacgcattgccctgcgttgcctgatggtgacactgctggccgcgctgatcgtgctggtcgagcggcattacccggcgtatttctacccggtcagcgccacgccgttcaccttgctgggcctgtcgctgtcgatcttcatgagctttcgcaacaacgcgtgctatgaccgttggtgggaggggcgcaaggcctggggcaaactgattatcgaaacccgctcgttcgtgcgggaaagcgtggtgattaccgacgaaacactgcgcaccgaactgctgcgcaacctgtgtggtttcgcccatgcactcaatgcccggctgcgtaacgaggacgaacgggcagctgccaggccgtggctggcccgggccgatgcgatcagcccgcacaatgtgtgcgacggcatcctgcgtgaaatcggcgaacactgttcacggttggccgcacagcaacagatcagcgaatggcgctacaacctgctggagcaacgcctggcgggcctgaccgaagtgcaagccacctgtgagcggatcaagggcactcccttgccgttcccctacacgctgctgctgcaccgtactatctacattttctgcctgctgctgccgtttgccctggccgagccgctgggctggctggcaccgctgttcaccaccatcgtggggtacacgttcttcgggctggatgcgatcggcaacgagctggaagacccgttcgggcgcgatgagaacgacctgccgaccgatgccatggtgcggactgtggagcgcgatgtgctggccggattgggggaacagcagctgcctcccgccttgttgccggtggggtatgtgttgagc

SEQ ID NO: 31737 - DNA, 1665 bp, Pseudomonas putida
atgcgtattgtcccgttccagtacctggctctcgcagccgcgatcctgagctgttcctcggtttacgccgccaccctggagggcggcgcggtggccgcccccgatcaatatggtgcacaggtggccgccgatattctgaaaaagggcggcaacgcggtggacgcggcagttgcgaccgccttcaccctggcggtgacgtacccagaggccggtaatatcggcggtggcggcttcatgaccctgttcgtcgatggcaagccttacttcctcgactaccgcgaagtcgcgcccaaggccgccacgcgcaacatgtacctggacgacaagggcgaggtcatcgagaacctcagcctggtcggggcacgcgccgcaggcgtacccggtacggtaatgggcctgtgggaggcgcaccagaagttcggcaagctgccctggagcgagttgctgaccccggccatcggctatgcgaaaaacggcttcaaggtggcggaaaagcagtaccagtaccgcaacgatgcccaaggcatgttcaagacggcgaccaacttcaacgattactttggcaacatgaaggtcggcgagctgttcaagcagccggaaatggcccagaccctggagcgtatagccgacaagggcgtgagcgagttctatcaaggcaagaccgccgatttgctggtggcgcagatgcaggctgacaaaggcctgattaccaaagaagacctgaaggattacaaggcggtatggcgtgaaccgatggccgtgagctggcgtggcaatgtggtgtataccgcgccaccgccgagctcgggcggtgtggcgctggcccagttgctgggcatcaaggaagaccgcgcggccgacttcaaaggggtggcgcataactcggcgcagtacatccacctgttggccgagatcgaaaagcgggtgttcgccgaccgcgccgattacctgggcgacccggccttcaccaaggtgccggtggaccagctggtggccaaggattacctggccaagcgcgcagcccaggtcaacccgaaggccatttccgacaccgacaaggtcaagccgggccttgaaccgcaccagaccacgcatttctcgatcgtcgacaagcagggcaacgcggtcagcaatacctacaccctcaacctcgactacggcagtggcgtcgtggtgaagggtgccggtttcctgctcaacgacgagatggatgacttcagcgccaagccgggggcggcgaacgcctttggcgtggtcggcggtgatgccaacgcgatcgaaccgggcaagcgcatgctgtcgtcgatgagccccagcctgatgacccgcgatggcaaggtcgagctggtaatcggtaccccgggtggttcacggatctttacctcgatcttccaggtgatgaacaacctgtacgactacggcatgccgctggacaaggcggtggcggcgcagcgcgtgcaccatcagttgctgcccaaggacaccatttacttcgacagctatgcgccactgaccgggccggtagctgatgagctgaagaagatgggctatgtgctggaggaccagggctgggagatgggcgacatccaggcgatccgcgtcgatggggcgaagcttgagactgcttccgacccacgtgggcgtggggtagggatgatcgtcaag

SEQ ID NO: 31738 - DNA, 2847 bp, Pseudomonas putida
gacctcggcaccccggcccgcgaaagcgacgtgcaggtcagcctgagcatcgacggccgcgccatcagcgtgcctgctggcacctcggtcatgcgcgccgccgccatgctgggcaccagcatccccaaactgtgcgccaccgacagcctcgaagccttcggctcctgccgcatgtgcatggtggaaatcgaaggcatgcgcggctacccggcatcctgcaccacgccagtcagcgaaggcatggtggtgcgcaccgaaaccccgcgcctggccggcctgcgccgcaacgtgatggagctgtacatttccgaccacccgctggactgcctgacctgttcggccaacggtaactgcgagctgcagaccgtcgccggccaggtgggcctgcgtgaggtgcgctacggctatgacggtgccaaccacctggacgagaaaaaagacgtttccaacccgtatttcgactacgagccgagcaagtgcatcgtctgcagccgctgtgtgcgcgcctgcgaggacatccagggtacgttcgccctgaccattaccgggcgtggtttcgaatcgcgggtggcggcagcgggtggcgaaaacttccttgcgtccgaatgcgtgtcgtgcggcgcctgcgtgcagacctgtccgaccgcgaccctcacggaaaagagcctggtgcagcttggccagcctgagcgttcggtcattaccacctgcgcctactgcggcgttggctgctcgttccgcgctgaaatcaagggtgaccagctggtgcgcatggtcccggacaagaacggtggcgccaaccacggccacgcctgcgtcaagggccgctttgcctggggctatgccacccacccggaccgcatcaccaaaccgatgatccgcaagcgcctggaagacccgtggcaggaagtcagctgggacgaggccgtgacctatgccgccagcgagttccgccgcatccagctcaaatacgggcgcgactccatcggcggtatcacctccagccgctgtaccaacgaagaagcctatctggtgcagaaactggtgcgcacggccttcggtaacaacaacgtcgacacctgcgcacgggtatgccattcgcccaccggttatggcctgaagcagaccctgggtgagtcggccggcacgcaaagcttcgactcggtgatgcaggccgacgttgtgctggtgattggcgccaaccccaccgatgcgcacccggtgttcggctcgcaactcaagcgccgcctgcgccaaggggcgcggctgatcgtgatcgacccacggcgtatcgacctggtcgactcgccgcacgcccgcgccgacctgcacctgcaactgcgcccgggcaccaacgtggccatgctcaacgccctggcccacgtgatcgtcaccgagggcctgctggcccaaagcttcatcgatgcccgctgcgaaaccggagacttcgcccgttggcgcgacttcgtcagcctgccagacaacgcccccgaggtgctcggcccggtttgtggcgtgcccgccgagcagatccgcgctgcggcccggctgtatgccaccggcggcaacgcggccatctactacggcctgggggtgaccgagcacagccaaggcagtaccgcagtgatgggcatcgccaacctggccatggccactggcaacatcggccgtgaaggggtaggggtgaacccgctgcgcgggcagaacaacgtgcagggctcgtgcgacatgggctcgttcccccacgagctgcccggctaccggcatgtctccaacgagggcgtgcgcgccgagttcgaacaggcgtggggcgtgaccttgcagcccgacccgggtctgcgcattcccaacatgttcgaggcggcgctggatggcagcttcaaggcgctgtactgccagggtgaggacatcgcccagagcgaccccaacacccagcacgtcaccgcggccttgctggccatggagtgcgtggtggtgcaggacatcttcctcaacgaaactgccaagttcgcccatgtgttcctgccgggcagttcgttcctggaaaaggacggcaccttcaccaacgccgagcggcgtatttcgcgggtgcgcaaggtcatggagccgctggccggcaaggccgactgggaagctaccgtggccctggccaacgccctgggctacccgatgaactaccgccatccttccgagatcatggacgagatcgcccgcctgacgccgaccttccgtcgtatcagctacgcggaactcgaccgccatggcagcctgcagtggccgtgcaacgacgctgccccagacggcacgccgaccatgcacatcgaccagttcgtgcgtggcaaggggcgcttcatgctcaccggctacgtgcccaccgacgaaaaggtcaacaaccgctacccgttgctgctgaccaccgggcgcattctcagccagtacaacgtcggcgcccagacccggcgtaccggcaacgtcgcctggcatgacgccgaccgcctggagatccacccgaccgacgctgaaagccgtggcatccaagacggtgactgggtcggcatcggcagccgcgccgggcagactgtgctgcgtgccaaggtcagtacgcgggtggcgccgggagtggtgtacaccaccttccacttcccagagtcgggggccaacgtgatcaccaccgacaactccgactgggccaccaactgccccgagtacaaggtgacggcagtggaagtggtgaaagtgttccagccatcgcaatggcagaagcgctatcaggacttcagtgatgaacagcagcggctactgaaagagcgccgcactgcggagaaagccgaggttcgccgatgagca

SEQ ID NO: 31739 - DNA, 615 bp, Pseudomonas putida
atgtccctgatccccgaaatcgacgcctttcttggctgcccgacgccagatgcctggatcgaagcggcgctcgccgaccaggaaaccctgctgatcgaccacaagaactgcgagttcaaggccgccagcacggccttgagcctgatcgccaagtacaacactcacctggatctgatcaacatgatgtcgcgcctggcccgcgaggagctggtgcaccacgaacaggtgttacgcctcatgaaacgccgcggtgtgccgttgcgtccggtgtcggcagggcgttatgcgtcggggttgcgccggctggtgcgcgcccacgagccggtcaagttggtggatacgctggtggtgggggcgttcatcgaggcgcgcagttgcgaacgttttgccgcgctggtgccgcatctggatgaagagctgggccgcttctaccacgggctgctgaaaagcgaagcgcgccactaccagggctacctgaaactggcgcacaactacggtgatgaagcggacatcgctcgctgcgtcgagctggtacgcgcggcggaaatggagctgatccagtcaccagaccaggagctgcgcttccacagcggcatcccgcaggctttggccgcc

SEQ ID NO: 31740 - DNA, 963 bp, Pseudomonas putida
gtggaccaagccgcaagcaatgaccaggccatgacccgcgatagcctgtatggtaccgccgcagaaagcacctacgctggtgttgtcagtttctcccgccgccgctacagccgcgacttgcgcggtgtggatgtggtggtcagcggtgtgccgttcgacacggccaccagtaaccgccccggcgcgcgcttcggcccgcgggcgatccgtgctgcctcggtccagcaggcctgggcccgccactggccgtgggcgttcgacccgttcgaccacctggcggtcatcgactatggcgactgtcccttcgacagcggcacgccgcagtcggtaccggacagcatcgaggcccatgccgagcacattctgcaggcgggttgcgccatgctgacccttggtggcgaccacttcatcagctacccgctgctcaaggctcacgcccgccgccatggcccgctggcgctgatccatttcgatgcgcacagtgacacctggccggacgaggcgggcaagcgcatcgaccacggcaccatgttctggcatgccgcccgcgaaggcctggttgaccccgcccactcggtgcagattggcctgcgcacgaccaatgacgacagccagggctttgccattctcgacgccaggcaagtgcaccgccagggcacagaggcggtgattgcagcgattcgccagcgggtgggcgagcggccggtgtacttgaccttcgacatcgactgcctcgatccggcctacgcgcccggtaccggaacgccggtgtgtggcgggctgagcacggtgcaggcgctggagattctgggtgggctgcgtggcatcaacctggtaggcatggacttggtggaagtggcgccagcctatgaccatgccgatatcaccgcgttggccggggcaaccctggccatggagatgctgtgcctgtatgcggcgcggcacaaggtggacaacggccag

SEQ ID NO: 31741 - DNA, 936 bp, Pseudomonas putida
atgatggactggaccgacagacattgccggttcttcctgcgcctgctctcccggcaaaccctgctctacaccgaaatggtcaccaccggcgccctgctgcacaacgacgctcaccgtttcctgcgccacgatgcttctgagcacccgctggccctgcaactgggtggcagtgtgccggccgacctggccgcttgtgcgcgcctggctgaagaagcgggctacgatgaggtcaacctcaacgttggctgcccgagcgaccgggtgcagaacaacatgatcggcgcatgcctgatggctcacccggcgctggtggccgactgcgtgaaggccatgcgagatgccgtatcgacgcctgtcacggtgaagcaccgcattggtatcaacggccgtgacagctacgccgaactgagtgacttcgtcggccaggtgcgtgaggccggctgccggagttttaccgtgcatgcacgcatcgcgattctggaagggctgtcgccgaaagagaaccgcgagattccgccgctgcgctatgacatcgcagcgcagttgaagagggacttcccggacctggagatcgtgctcaacggcgggatcaagaccctggacgaatgccaggcacaccttgaaaccttcgatggcgtgatgctggggcgcgaggcgtatcacaacccttatctgctggccgaggtggaccagcaactgtttggcagcgatgcgccggtggtcagccgtagcgaggcattggcgcaactgcggccttacatcgtggcgcatatggaaagtggcggtgcgatgcaccacgttacccggcatattctggggctggcccaaggattcaaaggggcgcggcgcttccgccagttgctgtcggcagacattcacaaggcggctgaacccttggcggtgtttgaccaggccgtggagttgttgcaggggcgg

SEQ ID NO: 31742 - DNA, 438 bp, Pseudomonas putida
atgagcctgttcagtttcgtgaaggaagccggcgagaagttgatcgacctgctgacccctggcaacgccaatgccgaggagcagctaaagaaacacgtggaagctgttggcctgggcaaccccaacatcaccgccactgtagaaggagacaagatcatcctcaagggtgaagtggccagccaggaagagaaggagaagatcatcctggcggcgggcaacatcagcggcgtggccagtgtcgaggaccagatcaccgtgaccgggccggtagtccaggcggcaaggttcgtcacagtgaaatcgggcgacacactttcagccattgccatggtcgtgtatggcaatgccaatcagtacaacaagattttcgaggccaacaagccgatgctcaaacacccggacaagatctatccggggcaggtgctgcgtattcctgac

SEQ ID NO: 31743 - DNA, 975 bp, Pseudomonas putida
atgttgccgcgctttcctgccgtcacccgtagcctgtccctggccgccctgctgatagcgggccccgctgctgcgctggagctgccactgccaccgcccggtgaagacatcgtcggccaagtgcatgtgatcaaggcaaagtacgaggacacgttcgccgatatcggcaccgcaaacgacctcggctacctggaaatgattgccgccaaccccggcgtggacccttggctgccgggcgccggcaccgagatcatcctgccaacccgtttcgtcctgccgccgggcccgcgcgaaggcatcgtcatcaacctggccgagtaccgcatgtactacttccccaagggggagagcgtggtgtacaccttcccgctgggcattggtcgcgaggggtgggggtcgccgatcgccaacaccaggattaccgccaagacgcccaacccgacctggacgccgcccgcttcgattcgcaaagagcacgccgaggacggtgacatcctgccgactgtggtgcctgctggcccggacaacccgctggggccgttcaagttcaccttgggcgtaccgggctacctgatccatggttcgaacaagaagttcggcattggcatgcgcaccagtcacggttgcttccgcatgttcaacaacaacgtgcttgaactgtcgaagatggtgccggtggggactccggtgcgcatcatcaacgagccttacaagttcggtatcagcgctggcaaggtctatcttgaggcacacacgccactggatgaccagggtaacccgtcggttgtcgacaaacacaccgcagttatcaatgccttgctcaagcgcgaagacctggccaataacctacgcatgaactgggacatggtgcgtgacgtggtggctgcagaagatggtatgccggtagaaattgccgtgccggtggaaaaccagggggccgcaccgatggtgacgagcattccgcccgaactgcag

SEQ ID NO: 31744 - DNA, 2394 bp, Pseudomonas putida
atgaagaccaccctcgacttgcctcttttgccattgcgcgatgtcgttgtttacccgcacatggttatcccgctgttcgtggggcgcgaaaagtccatcgaagccctcgaggcggcgatgacgggcgaaaagcagatcctactgctggcccagaagaatccagccgacgacgatccgggcgaggacgccctgtaccgcgtcggtaccgttgccaccgtgctgcaactgctgaagctgcctgatggcaccgtcaaggtgctggtcgagggcgagcagcggggtgcggtcgagcgcttctccgaagttgaagggcacatccgtgccgaagtctccctgatcgacgaaaccgatactgccgagcgcgagtcggaagtgttcgtgcgcacgctgctgtcgcagttcgaacagtacgttcagctgggcaagaaggtgccagccgaagtgctgtcttcgctgaacagcatcgacgagccagggcgcctggtcgacaccatggccgcgcacatggccctgaagatcgagcagaagcaggaaattcttgaaatcgtcgacttgactacccgtgtcgagcacgtgctggcgctgctggatgccgaaatcgacctcctgcaggtcgaaaagcgcattcgcggccgggtcaagaagcagatggagcgcagccagcgcgagtactacctgaatgagcagatgaaggccattcagaaagaacttggcgatggtgacgaaggccacaatgaagtcgaagagctgaaaaagcgcatcgaagccgcaggtctccctaaggatgccttggccaaggctcaggcggagctgaacaagctcaagcaaatgtctccgatgtcggccgaagctaccgtggtgcgctcgtacctcgactggttggtgcaggtgccgtggaaggctcagagcaaggtgcgtctggacctggccaaggccgaggaaatcctcgatgccgaccactatggcctggaagaggtcaaggaacgcatcctcgagtaccttgccgtgcagaagcgcgtcaagaagatccgcggtccggtgctgtgcctggtcgggccacccggcgtcggcaagacctcgctggccgagtcgatcgctgccgccaccaaccgcaagttcgtgcgcatggccctgggtggcgtgcgtgacgaggccgagatccgtggccaccgccgtacctacattggctccatgccgggtcgcctgatccagaagatgaccaaggtgggtgtgcgcaacccgttgttcctgctggacgaaatcgacaagatgggcagcgacatgcgcggcgacccagcctcggcactgctggaagtgctcgaccctgagcagaaccacaacttcaacgaccactacctggaggtcgactacgacctctcggacgtgatgttcctgtgcacctcgaactcgatgaacatcccgccggcgctgctggaccggatggaagtcatccgtctgcctggctacaccgaggacgaaaagatcaacatcgcggtcaagtacctggtgcccaagcaggtcaaggccaacggcttgaagaaagaagagctggaagtcgacgtctcggcgattcgcgacatcatccgctactacacccgtgaagccggtgtgcggggtctggagcggcaaattgccaaggtctgccgcaaggtggtcaaggaacataccgggcagaagcaggtcaaggtcaaggtggccagcgagcagctggagcacctgctgggcgtgcgcaagttccgctatggcctggccgagcagcaggaccagatcggccaggtaaccggcctggcctggacccaggtgggcggcgagttgctgaccatcgaggccgtggtcatccccggcaagggccagttgatcaagaccggctcgctgggcgatgtcatggtcgagtcgattaccgccgcgcagaccgtggtgcgcagccgcgcccgcagcctggggattgccgccgacttccacgagaagcatgacgtgcacattcacatgcctgagggcgccacgccgaaggacggcccaagtgccggtatcggaatgtgcaccgcactggtgtcggcgctgacgcagatcccggtacgtgccgatgtggccatgaccggcgaaatcaccttgcgtggccaggtattggccattggcgggctgaaggaaaaactgctggcggcacaccgtggcgggatcaagacggtgatcattcccgaggaaaatgttcgcgatctcaaggagattcctgaaaatatcaaacaggatcttcagatcaaaccggtcaaatggattgacgaagtcctgcaaattgcgctgcaatacgccccggagcccttgccagatgtggctccggagattgtcgcgaaagacgagaagcgcgacggcgatgctaaggaaagaatcagcacgcat

SEQ ID NO: 31745 - DNA, 665 bp, Pseudomonas putida
ccacccccggcccggtgctgacagacgaaacggaaaccctctccgaaaacgtcttccgacgcatccaggcggccattgtcaagggtgatatcgcccccggcagcaagatttccgaaccggagttggcgcgcacctatggcatcagccgcgggccgctacgcgaggctatccaccgccttgaaggccagcgcctgctggtgcgcgtgccgcatgtgggcgcgcgggtggtatcgctcaaccacgccgagctgatcgagctgtacgaaatccgcgagtcgctggaaggcatggcctgccgcctggccgccgaacgcatgagccaggccgacatcgacgaactgcgccgggtgctcgacacccatgagcgcgatgccgcgttccaggccggcctgggctactaccagcaggaaggcgactacgacttccattaccggattattcagggtagcggcaaccagaccctggtcaagatgctctgcggcgagctgtaccagctggtgcgcatgtaccgtatccagttctctgccacgcctaaccggccacgccaggcctttgccgaacaccatcgcattcttgatgccatcgccgaccgtgacggcgaactggccgaactcctgatgcgccgccacatcggcgcgtccaagcgcaatatcgagcgtcactac

SEQ ID NO: 31746 - DNA, 873 bp, Pseudomonas putida
gtggtggccaagcagaaggtctacctggaccaggccagcagtgccatgggcgacctgtactgcggttgcaaatggacctgggtgggcaagtctggcgggcgcatcgacgctgcctcgtgtggttaccagacacgcaagcagcagaaccgtgccgaacgcaccgagtgggaacacatcgtgcccgcccacaccttcggcaaccagcgccagtgctggaagaacggcggccgtgagcactgcgtggacaacgacccggtgttccgcgccatggaggccgacctgttcaacctttacccggccgtgggtgaggtcaacggtgaccgcagcaacttcaactacggcatggtcactggcaatgccggcgaatacggccaatgcaccaccaaggtcgatttcgtccagcgcaccgccgaaccgcgtgacgaagtcaaaggcctggtggcccgcaccacgttctacatgttcgaccgctacaagctgaacatgtcgcgccaacagcaacagctgctgatggcctgggacaagcaacaccccgtgtcggcctgggagaaagaacgcgaccggcgcattgccgcgatcatgggccatgccaacccgttcgtaagcggcgaacgcaagtggactgccggctacaagccggttggcagcggcgtggtagaggcggtgccggtaaacgcagccaagccagaggccaaaccaagcctggccagcgccggttcggtcggcgccgtgcttggcaaccgcaacagccacgtctatcacctgtcagtcggctgcccgggctacaaccaggttacagcgaagaaccaggttaccttcgcaaacgaaggtgaagcgcaggcagcggggtatcgcaaggcaggcaactgccgc

SEQ ID NO: 31747 - DNA, 921 bp, Pseudomonas putida
atgagcaatctcgcaccactgaaccacttgatcacccgctttcaggagcagacgccaatccgcgccagttccctgatcatcacgttgtacggcgatgccatcgagccgcacggcggtacagtctggctcggtagcctgatcaacctgctggagccgatcggcatcaatgaacggctgatacgcacgtcgatctttcgcctgaccaaagaaggttggctcactgcagaaaaggtgggccgacgcagttattacagcctgacaggcactggccgtcggcgtttcgaaaaagccttcaagcgcgtctatagcccgagccagccagcctgggacggggcctggacactggtgttgctgtcgcaactcgaggcgggtaaacgcaaggccgtgcgtgaggagctagagtggcaggggtttggtgtcatggcgccgaacctgctgggttgcccacgggcagaccgtgccgacctggtggccacgttgcatgatcttgaggcgggcgacgacagtatcgtcttcgaaacccacacccaagaggtactcgcgtccaaggcgatgcgcgcccaggtgcgggaaagctggcgtatcgacgaactggggcagcaatacagcgagtttatccaactgttcaggccgctgtggcaaggtttgaaagagcagccgttgctggatgcccaagattgcttccttgcgcgcacgctgctgattcacgagtaccgccgcctgctgctgcgcgacccgcaactacccgacgagctgctgccaggggactgggagggaagggctgcgcgacagttgtgccgtaacctctaccgactggtgtttgccaaagccgaagaatggttgaatgcagcgctggaaacagcagatggcccattgccggacgtgagcgagagtttttacaagcgttttggcgggttggct

SEQ ID NO: 31748 - DNA, 1464 bp, Pseudomonas putida
gtgtactcctggcctgtgaatgccgggccgctcgacccgcgtggctattcccccaaccagatgtacgcccaggccatggtctatgaacccctggtgcgctataccgccgcgggtacgctggagccatggctggctgaggcctggcaggtttcggacgacggcaagacctacacgttcacccttcgcgacggcgtgcgcttcagcgatggcacacccttcgatgcgcctgcggccaaagccaacctcgatgccgtcctggccaacactcagcgtcaccgctggatggaactggtgaccacactggaccacgttgaagcgcctgagcgcctgaccctgcgcctggtcctcaagcacccttactacccgacgctgatggagctggcccaggttcgcccattgcgctttgcctcgcctcaggccaaacccggccaaccggccggtaccggcccctggatgcgcgccgaatcacgcctgggcgaatacgaccgcttcgtgcgcaacccccagtactgggggcccaagccggcctacggcgaggtcatggtcaaggtcattccagaccccaacagccgcgcgctggccctgcaggccggcgaggtcgaactgatccagggcgccgccggcgagatcacggccggcacgttcgtgcgcctgcgtgaccagggctatgccaccgcactgtcggcaccgctggccacccgcaccctggcgatgaacaccggccgtggtgctacccgtgatctggcggtacgccaggcgatcaacgaggcggtggacaagcaagccatcatcgacaagattctctacggccttgaaccccgggcagataccctgttcgccagcaacatgccctacgccgatatcggcctcaagccctacccttacgacccggcgcgcgccgcccatgcccttgatgctgccgggtggacgctggccccaggcgcgtctgtgcgcagtaaaggcggcgaacccttggccatcgagctggtattcctcggcacaagtgccttgcagaagagcctggccgaagtgctgcagggcgagctggcgaaaatcggcatccacatcgacctgcgtgcggttgaagaaggggctttggtgcggcgccaacgcgacggcgacttcggcatgatcttcgccgacacctggggcgcgccctacgacccgcattcgttcgtcagctccatgcgctacgccggccatgccgactacatggcccaacgtgggctggcaatcaaggacgaactggacaagcgcattggccaagtgctggccagcaccgacgaacagcagcgtgccgaacagtaccgcttcatcctcaccaccttgcacgaacaagccgtctacctgcccatctcgcatctcacggccatcagcgtgcgccgagactcggtggccaaggtccagttcggcagcaccttgttcgatgtgccgttcgaaaccatgacgccaaaacagggagac

SEQ ID NO: 31749 - DNA, 1704 bp, Pseudomonas putida
atgcgcaaaattcgagtccattacaaaaacaagagcccccccatgaattgcctccacccccttgccgccctcggcgtgctcatgctcggtgccagccacgccatggccgcaccaaccgttaaacaaccaaacattctgctggtggtcgctgatgacctcggtttctctgacctgtcggccttgggcagcgaaatccagacgcccaacctggacaaactgttggccgacggccgcctgatgctcgatttccacgccgcgcccagttgctcaccgacgcgggcgatgctgatgtccggcaacgacccacacctggtcgggctgggcatgatgtcggagacgcgcaagcgcctgccggccggcgcagaggtacgcgccggttacgaaggcgtgctcggtgccaatgtcgcgaccctcgccgaactgctgcatgacgccggctaccgcacctacatcgccggcaaatggcacctgggcatgcaaccggcccaacagccacacaaccgcggcttcgaccaggcctacgtgctgctcgaaggcggcgcggcacacttcaagcaggccaacatggacctgcagtcgaactacagcgccacctatcgccacaacggcgagccgatcgcgctgcccgacgacttctattccaccacctggtacaccgaccgcctgatcgacgcgatcgaccaaggcaaggccagcaacaaaccgttcttcgcctttgccgcctacaccgcgccgcactggccgctgcaggcgccggatgcgtacctggcgcagtaccgaggccgctacgaccaaggctacgaagtcatcgcccacgaacgcctgaagcgccaacgcgaagccggcctggtgcccgccgacttctctctgcaagcacaactggaaggtgtgccgagctgggcatcgctgagcgatgaacaaaaacgccagtccgcacgcaccatggaggtgtatgcggccatggtcacggcgctggacgccgaggtggggcgcctggtggaacacctacgcaagaccggcgagctggaaaacacgatgatcctgttcatgtccgacaacggtccggagaacgccacccgtgtcgaccccgagtggatcaaggcaaacttcgataaccgcctggacaactacggccgccgcgattcgttcctgatgatcggctcggcctgggcccaggtcagcgccctgcccagccgtcgctacaagatgaccacctaccagggcggcatccgcgtaccggccttcgtctactacccggccaccatcaaggccggccgcagcgaagagctggccagcgtccgcgacatcatgccgaccctgctgcaactggccggtgcgccgatgcccggcgtcaagtaccgcgaccgcgatatcgtgccgccgcaaggcacatcggcgctgaactacctgcaaggcaaggacagccagatccacgcccatgacgaagccttggggtgggaaatcaacggcagcgcctcgttgcgcaagggcccgctgaagctggtgtgggatgccaccgacagcaagccgagctggcacttgtatgacctgcgcaaggaccctggcgagcaccacgacatcggcgcagggcaccccgagcaggtggcgctgatgctgcgcgactggaaggcttatgcccaacgcggcaacatcgcgatcgatgccgacggccgtccggccagcccgatcctggtcaagccgcaa

SEQ ID NO: 31750 - DNA, 993 bp, Pseudomonas putida
atgcagtacgtaaagctgggtagcactgggctggacatttcaaggctgtgcctgggctgcatgaccttcggtgaacccgacgccggcactcatccctggaccttgggcgaagacgccagccggccgatcattcgccatgccgtcgagcaaggcatcaacttcttcgacactgccaacagctattccgccggcacctcggaaatcatcctcggcaaactcctgagggagtttacccgccgtgaagaaaccgtgatcgccaccaaggtgttcttccctgccaacatgtgggaaggcgccagccggcccaatgagcaaggcttgtcacgcaaggcgatcatggccaacatcgacgccagcctcagccgcctgggcacagactacgtcgacctttaccagatccaccgctgggactaccacacccccatcgaggaaaccatggaagctctgcatgatgtggtcaaggccggcaaggcgcgctacatcggtgcatcgtcgatgtatgcctggcagttcgccaaggcgcagcaggtagccgccaaccatggctggagccgctttgtgtcgatgcagaactacctcaacctgatctaccgcgaagaagagcgagagatgatcccgctgtgcctggatcaaggcgtcggcctgatgccctggagcccgatggcgcgcggccgcctgacacgaccgcatgggcagcaaacccaacgcacgcgcaccgatgtatccgggcagtcgttctatgaaaagaccgaggtggaggacggccgggtaatcgatgtggtcgagcagatcgccagcgaacggggggtgccgatggcccaggttgcgctggcctgggtgctgggtagggccggcgtcagcgcccctatcgtcggcgcttcgaagcccgcccacctggacgatgccctgggcgcactgtcactgcagctgagcgaggacgaagtggcgcgcttgcaggccccttacgttccccacgcggtcaccggcttcaag

SEQ ID NO: 31751 - DNA, 1179 bp, Pseudomonas putida
atggcttggaacgagccgggtggcaactcgaacaatcaggatccctggggcggccgccgcggtggcggtggcggcggtggtgacaagaaaggtccaccggatctggacgaggccttccgcaaactgcaggacagcctgaatggcatgttcggcggcagcaagaaacgtggcggcggtgatcgcaatgtcggcaagggcggtggcctgggcctgctgggcatcggcctggcggtgctggctgcaatctggctgtacagcgccgtgtatgtggtcgacgagcaggagcaggcggttgtgctgcgcttcggcaagtactatgagacggtcggtcccggcctgaacatctacttcccgccgattgatcgcaagtacatggaaaacgtcacgcgtgagcgtgcctacaccaagcagggccagatgctgaccgaagacgagaacatcgtcgaggtgccgctgaccgtccagtacaagatcagcaacctgcaggacttcgtgctcaacgtcgaccagcctgaggtgagcttgcagcacgcgaccgacagcgccctgcgccacgtggtgggttccacttcgatggaccaggtgttgaccgagggtcgtgagcagatggccgtggatatccgcgaacgcctgcagcgcttcctcgacaactaccgcaccggtatcaccgttacccaggtcaacgtacagagcgcggcggccccgcgtgaagtgcaggaagccttcgacgacgtgatccgcgcccgcgaagacgagcagcgtgcccgcaaccaggccgagtcctatgccaatggcgtggtgccggaagcccgtggtcaggcccagcgcatcatcgaggatgccaatggttaccgcgacgaagtcattgcccgcgccaagggtgaggcagaccgcttcaccaagctgcttgccgagtaccgcaaggcacctgacgtaacccgtgagcgtctgtatctggagaccatgcaagaggtctacagcaactcgagcaaggtcatggtggcaaccaaggacgggcagagcaacctgctctacctgccgctggacaagatggtcgagggcagccgcaagccgtccgtgccaaccaccagcgcgtcgccatcggctaacgatgcggccgctcgtgccgcgcaggacatgcaacagcaacagcagccgctgcgtactagggagagccgc

SEQ ID NO: 31752 - DNA, 423 bp, Pseudomonas putida
atgcgtcattacgaaatcatcttcctggttcacccggaccagagcgaacaagtcggcggcatggttgagcgttacaccaagctgatcgaagaagatggtggcaagatccaccgcctggaagactggggccgtcgtcaactggcctacgcaatcaacaatgttcacaaggctcactacgtgatgctgaacgttgagtgcaccggcaaggccctggccgagctggaagacaacttccgctacaacgatgccgttatccgtaacctggtcatccgtcgcgacgaagccgttaccggccagtccgagatgctgaaggctgaagagaaccgcagcgagcgccgtgagcgtcgcgagcgtcctgagcatgctgactccgccgaaggcgacgacagcaatgacagcgactccagcgataacgctgacgag

SEQ ID NO: 31753 - DNA, 228 bp, Pseudomonas putida
atggcacgtttcttccgtcgtcgtaaattctgccgcttcactgctgaagacgtgaaagagatcgacttcaaagatctcaacaccctgaaagcttacgtatccgaaaccggcaagatcgttccaagccgtatcaccggtaccaaagctcgttatcagcgtcagctggctaccgctatcaagcgcgcccgcttcctggccctgctgccctacaccgacagccacggccgc

SEQ ID NO: 31754 - DNA, 444 bp, Pseudomonas putida
atggaactgatcctgctggaaaaagtcgctaacctgggcaacctgggcgacaaagtaaaagttaaggctggttacggccgtaacttcctgctgccattcggcaaggccaccgttgccaacgccgccaacctggctgcgttcgaagagcgtcgtgccgagctggaaaaagcagccgctgacaagaaagcttcggctgaaagccgcgctgcccaactggccgagctggaagtgaccatcactgccaccgctggcgacgaaggcaagctgttcggttcgatcggcacccacgacatcgctgacgccctgaccgcctccggcgttgaagtggccaaggctgaagttcgtctgccgaacggcaccatccgtcaggttggcgaatacgacgtagccgtgcacctgcacagcgacgttgaagccaccgtacgcgtggtcgtcgtagctgcc

SEQ ID NO: 31755 - DNA, 1401 bp, Pseudomonas putida
gtggccatgaacgagatcaccacctccgaacagcttgacctgcaaaccgcagccctgaaggtaccgccgcattccatcgaggccgaacaggccgtgctcggtggcctgatgctggacaacaatgcctgggagcgggtgctggaccaggtgtcggacggcgacttctaccggcatgaccaccggctgatcttccgcgctgtgcacaagttggccgacgccaaccagccattcgacgtggtgaccctgcacgagcagttggacaaggaaggcctgtcctcgcaagtcggcggcttggcttacctggccgagctggccaagaacaccccttcggtggccaacatcaaggcctacgccgcgatcattcgtgagcgggccacgttgcgccagctgatcagcatcagtaccgacatcgccgacaacgcgttcaacccgcaggggcgcaacgctgccgagattctcgacgatgccgaacggcagatcttccagatcgccgaggcgcggcctaaaaccggcggcccggtgggcgtcaacgagctgttgaccatggccatcgaccgcatcgatacgctgttcaactccgacagtgacatcaccggtatctccaccggttacaccgacctggacgagaagaccagcgggctgcaggcagccgacctgatcatcgtcgcgggtcgtccgtcgatgggtaagaccaccttcgccatgaacctggtggaaaacgccgttctgcgtaccgacaaggcggtgctggtgttctccctcgagatgccaggtgagtcgctgatcatgcgtatgctttcgtccctggggcgtatcgaccagaccaaggtccgttccggccagctggacgacgacgactggccgcgcctgacctcggcagtgaacctgctcaacgaccgaaaattgttcatcgacgatacggcgggtatcagcccctcggaaatgcgcgcgcgtacccgccgcctggcccgtgagcatggcgaaatcgccatgatcatggtcgactacctgcagctgatgcagattccggggtcggccggtgacaaccgtaccaacgaaatttccgagatttcccgctcgctcaaggccctggccaaagaattcaactgcccggtcattgccctttcgcagctgaaccgctcgctggaacagcgcccgaacaaacgcccggtgaactccgacttgcgtgaatccggtgcaatcgagcaggacgccgacgtgatcatgttcgtgtaccgcgacgaggtgtaccaccccgagaccgagcacaagggcgtggcggaaatcatcatcggcaaacagcgtaacggccccatcggcttcgtgcgtttggcgtttatcggcaagtacacccggttcgagaacttggcgccggggatgtacaactttgatgatgatgaa

SEQ ID NO: 31756 - DNA, 1428 bp, Pseudomonas putida
atgcgcatacgcgcactggtcgccatcgttgggctgctgctgacaacggtgaccgttgaggctctggccgtcactcaagtcaagagcatgcgcctgtggcgcgcaccggacaacacgcggctggtcttcgacctgtctggccccgtgcagcatagtgtcttcaccctgagcgcacccgatcgcctggtcatcgacatcaatggcgcaacactggccgcgccactgaatgtggccacctccaacacgccgataagcagtgtacgttcggctcagcgtacgccaaccgaccttcgggttgtggtcgacctgaaaaagtcggttaccccgaaaagcttcaccctggcgcccaacgcacaatacggcaaccgcttggtggtcgacctgtatgaccaggaagctgacgctatcgcggccagcgcgccgccacctgcaccggccccggtacaaacgcctgcgaccacgcctgcggtgccagtgacgccggcccagccggcgatcaagctaccaccggtacccagtggcaagcgtgacatcgtggttgccatcgatgccgggcacggcggcgaagaccctggcgcttccggctcgcgtggccagcacgaaaaagacatcgtgttgcagatcgccaaggaactgcagcgtcagatcaacagcgaaaaaggtttccgtgcagagctgacccgcaccggcgattacttcatcccgctgcgcaagcgtacggaaatcgcccgcaagaaaggcgccgacctgttcatttcgattcacgccgacgcggccccgtcgcgcgcagcctttggcgcctcggtgttcgccctgtccgatcgtggcgccacctccgagacggcgcgctggctggccgacacggaaaaccgttctgacctgatcggtggtgcgggtaatgtcagcctcgacgacaaggaccgcatgctcgctggcgtgctgcttgatctgtcgatgaccgctacgctcagctccagcctcaacgtggggcaaaaggtattgggcaacatggggcgggtcacttcgttgcacaagcagcgcgtggaacaggccgggttcatggtgctgaagtcgccggatattccgtcgatcctcgttgaaaccgggttcatctcgaacaacaacgaagcagccaagctggcctcgtcgagccaccagcaagcgttggcccgttcgatccgcactggggtgcaccagtacttccagcagaacccaccacctggcacctatatcgcctggctgcgtgacaccggcaagatcgccgccggcccgcgtgaacacaccgtacgccctggcgaaaccctggcgatgctcgccgtgcgttaccaggtcagtgtggccagtctgcgcagcatcaacagcctgaagaccgatgagctgaaggttggccagcgcctcgatgtacccgccacaaccttggccgcgcaa

SEQ ID NO: 31757 - DNA, 1896 bp, Pseudomonas putida
atgagtggcggttcgcgaattcagctgctcagcccgcggctggccaaccagattgccgccggcgaggttgtcgagcggccggcgtctgtggccaaggaactgctggaaaacagcctggactccggtgcccggcgcatcgatatcgaagtcgagcagggcggcgtcaaactgctgaaggtgcgggatgatggcagcggcatttctgccgacgacctgccgctggccctggctcgacacgccaccagcaagatccgcgagctggaagacctagaaggggtattgagcctgggcttccgtggcgaggccttggcctcgatcagttcggtggcgcgcctgaccctgacctcgcgtaccgccagtgccagtgaggcctggcaagtagaaaccgaaggccgcgacatgacgccgcgggtgcagccggcggcgcacccggtcggtacctcggtggaagtgcgcgatttgttcttcaataccccggccaggcgcaagttcctcaaagccgagaaaaccgaattcgatcacttgcaggaagtgatccggcggctggcgctggcccgtttcgatgtcggcttccacctgcgccacaatggcaagagcatcctcagcctgcacgaggcccacgacgaaatcgcccgtgcacggcgggtgggtgccatctgcggcccgggcttcatggagcaggcactgccgatcgacgtcgagcgcaacggtctgcgcctttggggctgggtcggcctgccgacgttctcgcgcagccaggcagacctgcagtacttcttcgtcaatggtcgggcagtgcgcgacaaactggtcgcccatgccgtgcgtcaggcctaccgggacgtgctgttcaacggccgccaccccacgttcgtgctgttcctggaactggagcccaacggcgtcgatgtgaacgtgcacccaaccaagcatgaagtacggttccgcgaagggcgctcggtgcatgacttcctgtatggcaccttgcaccgtgccttggccgatgtacgtccggaagaccagctggccgcacctgctgccgtacctgagctggttcgccccaccggccagcaggccggtgagttcgggccccagggtgaaatgcgcctggcctcgccggtgcttgaacagcctcgagccccgcaacagtcgttttccaatggtggcagcggcgccggttaccagtatcaatacaccccacgtccctcgcagccgctgccggccgcagaggcacaggcggtgtatcgcgagttctataagccgctggaaacaggtgctgcgcctgcgacggcactgcccgaaagccagggcgacattcccccgctaggctatgccctggcgcagctcaagggtatctacatcctggccgagaatgctgttggcctggtgctggtggacatgcacgccgcccacgagcggataatgtacgagcgcctcaaggtggccatggccagcgagggcctgagcggccagccgctgctggtgccggagaccctggccctcagccagcgtgaagccgactgtgccgaagagcatgcacagtggtttcagcgcctgggcttcgaattgcagcgcctgggccccgagaccctggcgattcgccagatcccggccttgctcaagcaggctgaagccaaccgcctggtgcaggacgtgcttgccgaccttatggagtacggcaccagtgatcgcattcaggcgcacctcaatgagctgctcggcaccatggcttgccacggtgccgtgcgcgccaaccggcgtctggcaattcccgagatgaacgccctgctgcgcgacatggaaaacaccgagcgcagcggccagtgcaaccatggtcgtcctacctggacccagatggggctggacgatctggacaaacttttcctgcgcggtcga

SEQ ID NO: 31758 - DNA, 1065 bp, Pseudomonas putida
atggacgacaacaagaagcgcgccttggctgcggccctgggtcagatcgaacgccaattcggtaaaggcgcggtcatgcgcatgggtgaccatgagcgtcaaggcattccggccatctccaccggctcgctggggctggatatcgccctgggcatcggcggtctgccaaaaggccgtatcgtcgagatctacggcccggaatcgtcgggtaagaccacgctgaccctgtctgtcatcgctgaagcgcaaaagaacggtgctacctgcgccttcgtcgacgccgaacatgcccttgaccctgagtacgccggcaagctgggcgtcaacgtcgatgacctgctggtttcgcagccggacaccggtgagcaggcccttgaaatcaccgacatgctggtgcgttccaacgcggtcgacgtgatcattgtcgactccgttgccgcgctggtaccgaaggccgagatcgaaggcgagatgggtgacatgcatgtgggcctgcaggcccgcctgatgtcccaggcactgcgtaagatcaccggtaacatcaagaacgcgaactgcctggtcatcttcatcaaccagatccgtatgaagatcggtgtgatgttcggcagcccggaaaccactaccggtggtaacgccctgaagttctatgcttcggtccgtctggacatccgccgtaccggcgcggtcaaggaaggcgacgaagtggtcggcagcgaaacccgcgtcaagatcgtcaagaacaaggtctcgcctccgttccgtcaggctgagttccagattctttacgggaaaggtatctaccgtaacggcgagatcattgatctgggggtatctcagggcctggtcgaaaagtccggcgcctggtacgcctaccaaggcaacaagatcggtcaaggcaaagccaacgctgccaagtacctggctgagaacccggctattggtgccgagatcgagaagcagattcgtgagaagttgctgaaagcgggtgctgctgctgaagccggcaaagctgctgctgctgaagctgatgccgatgacatggccgacgctgacgccggttat

SEQ ID NO: 31759 - DNA, 2571 bp, Pseudomonas putida
atgtcagatctttccgcacacaccccgatgatgcagcagtactggaagctgaaaaaccagcacccggaccagctgatgttctaccgcatgggcgacttctacgagatcttctacgaagatgcgaaaaaggccgcgaaactgctggatatcaccctgaccgcccgcggtcagtcggccggccagtccatccccatgtgcgggattccgttccattcgctggaaggctacctggccaagctggtcaagctcggcgagtcggtggtgatctgtgagcagatcggcgaccccgccaccagcaagggcccggtggagcgccaggtggtgcgcatcatcaccccgggtacggtcagtgacgaggcactgctcgacgagcgccgcgacaacctgattgccgccctgctcggtgacgagcgcctgttcggcctggcggtactggacatcaccagcggcaatttcagcgtgcaggagatcaagggctgggaaaacctgctggccgaactcgagcgcctgaacccggtcgagctgttgatccccgacgactggccacgggacctgcctgcggagaaacgcccaggcgcccgccgccgcgccccctgggacttcgaccgagactcggcacgcaaggccctgtgccagcagttcgcgaccaaggacctcaagggcttcggctgcgacaagctgaccctggccatcggcgccgccggctgcctgctgacctatgccaaggaaacccagcgcaccgccctgccgcacctgcgcagcctgcgccacgagcgtctggacgatacagtcatcctcgatggggccagccgccgcaacctggagctggacatcaacctggccggcgggcgcgacaacaccctgcaatcggtgatcgaccgctgccagaccgccatggccagccgcctgctgagccgctggctgaaccgcccgctgcgcgacctcaaggtgctgcaagcacgccaggactcgatccgctgcctgctcgacagctaccgcttcgagaagctgcagccgcagttgaaggaaattggcgatatcgagcggatcctcgcccggattggcctgcgcaatgcccgcccgcgcgacctggcacgcctgcgcgatgcgctgggcgcgttgccagagctgcagaacgccatgaccgagctcgaagcgccgcacctggcgcgcctggcggccattaccggtacctatccggagctggccagcctgttggagcgggcgatcatcgacaacccgccggcggtgatccgcgacggcggcgtactgaaagccggctatgacaacgaactggacgagctgctggcaatcagcgagaacgccggccagttcctgatcgacctggaagcccgtgaaaaggctcgcaccggcctggccaacctcaaggtcggctacaaccgcgtgcacggctacttcatcgaactgccgaccaagcaggccgagcaggccccgggcgactacatccgccgccagaccctcaaaggcgccgagcgcttcatcaccccggagctgaaggcgttcgaggacaaggcattgtcggccaagagccgcgccctggcccgcgagaagatgctctacgacgcactgctggaaaccctgatcagccacctggcgccactgcaggacagcgcagccgccctggccgaactggacgtgctcagcaacttggccgagcgcgcactgaacctcgacctgaactgcccacgcttcgtcgacgagccttgcctgcgcatcgagcagggccgccacccggtggtggagcaggtgctgaccacgccgttcgtggccaacgacctgggcctggacaacagtacgcgcatgctgatcatcaccggcccgaacatgggcggtaagtcgacctacatgcgccagaccgccctgatcgtgctgctggcgcacatcggcagcttcgtccctgcggcgagttgcgagttgtcgctggtcgaccgcatcttcacccgcatcggctccagtgacgacctggccggcgggcgctcgaccttcatggtggagatgagcgaaaccgccaacatcctgcacaatgccaccgaccgcagcctggtgctgatggacgaagtgggccgcggtaccagcaccttcgacggcctgtcgctggcctgggctgccgctgagcgcctggcccagctgcgtgcctacaccttgttcgccacccactacttcgaactgaccgtgctgccggagagcgagccgctggtggccaacgtgcacctgaacgccaccgagcacaatgaacgcatcgtgttcctgcaccacgtgctacccggccctgccagccaaagctacggcctggccgttgcgcagttggccggcgtaccgacggcagtgatccagcgtgcccgcgagcaccttggccggctggaaaccaccagcctgccccatgagcagccagcggcccacaaggccaaggacgcgccgcaagtgccgcaccagagcgacttgtttgccagcctgccgcatccagccatcgagaagctgggcaagctgcaactggacgacatgaccccgcgtcaagctatcgaaatgctatatcaactaaagaacctgtta

SEQ ID NO: 31760 - DNA, 1347 bp, Pseudomonas putida
atggccctcggctccgccatcggcaccggccttttctacggctctgcctcggccatccagatggcaggcccggccgttctgctggcctacctgatcggcggcgctgcagtgttcatggtcatgcgcgcccttggcgaaatggccgtgcacaacccggtggccggctccttcggccactacgccaccacctacctcggcccaatggccggcttcatccttggctggacctacgctttcgagatggtcatcgtcgccatcgccgacgtcaccgcgttcggtatctacatgggcttctggttcccggaggtagcccgctggatctgggtgctgggcatcgttttcctgatcggcggcctcaacctatgcaacgtcaaggtattcggcgaaatggaattctggctgtcgctgctcaaggtcggcgccatcgtggcgatgatcctggccggcctcggcatcatggctttcggtttcagccaggtgggtaccgggcatgccgtgggcatgagcaacctgttcgaccacggcggcttcatgcctaacggcgtggggggcttgattgcgtcgtttgccgtggtgatgttcgccttcggcggtatcgagatcatcggcgtcaccgccggcgaggcaaaagacccgcagcgcgtcattcccaaagcgatcaacgcggtgccactgcgtatcctgctgttctacgtgctcaccctgttcgtgctgatgtgcctgtacccatggccgcagatcggcagccagggcagcccgttcgtgcagatcttcagcaacctgggcattggctctgccgctgccgtgctgaacgtcgtggtgatttccgctgccatctccgccatcaacagcgacatctttggcgctggccgcatgatgtatggcctggcccagcaaggccacgccccgcgcggtttcagcaagttgtcgaaacatggcgtaccgtggatgaccgtcgtggtgatgggggctgcgctgctgatcggcgtattgctcaactacctgatcccggaaaatgtgttcctgctgattgcctcgatcgccaccttcgccacggtgtgggtgtggctgatgatcctgctcacccaggtagccatgcgccgcagcatgagccgcgagcaagtggcccagctcaagtttccggtaccgttctggccatacggcccggccatggccattgcgttcatggtgttcatctttggcgtgctcggttacttcccggacacccaggcggcattgatcgtcggcgtgatctgggtggtattcctggtggcgtcctacctgctgtggtgcaagccgcgcgcagggcagggccagccggtagcggagccggccgagctgcaccgc

SEQ ID NO: 31761 - DNA, 1671 bp, Pseudomonas putida
gtgaccgacaacaacaaataccgtgacgttgaaatccgtgccccacgtggcaacaagctgaccgccaaaagctggctgaccgaagcgccactgcgcatgctgatgaacaacctcgatccacaggtcgcggaaaacccgaaagagctggtggtatacggcggtatcggccgcgccgcgcgcaactgggcctgctacgacaagatcgtcgaaaccctgacccgcctggaagacgacgaaaccctgctggtgcagtcgggcaagccggtcggtgtgttcaagacccacagcaacgcaccgcgcgtgctgattgccaactccaacctggtgccacactgggccaactgggaacacttcaacgaactggacgccaagggcctggcgatgtatggccagatgaccgccggcagctggatctacatcggcagccagggcatcgtccagggcacctatgaaaccttcgtcgaagccggtcgccagcactacggcggcagcctgaaaggcaagtgggtactcaccgctggcctgggcggcatgggcggcgcccagccactggccgcgaccctggctggggcttgctcgctgaacatcgaatgccagcagagccgtatcgacttccgcctggaaacccgctacgtcgacgagcaggccactgacctcgacgacgccctcgcacgcatcgccaagtacaccgccgaaggcaaggccatctccatcgccctgcacggcaacgccgccgaaatcctcccagagctggtcaaacgtggcgtccgcccggacatggtcaccgaccagaccagcgcccacgacccactgaacggctacctgccagccggctggacctgggaacagtaccgcgatcgtgcgcagaccgaaccggctgcagtggtcaaggccgccaagcagtcgatggccgtgcacgtgcaggccatgctggacttccagaagcagggcatcccgaccttcgattacggcaacaacatccgccagatggccaaggaggagggcgtggccaatgccttcgacttcccaggcttcgtcccggcctacatccgcccactgttctgccgcggcgtcggcccgttccgctgggcggcgctgtccggtgaagccgaggacatctacaagaccgacgccaaggtcaaggaactgatccccgacgacgcccacctgcaccgctggctggacatggcccgcgagcgcatcagcttccagggcctgccggcacgtatctgctgggtggggctgggccttcgcgccaagctgggcctggctttcaacgaaatggtccgcagcggcgagctgtcggcaccggtggtgatcggccgtgaccacctcgactccggctcggtatccagcccgaaccgcgaaaccgaggccatgcgtgatggttcggacgctgtttccgactggccgctgctcaacgccctgctgaacaccgcaggcggcgccacctgggtatcgctgcaccatggcggtggcgtgggcatgggcttctcgcagcactcgggcatggtcatcgtctgcgacggtaccgatgaggccgccgagcgcatcgcccgggtactgaccaacgacccagggactggcgtcatgcgtcacgccgatgccggttatgacatcgccatcgactgcgccaaggagcagggcctggacctgccgatgatcaccggc

SEQ ID NO: 31762 - DNA, 960 bp, Pseudomonas putida
gtgatcaaacacaagaaagcccagtggccttggcatgggttgactgccctggtcctggtaggcctggcgctcagcctttacatggccacctcgatgatttcctacgagtggcgctggaaccgcgtaccgcagtacttcgcctacaaggccgaggaaacacaacgcgctgccggctacggcactgtgcaggaaatcgtcatttccggtgacaacgcccgcgtcacgctgaaggacgaaagtggtgccgagcaagtgctcgatgtggacaaggacagcctgcaactgagccgcggcgacgatgttgccgaaggcgaccagatcggggtaacccgccattgggccgcgggcccgctggcatggggcctgtggaccaccttgtggatctcggtggtgtccggggcgctgggcctggtgatcggcctgttcgccggattgtgccggttgtcgaacaacccgaccctgcgcgacctgtcgaccgtgtatgtcgagctggtgcgcggcacgccgctgctggtgcaaatcttcatcttctacttcttcatcggcaccgtgctcaacctgtcccgcgagtttgccggggtagcggcgctggcattgttcaccggtgcttacgtggccgagatcgtccgtgcaggcgtgcagtcgatcgccaaaggtcagaacgaggctgcccggtcgctgggcctgaacgctggccagtcgatgcgccatgtgatcttgccgcaggccttcaagcgcgtgcttccgcccctggccggccagttcatcagcctggtcaaggacacctcgctggtgtcggtgatcgccatcaccgaactgaccaagagtggccgtgaggctatcaccacctcgttctctactttcgagatctggttctgcgtggcaggcctgtacctgctgatcaacctgccgctgtcgcacatcgccagccggctcgagcggaggcttgcgcaaagtgat

SEQ ID NO: 31763 - DNA, 1404 bp, Pseudomonas putida
atgtcgaagtcggttcaactcatcaaagatcatgacgtcaagtggattgatctgcgtttcacggacaccaaaggcattcagcaccacgtgaccatgccgtcgcgtgatgcgctggacgaagacttcttcgaagtcggcaagatgttcgacggttcctccatcgctggctggaaaggcatcgaagcttccgacatgatcctgatgccggtcgacgaaaccgccgttctggacccgttcaccgaagaaccaaccctgatcatcacctgcgacatcgtcgacccgtcgagcatgcagggctacgaccgcgacccacgcgccatcgccaagcgtgctgaagagtacctgaagagcaccggcatcggtgacaccgtattcgccggtccagagcctgagttcttcatcttcgacgaagtgaagttccactcggacatctccggttcgatgttcaagatcttctccgagcagggctcgtggatgaccggcgctgacgtggaaggcggcaacaaaggccaccgtccaggcgtgaaaggcggctacttcccggttccgccgttcgaccatgaccacgaaatccgtactgccatgtgcaacgccctggaagaaatgggccagaccgttgaagttcaccaccacgaagtggcgactgccggccagaacgaaatcggcgtcaagttcaacaccctggtgaagaaggctgacgaagtacaggcgctgaaatacgtcgtgcacaacgttgccgacgcttacggccgtaccgccaccttcatgccgaagccactgtacggcgacaacggctcgggcatgcacgtgcacatgtcgatctggaaagacggcaagaacaccttctcgggtgaaggctatgccggcctgtccgacaccgccctgtacttcatcggcggtatcatcaagcacggtaaggccctgaacggcttcaccaacccgtcgaccaactcgtacaagcgtctggtcccaggcttcgaagccccggtaatgctggcctactcggctcgcaaccgttccgcctcgatccgtattccttacgttggcagcccgaaagcccgacgtatcgaagcacgcttcccggacccatcggccaacccgtacctggcgttcgcggccctgctgatggctggcctggacggcatccagaacaagatccacccaggcgacgcggccgacaagaacctgtacgacctgccgccagaagaagccaagaacatcccgcaagtgtgcggcagcctgaaagaagctctggaagagctggataaaggccgtgcgttcctgaccaagggcggcgtgttctccgacgacttcatcgatgccttcatcgagctgaagagcgaagaagaaatcaaggtccgtaccttcgtacacccgctggaatacgagctgtactacagctgc

SEQ ID NO: 31764 - DNA, 1083 bp, Pseudomonas putida
atgaccatcagcgatgcacagcaccgtctgcttctggacaacctgaccaccgccacgttgctgctcaacgccgagctgcgcctggagtacatgaacccggccgcagaaatgctgctggccgtcagtggccagcgcagccatgggcagttcatcagcgagctgttcaccgaatcgaccgaggcgctcagttcgctgcgccaggcggtcgagcaggcgcacccgttcaccaagcgtgaagcgcagcttacatcgctgaccgggcagaccatcaccgtcgattacgcggtaacgccgatactgcatcaaggccagaccctgctgctgctcgaggtgcacccgcgtgaccggctgctgcgcatcaccaaggaagaggcccaactgagcaagcaggaaaccaccaagatgctggtgcgcggcctggcccacgaaatcaagaacccccttggcggcatccgcggagcggcccagctactggcccgcgaactgccagaggaagggctgcgcgactacaccaatgtgatcatcgaggaggccgaccgcttgcgtaacctggtcgaccgcatgctcggctcgaacaagctgccgtcgctggccatgaccaatattcacgaagtgctggagcgggtgtgcagcctggtcgatgccgaaagccaggggtgcatcactttggtgcgcgattacgacccaagcctgccggacgtgctgatcgaccgagaacagatgattcaggccgtactcaacatcgtgcgcaacgccatgcaggcgatcagctcgcagaatgagctgcgcctgggtcgcatcaccttgcgcagccgcgccctgcgccagttcaccatcggccacgtgcgtcaccgcctggtagcgcgggtagagatcatcgacaacggcccaggcatcccgccggaactgcaggaaaccctcttctatcccatggtcagtggccgcccggacggtaccgggctgggcctggccattacccagaacatcatcagccagcaccagggcctgatcgagtgtgaaagccacgctggccataccgccttctcgatttacctgcctctggaacaaggagccaccgcctca

SEQ ID NO: 31765 - DNA, 2274 bp, Pseudomonas putida
gtgatcaggagaacctacatggcacgggacaatacgtattatctcgatgaggcgctatacatcagtgcgcaagcacctacaggtattgaactgagttttatcggtggcggtgggccgggctcaggtggctgggggctaagcgatggttatccacgcggcaccagcccaaccaaaaatgatattgctcgggttatttccacgcgtagggtgctgacagaagaatttcaaatcatcgaaaaggactattcagataagtatgctcatgaaacaaaccagcttcctgaaactataaatgcactaaaagcccagatcaaagccgaggcgagcagtacaaacggcgcggcatcaccattcgtaacagagcaacaaatcctgtcgtcgcgcatcagccagattcgtgatggttatctgcagattttacccgacgccaacaactactttggcgtacccgcattctacaagcggggcgactcaatgatgagccggtttctagacccgggtttcttcgcagcaacaacaggccaggaattaggcgtggaatgggccacaaggctgcagaagtcttgggagggtacgtaccgtttacacctggaagctcagaagcaccaagcattggctgacgaacttcgagcactggcaagccaggtagatcaggaagaactcagccagcaaccgctggatttgttgcaggtgattgcgcgtagaacagcgcagatccacacagagcgacaaatacatttcgattgtttacccaacgtccttcagcatgagctgggtcaaaccgtcattgacgacacgctcacgcttgtccaaaccttcagtacctacctggcaactgctgccgccttggtgcaggccaagcagtcgcaaattcccccctatcaagatcaaaacccgcgcatcaacagccccctgtcgaaaccacaacttgaagggcttttgcaccttgtagatgagcaacggttgcgccgggctggcccacgctggcaggaataccacctggcactggcgctaaccgaatcgatcagattcctgggggtatatgcaggtgccacgcagaacctgatgcagcgcgcggctgaagtggaaaacctccaggctcaactcgctgcacaggaagaagctgcacgccagcaggccgaagccgaacgcttggctgctgaagccgagcgccaaaggcaagaggctttgcggcgtagtgtctcctatatcaatgaagcgcggctagcggtatccacacctgccgtaatcccaattggggctaccacttttgccgtagccgaagcggcttactctgccttggctgaatcgatcgcagcggcacttacccggcttgttgctacgactgtcccttcggtcgcagtaggcacccttgcgatggcctggccatcaacgctgggcaacagtgaacgccagtacctcatcagcaccccactcgacagccttagccctgccggtgggcccgaccttgctgccttggcggcatcctcgaccagcatcgacctgccctaccttctggcgggggttgagaacgaaaacgaactggatctctacgtggtgccgagtggcaagccggtggcggtacgcgcagcaacgttcgacagcgagcggcaggtctacagcctggcgctggataatccgcaacggattctgacctggacacccgccagcgcgccgggtggcgatgagggaaactccaccagcctaccgctagtcccgcctggtaccgtcgtgtacaccggcagcagcctgaaccctgtcgtcaccgagcaggagggttaccccgcgcttgatctgctggaccaggaacggctgatcatcaccttccccatggactccggattaccgcctattctggtggtgttcaagagcccgcgatacgaggcaggaacatcgaccggacatggtgcacaggtgtcagatacatggcgaaaggaggcagccagccttgagggtgctccgattcctgctcaaattgcagaacttcttaaaagtagggaattcagaaattttgacgcattccggcgacagttctggaaagcggtggctaatgatcctgagctttcaaagcaatttgatgaaatgagcctgagtcggatgagaaaaaacggctactcaccgatagtcgatttcccagacagccacctgagccaaaagacctttatacttcatcatgtaatcccgatcagtgaagggggcggcgtttatgacatggataacattcgtattgtcacaccgctatcgcacaacagcattcactacggaacaaaacca

SEQ ID NO: 31766 - DNA, 687 bp, Pseudomonas putida
atgttgaaaggctacggggcagtcatcctcgacggggcgtggctgacgctacagctcgccctgtcgtcgatggccctggccatcgtgctcggcctgatcggtgtggcgctgcgtttgtcgccagtgcgctggttggcctggctgggcgatctgtattccacggtgatccgtggtattccggacctggtcctgatcctgctgatcttctacggcgggcaagacatcatcaaccgggtggcgccgctgctcggctatgaagactatatcgatctgaatccgctgattgcgggtatcggtaccctgggcttcatctttggcgcctacctctcggaaaccttccgcggggccttcctgggcattcccaagggccaggccgaggcgggcgtggcgtatggcatgagccctcgccaggtgttcttccgtatccaggtgccgcaaatgattcgcctggccattccgggcttcaccaacaactggctggtgctgaccaaggctactgcgctgatttcggtcgtcggtctgcaggacatgatgttcaaggccaagcaggcggctgacgccacccgcgaacccttcaccttcttcctggcagtggcggcgctgtacctggtgctgaccagtgtttcgctgttggccctgaagtatctggagcgccgctactcggtgggcgtcaaggtggctgaacta

SEQ ID NO: 31767 - DNA, 2622 bp, Pseudomonas putida
atgaaaagcgcagaaatccgtgaagccttccttcgcttcttcgaagagcagggacatacccgagtcgcctccagttcgctgatcccgaacaacgacccgaccctgctgttcaccaacgcaggcatgaaccagttcaaggactgcttcctcggtgcggagaagcgcgcctacacgcgtgctgtcagcagccagaagtgcgtgcgtgccggtggcaagcacaacgacctggaaaacgtcggttacaccgcgcgtcaccacaccttcttcgaaatgctgggcaacttcagcttcggcgactatttcaagcgcgacgccattacctttgcctggaccttcctgacgtctgagcagtggctgaacctgcccaaggaaaagctctgggtcaccgtctacgccaccgacgacgaagcctacgacatctggaccaaggaagtcggcgtgccggccgagcgcatggtgcgcatcggcgataacaagggcgccccgtacgcctccgacaacttctggaccatgggcgataccggcccgtgcggcccgtgcaccgagattttctacgatcacggcccggatatctggggtggtccacccggctcgccagaagaagacggtgaccgctacatcgagatctggaacaacgtcttcatgcagttcaaccgcactgccgacggtgtgttgcacccgctgccagcgccgtcggtggacaccggcatgggcctggagcgtgtcagcgccgtgctgcagcacgtgcattcgaactacgagatcgacctgttccagaacctgctggctgccgcagccaaggccatcggttgcagcaatgacggccaggcttcgctgaaagtggtcgccgaccacatccgttcgtgcggcttcctgattgccgacggcgtgctgccgtccaacgaaggccgtggctacgtgctgcgccgcatcattcgccgcgcttgccgtcacggcaacaagctgggcgccaagggcagcttcttctaccagatcgttgccgcactggccgctgaaatgggcgaagccttcccggagctgaagagccagcaagcgcacatcgagcgcgtgctcaaggccgaagaagagcagttcgccaagaccctggagcagggcctgcgcatcctcgagcaagacctggcccagctgaaaggcgacgtggtaccgggcgacgtggtgttcaagctgtacgacacctatggcttcccgatggacctgactgccgacatcgctcgtgagcgtgagctgaccatcgacgaagccggcttcgagcgtgaaatggacgcccagcgtgagcgcgcccgctccgccagcgccttcggcatggattacaacagcctggtcaaggtcgacagcgccaccgagttcctcggttacgacgccaccgagggccagggcaagatcatcgccctgtacaaggacggccaatccgttgaccagctgggtgaaggcgaggagggcgttgtggtgctcgaccgcacgccgttctacgccgagtccggtggtcaggtgggtgataccggcttcttgcaggctggcgctgcacgctttgacgtgcgcgacaccaccaagaccggcggtgccttcctgcaccacggcgtggtgaccagcggtgcgctggtgatcggttcgcccgtcgaggccaaggtcgatgccgacgtacagcacgccacctcgttgaatcactccgctacccacctgctgcacgaagcattgcgccaggtactgggcgagcatgtacagcagaagggctcgctggtcgacagccagcgcctgcgtttcgacttcagccacttcgaagcggtgaagccggagcagatcaagcagctggaagacatcgtcaaccgcgagattcgcaagaataccccggttgaaaccgaactgaccgacatcgaaactgccaaggccaaaggcgcaatggcgctgttcggcgagaaatacggcgacaccgtgcgtgtgctgagcatgggcggtgatttttcggtggaattgtgcggcggtatccacgccaagcgcaccggtgacatcagcctgttcaagatcatcagcgaaggcggcgtagcctctggcgtgcgccgtatcgaagccgtaaccggtgccgctgcgctggcttacctgaacgctgccgaagagcaggtcaaggaagccgcacaactggtcaagggtaaccgcgacaacctgatcgacaagctgtcggctgtgcttgagcgcaaccgccagctggagaagcagctggaacagctgcaggccaaggccgccagcgccgccggggacgatctctccaacgcggccgttgaggtcaagggtgccaaggtcctcgccgcccgcctggatgggcaggatggcaaggccctgctggccctggtcgatcagctgaagaacaagctcggccacgcagtgatcctgctgggcagcgagcatgagggcaaggttgtgctggtggccggcgtgaccaaggacctctccagccaactcaaggctggcgatctgatgaaacaagccgctgcggcggtgggtggcaagggcggcggccgtccggacatggcccagggtggtggcgtcgacgtcgctgccctggaccaggccctggcgctggccgtgccattcgcagagcagggactt

SEQ ID NO: 31768 - DNA, 1233 bp, Pseudomonas putida
atggcgttgatcgtacagaaatttggcggcacctctgtcggttccatcgagcggatcgagcaggtagccgaaaaggtcaagaaacaccgtgaagcgggcgacgacctggtggttgtgctgtcggccatgagcggtgaaaccaatcgcctgatcgacctggccaagcagatcaccgatcagccggttcctcgtgaactggacgtgatcgtgtcgacgggtgagcaggtcaccattgccctgctgaccatggccttgatcaagcgtggtgtgccagcggtgtcctacaccggcaaccaggtgcgtattctcaccgacagctcgcacaacaaggcgcgcattctgcaaatcgacgaccagaagattcgtgccgacctcaaggaaggccgcgtggtcgtggttgcaggcttccagggcgtcgacgagcacggcagcatcactaccctgggtcgtggtggctctgataccaccggcgtggccctggcggcggcgctgaaggctgatgagtgccagatctacactgatgttgatggcgtctacaccaccgacccgcgcgtcgtgccacaggcccgtcgcctggagaagatcaccttcgaagagatgctggaaatggccagccttggttccaaggtgctgcagatccgttcggtggagttcgccggcaagtacaacgttccgctgcgcgtgctgcacagcttcaaggagggtccgggtaccctcattaccattgatgaagaggaatccatggaacagccgatcatttccggtatcgccttcaaccgtgatgaagcaaagctgaccattcgcggcgtgccggataccccgggcgtggccttcaagatcctcggcccgatcagcgcttcgaacatcgaagtcgacatgatcgtgcagaacgttgcgcacgataacaccaccgacttcaccttcaccgtgcaccgcaatgagtacgagaaggcgcagagcgtgctggaaaacaccgcgcgcgaaatcggtgcccgtgaagtgatcggcgacaccaagatcgccaaggtctcgatcgtcggcgtcggcatgcgttcgcacgccggtgttgccagctgcatgttcgaagccctggccaaggagagcatcaacatccagatgatctccacttccgagatcaaggtttcggtggtgctcgaagagaagtacctggagctggccgtacgcgcgctgcataccgcgttcgatctggatgctcctgcccgacagggcgag

SEQ ID NO: 31769 - DNA, 1461 bp, Pseudomonas putida
atgaccacgcattacatcgcaggcaattggcaggccggccagggcgaaaccctgcagtcgctcaacccggtgacccaggccgtgatctggcaagggcagggcgctgacgccagccaggtcgacgccgccgtgcaggccgcgcggcaggcctttccggcctgggcgcaattgagcctggaggcacgtatcgatgtgctggagaagtttgccgcgcagctgaaagtgcatgccgaggccatggcccagtgcattggcgaggaaaccgggaagccgctgtgggaatctgcgactgaagtcaccagcatgatcaacaaggtggcgatttcggtacagagctaccgcgagcgcaccggcgaaaagagtggtcctctggccgatgccacggctgttctgcggcacaagcctcacggcgtcgtggcggtgttcggcccttacaacttccccgggcacctgcccaatggccatatcgtgccggcgctgctggcaggcaactgcgtggtgttcaagcccagcgagctgacccccaaggtcgctgagcttaccgtcaactgctggattgctgccggcctgccggcgggtgtgctgaacctggtgcagggcgcacgcgaaaccggtgtggcgctggccgccaacccaggtatcgatggcctgttcttcaccggctccagccgcaccggcaacctgttgcatcaacagttcgcaggccgcccagacaagattctggccctggaaatggggggtaacaacccgctcgtggtggacgaggtcaaggacctcgacgcggcggtgtataccattatccagtcggcgttcatttccgccggccaacgctgcacttgcgcgcggcgcctgctggtgccgcaaggcgcctggggcgatgcactgatcgcgcgcctggtcgaggtgtgcaaaaccatcacggtgggggcgttcgatgaacagccggcgcctttcatgggctcggtgatttcgctgcaggcggctcgggcgctgctagccgcccaggttgaactggccgccaaaggtggcgtgaaactgctggaaatgactcagccgcaggccgatgctgcactgctgaccccgggcattgtcgatgtcactgccgtggctgaccgcccggacgaagagtttttcggcccgctgttgcaggtgatccgctacgccgacttcgatgccgccatcgatgaagccaataacacccagtatggcctggccgccggcttattgtctgattcgcgagcccgctaccagtacttctggctgcgcagtcgcgcaggcatcgtcaactggaacaaacagctgacaggggctgccagcagcgcgccgttcggtggcgtgggagccagtggcaaccatcgcgccagtgcctattacgcagccgactactgcgcttaccccgtggcttcgctggagaccgccagccttgccttgccggcgaccctgacgccgggcgtcacccta

SEQ ID NO: 31770 - DNA, 458 bp, Pseudomonas putida; identical to SEQ ID NO: 31314

SEQ ID NO: 31771 - DNA, 366 bp, Pseudomonas putida; identical to SEQ ID NO: 31315

SEQ ID NO: 31772 - DNA, 402 bp, Pseudomonas putida
ggaatattaacctgttttccatcgactacgcttttcagcctcgccttagggaccgactaaccctgcgtcgattaacgttgcgcaggaaaccttggtctttcggcgtgcgagtttttcactcgcattgtcgttactcatgtcagcattcgcacttctgatacctccagcaagcttctcaactcaccttcacaggcttacagaacgctcctctaccgcatcatcgtaagatgatacccgtagcttcggtgcatggtttgagccccgttacatcttccgcgcaggccgactcgactagtgagctattacgctttctttaaagggtggctgcttctaagccaacctcctagctgtctaagccttcccacatcgtttcccacttaaccatgactttgggaccttagc

SEQ ID NO: 31773 - DNA, 1572 bp, Pseudomonas putida
atggcgaagaccgagcaagaacccgaacggggccttgccgcaagtctttatgccaagctcgcaccagaccgcgagaccttcctacagagggcgcgggactgttccaaatacagcatccccaccctgatcccgcctgccggtcacgcaagtggcacgaagttctacaccccatggcaagcggtggccgcccgaggcgttaacaacctcggagcaaaattgctcatggccttgctcccgccgaactctcccttcttccgcctggaaatcgacgagttcaccgaagagaagctgaccagcaatccgcagatgcacgctgatgttcaagcgggtctagcgaagattgagcgagcggtgcaaaccgagattgaaaccaccgccatccgtgtgactggttttgagttgctcaagcatttgattgttggcggcaacggccttgtgtacctgccccagcagggcggcatgaagttctacccccttgaccgctacgtggtccggcgtgacccaatgggcaacgtcctggacatcgtggtcaaggaggaggtctccctggcggtactgccagaggaggcccggtcattagtcgagcctggcgatgactccggcgacaccccccgagaccataacaagaacgtctcgatctacacccacatcaccctcaagggtgagacctggaacgtgtatcaggaggtcaagggccagattgttcccggctcccgaggcacgtacccgaaagacaagtgcgcctggctcccgattcgattcgtcaagatcgacggtgagaactatggccgctcctacgtggaagagtacctgggcgacatcaagtccctggaaggtctctcccaggccatcgtggaaggctccgcagcctccgcgaaagtcctgttcctggtgaaccccaacggggtcactagctccagcgagctggccgaagcgccgaacggcgaatttgtggatggcgtggcatctgatgtccaggccctccagcttcaaaagtccggtgacttccgtgtggcactggaaaccatcaacaccatcactgagcgccttgagttcgccttcatgctgaactccgcgattcagcggaatggtgagcgcgtgacagccgaagaaatccggtacatggccggggaattggaagccgccttgggcggtgtctattccatcctcagccaagaattccagcttccgctagtcaaccgcatcatgttctcgatgcagcgccgcaaaaagctccccgaactgcccaagggcactgttagccccaccattgtgacgggtatggaggcccttggacgtggcaatgacctgaccaaactggaccagttcatctccaccatcatgcagattcctgatgccgcctcccggatcaactggggcaactacatgacccgaagggccaccgcccttgggatcgacacagacggcctggtgaagaccgatcaagaggtccagcaggaacaacaacagcaacagatgcagcaggcaatgcagtcgggcgtagccccggcagtgcaggccgctggtcgcatgatggagaaaggccaacccgatggcagccaagcgcaaacc

SEQ ID NO: 31774 - DNA, 1266 bp, Pseudomonas putida
atgaccaacgcggccaatgacgaaaacgcgcatctcgaacagatcatcggccgctttcatgacctaccccacacgggcaagacttattcgggacacaaccgttacggctacgacctcaacgagcaactgcaaaccatccagcagtcacgccccaactggcaagccacgcaggtcgaggatttcaagtacgacaaggccggcaatctgttcgacggccccaagctcaatggcctgatcaagcacaaccgggtgttggtgtatcaggacaagcgctatcgctacgaccgctttggacggttgtgcgagaagcggatcggcagcaactgggtgcagtatttcgagtacgacgccgagcagcggctggtttgcgtggagcagtaccgcagtggcgagcgtgagcgggtggtgtttgcctatgacccgttggggaggcggatcagcaaggaggtttatcagagggactatccagagccgcgtcggcgggtgctgtttcattggcaagggttgcgcttgcttcaagaagtgcagagtgggttggctagcttgtatgtgtatgccactccggacagctatgagccgctagcacggatcgatgggtcgatgggtagggaggtggttcagtattttcataccaacctggccgggcttcccgagcaactgactgacgcgaatggcaatgcgatttggcgtaacgattatgagggctgggggaagacgcgggatgagtggcacagtccacaccaggcgagagaacagaacctgcgatatcaaggtcagtatgttgacagagaaataagcctccattacaacaccttcaggttctacgattttaccactggtcactttattcaaccggatcccattggactggaaggcgggttaaactcatacgcgtatggaccgaacccgctggcatggattgaccctcttggattgttctgtggtgtcgccaagagctcgaaatggaatagagcacgtcaaaaccttaatgggcccggacttagagatcatttcgaaaagcatggctctcaagtaggagcaaattcagcgaaggaatacgattttagtgcaagaacgacgatacaaaatggaagaaaattcacctacagggaccggtacactaacaagccaagagtcggctatcacgatcctgacactggattatttaccgcaaccagtcagacaggaaaagtacctgttattttaactcatttccctgaatcgtggtcaaacttaaggcgcctacctggattcagcactccaaat

SEQ ID NO: 31775 - DNA, 585 bp, Pseudomonas putida
atgatgcttatcaagcaattccccgacatttccctgaatgacacgctgttcgtctttgcgcttgaggccgaggctggcgatgtctttaccgaggtgaacaccgtgttcaccggcattggcaaggtcaatgccgcaatcgccctgaccaaggcgatcgccacgcgcaggcccaagcttatcgtcaacctgggctcggctggcagccagcgtcatggcaagggcgaagtcgtgtgctgtaaccgcttcgtacaacgcgacatggatgtgaccgcgctgggctttgcccgttatgaaacacccttgtccgacaccccggtggtactcgaacacggggcggcaatacccggcctggctgtggaaacctgtggcagcggtgacagcttcgagatcaaccatggcgacgcgccttacgacgtggtcgacatggaagcctacgtgctggcattgatcgcgcggggtgaaggtatcccgttcgtgtgccttaaatacatttccgatgatgccggcagcgaagccgcgggggattgggcggtacaagtgcacctggcggccgaagcgttcaagcgggtgctgttcagccaggcg

SEQ ID NO: 31776 - DNA, 915 bp, Pseudomonas putida
gtggcccaggtcaaacgtatccgccgcaatgtcagcggcatcatcctgctcgacaagccgctgggcttcacgtccaatgccgccttgcagaaagtgcgttggctgctgaatgcggaaaaggccggccataccggtagcctcgacccgctggcgaccggcgtgttgccgctgtgcttcggtgaagcgaccaagttttcgcagtacttgctggattccgacaagggctacgaaaccgtcatgcagatggggcagactaccaacaccggcgatgccgagggtgaggtgctgcagacccgcgacgtgaccgttggtcgcgccgacatcgaagcagtgctgccacgttttcgcggcccgatcagccagataccgcctatgtactcggcgctcaagcgtgacggccagccgttgtacaagctggcacgtgcaggagaggtagtggagcgcgaggcgcgttctgttactattaaccgcttggagttgctcgagtgcgaaggcacccgtgcacggctgagcgtaggatgcagcaaaggcacctatatccgcacgctggtggaggatatcggtgaagcccttggttgcggggcctatgtcgccgagctgcgcaggacccaggcagggccctttgcgctggcacagacggtcaccctcgaggaactcgaacaggcccatgccgaaggtggtaacgaagcgctcgaccgcttcctgatgccgtcggacagcgggctgcaggactggccgttggtcagcctgtcggaacacagtgcgttctactggctgcatggccaggcggtacgcgcgccggacgcgccacaatttggcatggttcgggtgcaggatcacaatgcacgcttcatcggtatcggtgaagtgagcgaagacgggcgcattgcgccgcgtcggctgattcggtcggaa

SEQ ID NO: 31777 - DNA, 780 bp, Pseudomonas putida
atgcctcgcttcgctgccaacctgtccatgctgttcaccgaacaggacttcctggcccgcttcaaggctgccgccgatgctggtttcagcggcgtcgaatacctgttcccgtacgacttcagcgctgccgacatcaagcagcagctggaggccaacggcctgacccaggtgctgttcaacctgccggccggcgactgggccaaaggtgagcgcggtatcacctgccaccccgaccgcatcgaagagttccgtgccggtgtcgacaaggccatcgagtacgccaaggtgctgggcaatactcaggtcaacgccctggccggcatccgcccacaaggcccggactgcgccaccgtgcgtaagaccttcgtcgagaacctgcgctacgccgctgacaagctcaagggcgccgggatccgcctggtcatggaaatgatcaacacccgcgacatccccggcttctacctgaacaccacccagcaggccctggaaatccaggccgaagtgggcagcgacaacctgttcctgcaatacgacatctaccacatgcagatcatggaaggtgacctggctcgcaccatggaagccaacctgaagctgatcaaccacatccagctggccgacaacccaggccgcaatgaaccaggcaccggcgagatcaactaccgcttcctgttcgaacacctggaccgcattggctaccagggctgggtgggcgcggagtacaagccgctgaccaccaccgaagcgggcctgggctggctgaaaacccacaacgcaatc

SEQ ID NO: 31778 - DNA, 1413 bp, Pseudomonas putida
atgacgcctgataaaaaagttaagatccttgccacccttggccctgcgatcaacggcatcgacgatatccgccagctggtcgaagccggggtgaacatcttccgcctcaacttcagccacggcgaacatgccgaccacgccctgcgctaccagtggatccgcgaagtcgagcaacagctgaactacccgctgggcatcctcatggacctgcaagggccgaagctgcgcgttggccgcttcgccgaaggcaaggtgcagttgcaacgcgggcaggccctgcgcctggatctggacaagaccccgggcgacagccgccgggtcaacctgccgcaccccgaaatcatcgccgccctcgaacccggcatggacctgctgctggacgacggcaagctgcgcctgcgcgtgaccgccaagcacagcgacgccatcgacaccgaggtgctgaatggtggcgagctttccgaccgcaagggcgtcaacgtaccgcaagcggtgctcgacctctccccgctcaccgaaaaagaccgccgcgacctggcctttggcctggagctgggtgtggactgggtcgccctgtcgttcgtgcagcgccctgaggacatcgtcgaagcgcgccagctgattggcgaccgcgcctacctgatggccaaaatcgagaaaccatcggcagtcgagcaactgcaagccatcgccgagctggcagacgcgatcatggtggcccgtggtgacctgggcgtggaagtaccggccgagagcgtgccgcagatccagaagcgcatcatcggcacctgccgccagctaggcaaacccgtggtggtggccacgcagatgctcgagtcgatgcgtttctcgccagcgccaacccgcgccgaagtcacggacgtggccaacgcggtggccgaaggtgccgatgcagtgatgctgtcggccgaaaccgcctcgggtgattacccgctggaagccgtgcagatgatgagcaagatcatccgccaggttgagaacggcccggactaccaggcccagctcgacgtcggccggccaaaggccgaagccaccgtgtcggatgccatcagctgcgccatccgccgcatcagcggcatcctgccagtggcggtgctggtcaactacagcgagtcgggtgcctcgaccctgcgcgcggcacgtgaacggccacgggcaccgatcctcaacctgacgccgaacctgaacaccgcgcgccgcctgagcgtggcttggggtgtgcattcggtggtcaacgaccgcctgcgtcaggtcgacgaggtggtttccaccgccctggagattgcccaggcgcaaggcatggccagccgtggcgacacgctgctgatcaccgctggcgtgcctttcggcaagccgggtacgactaacacgctgcggatcgagactttgatc

SEQ ID NO: 31779 - DNA, 818 bp, Pseudomonas putida
atgcaaaccccgcaatcaatacgcgagcggctcttcgtcatcgtcttccagaccgacaccgtagccggtcgccgcttcgacaagatcctgttgctgatcatcctggccagcctggtcacggtgatcctcgacagcatcgatgaggtgcaccagggctacgccggcctgctggccggtatcgagtggggctttaccgcgatcttcctggccgaatacatcacccgcctgtactgttcgcccaagccgctgcgctatgccttcagtttctacggcctggtcgatttactggcgatcgtgccggggatcctcgcgctgtactacagcgacgcccagtacctgctcatcatccgggtcatccggatgctgcggatcttccgtgtactcaagctcagcccgtacctcaagcaggcccattacctgatggaggcgtgcgcggcagcaagcagaagatcatcgtgttcctggtgacggtatcgacgctggtaacggtgttcggcacgctgatgtacgtgatcgaagggcctgagcatggctttaccagcatccccaaaggcatctactgggccatcgttaccctgaccaccgtgggctttggcgacatcgtgcccaagaccccgctggggcaggtgctgtcgtcgctggtgatgattaccggttactcgatcattgccgtgccgaccggcatctttaccgccgagctggccaatgccatgcgtggggagcagctgcagcatgattgcccgacctgccacaagaagacccacgagcagggggcggcgttctgttctcgctgtgggaatgggttgtttcccaaagcg

SEQ ID NO: 31780 - DNA, 994 bp, Pseudomonas putida
gtgaaaaaactcttcaccgcctcgctgctcgccgcaggcctggccctgggcaacctcgcccaggccgcccctaccctgctcaacgtttcctacgacgtgatgcgcgacttctacaaggactacaacccggccttccagaagcactgggaagccgagcacaacgagaaggtcaacgtgcagatgtccttcggcggctcgagcaagcaggcccgtgcggtgatcgatggcctgccggccgatgtcatcaccatgaacatggccaccgacatcaacgccctggccgacaacggcaagctggtgcccgacgactgggtaacccgcctgccgaacaacagcgcgccgttcacctcggccactgtgttcattgtgcgcaagggcaacccgaaagccctcaaagactggccccgacctgctcaaggacggtgtgcaggtgatcgtgcccaacccgaaaacctcgggtaatggccgctatacctacctgtcggcctggggctacgtactcaagcaaggcggcgatgaaagcaaagcccgcgacttcgtcggcaagctgttcaagcaggcacccgtactggacaccggtggccgtgccgccaccaccacgttcatgaccaaccagatcggtgacgtgctggtcaccttcgagaacgaagccgagatgatcgcccgcgagtttggccgcgaccagttcgaagtcgtttacccaagcgtatcggccgaagccgagccaccggtgacggtggtcgacaaggtagtggcccggaaaggcacccaggccgtggccgaggaatacctgaagtacctgtggtcacccgcagcccaggagatcgccgccaacaactacctgcgcccgcgtgatgcaacggtactggccaagtacaccgaccgcttcccgaaagtggacttcctgtcggtggagaaaaccttcggtgactggcgtaccgtgcagaagacccacttcaatgatggtggggtgtttgaccagatctataccggt

SEQ ID NO: 31781 - DNA, 1590 bp, Pseudomonas putida
atggcgagcccgtgcgcatgcccgctcatcgcagtccaagtgcatcaggagcccgccggaatgagtagcagcctcgaccttgcccctgaactatccgtcgccagcacacaccccgcgtccacgcttgccggccaccagccggaccttgttctcagcccgcgcctgcataaccgcgacctcgcgccaacgcgtatggaaggccgtcgctggggcggctacagcatcttcgcgctgtggacaaacgatgtgcacaatatcgccaactattcgttcgccatgggcttgttcgccctcggcctgggtggctggcaaattctgctgtcgctggccatcggcgcggcactggtgtacttcttcatgaacctgtcgggttacatggggcagaaaaccggggtaccgttcccggtcatcagccgcattgccttcggcatccacggcgcgcagatcccggcgctgatccgtgccgtcatcgccatcgcctggttcggcatccagacctacctggcatcggtggtgctgcgggtgctgctcaccgccgtttggccgcaaatagcagcctacgaccacgacagcatcctcggcctgtcgagcctgggctgggtgtgtttcgtgtcgatctggctggtgcagctggtgatcctggcctacggcatggagatggtgcgccgttacgaggcctttgccgggcctgtgatcctgctgaccgtcgccgcactggcggtgttcatgtacttcaaggccgacgcgcgcattgcctggtcggtggctacgccgctgaccggctacgagatgtggcgcaacatctttgccggcggcgcactgtggctggcgatctacggcaccctggtgctgaacttctgtgacttcgcccgctcctcgccttgccgcaagaccatccgcgtgggcaacttctggggcctgccggtaaacatcctggtattcgccgtgatcaccgtggtgctgtgcggcgcgcaattccagatcaacggccagatcatcgacagcccgacgcagatcgttgccgccatacccagcacgccattcctggtgctcggctgcctggccttcctgatcgtcaccgtagcggtgaacatcatggccaacttcgtcgccccggctttcgtactcagcaacctggcgccgcgccacctgaacttccgccgtgccgggctgatcagcgccaccctggcggtgctgatcctgccctggaacctgtacaacagcccgctggtgatcgtgtacttcctgtcgggcctgggcgccctgctaggcccgctgtacggcgtgatcatgtccgactactggttgctgcgcaaaggctgcatcaacgtgccggagctgtataccgagcacccggccggcgcctatcactacagcaagggcatcaacctgcgcgccgtggccgccttcgtgccggccgcactgctggccatcgtgctggccctggtgcccaacttccagggcatcgcgccgttctcctggctgattggtgccggcatcgccgccgccctatacctgcttatcgcgccacgtaaccgccattaccacgacgtcagcggcgagtgcatcgccgtcgaccacagcggccat

SEQ ID NO: 31782 - DNA, 1440 bp, Pseudomonas putida
atgagcacagcaatcagtccgactgcttataactataaggtcgtccgccagttcgccatcatgacggtggtctgggggatccttggcatgggcctcggcgtcttcatcgcctcgcagctggtgtggccgcagctgaacctggaccttccctggaccagcttcggccgcctgcgcccgctgcacaccaacctggtgatcttcgccttcgggggctgtgcgctgttcggcaccagctactacgtggtgcagcgcacctgccagacccggctgatctccgacagcatggccgccttcaccttctggggttggcaagccgtgatcgtcggcgcgctgatcaccctgccgatgggctacaccaccaccaaggaatacgccgagctggagtggccgctggcgatcctgctggccatcgtctgggttacctacgggctggtgttcttcggcactatcgtcaaacgcaagaccaagcacatctatgtcggcaactggttctacggtgcgttcatcgtggtcaccgcgatgctgcacatcgtcaaccacatctcgctgccggtgagcctgttcaagtcgtactcggcctactccggcgccaccgacgcgatgatccagtggtggtacggccacaacgccgtgggcttcttcctcaccaccggcttcctggggatgatgtactacttcgtgcccaagcaggccgagcggccgatctactcgtatcgcttgtcgatcgtgcacttctgggcgctgatcaccctgtacatctgggccggcccgcatcacctgcactacaccgccctgcctgactgggcgcagtcgctgggcatggtaatgtcgatcatcctgctggcgccaagctggggcggcatgatcaacggcatgatgaccctgtcgggcgcctggcacaaactgcgcaccgacccgatcctgcgcttcctggtggtgtcgctggcgttctacggcatgtccaccttcgaaggcccgatgatggccatcaagaccgtgaactcactgtcgcactacaccgactggaccatcggccacgtccacgccggcgccctcggctgggtggcaatgatttcgatcggcgccgtgtaccacatgatcccgaaactctacggccgcgagcagatgcacagcatcggcctgatcaacgcgcacttctggctggccaccatcggtaccgtactgtacatcgcctcgatgtgggtcaacggcatcacccagggcctgatgtggcgcgccatcaacgatgacggcaccctcacctactccttcgtcgaagccctgcaggccagccaccccggctacatcgtccgcgccctgggcggagcgttcttcgccagcggcatgctgctgatggcctacaacgtgttccgtaccgtacgtgccgccaacccggcacaggctgaagaggccgccaagatcgtcgttgtgggagcgcac

SEQ ID NO: 31783 - DNA, 786 bp, Pseudomonas putida
atggattcatcacaaacgtctttgggcgagttcgagtcgaccctgaagaagcatgcccaggagttggtcgaaagcctggagcggggccgtttcggcgaggcggtgcagttgattcacgaactgaaccagacccgcgaccgcggcctgtaccaggaagtcggcaagctgactcgcgagctgcacagtgccatcgtcagtttccagatcgaccccaccatgccgcaggcagaagaggtgtcgcagattaccgacgccaccgagcgcctgtcgtatgtggtcaagctcaccgagggcgcggccaaccgcaccatggacctggtcgaggaaagcacaccggtgctcaatgagctggccaacgaggccaaggccctgagcaccgactggcagcgcttcatgcgccgcgaagtggctgcgccggaatttcgtgatctggtcaagcgagtcgacagtttcctgacgcacagcgccgagggtaaccgcaaggtttccgggcacctcaacgacattttgctggcccaggactatcaggacctgaccggccaggtgatcaagcgcgtcaccacactggtgaccgaggtggaaagcaacctgctcaagctggtgctgatggccagccaggtcgaccgctttgccggtataaaacatgaccacgatcaattgcgtgcagaaaaagatcgagaaaaacatccgactcggggtgaaggtccgcagattcatgccgataagcgtgaagacgtcgtgtccggtcaggacgatgtcgatgatctgctgtccagccttggtttt

SEQ ID NO: 31784 - DNA, 339 bp, Pseudomonas putida
atgcggcggatcatcaagaacctgttgcgtgacctgggtttcaccaacaccgacgaagccgatgacggcaccacggcgttgccgatgctggaaaacggtcactacgacttcctggtgaccgactggaacatgccgggcatgtccggcatcgacctgctgcgtaaagtgcgtgccagcgacaagctgaaaagcatgccggtcttgatggtgaccgctgaagccaagcgcgaccagatcattgaagcggcccaggctggcgtcaatggttatgtggtcaagccgttcaccgctcaggtgctcaaagagaagatcgagaagatcttcgaacgcgtcaacggc

SEQ ID NO: 31785 - DNA, 717 bp, Pseudomonas putida
atgccgcagccgacaccgacaaggaaccaccaccccgtgcctgacctgcttgcgctgctgggctcggcactggtccttggcctgctagggggcggtcactgcctgggcatgtgcggtggcctgatgggcgcactaaccttggccatcccccccgaacaacgcggcaagcgcctgcgcctgttgctggcgtacaacctggggcgcattttcagctatgcctgcgccggcctgttgctgggcctggccggctgggccgtggccagcagcccggcagcgctggcgctgcgggtggtcgcggcactgctgctgattgccatgggcctgtacctggccggctggtggagcgggctgacccgtatcgaggcactgggccgcgggctgtggcggcatatccagccggtggcgtcgcgattgctgccagtgtccagcctccctcgggcattgctgctgggcgccctctggggctggctgccgtgcgggctggtgtacagcaccctgctgtgggcggccagccagggcaatgccggctacagcgccgggttgatgctggcgttcggggtgggcacctggccggtgttgctggcaaccgggctggctgccgaacggatgaacgccctgttgcggcgacgcagcgtgcgagtggcaggcggtgtgctggtgatgctattcggtatctggaccctgccgggcccacaccagcactggctgatgggccat

SEQ ID NO: 31786 - DNA, 318 bp, Pseudomonas putida
atggccggcctgatgaagcaggcccagcagatgcaggaaaaaatgcagaagatgcaggaagaactggccaacgccgaagtcaccggtcagtcgggtggcggtctggtgagcgtggtgatgaccggtcgtcacgacgtcaagcgcgtcagcatcgaccagagcctgatgtcgactgatgaagacgacaaggaagtactggaggacctcattgccgctgcgctgaacgacgcagtgcgcaaggtcgagcagagcagtcaggaaaagatgggcggcatgaccgccggcatgcagctgccgccgggcttcaagatgccgttc

SEQ ID NO: 31787 - DNA, 2328 bp, Pseudomonas putida
atgaccgccgaaacccgtatcctcgaactgcgtgccgagctcgatcagcacaattatcgctactacgtgctcgacgagcccagcgtgcctgatgccgaatacgaccgcctgttcaacgagctcaaggcgctggaagctgaacacccgcacctggtaacccccgactcgcccacccagcgtgtgggtggagctgccttggcggcgttcagccaggtacgccacgaagtgcccatgctcagcctgggcaacgccttcgaagaagccgacctgcgtgagttcggccgtcgcgtggtagaaggcctcgatcagccgggcgcggtcgactacagctgcgaacccaagctcgatggcctggccgtgagcctgctgtaccgcgacggccagctggtgcagggcgccacccgtggcgacggcaccactggcgaagacatcagcgccaacgtacgcaccgtgcgcaacatcccgctcaagttgcagggtaagggctggccggcagtgctggaggtgcgcggcgaggtgtacatgagcaaggccggcttcgaccggctcaatgccgcccaggccgaggccggtggcaagaccttcgccaacccgcgcaacgctgccgctggcagcctgcgccagctggattcgaaaattaccgccagccgcccgctggagttctgctgctatggcgttggccaggtgtccgagagtatcggcgacagccacatcggcatcctcgaacaactcaaggcctggggcctgccgatcagccgcgagctcaaacatgcggcgggcatcgaagagtgcctggcctactatcgcgacattggcgagcggcgtaacagcctgccgtatgagatcgacggggtagtgttcaaggtcaacagcctggccgcccagcgcgagctgggcttccgcgcccgtgagccgcgctgggcgattgcccacaagttcccggccatggaagagctgaccgaggtgctggatgtcgagttccaggttggccgtacgggtgcagtaacgcctgtggcgcggctgaagccggtcaaggtggccggtgtgacggtgtccaacgccaccctgcacaacatggacgaaatcgcccgcctgggcctgcgtatcggcgacacggtgatcattcgcagggccggcgacgtgatcccgcaggtgatgcaggtggtgctggagcgtcgtccgcaaggcgcccgcccggtagaggtgccaagcgcatgcccggtctgtggctcgcaggtcgagcgtacccggctggtaaagcgcagcaagggcaaggaaaccaccagcgaaggtgcggtgtaccgctgtgtcggccgcctggcctgtggcgcccagctcaagcaggcgatcattcattatgtgtcgcgccgtgccatggacatcgacggtctgggtgagaagagcgtcgagcagttggtggatgaaggcctgatcggctcgccggctgatttgtacaagctgcagttcgagcaggtcgtcggcctggaaggcttcgccgaggtgtctacccagaagctgctggatgccattgaagccagcaagcgcccgagcctggcgcgcttcatctacgcgctgggcatcccggatgtcggcgaggagaccgccaaggtgctggcccgctcgctgggcagcctggcgcgcgtgcagcaggcattgccgcaggtgctgacctatttgccggacatcggtctcgaagtggcctacgagatccacaatttctttgaagacgagcacaaccagaaggttatccagcagctgctcgacagcggtatgcagttgcaggacgaaggtgagctggctgccgaatttgccgccagcaccaccttggccgggatgatcgccaagctcgacattgcctccgtcggcccgaccggtgccgagaagttggtggccaggctcgacagcctggacaagatcatcgccgccgacggcattgacctgcgccaggccctggcggccaagcaggccgacgcagtgcgtgagttcttcaaggatgaagcgaaccagaaactggcccgggacatcgaagcccagctgctggcgttcggcatgcactggagcagcgagaagaaggtggccgaaggcttgccgctggccggccagacctgggtgctgaccggtacgctggagcgcatgagccgcgacattgccaaggacaagctggaaagcctgggggccaaggttgccggttcggtgtctggcaagacccattgcgtggtggctgggcctggggcaggctcgaagctggccaaggcggccgagttgggtgtgaaggtgctggacgaagatgcctttgtcacattcctggccgaacagggcatagcggtc

SEQ ID NO: 31788 - DNA, 3486 bp, Pseudomonas putida
atgcgcctgaagtgcattcgcctggccgggttcaagtcgttcgtcgacccgaccacggtcaacttccccagcaacatggctgccgtggtcggcccaaacggctgcggcaagtccaatatcatcgacgcggtgcgttgggtgatgggcgagagttcggcgaagaacctgcgcggcgagtcgatgaccgacgtcatcttcaacggctccagtggccgcaagccggtcagccaggccagtatcgagctggtgttcgacaacagcgaaaccaccctggtcggcgagtatgccgcctacgccgagatttcgatccgccgcaaggttacccgcgacgggcagaacagctattacctcaacggcaccaagtgccgccggcgtgacatcacggatattttccttgggacgggtctggggccgcgcagctactcgatcatcgagcagggcatgatctccaagctgatcgaggccaagcccgaggagctgcgcaacttcatcgaggaagcggctggcatttccaaatacaaggagcgccgccgcgaaaccgagaaccgcatccgccgcacccaggaaaacctggcgcgcctgaccgacctgcgcgaagagctcgagcgccagctggagcgtctgcatcgccaggcccaggcagccgaaaagtaccgtgagtacaaggctcaggagcggcagctgaaagcgcgcctgtctgccttgcgctggcgagacctggacgaacaagtacgccagcgcgaatcggtgatcggcgatcagggcgtttctcacgaggcactggtggccgagcagcgcaatgccgatgccagtatcgaacgcctgcgcgacggtcatcacgaactgtccgaacgcttcaaccaggtgcagggccgtttctactcggtggccggtgacatcgcccgggtcgagcagagcattcagcacggccagcagcgcctgcggcagttgcaggacgacttcaaggaagccgagcgcacacgcctggaaaccgaatcgcacctggggcacgaccgcaccctgctggcgactttgggcgaagagctggccatgctcgaacccgagcaggaaatgaccctggctgctgccgaggaagccgctgccgcgcttgaagaggccgagctgggcatgcacggctggcaggaacagtgggacagcttcaacagccgctccgccgaaccgcgccgccaggccgaagtgcagcaggcgcgcctgcagcagctggaaaccagccttgagcgccaggccgagcgccagcgcaagttggtcgaggagcgcgagcaactgggcagcgacccgcaggatgccgccatgctcgaactggccgagcaactggccagcagcgaaatgctgctggaagaactgcagctctgcgaagagcaggtgatcgagcgcctggaaagcgcgcgcgagcaactgcagcaggccacccaggcgcaacagcaggcacagggcgacctgcagcgcctgggtgggcgcctggcctcgctggaagccttgcagcaggccgccctggagccgggcgcaggtgctgcgcaatggctgcacggccaagggctggagcaacagccgcggctggccgaaggcttgcgggtggagccgggttgggagctggcggtagagacggtgcttggcgccgatctgcaggctgtgctggtggacgatttcaacgaccttgattttgccggcctggaacagggtgagctgcgcttgctgctggccgtcggcgcgggggcgacgttgcccggcagcttgctggagaaggtcgagggccgtatcgacctggcgccctggctgggccaggtcaggcctgtggaagacctggctcaggcactggagcagcgcggatcgctcggcgaagggcagagcctggtcagtcgcgatggctactgggtcggccggcacttcctgcgggtacgccggggtggcgaggccgaaggcggcgtgctggcgcgcggccaggaaatcgaacgcctgggccaggaacaactggaacaggaagcggcgctggaacaactcgatcaacagttgcaggccctgcgcgagcagcaactggacctggaggagcagcgcgaacagttgcgccgccgcacccaggatgaaaaccgcctgcacggcgaactgaaggccagtctttcggccagccgcgcgcgcgccgagcaggtcgagctgcgccgccgccgcctgcaggaagagctgagcgagctggaagaacagcgcgccctggaacacgagcaactgggcgaagcgcgcctgctgctgcaagaggctttggagctcatggcccaggacaccgagcagcgcgaacagttgatggcccgccgcgataccttgcgcgaaagccttgaccgggtgcgtcaggaagcccgccagcacaaggaccacgctcaccagctggcggtgcgtctggggtcgctgcgtgcccagcacgactctacccgccaggcgctggagcgtctggagcagcaagctgcgcgcctgaccgaacgccaggaacaactgagcctgaacctggaggagggtgaagccccgcaggaagaactgcgtctgaagctggaggagctgctggagcggcgcatgagcgtcgacgaggaaatgcgcctggctcgcctgcacatggacgaagctgaccgcgaactgcgcgatgccgaaaaacgccgcacccaggccgagcagcaggcccagctgctgcgtggtcaactggagcagctgcgcctggagtgccaaggcctggatgtgcggcgcaagaccttgcaggaacagttgctggccgacggctatgacctgcaaggcgtgctcgccaccctggaagccgaggccagcgagcagggcaccgagcaggagctggaacagcttgaagcgcgcatccagcgcctgggggcgatcaacctggcggccatcgaagaatacgagcagcagtccgagcgcaaacgttacctggacgcccaggacgccgacctggtcgaagcgctggagaccctcgaaaacgtcatccgcaagatcgacaaggaaacccgcaaccgcttcaaggatacctttgatcagataaatgccggattacaggcacttttcccaaaagttttcgggggtggcagcgcttatctggaactgacgggcgaagatttactcgatacaggggtgacgatcatggcgcgcccaccgggcaagaagaacagcaccatccatttgctgtccggcggcgagaaggcactgaccgccttggcgctggtgtttgccatcttcaagttgaaccccgcaccgttctgcatgctcgacgaggtcgatgcgccgctggacgatgccaacgtcgggcgctacgcgcgtctggtcaaggaaatgagtgaaagcgtgcagttcatctacatcacccataacaagattgccatggagatggcggaccaattgatgggggtgaccatgcatgaaccaggttgttcacgccttgttgcggttgatgtggaggcggccatggccatggtcgacgct

SEQ ID NO: 31789 - DNA, 2342 bp, Pseudomonas putida
gtagccaagagccaggccgagatggccgaactgttcagccaggacctgaccaccggggtcggccgcggcgtcaagcacgacagcgccgacaagcatgtatcgggggaggcgctgtacattgacgatcgcctggaattccctaaccagttgcatgtgtatgcacgtaccgccgaccgcgcccatgcgcgcatcctgcgcatcgacaccacgccgtgctatgccttcgagggtgtgcgtatcgccatcacccacgaagacatccccggcctgaaggacatcggcccggtggtggccggcgacccgctgctggccatcgacaaggtcgagttcttcggccagccggtgctcgctgtcgctgcccgcgatcttgaaaccgcacgcaaagcggccatggccgccatcgtcgagtacgaagacctggaaccggtgctggacgtggtcgaggcgctgcgcaagaagcacttcgtgctcgatagccacacccatcagcgcggcgattcggctgccgccctggccagcgccccgcatcgcattcagggcaccctgcacatcggcggccaggagcacttctacctggaaacgcagatttcctcggtcatgcctaccgaagacggcggcatgatcgtctactgctccacacagaaccccaccgaagtgcagaaactggtcgccgaagtactcgacgtgccgatgaacaaggtggtgctggacatgcgccgcatgggcggcggttttggcggcaaggaaacccaggccgccagcccggcatgcttgtgcgcggtaattgcgcgcctgaccggccagccaaccaagatgcgcctgccgcgggtcgaagacatgaccatgaccggcaagcgccacccgttctacgtcgagtatgacgtgggcttcgacgacaacggccggctgcacggtatcaatttcgacctggctggcaactgtggctattcgcccgacctgtccggttcgatcgtcgaccgtgccatgttccactccgacaacgcttactacctgggcgatgccaccgtccacggccaccgctgcaagaccaacaccgcctccaacactgcctaccgcggctttggcggcccacagggcatggtcgccatcgagcaggtgatggaccatatcgcccgtcatctgggccgcgacccgctggccgtgcgcaaggccaactattacggcaagaccgaacgcaacgtcacccactactaccagaccgtcgagcacaacatgctcgaagagatgaccgccgagctggaggccagcagcgactacgccgagcgacgcgagtcgatccgccgcttcaacgccaacagcccgatcctgaagaaaggcctggcactgacaccggtcaagttcggcatttcgttcaccgccaccttcctcaaccaggccggtgcactgatccatatctacaccgacggcagcattcacctgaaccacggcggcaccgaaatgggccagggcctgaacaccaaggtggcccaggtggtggcgcagatcttccaggtggatttcagccgcatccagatcaccgctaccaacaccgacaaggtgcctaacacctcgcctacggctgcttccagcggcgccgacctgaacggcaaggcggcgcagaacgccgccgaaatcctcaagaaacgcctgaccgagtttgccgcacggcactatcaagtgaccgaggaagacgtcgaatttcgcaacgccatgtgcgggtgcgcgaccagatcgtcagcttcgagcaactggtgcagcaggcctacttcgcccaggtgtcgctgtccagcaccgggttctaccgcacgccgaagatcttctacgaccgcagccaggcccgcggccggccgttctactacttcgcctttggcgctgcctgcgtggaagtgatcgtcgatacgctgaccggcgaatacaagatgttgcgcgccgacatcctgcacgacgtgggcgattcgctgaaccctgcgatcgacatcggccaggtggagggtggtttcatccagggcatgggctggctgaccaccgaagagctggtgtggaacgccaaaggcaagctgatgaccaacggcccggccagctacaagatcccggccgtggccgacatgccactggacttgcgggtgaagctggtggagaaccgcaagaacccggaagacaccgtgttccactccaaggccgtgggcgagcccccgttcatgctcggcattgctgcctggtgtgcaatcaaggatgccgtggccagcctggctgattaccgcgtgcagccgcaggtggatgcgccggcaacgccggagcgggtgctgtggggctgcgagcagatgcgcaaggcagtggctgaa

SEQ ID NO: 31790 - DNA, 1306 bp, Pseudomonas putida
atgaccgttacccgcaaagcctaccgtgccgccatcctgcacagcattgccgacccggccgaggtgggcctggaggcttcccatgaatactacgaagacggactgctggtggtcgacgatggccgcatcagcgccgttgggcacgccagtgaactgctgccgacgctggatgccggcatcccggtcgagcactaccaggacgcgctgatcaccccgggcttcatcgatacccacatccacttcccgcagaccggcatgatcggttcctacggcgagcagctgctggattggctcaatacctacaccttcccctgcgaaaaacagttcgccgacaaaggccacgccgaccaaggtggcgaagatcttcctcaaggaactgctgcgcaacggcaccaccactgcgctggtattcggcagcgtgcacccagagtcggtgaatgccctgttcgaagaggctgaacgcctggacctgcgcctgatcgccggcaaggtaatgatggatcgcaacgcgccggactacctgaccgacaccgccgaatcgggctatgccgaaagcaaggcactgatcgagcgctggcatggcaagggccgcctgcactatgcagtcaccccgcgcttcgccccaaccagcacaccggaacaattgaccctggccggccaattgctcaaggaacaccccggcgtgtacatgcacacgcacctgtcggaaaacctcaaggaaatcgactgggtcaagtcgctgttccccgagcagaagggttatctggacgtctacgatcacttcgagctgctgggcgagcgctcggtgtttgcccacggcgtacacctgtgcgacgaagagtgccaacgcctggccgaaaccggctcggccgtggccttctgccccacctccaacctgttcctcggcagcggcctgttcaacctgccccaggccgagcggttcggggtcaacgtgggcctgggtaccgacgttggcgccggcaccagcttctctctgctaaacaccctgaacgaggcatacaaggtgatgcagctgcaaggcgcgcgcctgcatccgtacaaatcgctgtacctggccaccctcggcggcgcccgcgcgctacgcctggacgaccgtatcggtagcctgcgcccgggcaacgatgccgacttcgtggtgctggactacaaggccacgccactgctggactaccgcatccagcagtccaacagcatcgaagaaaccttgttcgtgctcaccaccctgggcgatgaccgtaccgtacgtgaaacctacgccgccgggcgctgcgtgcaccagcgttaa

SEQ ID NO: 31791 - DNA, 696 bp, Pseudomonas putida
atgagcatgtccctgggtaaacgcatgggggccgaactgatcggcaccttctggctggtccttggtggctgtggcagtgcggtactcgcagccagttcccctctcggcatcggtgtgctcggtgtcgccttcgccttcggcctcaccgtactgaccatggccttcgccatcggccatatttctggttgccatctaaaccctgccgtgtcgttcgggctggtggtgggcgggcgcttcccggcaaaagagctgctgccttatgtgatcgcccaggtgatcggtgccatcctggcggccggtgtgatctacctcatcgccagcggcaaggccggtttcgagctgtctgcggggttggcttcaaacggctacgccgaccactcgcccggtggctatacgctgggtgcaggctttgtcagtgaagtggtgatgacggcgatgttcctggtggtcatcatgggggcgaccgacgcccgcgcaccggcaggttttgcacccatcgccatcggcctggccctgaccctgatccacctgatctcgatcccggtgaccaatacctctgtcaaccccgcgcgtagcacggggccggccctgttcgtcggtggctgggccctgcagcagctgtggctgttctgggtggcgccgctgatcggtgctgctatcggcggcgcgctgtatcggggcctggcgaaagaacct

SEQ ID NO: 31792 - DNA, 1287 bp, Pseudomonas putida
atggctgacaaaaaagcgcagttggtcatcgagggcgctgcccccgtcgagctgcccattttaaccggcaccgttggtcctgatgtaatcgacgtccgcgggttaggggccactggtcacttcaccttcgacccaggtttcatggcgactgcctcgtgcgagtcgaagatcacctatattgacggcgacaaaggtatcctgctgcaccgcggctacccgatcgagcaactcgccgaacagtccgactacctcgaaacctgctacctgctgctcaatggcgaactgccgaatgccgagcagaaggcccagttcgtcagcactgtcaagaaccacaccatggttcacgagcagctgaagtccttcttcaacggcttccgtcgcgacgctcacccgatggcggtgatgtgcggtgtagtcggcgccctgtcggcgttctatcacgactccctggatatcaataacccgcaacaccgcgaaatctccgcggtgcgcctggtcgccaagatgccgaccctggctgcgatggtttacaagtactccatgggccagccgatgatgtacccgcgcaacgacctgtcgtacgcggaaaacttcctgcacatgatgttcaacaccccgtgcgagatcaaaccgatcagcccggtgctggccaaggcaatggaccggatcttcatcctccacgccgaccacgagcagaacgcctccacctccaccgttcgtctggcaggctcgtcgggtgccaacccgttcgcctgtatcgccgccggtatcgccgcactgtggggcccggcccacggcggtgcgaacgaagccgtactgaccatgctggatgaaatcggcgatgtctcgaacatcgacaaattcatcgccaaggccaaggacaagaacgacccgttcaagctgatgggcttcggtcaccgcgtgtacaagaaccgcgacccgcgcgccaccgtgatgaagcagacctgcgacgaagtcctgcgcgagctgggcatcaagaacgacccgcagctggaactggccatgcgcctggaagagatcgccctgaccgatccttacttcatcgagcgctcgctgtacccgaacgtcgacttctactcggggatcatcctcaaggcgatcggcattccgaccagcatgttcaccgtgatcttcgccctggcacgtaccgtgggctggatctcgcactggaaagaaatgctctccagcccgtacaagatcggccgtccgcgccagctgtacaccggcgagcagaagcgcgacatcgttgccctgaaagaccgcaag

SEQ ID NO: 31793 - DNA, 576 bp, Pseudomonas putida
atgagtctgcatcaggcactttcgccccgctgcgtggagactctccccttgaccacaatcgtttctgtccgccgtaacggcaaagtcgtcatgggcggcgacggccaggtatccctcggcaacaccgtgatgaaaggcaacgccaagaaggtgcgccgcctgtaccacggccaggtcatcgcgggcttcgccggcgccactgccgacgccttcaccctgttcgagcgctttgaaggtcagctggaaaaacaccagggccacctggtacgcgccgccgtcgagctggccaaggaatggcgtaccgaccgctccctgagccgcctggaagccatgctggccgtggccaacaaggatgcatccctgatcatcaccggcaacggtgacgtggtcgaacccgaagatggcctgatcgccatggggtccggcggcgcctatgcccaggccgcagcccgtgccctgctgaacaagaccgacctctcggcccgcgaaatcgccgagaccgccctgaacatcgccggcgacatctgcgtgttcaccaaccacaacctgaccatcgaggagcaggacctggccgac

SEQ ID NO: 31794 - DNA, 795 bp, Pseudomonas putida
gtgtgccgttatcccatgctcgtagattcccattgccacctcgaccgtcttgacctcactgctcaccagggctccctcgacgctgccctgcaggcggcgcgtgagcgtggggtcgggcatttcctgtgcattggcgtcagtgccgagaatgcgggtgcagtgaaggcgctgagcgagcagtacgctgacgtcgactgctcggtgggcgtgcacccgctggacctggcccctggcgaaaccccggcgttggaatggttgttgcgcgaactggcccacccgcatgtggtggcgattggtgaaaccgggctggattaccactacgagccggaggctgccgagctgcagcaggcctcgttccgcctgcacctggaggcctccaggcagaccggcaagccggtgatcgtgcatacccgggcggcgcgcgccgataccctggcgctgctgcgtgaggccaacctgccgcaggctggcgtgctgcactgctttaccgaggactgggacatggccaaggccgcgctggacctgggttattacatttcgctgtcgggcatcgttaccttccgcaatgccgatgccttgcgggaagtggcgcggcaggtgccggtcgatcgcttgttggtggagaccgattcgccctacctggcgccgattccgcaccggggcaagccgaacctgccgcagtatgtgcgggaggtggcggagtatgtggcttcgctgcgtggggccagttatgagcagttggcagagcagaccacggcaaatttcaagcgattgttcccattggcgcgggtggct

SEQ ID NO: 31795 - DNA, 573 bp, Pseudomonas putida
atgaaagcactcaccttggcaaccctgatgaccctggccgccagcccggtgttcgccttcaacctcagtgacgccgccaatgccgtgtccgccatgcagaacccgcaacagcaaggccaggtgcaggctcccgaggcccaggccaatctgctcaacaccttgggcagcgaattgaagatcacccccgaacaggccgtgggcggcgcaggggcgatgttggggttggcgcgcaacaaccttagcagtgaggactatggccaattgaccaaggccgtgccgggtctggacctgttgtccggtgccaatatgctcggtagtttgagcgggttgggcgatttgctaggcaagaacagcgaaagtcagtcggcgttgagcaacgcgctgggcaacgacgtggagaaccgtaatgacctggacaatgcgttcaaggcactgggcatggacactggaatgatcggccagtttgccccgctgatcctgcagtacctcggccagcagggcatcgccgggtcgttgctgcagaacctgggtagcctgtggaccacgccggcgccagtgagcacgccatcggtt

SEQ ID NO: 31796 - DNA, 498 bp, Pseudomonas putida
gtgaaatctcttttagccatgttgtcgctgttggcgctgccggtgatggccgccgaacccactatctacggccgttacgagaatattgccctgcctgaactgggcgaaaccctgaaagccaagatggacactggcgccttcaccgcgtcgctgtcggccaaggatatcgagctgttcacccgcgatggggacgagtgggtgcgcttccgcctggcgaccaaggaatcggacggcaaagtgtacgagcacaaggtctcgcgcatcagcaagatcaagggccgtgctgatgaagaggacgaaggggatgcgccagaggtctccaagcgcccggtggtcgacctggagttgtgcctgggggatgtgaagcgcaccgtcgaggtgaatctggtggaccgcagcaacttcaactacccgctgctggtgggttccaaggcgctgcgcgagttcaaggcggcggtcaacccggcgaagaagttcactgctggcaagccagggtgc

SEQ ID NO: 31797 - DNA, 621 bp, Pseudomonas putida
atgagcacgatgaccctgttccactcgccgttgtcgcctttcgtgcgcaaggtcatggtggtgttgcacgaaaccggccagcttgagcgtgtgcagctgcagccggtgaacataagcccggtgagcggcgacccgcagctcaacctggacaacccgatcggcaaaatcccggccctgcgcctggaagacggcaccgtgctgcacgacagtcgggtgatctgcgagtacctcgaccagcagcacgttggcctgccgctgctgccgcgtgaaggttcggcgcgctggcggcgcatgaccttggtatcacaggccgatgcgatcatggatgcggcagtgtcgagccggtatgagagcttcctgcggccagaggacaagcgctgggatggctggctgcaagcgcagggtgacaagatccgccgtagcctggacaacctggagcaggagcacttgccggagctgatctccggcttcgacctggcggcgattggcgtggcctgtgcgctgggctatctggatttgcgtcagcccgggtttggctggcgtgagcgccagcctgggttggcggcgtggtatgccgaggtggtcaagcggccatcgatggtcgctacagcgccagtggcc

SEQ ID NO: 31798 - DNA, 1440 bp, Pseudomonas putida
gagcgccaggtgcgcgaagaggcgttgcggctgagccagttcgccatcgatcagagcaccgtgggtatcctctgggtcaactgggacagccatgtgcgttacgccaaccatgccgccgagcgcatgttgggctacagcgaaggggcgttgctggagcggccgctaagcgacttcgagccaagcctgaacatggaccgttggctagagctgtggaagggtgcgcggacaggggcggggggtgtcggtcagtttgagacgcaatgccggcgggctgatcaaagcttgctacccgtggagctgtcgctgagctttctgcgctttcgtgattccgaatatctggtggtctacctcgccgatgtcaccgagcgccaccgtgccttggcggcccttcgcgaaagcgaggcgcggcttaagggcattgctggcaacgtaccagggttggtgtttcgcctggagcgtgacccggccgagggcgatctggagttcccctatatcagtgagggtagcgaggctttggtgggttatgcacccagcgagatccagcacccgcagatgggcctgcgcaacctggtgcaccccgaggaccgtgctgattatcacagggtgcaggacctggccctggccagcgaccaggactggtcctggcaggggcgcatcctcacccggcagggcgaacagcgctgggccgatatcaaggccagcgcccggcatctgggcaacggccaggtagtgtgggacggtgtagtctgggacatcacacagggcaagcgggccgagctggcgctggcgaagtcccaggagcagctgcgcgaactctcggcccacctggagagcgtgcgtgaagaggaaaaagcccgtatcgcccgggaagtgcatgatgaactggggcagatgctgaccgtgctcaagctggaagtgtcgatgtgcgagctggcctatgccgagctggaccctggcctgaatgatcgcctggcgagcatgaaacgcctgatcgcccagttgttccagttggtacgcgatgtcgccactgccttgcgtccgccgatcctcgatgccggcattgcctcggccatcgaatggcaggcgcggcgtttcgaggcacgtacgcaaatcccctgtctggtgcaagtacccgataatctgccagcattgagtgatgccaaggccaccgggctgtttcgtatcctccaggaggcgctgaccaatgtgatgcgtcacgcccaggcgcacagcgtagagattgagctggtacgtgagggcggacagttgcgcatgacggtcagtgatgatggccaaggcttttgccgcgagcagacccggcccacctcatttggcctggtgggtgtgcgcgagcgggtgctgatgctgggggggagcatgacgctggaaagcgagccgggcgaaggcaccagcctgagtgtggccattccgttggagtag

SEQ ID NO: 31799 - DNA, 1056 bp, Pseudomonas putida
gtgcgggtactgatcatcaagacctcgtcgctgggggatgtaatccacaccctgccggcgcttaccgatgccgcccatgccattcccggcatccgtttcgattgggtggtggaagaaggcttcgccgaaatccccagttggcaccccgcggtcgaccaggtcatcccggtggcgatccgtcgctggcgcaagaacctctggcaaaccatcaagagtggcgagtggaaggcgttcaagcagcgcgtgcgcgagcgcaagtacgaccttgtgatcgacgcccagggcctggtcaagtcggcctggttgacccgttacgtgaaggcacccgtagccggcctggaccgctactcggcgcgcgaaggctgggccagccgcttctacgaccgacctctgtcggttgccaccggccagcacgcggtggagcgggtacgccaactgtttgccatggccctggcctatgacctgccagaaggcatcggcaactacggcctggacctcgaccgcctgcaactgccgccggctgcgccctatgtggtgttcctgcatggcaccacctgggcgaccaagcattggcccgaagcctactggcgcgaactggccgagcgcatgggccggcgcaagctggaagtgcgcctgccttggggtaatccggctgagaaggcgcgggccgagcgaattgcccaaggcttgaacaactgtcaggtactccccaaattgaaccttgccggcgtcgctcgtgttctggcggcggcaaaggcctgcgtggcggtcgataccggccttggccacctggcggcggcactcgatgtgcccaccctttcgctgtttggccctaccaacccgggcctgactggcgcctacggacggacccagattcaccaggccagtgactggccttgcgctccctgcctgcagaagaagtgcacctacaaaccgagcgccgatgacctggcccggttcgatctgaaacgcgagtggccgctgtgcttcactcgcctgaatcccgagcatgtggcgagccgcttgagcgcgttgctgctggctgaggatgtccgt

SEQ ID NO: 31800 - DNA, 1440 bp, Pseudomonas putida
atgcgtttgtctgaactgaaggatgccgggcgcagcccgacgctgcccctgagtatcacgttggttgatgccgccggcagtgccgacttgcaactgctcaccctgctgcgtgtgctgccgggccagcgttatgtgggcgctggtgtctggcgtggcacaccggtgctggcgaagctgctggtcggtggtaacgccgcgcggcatttccagcgcgaactgcagggtgtgaagttgctggccgaacaaggcctgaccacaccgacgctactggccgacggcctcaaggaaggcgagggcggctggctgctgttcgagttccttgacggtgcccaaagcctggccgatgcctgggccgcagtggaaaacctgccagtgctggcggacgagcagcacctggtactgggcgaagcgctcacggctgtggcgcacatgcacgcccaaggcctttggcaggaagacctgcacctggacaacctgctgcgccatgccggcaagctgtacctgatcgacggtgcgggcatcagggcggaaacacccggtcagcagttgtcgcgtccacgcgtgctggaaaacctcggggtgttcttcgcccaattgcccaagcgcctggagccgttcatcgaagagctgctggtgcattacctgctggccaatgccgagcatgccttgccgctggaagcgctgcagaaacaggtggacaaggtgcgcaactggcgccagaaggactatctggacaaggctggccgcgagtgcagcctgttcagcgtccagcgcaccctctcgggcttgcaggcgatccgccgcagtgaggtcgaggccatgcagcctgtactggagcaggccgatgcgctgatcgacaagggccatttgtacaagaccggtggcgctgccagcgtggcgcgcatcgaggtcaatggtcgccagttggtgatcaagcgctacaacatcaagaacaccgcacattggttcaagcgcttctggcgcccgagccgggcctggcattcctggattgaaggccaccgcctggaattcctcgacatcgccaccccacgccccctcgcggtgctggaacagcgagtgctgggcctgcgcagccgtgcttacctggtcaccgagtatgtcgacggcccggacctgacggcatgcttcgcgccccacgtcgaaagcggcgatgcgcccgaggagcaggtggatgccttggtgcacgtgatgcagcagctgattcgcgaacgcatcagccacggcgacttcaaaggccataacctgttctggcacaacggccagtggtcgctgatcgacctcgatgccatgtgccagcacgccacccagctcagcttcgccccggcctatgcccgtgaccgggcacggctgctgcgcaactggcccactggcagtgccttgcatcagcggctggaccggctgttgccaaaactggtcgac

SEQ ID NO: 31801 - DNA, 1047 bp, Pseudomonas putida
atggatatcaagagtgcgttgagccgtatcgtcgggcagttggacctgactaccgaagaaatgcgcgaggtcatgcgccagatcatgaccggtcagtgcagcgaggcgcagataggcgctttcctgatgggcatgcgcatgaaaagcgaaagcatcgacgaaatcgtcggtgcggtgtcggtgatgcgtgagctggccgaaaaggtcgagctgcaaagcctcgatggtgtcgtcgatattgtcgggaccggtggtgatggcgccaacatcttcaacgtgtccaccgcttcgtccttcgtcctggcggcggcgggttgcccggtggccaagcatggtaaccgcgcagtctcgggcaagagcggcagtgccgacctgctggaagctgccggcatctacctgaacctgacgccaactcaagtggcacgctgcatcgacagcctgggcatcggcttcatgttcgcgcaaagtcaccactcggccatgaaacatgccgctggcccacgtcgagaactggggttgcgcaccctgttcaatatgctcggcccgcttacgaatccggccggagtgaagcaccaggtggtcggtgtgttcgcgcaaaccctttgccgcccgctggctgaggtgctgcagcgcctggggagcaagcatgtgctggtcgtgcactcgaaggatggtctggacgagttcagcctggctgcacccaccttcgtcgccgaactgaaaaatgacgaaatcactgaatattgggtcgagccggaagacctcggcatgaagagtcagagccttcatggcctggctgtcgagagcccgcaggcttcgctggagttgatccgcgatgcgctgggccggcgcaagaccgagaacggtcagaaggccgccgagatgatcgtgcttaatgctggcgcggcactgtatgcagccgaccatgccatgagcctgaaagccggtgtagaactggcccatgatgtactgcacaccggcctggcctgggaaaagctgcaggaattgggtgcctttactgcagtattcaaggtggagaacgaagca

SEQ ID NO: 31802 - DNA, 831 bp, Pseudomonas putida
atgagtgtgccgacggtgctggaaaggatcattgcccgcaagtttcaggaagtggccgagcgcagtgcgcacgtcagcctcgccgaactggagggcctggccaaggccgctgacgccccgcgaggcttcgccaacgcgctgatcgagcaggccaagcgcaagcagcccgcggtgattgccgaaatcaagaaagcttcgccaagcaagggcgtgatccgcgagcacttcgtgccagcggaaatcgcggtcagctacgagaagggcggggccacctgcctgtcggtgttgaccgatgtcgattatttccagggtgccgatgagtacttgcagcaggcccgcgcggcggtttcgctgccggtgatccgcaaggacttcatggtcgacccttaccagatcgtcgaagcccgggccctgggggcagattgcgtactgctgatcgtgtcggcgctggatgacgtgaagatggctgaactggccgccactgccaaggacgtcggcctcgacgtgctggtggaagtgcacgatggcgatgaactggagcgcgcgctgaaaaccctggatacgccgctggtgggggtgaacaaccgcaacctgcacaccttcgaggtcagcctggaaaccacccttgacctgctgccgcgcattccgcgtgaccgtctggcgattaccgaaagcggtattctcaaccgggccgatgtggagctgatggcaatcaacgaggtttactcgttcctggtgggtgaggcgttcatgcgcgccgagcagcctggcctggaattacagcggctgttcttccccgagcaggtgaagaagactgttcagcaactggac

SEQ ID NO: 31803 - DNA, 702 bp, Pseudomonas putida
atgaccgatcaacccctggccctgagcgtcgaacaaggcctgcacgccgagcaggaactgctggccgccgtctgccgtggcgaacgcgaaagtggcgtgctgttctggcgccccaccgaccacgcgctggtcatgcctcggcgcatgagccggctgggcaacttcgaggtcgcctgcgcggaattggctattgctggctggccggtgctgctgcgagaaaccggcggcgaaccggtgcctcagtcgcattcgacggtgaacgttgcactggtctacgccgcaccgcgcagtgaaggcgaccacggccgtatcgaaaatgcctacgagcgcctgtgtctgccgctgtgtgatgtgctgcgcgagtggggcggcgtagcgtcagtcggggaaatcgacggggccttctgcgatggccgctacaacgtcaacctcaatggccgcaaattggtgggtaccgcccagcgctggcgtcagggcctgggtggcaagcgtccggtggtgctggtgcacggtgcgctgctgctggacaacgagcgtgagtcgatggtggcggcggtcaaccgcttcaacgagtgctgtgagctggagcaacgctgtcgcgccgatgcgcacatcgccttgcacgaagtggcgccggtagcaccttggttcgagcgcctttcgcaggcctacgccaaggtactggccgagttgcccaaggac

SEQ ID NO: 31804 - DNA, 1170 bp, Pseudomonas putida
atggctttcgacctggcagcgcgcctggccgaacggcgcgccgcagacctgtatcggcagcggccattgctggaaagcccgcaagggccggaagtggtggtcgacggccagcggttgctggccttctgcagcaatgactacctgggcctggccaaccaccccgaggtgatcgccgcctggcaggccggcgccgagcgctggggtgtgggggggggggcctcgcacctggtagttggccacagcaccccgcaccatcaggttgaagaggcactggctgaactcaccggccgcccgcgcgccctgttgttctccaccggctatatggccaatctgggcgccatcaccgcgctggtggggcagggcgacacggtattgcaagaccgcctcaaccatgcctcgttgctggatggcgggttgctcagtggtgcccgcttcaaccgctacctgcacaacgacccggccagcctggccagccgcctggacaaggcggtcggcaataccctggtggtgaccgatggcgtgttcagcatggacggtgacctggccgacctgccggcgctggccaatgtcgcccgtgcccgcggtgcctggctgatggtcgacgacgcccatggcctgggcaccctgggtgccaaaggcggcggcatcgtcgagcactttggcctgggcgtggatgatgtacccgtgctgatcggcacgctgggcaaggcttgcggcactgcgggcgcctttgttgccggcagcgaggcgctgatcgaggcgctggtacagttcgcccgcccctatatctacaccaccagccagccaccggcgctggcctgcgccacactcaagagcctggagctgttgcgccgcgaaacctggcgtcgtgagcacctggcagccttgattcgccagttccgagaaggcgcgcagcagttggggctgcagttgatggacagcccgacgccgatccagcccatcgtgatcggtgacagtgcgcaggcgttgcgcctgtcacgcctgctgcgtgagcgcggcttgctggtgacggccatccgcccacccaccgtgccggctggcagcgcacgcctgcgggtaaccctgagcgccgcacacagcgaggcgcaggtgcagctattgttgaatgcattggccgagtgttatccacagttggagaacgccgatgcg

SEQ ID NO: 31805 - DNA, 1944 bp, Pseudomonas putida
atgtcactgttcaaacaattgctgttggccatttgcctgttcctggtggtcgccttcagtggcagtttcatggtcagcctggaaagctcgcgcagccagtacgtcaaccagctgcgctcgcacgcccaggatgcggccaccgcactggcgctttcgctgacgccgaatatcgacgacccagcgatggtcgagctgatggtcagctcgattttcgacagtggttactatgcaagcatcaaggtcgtcgacctgggttccaacgccgtgctggtggagcgtcacgccgagccagaccctggtggtgtgccgctttggttcgtgcgcctgatcggcctcgaggccgccggcggcgatgcaatcgtcagtcgtggctggcagcaggccgcgcgcgttgaagtgatcagccacccgatgttcgccattgccaagctttggcaaagcgccttgggcagcctgggttggttgctgttgtgcggtgcggccagtgccgtgctcggtgctttgctgttgcgccgccagttgaggccgctggactacatggtagagcaatctcacgctattgcccgccgcgaattcctcagcctgccagagttgccacgcacgccggagctacgccgcgtagtgcaagcgatgaaccagatggtcgagaaactcaaagccctgttcaccgagcaggccgagcgcagtgagcggctgcgtgcggagtcctaccaggacagcctgaccgggctgtcgaaccgccgctattttgaaatgcagctgaacaatcgggtaagcaacctggaagacgcgcgcgccggttacctgctgttgctgcgggttcagggcctggctggcctgaacgcccgccttggcggccagcgtaccgaccagttgttgcaagcggtaggtgaacagctgcgtcgtacttgtgccagctacccggaaaccaacgacctcatttcccgcagccgcggcggcgagtttgcagtgctggcaccgggcatggtgcatgaggaggcagtacaccttgcccaggctctggaggcaacgttgcagagcctgcacgaaacgggggccagtgatatcgacccggtggcttgtataggcctggcgccattcagccctggtgattcaccccaggcattgctgaagctggccgacgaggctctggcccgcgctgagaaccagccaacgccgggctgggtatgccttgagcaaggtgttgctgcggttgctgcggatagtcagcatgcctggcacgaacggctcgaccaagcgttcatcaatgggcatttcgagttgttcttccagccagtgatagagtgcgcttcctcgcaacgggtactgcaccacaaagttatttcgcgtttgcgcgatggccagggcgaggccttgccggcgggccgcttcctgccttggctggagcgcttcggctggatgccgcggctggatgtgctggtgctggagaaagtgttggcgcacctgcgagggcatgaccaagtgctggcgttgaacctgtccgccgccaccctggccgaccccaaggcccttcagcgcgttttcgagctgctgggccagaatgcggcgctcggtccgcggctggtttttgaaattggcgaggagcagttgcctgagcaggcagcgttggagcaactcacccggcgcctgcatgggcttggcttcgggttggctttgcaacgcttcggtgggcgcttcagcatgattggcaacctggcgcatttgggcctggcgtacctgaagattgacggcagttacatccgcaacatcgatcatgagcagcacaagcggctgttcatcgaagcgatccagcgtgcggcgcatagcatcgacctgccgctgattgccgagcgagtcgagacggaaggggagcggttggtgttgctggagatgggagtaggcgggattcaggggcaactggtgggtgagcctgcgccttggcgc

SEQ ID NO: 31806 - DNA, 1374 bp, Pseudomonas putida
atggccatcagcgtgttcgacctgttcaagatcggtgtcgggccctccagctcccacaccgtcggccccatgcgtgctggcgccctgttcgttcagggcctgcgcgaacgcggtgagctggagcgtgtaaaacggatcgaagtgcgcctgtatggctcgctgtcagccaccggtatcggccatggcaccgacaacgccaccatcatgggcctgatgggcgagtggcctgacgccattgacccgacccagatcgtgccgcgtatcgccgacctgcgcgaaaccaacaccctgcagctggatagccgcttgcccatcgagtttgtctgggcccgcgacatgctgctgctggacgagaacctgccctatcaccccaacgccatgaccctaattgccgaaggcgagcagggcgagttgcaccgcgacacctattactcggtgggcggcggctttgtggtcgatgcagcccaagccgccagcggtgtgctggatgctgaccagacagtgctgccgtacgacttcaacagcgccgccgaactgctgcgcctgtgcaagcaaaacgacctcagcgtgtcgcaattgatgatggccaacgagaaggtctggcgcagcgaggaagacatccgcgctggcctgcacaagctctgggaagccatgcaggaatgcgtcaacaacggcctcaagtacgagggcacgctacccggcgggctgaacgtgcgccgccgtgccgccaagctgcaccgcagcctgcaggaaatcggcaagcccaacgtgatcggctcgaccatgagtgccatggaatgggtcaacctgttcgccttggcggtcaatgaagaaaacgccgccggtgggcgcatggtgaccgcgcctaccaacggcgcggcgggcatcatcccggcagtgctgcattactacatgcgcttcagcgatgcggtggatgaatccagcgttgtcgattacttcctggctgccgccgctgtgggcatcctgtgcaagaagaacgcttcgatctctggtgccgaagtgggctgccagggggaagtcggctcggcctgcgcgatggccgcagcggggcttgccgaagtgctcggcgccaccccgccacaggttgagaacgccgctgaaattgccctggaacacaaccttggcctgacctgcgacccggtgggtgggttggtgcaagtgccctgcatcgagcgcaacgcgattgctgcggtgaaggccatcaacgcggtgcagatggccttgcgcggcgatggtgagcacttcatttccctcgaccaggtaatccgcaccatgcgcgataccggcgccgatatgcacgacaagtacaaagagacctcgcgcggcggcctggcggtcagcgctatcgagtgc

SEQ ID NO: 31807 - DNA, 975 bp, Pseudomonas putida
atgagcccagccgaactacacgccgacagcatcgtcatcgatggcctgatcatcgccaaatggaaccgcgagctgttcgaagacatgcgcaaaggcggcctcactgcggccaactgcacggtgtcggtctgggaagggttcaaggctaccgtcgacaacatcgcgtccagccagaagctgatccgcgacaacagcgacctggtgatgccggtgcgcaccaccgccgacatccgcaaggccaaggagctgggcaagaccggcatcctcttcggcttccagaacgcccatgcgttcgaggaccagatcgcttatgtggacgtgttcaagcagctgggcgtgggcatcgtgcagatgtgctacaacacccagaacctggtgggcaccggctgctacgagcgtgacggcgggctgtccggcttcggtcgcgagatcgttgccgagatgaaccgtgtcggcatcatgtgcgacctgtcccacgtcggctccaagacttccgaagaagtcatcctcgaatcgaaaaagccggtgtgctactcgcactgcctgccctcgggcctgaaagagcacccgcgcaacaagtcggacgaagagctgaagttcatcgccgatcacggcggtttcgtcggcgtcaccatgttcgcgccgttcctggccaaaggcattgactcgaccatcgatgactacgccgaggccatcgagtacaccatgaacatcgtcggtgaagacgccatcggtatcggtaccgacttcacccagggtcacggccaggacttcttcgaatacctgacccatgacaagggctacgcccgccgtctgaccaacttcggcaagatcatcaacccgctgggcattcgcaccgtcggcgaattccccaacctcaccgagaccttgctcaaacgcggccattccgagcgcgtggtgcgcaagatcatgggcgagaactgggtaaacgtcctcaaggatgtctggggcgag

SEQ ID NO: 31808 - DNA, 1104 bp, Pseudomonas putida
atgaacatgtccgataccttcctcaatccggtcactacccagacctgggccaatggccgccacattgtgcgctgcgtcaaggtcatccaggagacctgggacgtgcgcaccttctgcttcatggccgaccagccgatcatgttcttcttcaagccagggcagttcgttaccctggagctggagatcgaaggcaagcccgtgatgcggtcctacaccatctccagttcgccgtcagtgccctacagcttctcgatcaccgtcaagcgcgtgccgggtggcctggtgtcgaacttcctgcatgacaccatgcacgaaggcgccgagctgccggtgcacggcccggtggggctgttcaacgccatcgacttccctgctggcaaggtgctgtacctgtcgggcggcgtcggtattaccccagtgatgtcgatggcgcgctggttctacgacaccaatgccaacgtcgacatggtgttcgtccacagcgcccgttcgccgaaagacatcatctaccaccgcgagctggaacagatggcgtcgcgcatccccaacttcagcctgcacatcatttgcgagaagcacgggctgggtgagccgtgggcgggttaccgcggttacctgaaccagcggctaatggagttgattgcgcccgactacatggagcgcgttgtgttctgctgcggcccgacgccgtacatgacggcggtcaagcgcatgcttgaagcggtcggcttcgacatgaagaattatcacgaagagtcgttcggtgccacgccgccagaagccaaggctgatgcggtggagcacgccgagcaggcagccgatgcgcctgagctggatgtttccgacctcaacctggtggagttcatcggcagcgagaagagcatccgcatcgccccgggcgagaccgtgcatgcggcggcagccaaggttggcctgatgatcccgaaagcctgcggcatgggtatctgcggcacctgcaaggtgctcaaactgggcggcgaggtggaaatggagcacaacggcgggattaccgaagaggacgaagccgagggctacatcctgtcgtgctgcagcgtgccgaaaggggatgtgcggatcgattac

SEQ ID NO: 31809 - DNA, 1023 bp, Pseudomonas putida
atgctagtactgggattggaaacatcctgcgacgaaaccggcgtcgcattatacgacagtgaacgcggtttgttggccgacgcactgttcagccagatcgacctgcaccgcgtcttcggcggcgtggtgcccgagcttgcctcgcgtgatcacgtcaagcgcatgctgccgctcatccgccaggtgctggacgaggcaggttgcgttgccaccgaaatcgacgccatcgcctacaccgcaggccccggcctggtcggcgccttgctggtgggcgcttcctgcgcccaggcgctggcctttgcctgggacatcccggcgatcggtgtgcaccacatggagggtcacctgctggcacccatgctggaagaaaacccgccagagtttccgttcgtcgctttgttggtttccggtggacatacccagctggttcgggtcgatggcatcggtcagtacgaactgttgggcgaaagcctggacgatgctgccggtgaagcgttcgacaagaccgccaagctgatcggcctcaattatcctggtggtccggaaatcgcgcgtctggccgagcaaggtgtgcctgggcgcttcgtgttcccgcggccaatgaccgatcggccaggcctggaattcagcttcagtggcctcaagaccttcgccctgaacacctggcagcaatgcaagaatgctggcgacgacagtgagcaaacccgttgcgacctgtccctggcattccagcaggcggtggtggagactttgaccatcaagtgcaagcgggcgctcaagcagaccggcctcaagcggctggtcatcgcgggtggcgtgagtgccaacaaggccctgcgcgcgtccctggaggacatgctcggtagcatcaagggcaacgtgtactacgcgcgtccgcaattctgtaccgacaatggtgcgatgatcgcctacgccggttgccagcgcctgctggccgggcagcagcaagacctggcgatcagcgtgcaggcacgctggccgatggaacagttgccgccgctg

SEQ ID NO: 31810 - DNA, 1251 bp, Pseudomonas putida
atgttcagcaagcaagaccagatccagggttacgacgatgcactgctggcggcgatgaatgccgaagaacagcgccaggaagatcacatcgagctgatcgcctcggagaactacaccagcaagcgcgtcatgcaggcccaaggcagcggcctgaccaacaagtacgccgaaggctaccctggcaagcgttactacggtggctgcgagcacgtagacaaggtagaagccctggccatcgagcgcgccaagcagctgttcggtgccgactacgcaaacgtccaaccgcactccggctcgtcggccaacggcgcggtctacctggccctgctgcaagccggtgacaccatcctgggcatgagcctggcccacggcggtcacctgacccacggcgccaaggtgtcgtcctcgggcaaactgtacaacgcagtccagtacggcatcgacaccaacaccggcctgatcgactacgacgaagtcgagcgcctggcggtcgagcacaagccgaaaatgatcgttgccggtttctcggcctactccaagaccctcgacttcccacgtttccgcgccatcgccgacaaggtgggcgcactgctgttcgtcgacatggcccacgttgccggcctggttgccgctggcctgtacccgaacccgatcccgttcgccgacgtggtcaccaccactacccacaagaccctgcgcggtccgcgtggcggcctgatcctggccaagtcgaacgaagagatcgagaaaaagctgaacgccgctgtattcccgggtgcccagggtggcccgctgatgcacgtgatcgctgccaaggcagtgtgcttcaaggaagcgctggagcctggattcaaggcctaccagcagcaagtgatcgaaaacgcccaggccatggcccaggtgttcatcgaccgtggctacgatgtggtttccggtggcaccgacaaccacctgttcctggtcagcctgatccgtcagggcctgactggcaaagacgccgacgccgccctgggtcgtgcgcatatcaccgtcaacaagaacgccgtgccgaacgacccgcagtcgccgttcgtcacttcgggcctgcgtatcggcaccccggccgtcaccacccgcggcttcaaggtcgcccagtgcgtggccctggctggctggatttgcgacatcctcgacaacctcggtgacgcagacgtcgaagccgatgtggcgaagaacgtcgcggccctgtgcgcagatttccctgtctaccgc

SEQ ID NO: 31811 - DNA, 1314 bp, Pseudomonas putida
atgggccaatggctcgacagcctgaccggctggctcagcgccaacccgcagtggcttggcctggcgattttcctggtggcctgcatcgaatgcctggccatcgccggcattatcgtgccgggcaccgtactgctgttcgccgttgcggtactggccggtaacggcacgttcagcctgggcgaaacgctgctcctcggctttctcggcggcctgctgggcgacgccatgtcttacgcagtgggcaagtacttccaccagaacattcgccggctgccgctgctacgccaccatccggaatggatcggcagcgccgaaagctacttccagcgttatggcatcgccagcctgctggtaggccgcttcatcggcccgctgcggccgatgctgccaatggtcgccggcatgttcgacatgcccctgccgcgcttcatcgccgtcagcctgctggcgggcgccggctggtcggtcgcctacctgctgcccggctgggccaccggcgccgccatgcgcctgcccctgccggaaggcttctggctggacgccgggatcatagccggcgccctcgcggtgctgatcggcctgagcctcaataccagcctgcgtgaccagcgccacggcacccggctggttgccgcgctcagcttcatcgccctggccggtgtattcctcggctggccctacttccatgagttcgaccaaggcgtgatgacactggtccaggagcatcgcagccaggccatcgacggcaccgtggtgctggtgacacggctaggcgatttccgcacccagttgttcctcggcgccctgctgaccggcctgctgctgcttgcccgtcagtggcgacacgcatttttcgcggcgggcgcgttgatgggcacggcgatcgccaacggcacactgaaatggctatttgcccgggccaggccggaagtactgaccgacccactgaccagctacagcatgcccagcgggcacagctcggcatcgttcgcgttcttcctggtcatggccgtactggcggggcgtgggcagccaccacgcatgcgcctgacctgggtgatgctggggtgcattccggcgctggcgattgccctgtcgcgggtgtacctgggggcgcactggccaaccgatatcctggccggggccctgctggcctgttgcgtgtgcgcactcagcctgacattggtgcaacgccagcagaccctgccagccctgccgctgcgggtgtggtggctggtgttgccggcatgcgtggcgctgctggcgttcttcgccatgcatgcgttgccgcaggcgttggtcaggtatcaatat

SEQ ID NO: 31812 - DNA, 465 bp, Pseudomonas putida
gtgcgtctgcgcctgattgcggtcggctcgcgcatgccgaagtgggtcgaggaaggctggcatgaatatgccaagcgcctgcccgccgagctgtcgctggagctggtggaaatcccgctgaatacccgtggcaagaatgccgacgtcgcccgcctgatccgtcaggagggcgaagccatgctgagcaaagtgcagcctggggaacgcattgtcaccctcgaggtccatggcaagccatggagtaccgagcagctggcgaccgagctggaccgctggcgcctggatgcgcgcacggtgaatttgatggtgggcggcccggagggcctggcgcctgaggtttgcgcgcgcgccgagcaacgttggtcgctgtcgccgctgactttgccgcacccgttggtaaggatactcatcggcgagcagatctaccgcgcctggaccgtgttgtccgggcacccttaccacaaa

SEQ ID NO: 31813 - DNA, 2208 bp, Pseudomonas putida
atggatctgctcggctgggattcctgcgacatcatcatcgtgaccggtgatgcctacgtcgaccatccgtcgttcggcatggccatcattggccgtctgctggaagcccaaggcttccgcgtgggcatcatcgcccagccgaactggcagtcgaaagacgacttcatgaagctcggcgaaccgaacctgttcttcggtgtggccgccggcaacatggactcgatgatcaaccgctacaccgcggacaagaagatccgttccgacgatgcctacacccctggtggcctggccggcagccgtccggaccgtgccagcctggtgtatagccagcgctgcaaggaggcctacaagcatgtgccgatcgtgctcggcggcatcgaggcttcgctgcgccgcatcgcccactacgactactggcaggacaaggttcgtcactcgatcctgatcgatgccagcgccgacatcctgctgttcggcaacgccgagcgtgcggtggtcgaggtggcccagcgcctgtccaacggggagaagatcgagaccatcaccgacgtgcgcggcaccgccttcgtgcgccgcgataccccgcagggctggtacgagatcgactccacccgtatcgaccgcccggggcgcgttgacaagatcatcaacccgtacgtgaacacccaggacacccaggcctgcgccatcgagcaggccaagggcgaccaggaagacccgaacgaagccaaggtggtgcagattctcgacagcccggccgtgacccgggaaaagtcggtgatccgcctgccatcgttcgaaaaggtgcgtaacgacccggtgctctatgcccatgccaaccgcgtgctgcacctggagaccaacccgggcaatgctcgcgcgctggtgcagaagcacggtgaagtggatgtgtggttcaacccgccacccatccccatgagcaccgaggaaatggactacgtgttcggcatgccatacgcccgtgtgccgcacccggcctatggcaaggagcgcatcccggcctacgagatgatccgtttctcggtgaacatcatgcgtggctgcttcggtggctgtaccttctgctcgatcaccgagcacgaaggccgcatcatccagaaccgctcgcacgagtcgatcctgcacgaaatcgaagagatgcgtgacaaggtgccgggcttcaccggcgtggtctcggaccttggcgggccgactgccaacatgtaccgcatcgcctgcaaaagccccgaaatcgagaagtactgccgcaagccgtcgtgcgtattcccgggtatctgcgaaaacctcaataccgaccacagctcgttgatcgagctttaccgcaaggcccgtgccttgccgggtgtgaaaaagatcctgattgcttccggcctgcgctacgacctggcggtggaatcgccggagtacgtcaaggaactggtcacccaccacgttggcggctacctgaagattgccccggagcacaccgagcgtggccccctggacaagatgatgaagccgggtatcggcacctacgaccgcttcaagcgcatgttcgagaagttctcgaaagaagcgggcaaggagcagtacctgatcccgtacttcattgccgcgcaccccggtaccaccgacgaagacatgatgaacctggccctgtggctgaagggcaacggcttccgcgccgaccaggtacaggcgttctacccgtcgccaatggcctcggccacggccatgtaccactcaggcaagaacccgctgcgcaaggtgacctacaagagcgaaggggtggagatcgtcaagagcgacgagcaacgccgtctgcacaaggcgttcttgcgctaccacgacccgaagggctggccgatgctgcgtgaagcgctgcagcgtatgggccgagccgacctgatcgggccgggcaagcaccaactgatcccgctgcaccagccgcagaccgatacttatcagagcgcgcgccggaagaactcgaccccggcggggagccacaaggtgggcaaggaccagaagatcctgacccagcacaccggcctgccgccgcgtggcagcgatggcagcaagccgtgggacaagcgcgaaaaggccaaggccgaggcgtttgcgcgtaaccagcaggctgccaaggagcgcaaagaggcgagcaagggtggcaagggcaacaagaagccgcgtcagcctgtcattccgcgt

SEQ ID NO: 31814 - DNA, 585 bp, Pseudomonas putida
atgcccgtacgttccgtttgtgtgttctgcggcgccagcatgggcgccaaccctgcctaccgtgaagcagccgtcgcgctgggccaggccattgcccgccgcggcttgaccctggtgtatggcggtggcgcggtcggcttgatgggtgtggtggccgacgcggccatggcggccggtggcgaagtggtcgggatcatcccgcagagcctgctggacgctgaagtcggccacaagggcctgacccgcctggaagtggtggatggcatgcatgcgcgcaaggcccgcatggccgagctgagcgatgcattcattgccttgccgggtgggctgggtacgctggaggaactgttcgaagtgtggacctgggggcagctgggctatcacgccaagccgctcgggctactggatgtgaacggtttctacgacaagctgggcgggttcctcgaccatatcgtcgaagaaggtttcgtgcgcccgcaacaccgggcgatgttgctgctggggcagcagccggacgagctgctggaagggatggacagctttgtggcgccggtcgcgcctaagtgggtcgacaagcagcctgac

SEQ ID NO: 31815 - DNA, 825 bp, Pseudomonas putida
atgcaagcggttcagcaagagattgcccaggcgctgaaggtacagccgccgttcgccgacgcggcagcgctcgaggccgaagtcgcccgacgggtggcgttcatcaaggactgtctggccaatgctcgactcaagaccttggtgctgggcatcagcggtggcgtcgactcactgactgccgccctgctcgcccagcgcgccatcaacgagctgcgcgccgagaccggcgacaaggcctacaccttcattgccgtgcgcctgccgtaccaggtacagcatgacgagcatgacgcccaggcatgcctggaagttatcaaggcagatgaagttcacacggtggatatcgccccggcagtgcgtgcattggcagctgaagtggcggcgttgaagaacggctcgccgacgttggtggacttcgtggtgggcaacgtcaaggcacgcacccggatggtcgcccagtacaccatcgctggcgcccgcgcaggtctggtgatcggtaccgaccacgcggccgaggcagtaatgggcttctttaccaagtttggtgatggtgcctgcgacctcgcgccgttgagtgggctggtgaagaatcaggtgcgggcgattgcgcgcagcttcggtgcgccggagtcactggtggaaaaggtgccaacggccgacctggaagacctggagccgggcaagccggacgaggcgtcacatggcgtgacctacgcgcagatcgatgccttcctgcatgggcagccggttgaccaggcagcgttcgacatcatcgtcgccacctaccgcaagacccagcacaagcgcgaactgccgttcgctcct

SEQ ID NO: 31816 - DNA, 1203 bp, Pseudomonas putida
atgagcgaaagcgcattcgccgagcgcatcgtgcacaacctgctcgacaccgacttctacaaactcaccatgatgcagggtgtgctgcacaactacccggacgccgacgtcgaatgggaattccgctgccgcaacggtgaggacctgcgcccctacctcggcgaaattcgcaatcagctcgaacggcttgccgacctcaccctggacgatggccagctggccttcctcgaacgcatcagcttcctcaagcccgactttttacgctttctgcgcctgttccgcttcaatctgcgttacgtgcacgtcggcatcgaaaatgatcagctgttcctgcgcctgaaaggtccgtggctgcatgtgatcctgttcgaagtgccgctgctggccatcatcagcgaagtacgcaaccgcaatctgcacccgcacatgcgcctggccgaggcgcgggaccagttgtaccgcaagttcgactggctgcgtgcgcatgccagcgacgacgagctggccgaactgcaggtggccgacttcggcacccgccggcgcttttccagccgcgtgcaggaggaagtggcaagggtgctgcgcgacgacttccccggccgttttgtcggcaccagcaacgtcgacctggcatggaaactggatatcaagccgctgggcaccatggcccacgagtggatcatggcccaccagcagctcggcccacggctgatcgacagccagatcgctgcgctggactgctgggtacgcgagtaccgcggcctgctcggcatcgccctgaccgactgcatcaccatggatgccttcctcggcgatttcgacctgtacttcgccaagctgttcgacggcctgcgccatgattcgggcgagccggtagcctgggcggagaaggccattgcccattaccagaaactgggtatcgacccgatgaccaagacgctggtgttttccgacggcctcaacctgacccgctcgctggaaattttccgcgccctgcgcggacgcatcaacgtcagctttggcatcggcaccaacctgacctgcgacatcccaggtgtggcccccatgaacatcgtgcttaaaatgaccgactgcaacggcgcgccggtggccaagatctctgacgaagccgccaagacccagtgccgcgacgagaacttcgtcgcctacatgcgtcacgtattcaaagtccccagcaaggag

SEQ ID NO: 31817 - DNA, 1125 bp, Pseudomonas putida
ttgcgcgcattacttgacgccccgtacttgaaccagctgttccgcaagctgatgtaccgccatggcatacatcacgctgcggttgtagcgagtgatcgcgtagaagttcttcaggcccatccagtactcggggccgctctcgccctcgagacggaaggcggtaaccggcagatcatcgcgcagcgaatcatgaaccgaccagccaagcgtacgcaactcccctaccgttttcaccggctcgatgccggtggtcaggccttcgtcggcgcgctcaccttccacccaggcgcgactgaccacaccctcgccggccacccagccgtggcgcttgaagtagctggccacgctgccgatggcatcgtcagggttgttccagatattgatatggccgtccccgtcgaagtccaccgcgtagttgcggaagctgcttggcatgaactgcggcagccccatggcgccggcgtacgagcccttgagcgtcaagggatcaagctgctcctcacgggccagcagcaggaactctcgcagctccttgcggaagaactcggcccgtggcgggtagtcgaagcccagcgtcgacagggcgtcgatcacccggtagttgccggtattgcggccaaagaaggtttccacgccgatgatcgcgacaatgtactgcgcaggtacgccgtactcctgctcggcacgtgccaatacagcctcgtgctgacgccagaaatccacaccgcgagcgatacgcgcatcggtgatgaacatcggccggtagtccttccacggtttgacccgctcggccgggcgcgagatggcgtcgagaatcgactgcttgcgctgcacctcacgaaacacacccatcagttgctcaggcgcaaaaccatagtcgcggctcatttcgccaacaaacgcggctacctcgggcgagccgtcgtattcgccggcatgggccagctgtacagcgccgaacaggcccaccgcaccgatccaaggcgcacaacgggcagcccagttacgcactgcttgcatgaaattgttcaccttattcaaacctgcgcgatccatttgcggtgcgtatggatcgacatcaaaacgccaaacgctgacagcagcgtcaccaacgatgttccgcca

SEQ ID NO: 31818 - DNA, 1005 bp, Pseudomonas putida
gtgcaagaagccgtgccgaacctgatacctacccaggatgccaccccgcgcccagcgccgaagaaggtggaagctggggtcaagctgcgtggtgccgacaaagtcgcgcgcatcccggtgaagatcatccctaccgatgagctacccaagaagcccgactggattcgcgtgcgtatcccggtgtcgcccgaggtagaccgcatcaaacaactgctgcgcaagcacaaactgcacagcgtgtgcgaagaggcctcctgcccgaacctgggcgagtgcttctcgggtggtaccgccaccttcatgatcatgggtgacatctgcacccgtcgttgcccgttctgcgacgttggtcacggccgaccgaagccgctggatctggacgagccgaaaaacctggctgttgccattgccgacctgcgcctgaagtatgtggtgatcacctcggtggaccgcgacgacctgcgtgacggtggtgcccagcactttgctgactgcatccgggaaatccgcgcgctgtcgccgggcgtgcagttggagaccttggtgcctgactaccgtggccgtatggacgttgccctggagatcaccgcgcaagagccgccggatgtgttcaaccacaacctcgagaccgtaccgcgcctgtacaaggccgcgcgcccgggttcggactatgactggtcgctggacttgctgcagaagttcaagcagttggtgccgcacgtaccgaccaagtcgggcctgatgctcggcctgggcgaaaccgacgaggaagtgatcgaagtgatgcaccgcatgcgcgagcatgacatcgacatgctcaccctcggccagtacctgcagccgtcgcgcagccacttgccggtgcagcgtttcgttcacccggacacctttgcctggttcgccgaggaaggttacaagatgggcttcaagaacgttgcttctggcccgctggtgcgttcttcgtaccacgccgaccagcaggcccacgaagccaagatcaagctc

SEQ ID NO: 31819 - DNA, 1515 bp, Pseudomonas putida
atgcgttggatcacccgccccggctggcccggtaacctgctggccctggcggccggtgcttccaccctcctggccctggcgccgttcgacatctggccgttggcggtgttgtccatcgcggtgctctaccttggcctgcgcgagctcagcccgcgccaggccatgtggcgtggctggtggtttgggtttggcctgtatggcgccggcacctggtggatctacgtcagcatgaacacctacggcggcgcctcgccgctgctggcaatcgtgttgctgctggcgttcttcgccgcactggcctggttcttcgccctgcccacctggctatgggcgcgctggctacggcgcaacgaagcaccactggccgacgccctgtgcttcgccgccctctggctactgcaagaggccttccgcggctggttcctgaccggtttcccctggctctacgccggctatagccaactggacggcccgttggccggccttgcgccactgggcggggtatggctgatttccttcaccctcgcccttaccgccgccctgctgtgcaacctgcaccgcctgcgcccccgcccctcgttcctggccgtggccagcgtgctgttgctggccccctgggggctgggcctggcgctcaagggccatgcctggaccattccggcaggcgatccgctgaaagtggcagcgatccagggcaacgtcgagcaggacctgaaatgggaccccgcgcacatcgacgcgcaactggcgctataccgcgacctgagcttcagctccaggccggtggacctgctggtgtggccggaaaccgccgttccggtgctcaaggaccaggcccagggctacatcgacgtgatgggccgcttcgccgccgagcgccactcggcgctgatcacgggcgtgccggtgcgtgaagaagtgcaccaccagcgccgctactacaacggcatcaccgtcactggcgaaggcgacggcacctacctcaagcagaagctggtgccatttggcgagtatgtgccgctgcaagacgtgctgcgtggggccatcgagttcttcaacctgcccatgtccgacttcgcccgcggtccggaagaccagccgctgctgcaggccaagggctaccagattgccccttacatctgctacgaggtggtctaccccgagttcgccgccggcctggctgcgcgtagcgacctgctgctgaccatcagcaacgacacctggttcggcaaatcgatcggccccttgcagcacctgcagatggcgcagatgcgcgcgctggaagccggccgctggatgatccgcgccaccaacaacggcgtgaccgcgctgatcgacccgtttggccgcattaccacgcagattccgcagttccagcaggccgtgctgtatggcgaggtggtgccgatgcagcagctgacgccttacctgcaatggcgctcatggccgctggcgattgtctgtgcattgctgctgggctgggcgttgctggcagggcgtattgcaaaaaccgtc

SEQ ID NO: 31820 - DNA, 621 bp, Pseudomonas putida
atgaagctacgcggtctgtacgccatcaccgacagccagctgctcgccggccgtttcctgtcccatgtcgaggcggccctggaaggcggcgtgtgtctgctgcagtaccgcgacaagaccgacgatgctgcgcgccgcctgcgtgaagccgaagggctgatgaagctctgcgagcgttacggcacccagttgctgatcaacgatgacgccgaactggccgcccgcctgggtgtcggcgtgcacctgggccagaccgacggcccgctgaccccggcccgcgcactgctcggccgtcaggcaatcatcggctccacctgccacgccagcctcgaactggccgcccaggctgccagcgaaggcgccagctacgtggcctttggccgcttcttcaattctgtcaccaagccgggcgcgcccgctgccaacgtcggcctgctcgagcaggcccgcgcccaggtgaaactgccgatcgccgtgatcggtggcatcaccctcgacaacgccgccccactggtcgcccacggcgccgacctgctggcggtgatccacggcttgttcggtgccgacagcgcgcaggaagtcacccgccgcgcccgcgccttcaacgccttgttcgcatcc

SEQ ID NO: 31821 - DNA, 1461 bp, Pseudomonas putida
gtgagccacgcttttgtagtcgttgatacccccgaacaggccgtcgaccgtctggcggccttgcatgaacaggccacaggtgcccttagtcaggccctgaagcgttacctgaaggaccgtaccgagcccgataccgatgagcgcgacctgttccgctacccggctctgcgcctgacctactacagccatggcgaagtcgccgccaccacccgtgcctatgccaaggtccaggttgccggcacctacagcgtcaccgtcacccagcccgctgcgttccgtggctacctgcttgagcaactgcgcccgctgatgcatgactacaccgttacggtagaagtcggcgtcagcgagcagaatatcccttacccctatgtggtcgaccagggcgacgagctggccggtagcggcattaccgctgcgcagctggcgcgggtgttccccagcaccgacctgtcggcggccaccgacaacatcgctgatggcctgtacgactgggaccgtgctgaaatcatgccactggcgttgttcgatgccgcgcgcgtcgacttctcgctacgccgcctggtgcactacaccggcagcgactggcgccatgtacagccgtggatcctgctgaccaactaccaccgctatgtcgaccagttcatcagccatggcctggaccaactgcgtgacgacccgcgcttcgtacgtatggtgctgccgggcaacgtcgtgatcgaaaagggcatggaccatggcgaaacccaggccctggtggccagcgtggtctggcaccgctaccagatgccggcctaccacctgatcgccgccgacggcgatggcgttaccttggtcaacattggtgtgggcccatccaacgccaagaacatcaccgaccacctggccgtgctgcgcccgcattgctggctgatgatcggtcactgcggcggcctgcggcagtcgcagaccatcggcgactacgtgctggcacacgcctatatgcgccgtgacggcattctcgaccgggtcgtgccgccgaatatcccgatcccggccctggccgaagtacagatggccttgcaggaggccgccgctcaggtcactggcgagcgtggcgagcagttgaaaaagcgcctgcgcaccggcaccgtgctgacctacgacgaccgcaactgggagctgcgctgggctcaggaacgcccgctgatcaacctgtcgcgtgccgtggcggtggacatggaaagcggcaccattgctgcccagggctaccgtttgcgcgtaccttacggcaccttgctgtgtgtgtccgacaagccgctgcacagcgagatcaaactgccaggttcggccaacgccttctataaccgggcggtcagccagcacctgaagatcggcattgctgccctcgatctgctgcgcaccgagctcaactcgctgcactcgcgtaaactgcgcagcttcgatgagccgccgttccgc

SEQ ID NO: 31822 - DNA, 957 bp, Pseudomonas putida
atggacttcaaagactattacaagatactcggcgtagagcccactgcggacgaaaaggcgatcaaggccgcgtaccgcaaactggcgcgcaagtatcaccccgatgtcagtaaggagcgcgacgccgaggagaaattcaaggaggccaacgaggcctatgaggtgctgggcgacgcgcagaaacgtgccgagttcgatgaaatccgcaagtacggcggccagcatggccggccgttccaggcaccaccgggttgggaaagccgcggtggcggcggcggcttcgaaggcggcgacttctccgacttcttcagctcgatcttcggtgggcgcagtgcgggtggcaaccccttcggtggcgcccggcagcagcaacgcagtgctggcaggcgggggcaggacgtggagcttgaactggcagtgttccttgaagagaccctgagcaaggagtccaagcagatcagcttccaggtgccgcaaaccaatgccatgggccagcgcaccggcttcaccaccaaaaccttgaacgtgaggattccggctggggtgaccgacggcgagcgcatccgcctcaagggccagggcgcgcccggcagcggtggcggggccaacggtgacctgttcctgaccatccgcatggcaccgcacccgctgttcgatgtcgaaggtcatgacctgatcatcactgtgccgttggcaccgtgggaggcggccctgggcgccaaggtggcggttccgaccctggatggcaagatcaacctgaccatccgtcctgacagccagagcggccagcgcctgcgtgtaccgggcaagggcctggcgaacaaacagggagagcgcggcaacctttatgcgcagctcaaggtggtcatgccgcccgcgtcggacgaatctgcccgcgaactctggaccaagctttccgagaaagctgcgttcaacccgaggacacaatggagtaag

SEQ ID NO: 31823 - DNA, 2499 bp, Pseudomonas putida
ttgcccgccctgcgccaagctctggaaaaccgtgacgaagtggtgcttgaagcgccgcctggcgctggcaagaccacccgcgtgccactggcgctgctgcacgaaccgtggctggccgggcagagcatcctaatgctcgagccacggcgcctggctgcgcgggcagcggccgaacggctggccagtgagctgggcgagcaggttggggaaacggtgggttaccgcatccgtctggacagcaaggtcgggccgaaaacccgtatcgaagtggtgaccgaaggcatcctcacacgccgcctgcaagccgacccggcgctggaaggtgtgggcctgctgatcttcgacgaatttcacgagcgcagcctggatgccgatctcgcacttgcgctgagccttaacggccgcgagttgctgcgtgacgacccgccactgaagattctgctgatgtccgcgaccctggaaggcgaacgcctgtcgcggttgctggacgatgccccggtggtcagcagcgaaggccgcatgcatccggtggatatccgctgggggcggccgttccagccaggcgagttcattgagccacgggtggtggactgcgtgttgcatgcgctggctgaccaggccggcagcgtgctggtgttcctgcctgggcaagccgagatccgccgggttcaccaaagccttcaggaggtactgggcgcgcgccccgagattctgctgtgcccgctgcatggcgagctcgacctcaatgcccagcgcgccgctatcgacccgccggccaaggggttgcgcaaggtggtgctggccaccaacatcgctgagaccagcctgaccatcgatggcgtgcgcgtggtgatcgacgcaggcctggcccgggtgccgcgcttcgaccccggcagcggcatgacccgcctggacacccagcgcatttcccgcgccagtgccacccagcgcgctgggcgtgccggccgcctggaacccggcgtgtgctaccgcctttggtccgaggcccagcatgaccagctggccgcccatggcagtgccgagattctccaggccgacctggccgggctggccctgcagttggcgcgctggggtgtaacccccgagcagttgcgctggctcgaccagccgccagctgcagcgtacgcccaggcacaggacctgttggcgcgactcagcgccttccggccgggcagccgcgacaccctcagcgaacatggccaggccatggccgaactgccggctcacccacgcatcgcgcacttgttgctgcggggtcaggatctgggcctggcacagatggcctgcgatgtggctgcactgctgggggagcgggacatccagcgtggcggtggtgccgacttgcacagccggcttgcgctggtcagcggtgagagcaaggcagcgcgtggcggccagggtggtgtgcagcgtgctcgtcagctggcccggcaataccgtggcctgttgcgtggcaaggtcggtgcgccggtcgccgacccggaccacccacgctggctgggcgccctgctggcgctggcctaccctgaccgggtcgcccagcagcgccgggcgggtggggcggagtatcggctggccaacggccgtgcggccctgtttggcgaagtcgatgcattgatgaagtgcccatggctggtgatcgccgacctgggtagccgccaggggcagcgtgaggagcggatctatctggcagccgaattcgatccggcgttgcttgagggggtactggccgagcaggtcgagcgggtcgatatcctcgattgggacgagcgcgagcaggtgttgcgcgccgagcgtcaggtgaaggttggcgaactggtcctcagccgcgagccgctgcctgggctggatgatgaagccaggacccgggcgctgcttggcctggtccggcgcaaaggtttgaacctgctgacctggacgccggaactgcggcaatggcaggcacgtgtggcgctgctgcgtcagctcgacctgcagaaggatggccacagcgaatggcctgacctgggggacgaagccctgctggccagcctggaagactggttacagccttacctgagcaaagtatcgcgcctcagccactttgccgcgctggacttgccgtcgatgctgcgcaacctgctgccctggccgctgccgcaacgcctggaagaacaggccccggcgcatttggccgtgccgtccggctcgaacatccgcctggattacagcgaaaccccgccgattcttgccgtgcgtctgcaagaactgttcggccttgccgacaccccgcgcatcgccaatggccggcagcaggtcaagctgcacctgctgtcaccggcgcgtcggccggtgcaggtgacccaggacctggccagtttctggcgcacgacctatgccgaggtgaagaaagacctgaaagggcgatatccgaagcactactggccggacgaccctctggtggccgaggctaccgccagggccaagccgagagggagc

SEQ ID NO: 31824 - DNA, 684 bp, Pseudomonas putida
atgctatcgagcaacaccctggggcaccccgccattcatgcccggcgcaagcgacgcctgactcgcaaagccgtcggagccgccctgggcctgtgcatggtcgtggcggcgttgaccacctggctggcgacgaggacgcatatcgtggaccttggcaacgagcaacaactgagtgacagcggcctgctgcaggactgggccgacggtgcggtgatcgtgatgatccgccacgccgaacgctgcgacagcgcccccggcccctgcctggacgaccccacggggatcaccctgagcggcagccaggccgctgcccgcgttggccaagggctgcaccagctgggcctgaacaaagccgacctgctcagcagcccgaaactacgcacccggcaaaccgcacacttcatactgggtcaggcggtggccagcgaggactggctcgaaagctgcgacagccagttcgccaacgaagcgcttgcacacaaacgcgcgggccacaacctggtgctggtgactcacaacggctgcatcgaccactttgcccgccagcagcacgttgccggcggcgaacgtcaaagcaactatgccagcgccctgttcgtgtcggtggatggcaatggcaaggcacgcatcctcgggcgactgaacgaacctgactggcaacgcgtattggccagcacaggaaaa

SEQ ID NO: 31825 - DNA, 402 bp, Pseudomonas putida; identical to SEQ ID NO: 31313

SEQ ID NO: 31826 - DNA, 831 bp, Pseudomonas putida
atgacctacacccttgacgacctgctgcacctcatggcccgcctgcgcgacccgcagtacggctgcccgtgggacctaaagcagaactacgccagcatcgtcccgcacaccatcgaagaggcctacgaggtcgctgacaccattgagcgcggcgatttcgagcacctgcaaggcgagctgggcgacctgctgttccaggtggtctactacagccagctggcccgcgaagaagggcgtttcgagttcgatggcgtggtcgacagcatcacccgcaagctcatccgccgccacccgcacgtgtttccgactggcgagctgtacgcgccggtggacacgcccagcctgagcgaagcccaggtcaagtcgcgctgggaagaaatcaaggccgaagagcgcgcggagaagagccagcccgaacagctgtcgctgcttgatgacgtgccggcaaccttgccggcgctatcgcgggcagccaaactgcaaaaacgtgcggccacggtcggtttcgactggccggcggcgttgccggtgctggacaaggtccgcgaagagctggatgaagtgctgcaggccatggccgacggtgacgccgatgcgctggaagatgaagtcggcgacttgctgtttgctgcggtcaacctggcccgccacctcaagcaagacccagagcatgcgctgcgccgcgccaatcgcaagttcgaacgacgtttccgttttatcgaacaggcattgcgcgacagtggccgccccattgaagattgtgaccttgacgagctggatgccctttggggggaagccaaacgtcaggaaaagaacctgcccagctgcggc

SEQ ID NO: 31827 - DNA, 2817 bp, Pseudomonas putida
atgctcgttcgcatgcggcctatgggctgcacgggcgactcatggggccgccctccatccctaagtgtggaagatcctgccgatatgtttgcgcctttgttaaaaaaactttttggaagcaagaacgagcgtgaagtcaaacgcatgctcaagacggtgagtatcgtcaatgccttcgaagagaagatggtggccctctccgacgagcaactgcggggcaagactgcagagttcaaggaacgcctggccaaaggcgagacactggaccagttgctgcccgaagccttcgccgtggcccgcgaggccggcaagcgcgtaatgggcatgcgccatttcgatgtgcagctgattggcggcatgaccctgcacgagggtatgatcgcagaaatgcgcaccggtgaaggcaagaccttggtcggtaccttggccgtctacctcaacgcattgtccggcaagggcgtgcatgtggtcaccgtcaacgactacctggcgcgccgtgacgccaactggatgcgcccgctgtacgagttcctcggtctgtcggtcggtatcgtctcggccttccagccgccggaagaaaagcgcgccgcctatgcagccgacatcacctacggcaccaacaacgaattcgggttcgactacctgcgcgacaacatggcgttcagccaggacgagaagttccagcgtgaacttaacttcgccgtgatcgacgaagtcgactccatcctcatcgacgaagcgcgtaccccgctgatcatttccggtcaggccgaggacagctccaagctgtacatcgagatcaaccgcctgatcccgcgcctcacccagcacatcgaagaggtcgaaggccaggtcacccaggaaggccacttcaccatcgacgagaagagtcgccaggtggagctgaacgaagccggtcaccagttcatcgaagagatgctggcccaggcgggcctgctggctgaaggcgagagcctgtactccgcgcacaacctgggcttgctgacacacgtctacgccggtcttcgtgcacacaagctgttccaccgcaacgtcgagtacatcgtccaggacggccaggttctgctgatcgacgaacacaccggccgtaccatgccgggccgtcgcctgtccgagggcctgcaccaggccatcgaagccaaagagaacctgaacatccaggccgagagccagaccctggcttcgaccaccttccagaactacttccgcctgtacaccaagctgtccggcatgaccggtaccgccgacaccgaagcattcgagttccagtcgatctacggcctgaacgtgatggtcattccgccgaacaagccactggcgcgtaaggactacaacgacctggtgtacctgaccgctgacgagaaatacgccgcgatcatcgccgacatcaaggaaagcatgaagctgggccggccggtgctggtaggtaccgcgaccattgaaacttccgagcacatgtccaacctcctgaaaaaggaagggatcgaccacaaggtgctcaacgccaagtatcacgagaaggaagccgagatcatcgcgcaagcaggcgcgccaggtgcactgaccatcgccaccaacatggctggccgtggtaccgacatcctgcttggcggtaactgggaagccgaagtggcagccctggaaaacccgacagccgagcagatcgcccagatcaaggccgattggcagaagcgtcaccagcaagtgatcgagacgggtggcctgcatgtaatcgcttccgagcgccacgaatcgcgccgtatcgacaaccagctgcgcggccgctccggtcgtcagggcgacccgggttccagccgcttctacctgtcgctggaagacagcctgatgcgcatcttcgcctctgaccgggtgaagaacttcatgaaggcactgggcatgcagtcgggcgaggccatcgagcaccgcatggtcaccaacgctatcgagaaagcccagcgcaaggtcgaaggccgcaacttcgacattcgtaagcaattgctcgaatatgacgacgtcgccaacgagcagcgcaaggtgatctaccacatgcgcaacagcctgctggccgccgagaacattggcgacaccatcgtcgaattccgcaaggaagtactggacgctaccatcagccagcacattccgccgcagtcgctgccagagcagtgggacgtagccggcctggaggcttcgctggccagcgatttcgccatcaagttgccaatccggcaatggctcgacgaggacgatcacctctacgaagagaccctgcgcgagaagctgctgagcgagatcaccacggcctacaccgagaaggaagaccaggccggtctcgaggccttgcgaaccttcgagaagcagattctgttgcgcgtactggacgacctgtggaaagaccacctgtcgaccatggaccacctgcgtcacggtattcacctgcgtggttatgcgcagaagaacccgaagcaggagtacaagcgcgagtcgttcagcctgttccaggagctgttggagtcgatcaagcgcgacaccatccgtgtgctgtcgcacgtacaggttcgccgcgaagacccggccgaagaagaagctcgcctgcgccgcgaggccgaagagctggcgagtcgcatgcagttccagcacgccgctgcaccgggcctgggaagcgagcaactgagcgaggagggtgccgaagtagcggtagcctcggcgccagtacgcaatgaccagaagctgggccgcaacgagccgtgctggtgtggttcgggcaagaagttcaagcattgccacggtcagatcgag

SEQ ID NO: 31828 - DNA, 630 bp, Pseudomonas putida
atgagctatcacctgatcatcggcgacaagctgtactcctcctggtcgctgcgtggcgccctggccctcgagctggctggcgtgccctacgaagaaactctgatcaagctgaaccagcctgatacccgccagcgcatcctcgctttctcctccaccggcaaggtgccgctgctcaagaccgagcacggtgtgatcgccgattccctggccatcgccgaatacctcaacgaacagcaccccgacgcccagctgtggcctgccgacgcagccgcccgcgcccaggcccgttcggcttgcgcgcagatgcacagcggtttcttcgccctgcgcggtgccatgccgttcgacctgtcgcgtgaccaggcgctggacactgtgccgctggacgtgcaggtcgatatcgaccgtatcgtcgcgctgtggtccgaatgccgcgtggtggccaaggacagcggcccgttcctgttcggcaagccaagcctggccgatgccttctttgccccggtggcggtgcgcctgcgcacctaccgcgtagaagtccccgctgaggcggcagcctacatcgagaccatttatcagtggccagccttccaggcatggcaacaggcaggcctggaggagcgtaaagcg

SEQ ID NO: 31829 - DNA, 263 bp, Pseudomonas putida
aagggggaagggcagaaggtctattacttccatacgggccaggttggtacgccgctggaactgacggacagagacggcacaatcgttaagggcagtattttgatagtgaaatcaatcttaactataatactcttctttattatggtcctgaaactgagatgttcattacttaggaaccaattgggcttgaaggcggtagtaatttttataaatatgggccggaacccactgggtgtgttgatccgctagggctggtaagctgc

SEQ ID NO: 31830 - DNA, 966 bp, Pseudomonas putida
atgaacactccttttgccataccggataaccccgactccgcgtgccagccaccgtctgcgaaagactttctggtcgatcgcaccttccgtgcgcttgcgcgcattggcgtggtgctggtgctggcgctggtcttcgcgctggtctacgaagtcggccgcaaggcactgcctgggattgaaaagcacggttttgacgtgttgttcggcagcgtctgggacgttaaccaaggcaagtacggtattctgccagcgatctggggtacgctttacagcgccttgatcgccctgttgatcgccggtttcttcggcgtcagcatggccattttcctgacccaggatttccttccggccaagcttgccgcggtgtttcgcaccatcgtcgagttgctcgccgccatccccagcgtggtgtacggcctgtggggcatctatgtggtcatcccggcgattcgtccgctgaccgcctggctgaacagcgagctgggctggatcccgtttttcggcacctccctgagtggcccaggcctgctgcctgcggcgctggtgctggcgatcatgatcctgccgaccatcgcggcggtttcccaggatgcgctgaccagcgtacctatgaaaaccaagcaggctgcctacggcatgggtactacccactgggaagccatcctcaaggtgatggtgccctcggcggctaccggcatcttcggttcgctggtgctgggcctgggccgtgcactcggtgaaaccatggcgctggccatgctggtcggcaacgccaacaccatttccctgtccttgttcgcaccggccaacaccctggcggcgctgctggcgctgaacttcccggaagccggcccgaacgaggtcgaagtgctgatgtacgcggcactggtactgatgttcatcaccctgctggtgaacgtcctcggctccatgatcatgctctacgcccagcgtggtaacaaacaa

SEQ ID NO: 31831 - DNA, 1431 bp, Pseudomonas putida
gtgacctccagcattttctggcacgactatgaaaccaccggcatcaacccgcgctgtgatcggccgctgcaggtggccggcctgcgcactgacttcgacctcaacgaaatcgacgagccaatcagcctttattgccgaccgtcggacgacatcctgccgcacccggcggcctgcctggtgacaggcattacgccgcaactgctggcggagcagggcctgtgcgaagccgagttcatgactcgcgtgcacgcccagctggcgcaaccgggcacctgtggtgccggctacaacaccctgcgcttcgacgatgaagtgacccgctacagcctttaccgcaactttttcgacccctatgcccgtgaatggcagggaggcaatagccgctgggacctgatcgacattgtgcgcaccgcctatgccctgcgcccggaaggcattgaatggccgcagcaggacgggcgcaccagcctgcgtctggagctgctgagcaaggccaatggcattgaccacggtcatgcccacgaagcgctttccgacgtgcgggcaaccattgccttggctcgcctgattcggcagaaacaacccaagttgtatgactggctgtttcaactgcgcagcaagcataaagtgatggagcagatccgtctgttgcagccactggtgcatatatccgggcgtttttcggcggcgcgcaattacctgggggtcgtattgccactggcctggcacccgcgtaatcgcaatgcactgattgtctgcgacctgcatcaggaaaccctaccgttactgcgggaaagtgctgaagttttgcgtcagcgcttgtacacccggcatgatgaattggccgaaggtgaattaccggtaccgctcaaattggtgcagatcaatcgttgcccggtagtggcgccgctgtcggtattgcgcccggtcgatcaacaacgattgggcctggacttgacgttgttacaatcgcgcggcgaacaattggccaatcaacaggcgcaatggcaagaaaagctggagcacatctatggcaaggacgagttcgccccgagcgaggacccggaacagcagttgtatgagggttttataggtgaccgcgaccggcgcttatgcgagcaagttcgtgcgctggaaccggcgcagttgagccatggccagtggatgttcgatgatccgcgtttgccggagctgttgttccgctaccgggcacgtaacttccctgaaaccttgaccggcgaagagcggcaacgttggtatggcttctgccaacagcgcctgagcgaaccgcagtggggggcgccgaataccttgggcgacttcgaaaaggcgcgccagcaagcctgggagggcgccgacgaggcaggcaggcgcgtgttggaggcctggcaactgcatgctcgacaattgcaggaacgctattcaatcggc

SEQ ID NO: 31832 - DNA, 573 bp, Pseudomonas putida
atgagcaaccaccaacccgcgtcattggaaaccgacaggcggttccccgaagcggcggtcctcttgcccattacccgcagcgaagcgcccgaactggtcttgaccctgcgcgccaagggcctgtctacccacggtggcgaagtagcctttcccggtggccgccgcgacccggaagacccggacctggtctttactgccctgcgcgaggctgaagaagaaatcggcctgccccctggcctggtggaggtgattggtccgctcagcccgctgatttcgctacatggcctgaaagtgacgccattcgtcgggcttatcccggacttcgtcgaatatcgcgccaatgatgccgagatcgcggcagtattcaccgtgccgctggaattcttccggcaggacccgcgcgatcatacccaccgtatcgattaccaggggcgtagctggtatgtgcccagttaccgctatggtgaatacaagatctgggggttgtcggcgatcatgatcgtcgagttggtcaacctgctgttcgatgccggtatcagcctgcatcacccccctgagcgtcacatcgaaaat

SEQ ID NO: 31833 - DNA, 1374 bp, Pseudomonas putida
atgttcgaaaacctgaccgaccgcctgtcacagacgctgcgccatgtcaccggcaaggccaagctgaccgaagacaacatcaaggacacgctgcgcgaagtgcgcatggcgctgctcgaggccgacgttgccctgccggtagtcaaggatttcgtcaacagcgtcaaggatcgtgcggtcgggaccgaggtgtcgcgcagcctgactccgggccaggccttcgtgaagatcgtccaggccgagctggaaagcctgatgggcgcggccaacgaagacctcgcactgaacgccgccccgcctgccgtcgtgctgatggcgggcctgcaaggcgccggtaagaccaccaccgccggcaagctggcgcgctttcttaaagagcgcaagaaaaagagcgtgatggtggtgtctgccgacgtttatcgtccggcggcgatcaagcagttggaaacactggccaacgatatcggcgtcaccttcttcccgtccgatatcagccagaagccggtggccatcgccgaagccgccatccgtgaagccaagctgaagttcattgacgtggtcatcgtcgacaccgccggccgtctgcacatcgacgccgacatgatggacgagatcaaggcgctgcacgctgccgtcaaaccgatcgagacgctgttcgtggtcgacgccatgaccggccaggacgctgccaacaccgccaaggcctttggcgaggcgctgccgctgaccggtgtggtgctgaccaaggttgacggtgatgcccgaggcggtgctgcgctgtcggtacgtgcaatcaccggcaaaccgatcaagttcatcggtatgggtgagaagaccgaggccctcgagccgttccaccccgaccgcgtcgcttcgcgcatcctcggcatgggcgacgtgctcagcctgatcgagcaggccgagcagaccatcgacaaggccaaggccgacaagctggccaagaaactgaagaagggcaagggcttcgacctcgaagacttccgcgaccagctgcagcaaatgaagaacatgggcggcctcggcggcctgatggacaagctgccgagcatcggcggggtcaacctgtcgcaaatgggcaacgcccagggcgcggccgaaaagcagttcaagcagatggaagcgatcatcaactccatgaccccggccgagcgccgcgaccctgacctgatcagcggttcgcgcaagcgccgtattgcgttgggttccggtacccaggtgcaggacatcggccggctgatcaagcagcacaagcagatgcagaagatgatgaagaagttttctgccaaaggcggcatggccaagatgatgcgcggcctcggtgggatgctgccaggtggcggcatgccaaagctg

SEQ ID NO: 31834 - DNA, 327 bp, Pseudomonas putida
gtgtgcctatttggcattcagatttgcagtaccagctgctgtatcaactgcagcaccgactataggaacgatgttcacatggtaaccattcgtctggcccgtggcggctcgaaaaagcgcccattctaccacctgaccgtgaccaactcgcgtaacgcccgtgacggccgtttcgttgagcgcgtaggtttcttcaacccaatcgctgctggcgccgaagttaagctgtcggtcaaccaagagcgcgtcacctactggctgagccagggtgcacagccgtctgagcgtgttgctcagctgctgaaggaagctgccaaggccgctgcc

SEQ ID NO: 31835 - DNA, 750 bp, Pseudomonas putida
atgggtaaccttcgcgtagacgtcatcacgttgttccccgagatgttctcggccatcacggagtacggcattaccagccgcgcggtgaaacaagggttgcttcaggtgacttgctggaacccgcgggactacaccacagatcgtcaccacacggtagatgatcggccgtttggcggtggtccgggcatggtgatgaaaatcaagcctctggaagacgccttggttagcgccaggcaggcgaccggagcagcggcgaaggtgatctacctttcgccacaaggccgcaagctgactcagcaggcggtcaaaggcctggccgaacaggaatcgttgatcctgatcgccggtcgttatgaaggcatcgacgagcgctttatcgaggctcatgtcgatgaggagtggtcgattggcgactatgtgctttccggtggcgagctgccggccatggtactgatcgatgcggttacgcgactgctgcccggagctttagggcatgtggactcggcggaagaagattccttcaccgacggtctgctcgattgcccgcactacacccggcctgaggtgtatgcggatcagcgtgttcccgacgtgttgctaagtggcaaccatgcacatatccggcgttggaggatgaagcagtcccttggtaggaccttcgaacgacgcgccgatcttctggaaagtcgctcgctttctggagaagagaagaagctgctcgaggaatatctccgcgagcgggacgatagt

SEQ ID NO: 31836 - DNA, 348 bp, Pseudomonas putida
atgaccaacaagatcatccagcagctcgaagccgagcagatgagcaaggaaatcccgaccttcgcaccaggcgacaccgttgtcgttcaggttaaagtgaaggaaggtgagcgttcccgtctgcaggcgttcgaaggcgtcgttatcgccaagcgtaaccgcggtctgaacagcgccttcaccgtgcgcaagatctccagcggcgttggcgtagagcgtaccttccagacctacagcccgcaaatcgacagcctggccgtgaaacgtcgtggtgacgtgcgtaaagccaagctgtactacctgcgcgacctgtccggcaaagccgctcgcatcaaggaaaaactgtcc

SEQ ID NO: 31837 - DNA, 894 bp, Pseudomonas putida
atgcccgccctcgaccaccccctgatcgaccagttccttgacgccctatggctggaaaaaggcctgtccgacaacacccgcgtgtcctatcgcagcgacctggccctgttcaatggctggttgcaggagcattcggtatcgctgccggacgccggtcgcgacctgatcctcgatcacttggcctggcgcctggatcagggctacaagccacgttccacggcgcgtttcctctccggcctgcgcggcttcttccgttacctgctgcgggaaaagctggtggccatcgacccgaccctgcaggtcgacatgccgcaattgggcaagccgctacccaagtcgctgtccgaagccgacgtcgaagccctgttgcaggctccggacctgggcgaagccattggccagcgcgaccgtgccatgctcgaagtgctctacgcgtgcggccttcgggttaccgaactggtcagcctgaccctcgaccaggtcaacctgcgccagggtgtgctgcgggtgatgggcaagggcagcaaggagcgtctggtgcccatgggtgaagaggcggtggtgtggttggagcgctaccagcgcgatggccgcgccgaactgctcaatggccggcccagcgacgtgctgttccccagtcagcgcggcgagcagatgacgcgccagaccttctggcaccgtatcaaacaccacgcacgggttgccggcatcgacaagccgctgtcgccgcacaccctgcggcatgccttcgccacccacctgctcaaccacggtgccgacttgcgggtggtacagatgctgctgggccacagtgacctgtcgaccacgcagatctatacccacgtcgccaaggcgcgcctgcagcagttgcacgcccagcaccacccgcgtgga

SEQ ID NO: 31838 - DNA, 741 bp, Pseudomonas putida
atgcgcgtgacccagtttttcgccgccgccgcgttggcgctggccagtacctttgccgttgccgcggcaaccgatagcaacgccggtgccgagcaggccatccgtaaatcgttgcagaacctcgaactggaagtgcctgtggaaagcgtggccagcagcccgctcaacggcctctatgaagtcaagctgcagggcggccgcgtgctgtacgccagcgctgacggacagttcgtgatgcagggctatctgttccagatccaggacggcaagccggtcaacctcaccgaaaaaaccgaacgccaaggtatcgccaagctcatcaacggcattccagccggcgagatggtggtttatcctgccaaaggcgagaccaagtcgcacatcaccgtgttcaccgacactacctgcccgtactgccacaagctgcacgccgaagtgcccgagttgaaccgtcgcggtatcgaagtgcgctatgtcgccttcccgcgccagggcctcggttcgtcgggtgaccagcagttgcaggcggtgtggtgctccagcgaccgccgcggggcgatggacaaaatggtcgaaggtgaagaaatcaaggccgccaagtgcagcaacccggtcagcaagcagttccagctggggcagtcgatcggggtcaacggcacgccggccattgttcttgaaagcggccaggtcattccgggctaccagccggcaccacaggtcgccaagctggcacttgccaag

SEQ ID NO: 31839 - DNA, 1407 bp, Pseudomonas putida
atgcgctatatcagtacccgcggccaggcaccggccctgaatttcgaagacgtgctgctggctggcctggccagcgacggcggcctgtacgtgccggaaaacctgccacgcttcacccaggaagaaatcgcctcgtgggccggcttgccctaccacgagctggccttccgcgtgatgcgcccgttcgtcgaaggcagcatcgccgacgccgacttcaagaagatcctcgaagaaacctacggcgagttcgcccacgctgcggtcgccccgttgcgtcagctgaacagcaacgagtgggtgctggagctgttccacggcccgaccctggcgttcaaggactttgccctgcagttgctcggtcgcctgcttgaccatgtgctggccaagcgcaacgagcgcgtggtcatcatcggtgccaccagcggtgataccggttctgccgcgatcgaaggctgccgccgttgcgacaacgtcgacatcttcatcctgcacccgcaccagcgtgtgtcggaagtgcagcgccgccagatgactacaatctttggcgacaacatccacaacatcgccatcgaaggcaacttcgacgactgccaggaaatggtcaaggccagtttcgccgaccagtcgttcctcaagggcacccgcctggtcgccgtcaactcgatcaactgggcgcggatcatggcccagatcgtctactacttccatgcagccctgcagctgggtggcccggcgcgctcggtggcgttctcggtaccaaccggcaacttcggcgacatcttcgccggctacctggcgcgcaacatgggcctgccggtcagccaattgatcgtcgccaccaaccgcaacgacatcctgcaccgcttcatgagcggcaaccagtacgtcaaggaaaccctgcacgcgaccctgtcgccgtcgatggacatcatggtctcgtccaacttcgagcgcctgttgttcgacctgcatggccgcaacggtggtgcgattgccgagctgatggccaacttcaagcaaggtggcggcttcagcgtcgagcaagaccgctggaccgaagcccgcaaactgttcgactcgctggccgtcagcgacgagcaaacctgcgagaccatcgcagaagtgttcgccgccaccggtgaagtgctcgacccgcataccgcaatcggcgtcaaggctgcccgcgagtgccgccgcagtctggacacgccaatggtggtgctgggtaccgcgcacccggtcaagttcccggaagcggtggagaaggccggtgtgggcaaggcgctggagctacccgcgcacctcagcgacctgttcagccgtgaagagcgttgcacggtcctggccaacgacctgaaggctgtacagggctttgtcagccagcacggcaaccgcggcaagccgctg

SEQ ID NO: 31840 - DNA, 1707 bp, Pseudomonas putida
atgcgtatcgaacctcgcccgctgccgccgaccctgccatttctgggtaacctgccacccttgctgacccgcctttacgccgcgcgcggcgtgcagagcgaggccgagctggacaagagcctggcacgcctgctgccctaccagcagctcaagggcatcgaggccggtgtggacctgctggtcgaagccatcgaccagcgccagcgcatcctcatcgtcggcgacttcgatgccgacggtgccaccgccagcaccgtcggggtgctgggcctgcgcctgctgggtgcggcccatgtcgattacctggtgcccaaccgcttcgagtatggctacggcctgaccccggaaatcgtcgaggtggcgctgcagcgccagccgcagttgctgattaccgtggacaacggcatttccagtgtcgacggggtggcggccgccaaggccgccgggctcaaggtgctggtcaccgaccaccacctgccgggcgagcagttgcccgatgccgatgccatcatcaaccccaaccagccgggctgcagctttccgagcaagtcactggccggggtgggggtgatcttctatgtgttgatggccctgcgcgctcgcttgcgcagccttgggcgctacgaggcgcagccacagccgaacattggcgaactgctcgatctggtggcgctgggcagtgttgctgacgtggtgccgctggatgccaacaaccgcatcctggtgcaccaaggccttgagcgcatccgcgccggccgcgcccggcccggcctcaaggccatccttgaggtggcgcggcgcgatcaccggcgcatcacttcgactgaccttggtttcatcctcggcccacggttgaatgccgccgggcgcctggacgacatgagcctgggcatcgaatgcctgctgtgcgaggacgcggcgctggcccaggacatggcccagcagttggatgacctgaaccaggaccgcaagtccatcgagcagggcatgcagcgcgaagccctggcccaactcaaggacctgccggtcgagtcgatgccgtatgggttgtgcctgttcgatgccgactggcaccagggcgtgatcggtattctggcttcgcgcttgaaggagcgttaccaccggccgaccatcgccttcgccgatgctggtgatggcatgctcaaaggctcggcgcgttcggtgccgggcttccatattcgcgatgcgctggatgccgtggccgcgcgccacccgcagctgatcagcaagttcggcggccacgccatggctgccgggttgtcgttgccagaggctaatttctcggcgtttgccgaggcgttcgacgaagaggtgcggcgtcagctgcgcgaagaagacctgactggccgcctgttgtccgacggcagcctggcggtagaggagttccacctcgacctggccaaggccctgcgccatgccggcccatggggccagcacttccctgagccgctgttccatggcgtgttccagttggtggagcagcgtgtggttggcgaacggcacctgaaagtggtgctcaagagcgaatgtggctcggtgcggctggatggcattgccttcggcattgaccgcgaagtgtggccaaacccgacggtgcgctgggtggagttggcgtacaagctggatgtgaacgagtttcgcggtaatgagagtgtgcagttgatgattgcgcatatggagccgcgc

SEQ ID NO: 31841 - DNA, 1644 bp, Pseudomonas putida
atgcagtccgcctacaccgttctcatcctgctgacgctggtcagcctgtcgaagctggtcggccgtgtgatcccactgccattgccgctggtacagattgccgccggtgccttgctggcgtggccgacgctgggcctgcatgtagcccttgaccccgaattgttcctgttcctattcctgcctccgctgctgttcgccgacggctggcgcatccccaagcgtgagttatggcgcattcgtggcccggtagtggcgctggccgtggggctggtgttgttcaccgtggtcggggccggttacttcatccactggttgctgccgagcatcccgttgccggtggccttcgccctggccgcagtgctttcgccgaccgacgccgtggccgtttcagccattgcccaggaccgcctgcccacacccctgatgcacatgctgcagggcgaggcactgatgaacgatgcgtcgggcctggtaaccttcaagttcgccttggcggcggcgatcaccggggtgttttcgttggctgacgccagcttcagcttcgtgttggtcgcactgggcggccttgcggtgggcgtggtactgagttggttgatcggtcgcctgcgcatgtggatgatcacccggggctgggacgatccggctacccatgtggtgttcatgttgctgctgccgttcgcagcctacgtgctggccgagcgtttgggcgtttcgggtattctctcggcagtggcggccggcatgatgcagagctggctcgacctgctgccgcgtcagaccagtacccgcctgctcaaccgcagtgtctggtcgttgctggagtttgccttcaatggcctgatcttcctgttgttgggcttgcagttgccagacatcatcaaggctgtggtcagccacgaagcgaccctctggccgacattggcctaccgctgcctggacgtggtggcgatctttgccgcactgattatgttgcggttcatctgggtccagagtatctggcgctcgatcggtgtggtccgtcgctggcgcggcaagccggcactggtgctgatgcctacggcgcgttcctgctggttgctgaccttggggggggtgcgcggcgctgtcaccctggcgggtgtcatgtcgatcccgttgctgataggggctggcaccgctttcccggagcgtgatctgcttatcttcattgctgcgggggtaatcctgctgtcgttgatcagcgcctgcatcgcgctgccgatattactgcgcggggtgaccaagagccctgacgaacgcttgcaccaagaggtgcaggaggcctggcggcgcacggccgaggcggcgattcatgccttggaggcagaagaggtgatcgacagcaacgcaccgcaggatgctgcgcaggcaacgttggcgaccgagttgaaggcgcgcttgatggctgaataccgggatgagctggaaagctacgacgacagtgctgaagccaaagccctggccgcacagatggacttgctggagcggcgtttacgcttgcgtgccctgagggcgcagcggttggagctgtacaacctgcatcgtcagcacctggtgggggatgaggtggtgcggcaagtactgggtgagctggatatgagtgaggcgaacctgggttcagtcaag

SEQ ID NO: 31842 - DNA, 252 bp, Pseudomonas putida
atggtcgaacaaactgaactcaaccggcttttctggcacagccgccgcggcatgctggaactggacgtactgctggtgcctttcacccaggaagtctaccccaccctcaatgagaccgaccgtgaactgtacgtgcgtctcttgagctgcgaggatcaggacatgttcggctggttcatggagcgcaccgagtccgaagacccggaactgcagcgcatggtccgcatcattctggaccgtgtccagcccaag

SEQ ID NO: 31843 - DNA, 735 bp, Pseudomonas putida
atgtcccaagtcaacatgcgcgatatgctgaaggccggtgtgcacttcggccaccagacccgttactggaacccgaaaatgggcaagtacattttcggcgcgcgtaacaagatccacatcgtcaacctggaaaaaaccctgccaatgttcaacgacgctctgtcgttcgtagagcgcctggcccagggcaagaacaagatcctgttcgtcggcaccaagcgttccgccggcaagatcgtcgccgagcaagcagctcgttgcggttcgccgtacgttgaccaccgttggttgggcggcatgctgaccaactacaagaccatccgcgcttcgatcaagcgtctgcgcgacctggaaacccaggccgaagacggcactttcgccaagctgaccaagaaagaagccctgatgcgctcccgcgacctggaaaaactggatcgcagcctgggtggcatcaaggacatgggcggtctgccagacgctctgttcgttatcgacgttgatcacgagcgcatcgcgatcaccgaagccaacaaactgggtatcccggtcatcggcgttgtcgataccaacagcagcccggaaggtgttgactacatcatcccaggtaacgatgacgccattcgcgctatcgagctgtacatgacttcgatggctgacgcagtcatccgcggccgcaacaacgttgccggcggcaccgaagtttacgctgaagaagcggctgcacctgctgctgag

SEQ ID NO: 31844 - DNA, 1011 bp, Pseudomonas putida
atgaagatcgccatcgtcaatgacatgcccctggccgtcgaagcgttgcgccgggcggtcgccctggagcccgcacaccaggtcgtgtgggtggccagcaacggtgccgaggcggtgcagcgttgcaccgagcagttaccggacctgatcctcatggacctgatcatgccggtgatggacggtgtcgaggcaacccggcggatcatggccgaaaccccgtgcgccattgtcatcgtcacggtcgaccgtaaacagaacgtccaccgggtattcgaggccatgggccatggcgccctcgatgtggtcgacacccctgcgttgggcgctggcgatgcccgcgaagcggcggcgcccttgctgcgcaagatcctcaatatcggctggctggtcggccagcagcgtgcacctgccgcaaggtcggtggctgcaccgctgcgcgaggcttcccagcgccgcgggttggtggcaatcgggtcttcggcgggtggcccggcagcactcgaagtgctgctcaagggtttgccggcagcgtttccggcggccatcgtgctggtccagcatgtggaccaggtgtttgccgcaggcatggccgaatggctcagcagcgcagcaggcctgccggtgcgcctggcccgtgaaggcgaaccgccgcagccagggcaggtactcctggccggtaccaaccaccacattcgcctgctacagaatggccaactggcctacactgccgaacctgtgaatgaaatctaccggccctcgatcgatgtgttcttcgagagcgtggcacgttactggaatggtgatgcagtgggcgtgctgctcaccggcatgggccgcgacggtgcccagggcctgaagctgatgcgtcagcagggctttctgaccattgcccaggaccaggccagcagcgcggtgtacggcatgcccaaggctgctgcggctattgatgccgccgtggaaatccgcccgctggaacgcattgccgggcgcttgactgaatttttcgcaaaa

SEQ ID NO: 31845 - DNA, 861 bp, Pseudomonas putida
atggcagcaattactgcagcgctggtaaaagaactgcgcgagcgtaccggcgaaggcatgatggattgcaaaaaggccctggaaaaggccggcggcgacatcgagaaagccattgacgacatgcgtgcctcgggcgccatcaaggccgccaaaaaggctggcaacgtcgctgctgaaggcgctatcgccgtcaagaccgacggtacttccgccgtcctgctggaagtgaactcgcagaccgacttcctggccctgcaagacgacttcaagaacttcgtggccgaaagcctcgaagaagccttcgcccagaagctgaccgacgccgctccgctgatcgcctcgcgtgaagctgctcgtgaagccctggttgccaagtgcggcgagaacgtcaacatccgtcgcctggtgcgcgttgagggtgacgttgtcggtgcctacctgcacggcaacaagatcggcgctgtcgtcgttctgaaaggcggtgacgtggagctggcgaagaacatcgccatgcacgttgcagcttcgaaccctgagttcctggattcgtcggaaatctccgccgaggccatcgagcgcgagaagaatgtcttcctgcagctgaacgccgacaagatcgccggcaagccggaaaacatcgttgagaacatgatcaacggtcgtatcaccaagttcaaggccgaagcctcgctgaaagagcaagccttcgtcatgaacccggaaatcaaggttggcgagctggccaagaaagccggtgcagaaatcgtttccttcacctacttcaaagtaggcgaaggcatcgagaagccagtcgacgacttcgctgctgaagttgccgctcaggtcgctgctgccaagcag

SEQ ID NO: 31846 - DNA, 1500 bp, Pseudomonas putida
atgagcgacctcaagaccgaatcgcaagacctgcaacaggaagaaaacgccctgatcgccctgcgcaaggaaaaacttgccgccgagcgtgccaagggcaatgccttccccaacgacttccgtcgcgacagctactgcaacgacctgcagaagcaatacgcggacaagaccaaggaagagctggaagcagccgcgatcccggtcaaggtcgccggccgcatcatgctcaaccgtggttcgttcatggttatccaggacatgactggccgtattcaggtctacgtcaaccgcaagaccctgccggaagaaaccctggccgcggtcaagacctgggacctgggcgacatcatcagcgccgaaggcaccctggcccgttccggcaagggcgacctgtacgtcgaaatgaccaacgtgcgcctgctgaccaagtcgctgcgcccgctgcccgacaagcaccacggcctgaccgacaccgagcagcgctaccgccagcgctacgtcgacctgatggtcaacgaagaaacccgccacaccttccgtgtgcgttcgcaggtgatctcgcacatccgcaagttcctcatcgagcgtgacttcctcgaagtcgagacgccgatgctgcagaccatcccgggcggcgccgctgccaagccgttcgaaacccaccacaatgccctggacatggccatgttcctgcgtatcgcgccggagctgtacctcaagcgtctggtggttggtggttttgagaaagtgttcgagatcaaccgtaacttccgtaacgaaggcgtttcgactcgtcacaaccctgaattcaccatgctcgagttctaccaggcctacgccgactaccgcgacaacatggacctcaccgaggaactgttccgcgagctggcgcaactggtactgggctccactgacgtaccgtacggcgacaaggtcttccacttcggcgagccgttcgtgcgcctgtcggtgttcgactcgatcctcaagtacaacccggagctgaccgccgccgacctgcaggacgtcgaccgcgcccgcgagattgccaggaaggccggcgccaaggtgctgggccatgaaggcctgggcaagctgcaggtgatgattttcgaagagctggtcgagcacaagctggaacagccgcacttcattaccgagtacccgttcgaagtgtcgccgttggcccgtcgcaacgacgacaacccggccgttaccgaccgtttcgagctgttcatcggtggccgcgaaatcgccaacgcctactccgagctcaacgatgccgaagatcaggccgagcgcttcctggcccaggtggccgagaaggacgcgggtgacgatgaagccatgcactatgacgccgacttcgttcgtgcgctggagtacggcatgccgccgaccgccggtgaaggcatcggcatcgaccgcctggtgatgctgctgaccaactcgccgtcgatccgcgacgtcatcctgttcccgcacatgcgtccgcaggcc

SEQ ID NO: 31847 - DNA, 852 bp, Pseudomonas putida
atgtcgctaaatttcccgctgttgctggtcatcgccgtcttcatctgcggtctgctgggcttgatcgacctgctgttcctggccccgcgccggcgtgcggcaatcgccaactatcagggcagcgtcagccagcctgagatggcggtggtcgaacggctgaacaaggagccgttgctggtcgagtacggtaagtcgttcttcccggtgctgttcatcgtgctggtgctgcgttcattcctggtcgagccattccagatcccttcgggatcgatgaaaccgaccctggaagtgggcgacttcatcctggtgaacaaattctcgtacggcattcgcctgccggtgatcgacaagaaggtcatcgaggtcggtgacccgcaacgcggggatgtaatggtgttccgctacccgagtgacccgaatgtcaactacatcaagcgtgtggttggcctgccgggcgacgtggtccgctacaccaacgacaagcggctgttcgtcaacggccagcccgttgccgaacaactggtgggcagcgagccgggtaccctgggcagtgctcagctgtacaaggaaaagctcggcgcggccgaacacctgatccgcaaggaaatgagccgttatcgcatgccgccggaccagcagtggaccgtgcctgcgggccattacttcatgatgggcgacaaccgcgacaactccaacgatagccgtttctgggatgacccgaacattcccaaggaactgcacggcatggttccggaccggaacattgtcggcaaggccttcgcggtgtggatgagctggccagagcccaaactcagccacttgcccaacctgtcgcgggttggcctgatccat

SEQ ID NO: 31848 - DNA, 900 bp, Pseudomonas putida
atgactgatagcaacccgacccgctgcggctacgtagccattgtcggccgtcccaacgtcggcaagtcgaccctgctcaaccacatcctgggccagaagctggcgattacttcgcgaaagccgcagaccacccgccacaacatgctcggcatcaagaccgaaggtgatgtgcaggccatctacgtcgatacccccggtatgcacaaggccaacgacaaggccctgaaccgttacatgaaccgcaatgcctcggcggccctcaaggacgtcgacgtggttatcttcgtggttgaccgtaccaagtggaccgacgaggaccaactggttctggagcgcgtgcagtatgtcaccggcccgctgatcatcgcggtcaacaagaccgaccgcatggaagagaaagccgagctgatcccgcacctgcagtggctgcaagagcaactgccgaacgccgaggtgatgccgatttccgcacagcaggggcacaaccttgacgcgcttgaagcacagatcgccaagcacctgcccgagaacgatcatttcttccccgaagaccagatcaccgaccgtagcagccgcttcctggccgccgaactggtgcgcgagaagatcatgcgccagctgggtgcggagttgccgtaccagatcacggtggagatcgaggaattcaagcagcagggccatgtgctgcacattcacgcgttgatcctggttgaacgcgatggccagaagaaaatcatcattggtgacaagggcgagcgcatcaagcgcatcggttccgaggcgcgcaaggacatggaagtgctgttcgattccaaggtcatgctcaacctgtgggtcaaggtaaagggcggctggtccgacgacgagcgcgccctgcgttcgctgggctacggcgacctg

SEQ ID NO: 31849 - DNA, 648 bp, Pseudomonas putida
atgcgcgtaattctgctgggagctcccggggccggtaaaggtactcaggcaaagttcatcaccgaaaagttcggtattccacagatctccaccggtgacatgctgcgtgccgccgtcaaggctggcaccccgctgggcctggagctgaagaaagtcatggatgccggccagctggtctccgacgagttgatcatcagcctggtgaaggagcgcatcgctcagcctgattgcgccaacggctgcctgttcgacggcttcccacgcaccatcccacaggccgaagccatggtcgctgccggtgtcgacatcgatgccgtggtcgaaattgccgtggacgacgaggaaatcgtcggccgcatggctggccgccgcgtgcacctggcctcgggccgtacctaccacattcagtacaacccgccgaaagtggaaggcaaggacgacgagaccggtgaagacctgatccagcgtgacgacgacaaggaagaaaccgttcgccatcgtctgtcggtctaccacagccagaccaagccgctggtggatttctaccagaagctgtcggctgccaatggcggcaagccgaagtacagccacatcgaaggtgtcggctcggttgaagccatcaccgccaaggtcctggcagccctgagc

SEQ ID NO: 31850 - DNA, 924 bp, Pseudomonas putida
atggcggcgagcattgccacgtccttgttgtgcgggtttgccgagcacaagcataagccacatgcggtcctcccgacacaaggctgtttcgcctaccaaagggcgacaggcggaggattgacagcctgtcaggctcagggaatactctcgaaaaattcatatatatgtttatataacaagacgagagcgagacccatgcacccattgaccggtgatgctcgactgccccgctaccaacaactgcgcgatcacatggttgcgcaaattgccaacaaccgctggcgcccgggggaagcgatcccgaccgaggcagccttggccaccgagttcgacctgtcgatcggtaccgtgcgcaaggccgtcgatgtcctggtggccgaaggcgtgctggagcgccagcagggccgcggcaccttcattcgccgcccacagttccagtcgtcgctgttccgcttcttccgtttcgaggccgccaatggcgagcgcatagtgccggaaagccgcattctctccatcgagtcgctgccggcgccttccgcggtggccgaggcattgggcctggcaggggaggcagaagtgatccgcatcattcgcacacgtctgctcggcgcccagccggtgctggccgaagaaatctggctgccgcgccaaaccttccagccgctgctggacgtggatctgaacagcgagggcccgctgctgtacccgatctacgaagcgctgtgcggtcaggtggtcgcctacgccgaagaaaccctgaccgccgaagcggtcgacgcggtgcatggccgcttgctgcaactgccggccgacagcccggtggtcgtgatcgagcgcctggcccgcgattacgccggcaaacctctggaatggcgccgctcgcgcggccatgcgcagcacttccgctaccgcatcgacattcgt

SEQ ID NO: 31851 - DNA, 840 bp, Pseudomonas putida
atgatcaagatcaactccacaatcgaatgctccaactcggctccttttgtgctattcggcggcatcaacgtgctcgagtctgaagacctggcccttactgcctgtgcagaatatgtgcgcgtcacgcagaagctgggcatcccgtatgtgttcaaagccagctttgataaagccaatcgctcatcgatccattcctaccgtggccccggcatggaagaagggctgcggatctttgaaaaggtgaaggcagaatttggcgtgccgataatcaccgacgttcacgaaatctaccaaacggccccggtggcggaagtcgtcgatgtgctgcagctgccggcattcctcgcccgtcaaacagacctagttgttgccttggccaaaaccggcaagccggtgaacatcaaaaagccccaattcctcagcccttcgcagatgcagaacatcgtgcataagttcaaggaagcgggtaatgaccagttgatcctttgcgacaggggcacttgcatgggctacgacaacctgatcgtggacatgcttggcttcggcgtcatgaagcgtacttgccaagatctgccgatcatctttgacgtcactcatgccctgcagaatcgcgacccatcgggtgcggcttctggcggtcggcgcgagcaggtggtagagctggcacgtgccggcatgggagtcggattggctggcctgttcctggaagcccacccaaaccctgatcaggccaagtgtgatggcccgagcgcactgccattggacaagctggaacccttcctggcacaaatcaaagcgctggatgatctggtaaaatcattcccgcaattgactattgcc

SEQ ID NO: 31852 - DNA, 2550 bp, Pseudomonas putida
atgaaggcaacagcgagcagcgggcaacgagagcgactggtcatcgtcggcaacggcatggtcggccaccattgcgtcgaacaactggtcagtcgcggcgccctgcagcgcttcgaggtgcgggtattcggcgaagagcgccaacgcgcgtatgaccgcgtgcacctgtccgaatacttcggcggcagctgtgccgaaaccctggccctgtgtgagcacgatttctacgaggccaatggcgtgcacctgcacctgggtgaggccgtgctggagatcgaccgcgagcgccgcgaagtcgtcactgccgcaggtcgctatggctacgaccaactggtgctggccaccggctcctatcccttcgtgccgccgatcgaaggctccagcggcaatgcccgcctggtctaccgcaccctggacgacctcgatggcattcgtgctgccgcagccggtgcccgccgaggggtggtggtcggcggcggcctgcttggcctggaagcggccaacgccctcaagtcgctggggctggaagctcacgtggtggaattcgccccacggctgatgccggtacagctggacggcgagggcggtgccgcgttgaaggcgcagatcgaagcgctaggtgtgggggtgcacctgtcgcgcgccacccagtcggtcagtgccggtgaaacctaccgctaccgcatgaacttcgacggcggtgagcacctggaaaccgacctgatcgtgttctccgccggtatccgcccacaggatgcactgggccggggttgcggcctggacatcgccgcgcgcggtggcgtggtcatcgataaccactgccgcagcagcgacccccgcatcttcgccatcggcgagtgcgcctcgtggaacggcagcgtgttcggcctggtcgccccgggctacagcatggcgcgcaacctggccgggctgctgatgggcgaggcggcggtggcgttcaccggcgccgacatgtcgaccaagctcaagctgctgggtgtggatgtcggttcgatcggcgatgcccacggtgccacgccgggcgcgcgcagctatcgcttcatcgatgaagccaacagcgcttaccgccgtttggtggtggatgccagcggcaagcacgtgctcggcgcggtgctggtcggcgacaacagctattacgacaccctgttgcagtacgcccagaacggcatcgccctgccggccgacccggcagcgctgatcttgccgcaaggcggtggtgcgccggccctgggcgccgatgcgctgcccgacagcgcgaccatctgctcctgccacaacgtcagcaagggggcggtgtgcgccgcgatcgacagcggctgcagcgacctcgctgcggtcaagggctgcaccaaggccgcgaccggctgcggtggttgcgcggccctgctcaagcaagtcttcgagcacgaactgacggcccgcggcgtggcggtggacaagagcctgtgcgagcactttgcctacacccggcaggagctgtacgggttggtgcgggtggagggtatccgcactttcagcgaactgctcgagcgccatggcaagggccatctggggtgtgacatctgcaagccggcggtgggcaacattctcgcctcgtgctggaaccagccgatcatggacccggcgttggtgccgctgcaggacaccaacgacaccttcatggccaacatgcagaaaaacggcacctattcggtggtgccgcgcattcccggtggtgaaataacccccgacaagctcatcgtcatcggccaggtggccaagaaatacgacctgtacaccaagatcaccggtggccagcgcatcgacctgttcggcgcccagttgcacgagctgccgctgatctggggcgaactgatcgaggccggtttcgaaaccggccacgcctacggcaagtcgacccgcacggtaaagtcgtgcgtgggcagcacctggtgccgttacggcgtgcaggacagtgtcgccatggccctgcgcctggaagatcgctacaagggcctgcgcagcccccacaagctcaagttcgcggtatcgggatgcacccgtgaatgcgccgaggcgcagagcaaggacatcggcgttatcgccaccgacaagggctggaacctgtacgtgtgcggtaacggcggcatgcgcccgcggcatgccgagctgttcgccaccgacctggacgacgaagccctggtacgcctgatcgaccgcgtgctgatgttctacatccgcacggccgacaagctgcagcgcacctcggtgtggcgcgaaaacctggaaggcgggctggactacctgaagcaggtgatcatcgacgacagcctgggcctggccagcgagctggaaagccagatgcagcatgtggtcgaccagtatgaatgcgaatgggccaatgccctcaacgacccggagaagctcaagcgcttccgtacctttgtcaacgatcgccgcgccgacccggacgtgcacttcgtgcgcgaacgcgaacaacgccggcccgctgcaccgctgcacctgatcccaactgtcgaggaggctgtt

SEQ ID NO: 31853 - DNA, 930 bp, Pseudomonas putida
atgaacctcgacacccgcatcaaataccgccacttgctgtgcttcctggagattgcccggcagggcagcctggccagggcggccgatatcctgtcgatcagccagccggcgatttccaagaccctcaaggagcttgaggacctgctcgaggcgcgcctgttcgagcgtagccgccagggtgtcgagctgaccccggccggcacccgcttcatgcgttacgccgggcccagcgtgcaggcgctgcgcgatggcgtcagcagcctgcgcggtgaagcgcgggcgccgtcgcaggtgcgcattggcgtgctgtccacggtcgaaggcctgctcatgcccgaggtgctttgccgcctgcatcagcgccatgaagcgctggtgatcagcgtggtcaccggggtcagcgcgcagttgcttggccaacttcacctgggggagctggaactggtggttgggcgcatgaccgacagcccacagatccagggcctgtcgttcgagcacctgtacagcgagtcgatgagcctggtggtgcgcccgggtcacccgctgctggccagcacgcccgtggagcgaggacaggtggggcgttacccgcttgtgctgccgccggccggcaccaccatccgtcagcatgccgacagcctgtttgtgcaatgcggcatccagatgccggcccagcgcctggaaaccctgtcgctggccctgagccggcgctacctgctgggtagcgatggcctgtgggtggcgccgcgtgatgccgtgctgctcgacctgcgccgtggcgaactggtcgagcttgacctgggtgtgcgtgagccgggagggtcggtggggatttgccgcaatgccgccttgccgttgagtttgccggggcagtgggtgggtgaggtgctgcgggaggtggcaggggaatatcgagagggtaggtatcct

SEQ ID NO: 31854 - DNA, 1104 bp, Pseudomonas putida
atgatccggccctgtacgttcggcatcgaggaagagtacctactggtgaacctgggctcgggtcaggttccggccacaccgtcacccgcggtgatggggcgctgccgtgaagcactgggccgctatttcgcccaggaaatgttccgcagccagatcgagctggcgtcgccggtgttcaccaacctgtatgaagcacgtgagtttctccagcgcaaccgtcagcggctgcgcgtggcattggccgaagaggggatggggccatacgctgcggcaagccacccctgcgccgcgtggctgctgcagaagcccgcggcacaagggcactataagcagctgttcgacgactaccgccatgtggcaaggcgtagcctgctcaatggcctgcatgtgcacgttggcgtgccgccagcttgtgaccgcatgcaactgatcaaccgccttctgccctggttaccgttgttactggcgttgagcacttcgtcgcccctgtgggctggccagcctaccgggtacttgagctatcgccgagtgatctgcggtgagtggccacacatgggcttgcccgaagcattgcccgactgggccgcctatgagcgctaccgtgccctgttgcagcgaaccggtgcactggctgccgatggcgacctttggtgggcactccggccttcgcggcgctatccgacagtggagttgcgcatctgcgatggctgcccgaatctggaagacgttctgtgcattgcagcactgtttcgccacctggttgaacacagcattgcctaccgccatgacccgctaccctgcagccgcgaattgcgctggatcgcccaggagaactactggcgtgccatgcgccatgggcgccacgcacaattcataggttgtcacgagcagcagccggtcacggcgcaaggctggctcgcccaactgcaggcccagatacccatagacagcgcggacgccgagcgcgcctgccagcacgccctgcacgtgctgcgccatggtacccatgccgatcagcaattgcgctgcctggcacaggccagggcagacgggcttggcaaagggcaggcgctacgcgccgtggtggctgccgggacttgcatt

SEQ ID NO: 31855 - DNA, 2145 bp, Pseudomonas putida
gtgcctgccctcctgcgttacctgttcctgttgctcttgcttttcattgccccggtacaagcggcgggcttgcctggcctgctgggcggcagtgcgcccgcgcaaccagaggccaccgagccgctgggcaagtcgctggacgaggtgatcaagaacctcgaaaacgaccagcaacgggccaagctgctggccgacctgaaaaaactgcgcgacgccacccggcaatcgcaacccagcgttgaacagggcgtactcggcctgatcggcggtgccctgcatgactttgaaaaacagttcagcggcgatgccagcccattccaccgctgggccgcggaaatcgaacaggcccaggccgaactggcggaactggtggtgcccgtgcaccagtggccggcgatcctgttcggttttgctgcagtgattgccgtgtggagcgtgctggcctatgccttcaactgggtcggccatcgggtccgcctgcgctttggcctgagcgaggaactgccacagcacccgcggacctgggacctggtgcgctttgccttgcgcaagctcggcccctggctggtagcgctggtgttcacggtgtacctgagtttcgtgctgccgccatcactgggcaaatccctggccatggtgctggcctacgcactggtggtcggtacctgcttttcggccatttgcgtcatcgccttttccttgctggacggcccacaccgccaccgcgccctgcacatcctgcggcgccaggcgtttcgcccgttgtggctgattggcagcttcgccgcgtttggcgaggcgatgagcgatccgcgcatgctggttgctctcggtacccacctggcccacaccctggctaccttggccaatgtgattgcggcactgtgtaccgggctgttcatcctgcgcttccgccggccgatcgcccacctgatccgcaatcagccactgtcgcgacgcctgacccgacgtaccctcagcgataccatcgagatcctcggcagcttctggttcattccggcgctgattctggtggccatttcgctgttcgccaccttcgtctccgccggcgacaccagcaccgccctgcgccagtcgctgatgtgcaccgtgctggtggtggtgtgcatggtgctcaacggcctggtgcgacgccatgccgccaaccccaagcgggccagcaagcgccaggcggtgtacaccgaacgcctgcgcaacttcggctacctgctggtgcacctgttcatctggctggtgttcatcgagttgggcctgcgcgtgtggggcgtgtcgatgatcagcttcgccgagggcgacggccatgacatcagcctgcgcctgctgggcctggccggcacgctgatcgtggcctggctggtgtggatccttgcagacaccgccgtacaccatgccctggtgcgctcgcgccgggggctggccaacgcccgtgcgcaaaccatgatgccgttgattcgcaacgtgatgttcgtggtcatcttcatcatcgcggtcatcgtcgccctggccaacatgggcatgaacgtcaccccgctgctggccggtgccggtgtgatcggcctggccatcggttttggcgcgcagtcgctggtggccgacctgatcaccggcctgttcatcatcatcgaagattcgctggccatcgacgactatgtggatgtcggcggccacctcggcacggtggaagggttgaccattcgtaccgtgcgcctgcgcgacatcgacggcatcgtgcataccatcccgttcagcgaaatcaagagcatcaagaactactcgcgggagttcggctacgcgatcttccgcgtggcaatcccgcacagcatgaacatcgaccaggcgatctcgctggttcgcgaagtggggcagaagctgcgcaacgacccgctgatgcgccgtaatatctggtcgccgctcgagctgcagggggtggagagcttcgagtcagggtcggcgatcttgcgagcgcggttcaagaccgcgccgatcaagcagtgggaggtgtcgcgggcgttcaacctggccttgaagcggcagctggatgaagccgggctggacctggcgacgccgcggttgtcggtgcaggtggtgacagccggtgggggtggaatgacagaggccggctcg

SEQ ID NO: 31856 - DNA, 1344 bp, Pseudomonas putida
atgatccgctcgctgcgggtgcgcctgatgctggccgccgcagtgttggcgctgctgttcatgctggcgctgctgccggccttgcagaaggccttcagcctggctctgcaggaatcgatcgagcagcgtctggcctcggatgtgaccacgctgatttccgctgcgcgtatcgagcatggccggttgcagatgccgacactgctgccggacgagcgctacaacctgccctacacaggcctgctcggctatatctttgaccgcgatggcaaactggtctggcagtcgcgtgccaccgccgaccggcacatcaactatcagccgcgctatgacgggcgcggcaacgagttcgaccgcattcaccagtcagatggcgaagagttcttcgtatacgacgtcgagataaagctgctgggcgggcagagcgccgcctacagcattgtcgctctacagcccgtgagcgagtacaaggccaccctcaatggcctgcgcgaaaagctctacctggggttcggcgctgcattgctggcgctcatggtgttgttgtgggcaggcctgacctgggggctgcgctcgttgcgacgcctcagccacgaactggatgaagtggaatccggtgcacgtgacggcctgagcggcgagcacccacgcgagttgctgcgccttacccgctcgctcaaccgtctgttgcgcagtgagcgtgagcagcgcacgcgctaccgtgattcgctggacgacctggcgcacagcctgaagacgccgctggcggtgctgcagggcgtgggtgaaagcttgcagcagcgcagcggcgagcgcgagcaggcgcgggtgctgcaaagccagatcgagcgcatgagccagcagatcgactaccagctgcaacgcgccagcctgcgcaagagtggcctggtacgccacagcgtattgctgcggccgttgctcgacagcctgtgcagcaccttggccaaggtttaccgggaaaaacgtgtggacgtggtgctggagttgccggacgcggcgcaggtaccgatggagcagggcgcgttgttggaaatgctcggcaacctgctggagaacgcctaccggctgagcctgggccaagtgcgggtgagcctgatgaaagcgccggggtatctgaccttgtgcatcgaggacgacgggccgggcgtgcccgtcgaccagcgtgaacgcattctggagcgtggggagcggctggacagccagcacccggggcagggcatcggcttggcagtggtcaaggatatcgtcgacagctatgacgccgagctgagccttggcgattcgccactggggggcgctgcgttcaggatcaccttccacctggat

SEQ ID NO: 31857 - DNA, 969 bp, Pseudomonas putida
atgacgttcaaacgcaagctgcttcttgccgtactcccgttcgccttcagcgtggccatgcccgcctcggcactggacatcaagttcgccgagattcacccggccgggtacccgaccgtggtcgccgaacagaacatgggtaaaaagctggaagacgccagcaatggcgaaatcaccttcaagatgttcgccggcggcgttctgggttctgagaaggaagtgatcgaacaggcacagatcggtgccgtgcagatgacccgtgtcagcttggggatcgtcggcccggtggtgccggatgtgaacgtattcaacatgccgttcgtgttccgcgaccatgatcacatgcgcaagatcatcgacggcgagatcggccaggaaatcctcgacaagatcaccaattccgatttcaacctggtggccctggcctggatggatggcggctcgcgcagcatctacacgaaaaagccggtgcgcagcctggaagacctcaagggcatgaagattcgcgtacagggcaacccgctgttcatcgacatgatgaacgccatgggcggcaacggcatcgccatggacaccggggaaatcttcagcgccctgcagactggcgtgatcgatggcgccgaaaacaatccgcccacgctgcttgagcacaaccacttccagagcgccaagtactacacactcacgggtcacctgatcctcccggagccggtagtgatgtccaagaccacctggaacaagctcagccccgagcagcaggcgctggtgaagaaggttgcgcgtgaagcacagatggaagagcgcgcgctgtgggacgccaagtctgccgccagcgaagagaagctcaaggccgccggtgtcgagttcattaccgtcgacaagaagccgttctacgacgccacggcttcggtacgcgaaaaatacggcgcgcagtacgccgacctgatgaagcgtatcgacgccgtccag

SEQ ID NO: 31858 - DNA, 2877 bp, Pseudomonas putida
atgcaaaccgacacgactcgcgagaacccgcaggcccaggtgccgcaggccgccgattccaaccaggatctggctgccaccgcccccggccaactgcgcgtgatcaagcgtaacggcactgtcgtcccttacaccgacgacaagatcaccgtcgccatcaccaaggcgttcctcgcagttgaaggcggcaccgccgccgcttcgtcgcgcatccacgacaccgtcgcgcgcctgaccgagcaggttaccgcaacgttcaagcgtcgcatgccatcgggtggcaccatccacatcgaagaaatccaggaccaggtcgaactggccctgatgcgcgccggcgagcagaaagtcgcccgcgactacgtgatctaccgtgaccagcgcgccaaggagcgtgccacccgcgccaacaccgacgccgtggtcgagccgcacccgagcatccgcatcaccctggccgacggcagcctggcgccgctcgacatggcccgcctgaacaccatcatcagcgaagcctgcgaaggcctggccgaagtcgatggcgacctgatccagcgcgaaaccctgaagaacctgtacgacggcgtggccatcaaggacgtcaacaccgccctggtgatgaccgcccgtaccctggtggagcgcgagccgaactactcgttcgttaccgcccgcctgctgatggacaccctgcgcgccgaaggcctgggcttcctgaatgtagccgacagcgccacccaccacgagatggctgacctgtacgccaaggccctgccggcctacgtcgccaaaggtatcgagttcgagctgctgaacccggccctggccgacttcgacctggaaaaactgggcaaggcgatcaaccacgagcgcgaccagcagtttacctacctgggcctgcagaccctgtacgaccgctacttcatccacaaggatggcgtgcgcttcgagctgccgcaggttttcttcatgcgtgtggccatgggcctggcgctggaagaaaaagacaaggaagcccgtgcgatcgagttctacaacctgttgtcgtcgttcgactacatggcctcgaccccgaccctgttcaacgccggcaccctgcgcccgcagctgtccagctgctacctgaccaccgtgccggacgacctgtcgggcatctaccacgcgatccacgacaacgccatgctgtcgaaattcgccggtggcctgggcaacgactggacccctgtgcgcgcactgggctcttacatcaagggcaccaacggcaagtcgcagggcgtcgtaccgttcctgaaagtggtcaacgacaccgccgttgcggtcaaccagggtggcaagcgcaaaggcgctgtatgtgcctacctggaaacctggcacctggacatcgaagaattcatcgagctgcgcaagaacaccggtgatgaccgccgtcgtacccacgacatgaacaccgccaactggatccctgacctgttcatgaagcgtgtcttcgatgacggcaagtggaccctgttctcgccttcggaagtgccagacctgcacgacctgaccggcaaggccttcgaagagcgctacgagtactacgaagccctgaccgagtacaacaagatcaaggtgttcaagaccgttcaggccaaagacctgtggcgcaagatgctgtcgatgctgttcgagaccggccacccatggctgaccttcaaggacccgtgcaacctgcgttcgccgcagcagcacgtgggcgtggtccacagctcgaacctgtgcaccgaaatcaccctgaacaccaacaaggacgagatcgcggtctgcaacctgggctcgatcaacctgccgaaccacatcgtcgatggcaagctggacaccaccaagctgcaacgcaccgtgaacaccgccgtgcgcatgctcgacaacgtgatcgacatcaactactactcggtgccgcaagcgcgtaactcgaacttcaagcaccggccggtcggcctgggcatcatgggcttccaggatgcgctgtacctgcagcacattccttacggctccgatgctgccgtcgagtttgccgacaagtcgatggaagcggtcagctactacgccatccaggcttcgtgcgacctggccgatgaacgcggcgcctacgagaccttccagggttcgctatggtccaagggcattctgccgctggattcgcaacagatcctgatcgaggcccgtggccagaagtacatcgacgtcaacctggaagaaaccctggactgggcgccggtacgtgcccgcgtacagaaaggtattcgtaactcgaacatcatggccatcgcgccaaccgcgaccatcgccaacatcaccggcgtgtcgcagtcgatcgagcctacctaccagaacctgtacgtgaaatcgaacctgtcgggcgaattcaccgtgatcaacccgtacctggttcgcgacctcaaggcccgcgacctgtgggactcggtcatgatcaacgacctgaagtactacgacggttcggtacagcagatcgagcgtatcccgcaagagctgaaagacctgtacgccactgcgttcgaagtcgagaccaagtggattgtcgacgctgcttcccgtcgccagaagtggatcgaccaggcgcagtcgctgaacctgtacatcgcgggtgcatcgggcaagaagctggacgtgacctaccgcatggcctggtaccgtggcctgaaaaccacctactacctccgtgccctggccgccaccagcaccgagaagtcgaccatcaacaccggcaagctcaacgccgtttccagcggtggcgacagcgccccagtccaggcagccggccctgcgccagtgccaaaggcctgcgcgatcgacgagcctgactgcgaagcctgccag

SEQ ID NO: 31859 - DNA, 1248 bp, Pseudomonas putida
atgctgagctgggacgaattcgacaaagaagacggcgaagtagccgccaaaggcaacacccctgcgcaggccgctgccgccgccaccctcgacaagctcgacagcgccggtggtgccgccgccctggaggcccgtgcggccaccgcttctgactccgaagccgtcaaacgtgccaaggctgccctcgacgccctcgacgttgccgaaggcctggccgagctggaaggctcctcggcccgcgttgcagtcgatgaaaagcgcatgatcaactgccgcgccgacctcaaccaactggtaccgttcaagtacgactgggcctggcagaagtacctggacggctgcgccaaccactggatgccgcaagaggtcaacatgaccgccgacatcgccctgtggaagagccaggacggcctgaccgaagacgagcgccgcatcgtcatgcgcaacctcggcttcttctccaccgccgactcgctggttgccaacaacctggccctggccgtgtaccgcctgatcaccaacccggagtgccgccagtacatcctgcgccaggccttcgaagaggcgatccacacccacgcctaccagtactgcatcgagtcgctgggcatggatgaaggcgagatcttcaacatgtaccacgagattccgtcggtcgctaaaaaagccgcctggggcctgaagtacacccgcgccatctccgacccggaattcaacaccggcaccgtcgaaaccgacaaagagctgctgcgcaacctgatcgcctactactgcgtactggaaggcatcttcttctactgcggcttcacccagatcctgtccatgggccgccgcaacaagatgactggcgttgccgagcagttccagtacatcctgcgtgacgagtcgatgcacttgaacttcggtatcgacgtgatcaaccagatcaagatcgaaaacccgcacctgtgggatgcggcgatgaaggaagaagcgacccagatgatcctgcaagggacccagctggagatcgaatacgcccgagacaccatgccacgcggcgtgctgggcatgaacgcagcgatgatggaggattacctcaagttcattgctaaccgtcgtttgactcagattggtttgaaagaagagtatccggggactaccaacccgttcccatggatgagcgagatcatggacttgaagaaggagaagaacttctttgagacgcgtgtgatcgagtatcagacgggtggggcgttgagctgggat

SEQ ID NO: 31860 - DNA, 711 bp, Pseudomonas putida
gtggcgaagacctggagacggactatgcaaatccacctgctgttcaagaaggctttactcgcggctgctgtagctggcgtgttgtcgatgtccattgccttgatccctgactcgatttctcatggctccagtgcctacgctaaagatggcggtggcggtggcggtggcggtggcggtggcggtggccacggtggcggtggaagtggcggcggcggtggccacggtggcggtggaagcggcggcggcggtggccacggtggcggtggaagcggcggtggcggtggtcacggtggtggtggaagcggcggtggcggtggccacggtggtggtggaagcggcggtggtggtggccacggtggtggtggaagtggtggcggcggtggccatggtggcggaagcggaagtggtggccacggcagcggcggtgacggtggtggccatgccggcaacagcggcagtggccacgacggtaattcaaacgctgggcgcagcagcaaccatgctgaagcgggtgacgatcatggcaatcacgtgggtggggaacccggggatgatcatggtaatcatgtcggcggtaagcctggcgatgatcacggcaatcatgttggtggtgaacctggtgacgatcacggcaaccatgtgggtggcgaacccggtaatgaccacggtgttcatgccggcggcgaggccggggatgacaacagcagaagc

SEQ ID NO: 31861 - DNA, 690 bp, Pseudomonas putida
atgcagcatacggttgtcccggtcggcatcgtccactcctgtttcaaggaaaagttcgccattccgcgccagccgcaactggcgcctgccgcctgtggcgtactcgaactgttgccgccgttcgatcaaggtgacgcggtcgagggcctggaacaggtcagccatgtgtggctgctgttcctgttccaccaggccctggaggaaaagccgcgcctgaaagtgcggcctccgcgtctgggcggcaacaagagcatgggggtgttcgccacccgcgccacccaccggcccaacggcatcggccagtcggtggtacgcctggagggcgtggagcccgggcgcctgctgctgtccgggatcgacctgctcgacggcacgccggtgctggatatcaagccgtatgtgccctatgccgacagcatcgctggcgccagcaaccagatggccaacgcagcgccggtggcaattgccgtgcagtgggccgacaacgccttgctccaggcccgcgagcatgcgctgcgcctgagcgagccgctggtggagctaatcgagcaatgcctggcgcaggacccacggccggcctaccagataccaccgtccgagcgggtgtacggggtgaagttctgggatgtgcaagtaaggtggcattacccgcagccggacgtcatccgggtgttggaagtggtactgggc

SEQ ID NO: 31862 - DNA, 1320 bp, Pseudomonas putida
atgacgacacgtcagccgctgtacaaatccctgtatgtccaggtgttggtcgccatcaccatcggcatcctgctcggccactactacccggaaacgggcgttgccctcaaacccctgggtgacggcttcgtcaaactgatcaagatggtcatcgccccgatcatcttctgtaccgtggtcagcggcattgccggcatgcagagcatgaagtcggtcggtaaaaccggcggctacgcgttgctgtactttgaaatcgtctccaccatcgccctgatcatcggcctcgtcgtcgtcaacgtggtcaagccaggcgctggcatgcacatcgacgtcagcaccctgaacgccagcagcgtggctgcctacgccgccgccggcgcgcagcagacgaccgtcggcttcctgcttaacgtcatccccaacacggtcgtcggcgccttcgccaacggcgacatcctgcaagtgctgatgttctcggtactgttcggcttcgccctgcaccgcctgggcagctacggcaagccggtgctggacatgatcgaccgcttcgcccacgtcatgttcaacatcatcaacatgatcatgaagctggccccgatcggcgctttcggcgccatggccttcaccattggccagtatggtgttggttcgctggtgcagctgggctacctgatggcctgcttctacatcacctgcctgctgttcgtgctggtggtgctgggcggtatctgccgcgcccacggtttcagcgtgatcaagctgatccgctacatccgtgaagaactgctgatcgtgctgggtacttcgtcctcggagtcggccctgccacgcatgctggccaagatggagcgcctgggtgccaagaaatcggtagtgggcctggttatcccgactggctactcgttcaacctggacggtacctcgatctacctgaccatggctgcggtgttcatcgctcaggccactgacaccaccatggacatcactcaccagatcaccctgctgctggtgctgctggtggcttccaagggggctgccggcgttaccgggtcgggcttcatcgtgctggccgcgaccctgtcggctgttggccacctgccggttgccggcctggcgctgatcctcggcatcgaccgcttcatgtccgaagcccgcgccctgaccaacctggtgggcaacgccgttgccaccgtggtagtggccaagtgggtcaaggaaatggacaacgacaagctggcttcggaactggactccggtggtgcgccgctgatcgatacccgcccgacggacgacctgggcgtggctgaaggcccggctcgt

SEQ ID NO: 31863 - DNA, 468 bp, Pseudomonas putida
atgcaaagcattgttctcctgctgtggcttgccttgtgctccgaacaggatgtgcgtcaacgccagatatccaacgtgctgaccctgggggcggctggctgcgccctggcctggctgttcagcactggtcacagctggataggcgccgaagccagcgaggccggttgggcgctggccatcgtcatgctgctgaccctgccaggctacatgctcggccgcttcggcgccgacgacgtcaagctgatgggcgccctggccctggccaccagcccgcaatatgtgctcggcaccttcattggcgcgggtgtcactgtactggtctggctactgacccgccgccgcctgtggactctgctcaaccccaaggtaaagaagcgtttgcaggccctgaccgaagaaatgggcgacaagcaggcgttcgtcccctatgtgttatcaggttttcttctaacggccgtatggatccaa

SEQ ID NO: 31864 - DNA, 681 bp, Pseudomonas putida
atgaacaagtccttgctgggtgcctcgcttgtggcccttgcgctcgccgcccctgccgcccacgcctatcaggcgggggacatgatcctgcgcgcaggcgccatcaccaccgccccgaacgagagcagcggcgacctcaagttcgacggcaacaaggtgtcgggcaccaaggcgaccctggacagcgatacccagttgggcctgacctttgcctacatgctcaccgaccacatcggcctggagctgctggcagctaccccgttcaagcacaccgtcggcgtaaaaggtctgggcggcgggctggacggcaagctggcggacatcaagcaactgccgccaacgctgtcgctgcagtactacccaatggagccaaattcgcgcttccagccgtacgctggcgtcggtatcaactacaccctgttctttgacgaagacttgagcagcgcacgcaaggaacaaggcttcagcaacctcaagctgcaggattcggtaggtatcgccggccaactgggcatggactacatgctgaccgacaacctgctggtaaacgcctcggtctggtacgtcgacatcgacaccaaggccagcgtcaacggcccgaccgcccttggctacagcaagaccaaggtcgacgtcgacgtcgacccgtgggtatacatggtcggtcttggctacaagttc

SEQ ID NO: 31865 - DNA, 744 bp, Pseudomonas putida
ttggtggttgatgaccaaccggtcattgtcgaacagctgagtgaattcctcgaaaccaagggctatgcctgcgttacagccctctcaaccgacgaagccatcgagcactatgtggcagacccgaccatcggcttgctcatctgtgacctgcacatgcccgatcgggatggcatcgagctggtgcgcgccttgaaggaaatcaacggcagccagcgcacgttcgaagccatcatgttgacagggcgtgccgagaaacaggacttgatccgggcgatacgcgaaggttttgccgattactaccagaagccgatggaccttgatgaactgctggcaggcgtccgtcggcaagaagcggctttgctggagcgccagcgcaacctccgtgatctgggtgggttgaaccagcgcttgcaggaactggccgagtcggtggacgaactgtatcaggacctggaaaaagcccgtggccaaggcacccaccggcgtgccagtgatgcagaagaaagcgaaagcgagctgccagcagcgttcgagaaactgtctccacgccagctggaagtggcgcgcctggtaggcaagggcaagaccaattaccagatcgcctgcgaactgggcattaccgaaaacaccgtgaagctctatgtgtctcaggtattgcgtttgacgcatatgcacaaccgcacccagctggctctggcgctgacccccagctcgtcacccgtgcaccagcggttcacgacccat

SEQ ID NO: 31866 - DNA, 459 bp, Pseudomonas putida
atggatatccgtaaagtcaagaaactgatcgagctgctggaagagtctggcatcgacgaactggagatcaaggaaggcgaagagtcggtccgtatcagccgtcacagcaagaccccagctgcccagcagttctacgcaccggcgcctatggccgccgcccctgccgctgcgccggttgccgctgctgcgccagccgccgaagccactgctgccgccccggccctgaaaggcaccgtggtccgttcgccaatggtaggtaccttctaccgcaagccttcgccgacctcgcctaacttcgctgaagttggccagtccgtgaagaaaggcgacaccctgtgcatcgtcgaagccatgaagatgatgaaccacatcgaagccgatattggcggtgtcatcgacgccatcctggtagaagacggccagccggttgagttcgaccagccgctgttcaccatcgtt

SEQ ID NO: 31867 - DNA, 1353 bp, Pseudomonas putida
atgtctgggaagctcgaaaaagtcctgatcgccaaccgcggggaaattgccctgcggatcctgcgtgcctgcaaagagctgggtatcaagaccgtcgccgtgcactccactgccgaccgtgaactgatgcacctgggcctggcagacgagtcggtctgcatcggccctgcatcgtccaaggattcctacctgcatatccccgcgatcatcgctgccgccgaagtgactggcgccactgcgattcacccgggttacggcttcctggcggaaaacgccgacttcgccgaacaggtggaaaaatccggtttcgccttcatcggcccgaaagccgacaccattcgcctgatgggcgacaaggtttcggccaaggacgcgatgatcaagtcgggcgtaccgaccgtaccgggctccgatggcccactgccagaagacgaagaagttgccctggcgattgcccgtgacgtcggctacccggtgatcatcaaggccgccggtggcggtggtggtcgcggcatgcgcgtggtgcacaaggaagaggacctgatttcctcggccaagctcacccgtaccgaagccggtgcagccttcggcaacccgatggtttacctggagaagttcctgaccaacccacgccacgtggaagtacaggtactgtccgacggccagggcaacgccattcacctgggcgaccgcgactgctcgctgcagcgccgtcaccagaaagtactggaagaagcaccagccccgggcatcgatgagaaagcccgtcaggaagtgttcaagcgctgcgtcgatgcgtgcatcgagatcggctaccgtggtgccggtactttcgagttcctgtacgaaaacggccgcttctacttcatcgagatgaacacccgcgtgcaggttgagcacccggtgtcggagatggtcactggtatcgacatcgtcaaggagatgctgagcatcgccgctggcaacaagctgtcgttccgccaggaagacgtggtgatccgtggccactcgctggagtgccggatcaacgccgaagacccgaagaagttcatcccgagcccaggcaaggtgaagcacttccacgccccgggcggcaacggcgtacgcgtcgattcgcacctgtacagcggttattcggttccgccgaactacgactcgctgatcggcaagctgatcacctacggcaaggaccgcgacgaggccatggcgcgcatgcgcaatgccctggacgagatcgtcgtcgacggcatcaagaccaacatcccgctgcaccgcgacctggtgcgtgatgaaggcttctgcaaaggcggcgtcaacattcactacctcgagcacaaactggccaaccaggag

SEQ ID NO: 31868 - DNA, 2832 bp, Pseudomonas putida
gtggacaagatcctgattcgtggggcacgtacccacaacctgaagaacatcgacctgaccctgccccgggacaagttgatcgtgatcaccggcctgtccggttccggcaagtcgtccctggcgttcgataccttgtacgccgaaggccagcgccgctatgtggaatcgctgtcggcctacgcccggcagttcctgtcgatgatggaaaagcccgacgtcgacaccatcgaaggcctgtcgccggcgatttcgatcgagcagaagtcgacctcgcacaacccgcgctccacggtcggcaccatcaccgaaatctacgactatctgcgcctgctgtacgcccgcgtcggtactccacgctgcccggaccacgatatcccgctggaggcgcaaacgatcagccagatggtcgacctggtgctggagcgcccggaaggcagcaagctgatgctgctcgcgccagtggtgcgcgagcgcaagggcgagcacctggcggtgtttgacgagcttcgcgcccagggcttcgtgcgggccagggtcaacggcaagctctacgaactcgatgagttgcccaagctggacaaacagaagaagcacagcatcgatgtggtggtggaccgcttcaaagtccgcgccgacctgcaacaacgcttggccgaatcgttcgagaccgcgttgaagctggccgacggtattgccctggtggcaccgatggacgacgaacaaggcgaagagacgatcttctccgcgcgcttcgcctgtccggtgtgcggccacgcgatcagcgagctggaaccgaagctgttttccttcaacaacccggctggcgcctgcccgacctgcgacggcctgggggtcaagcagttcttcgacaccaaacgcctggtcaacaccgaactgaccttggccgaaggcgcgatccgcggctgggaccggcgtaacgtgtactacttccagatgctcggttcgttggctgcgcactacggcttcagcctggaggagcctttcggcgagctgtcagccgaacaccagaaagtgatcctgcagggcagcggcaagcagagtgtcgatttcaagtacctcaacgaccgaggcgacatcgtcaagcgatcgcacccgttcgaaggcattgtgccgaaccttgagcgccgctaccgcgaaaccgaatcggccaccgtgcgtgaagaactggccaaattccttggcacgcaaccgtgcccggattgccggggtacgcgcctgcgccgcgaggcgcgccatgtgtgggtgggcgagaaaaccctgccggcggtaaccaatttgccgatcggtgaagccagcaactactttggtcaactgacccttactggccggcgtggcgaaatcgcggcaaaaatcctcaaggaaatctgcgaacgacttcagttcctggtcaatgtcggtctcgactacctgaccctggatcgtagcgccgacaccctgtccggcggtgaagcgcaacgtatccgactcgccagccagatcggcgctggtctggtgggggtgatgtacatcctcgatgaaccgtccatcggccttcatcaacgcgacaacgaccgcctgttggccaccctcaaccatttgcgcgacctgggcaacacggtgatcgtggtggaacacgacgaggacgccattcggctggccgactacgtggtcgatatcggcccgggcgccggtgttcacggtgggcagattgtcgccgagggctcgccccaggaggtcatggaccatcccgattcgctgactggcaagtacctgtccgggcgcaagaagatcgtcgtgccggccaagcgcacgccgcgcaacaagaagctgcagctcaagctcaagggcgcacgtggcaacaacctgcagaacgtcgacctggaagtaccgatcggcctgctgacctgcgtgactggtgtatccggctcgggtaaatcgacgctgatcaacaataccctttaccccttggccgccaccgccctcaatggcgcaagcagcctggaagccgcaccgcacagcagcatggacggcctgcagcacctggacaaggtggtggatatcgaccagagcccgatcggccgcacaccacgctccaacccggccacctacaccggcatcttcacgccgatccgcgagctgttctccggtgtcccggagtcacgctcgcgtggttatggcccggggcgtttctcgttcaacgtcaagggtggccgttgcgaggcctgccagggcgatggcctgatcaaggtggaaatgcacttcctgccggacatctacgtgccgtgtgacgtgtgcaagagcaagcgctacaaccgcgaaaccctggagatcaagtacaagggcaagaacatccacgaggtgctggaaatgaccatcgaggatgcccgcgagttcttcgatgcggtgccggcgctggcgcgcaagctgcaaacattgatggatgtgggcctgtcgtacatcaaactggggcaatcagcgaccacgttgtccggcggtgaggcgcagcgggtaaagctgtcgcgcgaactgtccaagcgcgataccggcaagaccttgtacatcctcgacgaacctaccaccggcctgcactttgccgatatccagcaactgctggacgtattgcatcgcctgcgcgaccacggcaataccgtggtggtgatcgagcataacctggatgtgatcaagactgccgactggctggttgacctggggcctgagggcggttccaagggtgggcagatcattgcctgcggtacaccagaagagctgagcgagatgaagcagtcatataccggccattacctgaaaccattgctggagcgggatagggcc

SEQ ID NO: 31869 - DNA, 1086 bp, Pseudomonas putida
atgaatgacctgagccacacccacatgcgcgcggccgtctggcatggccgccacgatattcgtgtcgaacaggtacctttgccggccgaccctgcgccgggctgggtgcagatcaaggtggactggtgcggcatctgcggctccgacctgcacgaatatgttgccggcccggtgttcatcccggtagaggccccgcacccgctgaccggcattcagggccagtgcatcctcggccacgaattctgcggccacatcgccaagcttggcgaaggcgtggaaggctatgccgtaggcgacccggtggcggcagacgcgtgccagcattgtggtacctgctattactgcacccatggcctgtacaacatctgcgaacgcctggcgttcaccggcctgatgaacaacggtgccttcgccgagctggtcaacgtgcccgccaacctgctctaccggctgccgcagggcttccctgccgaagccggggcactgatcgagccgctggcggtgggtatgcacgcggtgaaaaaggccggcagcctgcttgggcaaaccgttgtagtggttggggccggcaccatcggcctgtgcaccatcatgtgcgccaaggctgcaggtgcggcacaggtcatcgcccttgagatgtcctctgcgcgcaaagccaaggccaaggaagcgggcgccaacgtggtgctggaccccagccagtgcgatgccctggcggaaatccgcgcactgactgctgggctgggcgccgatgtgagttttgagtgcatcggcaacaaacatacggccaagctggccatcgacaccatccgcaaagcaggcaagtgcgtgctggtgggtattttcgaagagcccagcgagttcaacttcttcgagctggtgtccaccgagaagcaagtgctgggggcgttggcgtacaacggcgagtttgctgacgtgattgccttcattgctgatggtcggctggatattcgcccgctggtaaccggccggatcggattggagcagattgtcgagctgggcttcgaggaactggtgaacaacaaagaggagaacgtgaagatcatcgtttcaccaggtgtgcgc

SEQ ID NO: 31870 - DNA, 1518 bp, Pseudomonas putida
atgcgttatgcacatcccggtaccgaaggcgcgaaggtttccttcaagagccgctacggcaactacatcggtggtgagttcgttactccggtaaaggggcagtacttcgaaaatacctccccggtgaatggcaagctgatcgctgagttcccccgctctactgccgaagacatcgacaaagccctggatgccgcccatgctgcggccgacgcctggggccgcacttcagtgcaggatcgttccaacgtgctgctgaagatcgccgaccgcatcgagcagaacctcgaactgctggccattaccgaaacctgggacaacggcaagccgatccgcgaaaccctcaacgccgacattccgctggcggtcgaccacttccgctatttcgctggctgcatccgcgcccaggaaggcggcgctgccgaaatcaatgaaggcaccgtggcctaccacatccacgagccactgggcgtggtcgggcagatcatcccctggaacttcccgatcctgatggctgcctggaagcttgccccggcactggcagctggtaactgcgtggtgctcaagcctgccgaacagacgccgctgggtatcaccgtactgctcgaagtcattggcgacctgttgccacctggcgtgctcaacgtagtgcaaggctatggccgcgaagccggtgaagccctggccaccagcaaacgcatcgccaagatcgccttcaccggctctaccccggtgggctcgcacatcatgaaatgcgccgccgagaacatcatcccgtccaccgtcgaactgggtggcaagtcgccgaacgtgtacttcgaagacatcatgcaggccgaaccaagcttcatcgagaaggcggcagaaggcatggtgctggcgttcttcaaccagggtgaagtgtgcacctgcccgtcgcgtgccctggtgcaagagtcgatctatccgcagttcatggaagtggtgatgaagaaggtgctgcagatcaagcgcggcgacccgttggacaccgacaccatggtcggcgcccaggcctcgcagcagcagttcgaaaagatcctctcgtacctgcagattgcccaggaagaaggcgccgagctgctcaccggcggcaaggtcgagaagctggaaggttcgctggctaccggttactacatccagccgaccctgctcaagggcaacaacaagatgcgcgtgttccaggaagaaatcttcggcccggtggtcagcgtcaccaccttcaaggacgaagccgaagcgctggcaattgccaacgacaccgagttcggcctgggcgccggcgtgtggacccgcgacatcaaccgtgcctaccgcatgggccggggcatcaaggctggccgtgtgtggaccaactgctaccacctgtacccggcgcatgccgcgttcggcgggtacaagaagtcgggggttgggcgtgagacgcacaagatgatgctggatcactatcagcagaccaagaacctgctggtgagctacgacatcaatccgctgggcttcttc

SEQ ID NO: 31871 - DNA, 1392 bp, Pseudomonas putida
atggcaagtttcgtacacacggtcggccatctggtctaccgcttcgacagcctcaaggaagtgatggccaaggccagcccggcacgctccggggactgcctggcaggcgtggcggccagcaacgacgccgagcgcgtcgccgcgcagatggcgttggccaacattccgctgacgcactttctcaatgaagcactgatcccttacgaagcagatgaagtgacccgcctgatcatcgacacccacgatgcccaggccttcgccccggtcagccacctgaccgtgggtggcctgcgtgactggctgctgagcgaggaagccaacgaagacagcctgcgcgccctggcgcccgggttgaccccggaaatggccgctgccgtgtcgaagatcatgcgcgtgcaggacctggtgctggtggcgcagaaaatccgcgtggtcacccggttccgcggcaccatgggcctgcgcgggcgcctgtcgacccggctgcaacccaaccacccgacagacgaaccggccggtattgccgccagcattctcgacggcttgctgtacggcaacggcgacgccatgatcggcatcaacccggccaccgacagcatcgcttcgatctgcgccctgctggaaatgctcgacgccatcatccagcgctacgacatccccacccagtcctgcgtgctgacccacgtcaccacctcgatcgaagcgatcaaccgcggcgtgccactggacctggtgttccagtccatcgccggcacagaggcggccaacgccggcttcggcatcaacctgaacgtgttgcaggaaggctacgaagcagggctgtcgctgaaacgtggcaccctcgggcagaacctgatgtatttcgaaaccggccagggcagcgcgctctcggccaacgcccaccacggcgtcgaccagcagacctgcgaaacccgcgcctatgccgtggctcgtcacttcaagccgttcctggtcaacaccgtggtcggtttcattggcccggaatacctgtacaacggcaagcagatcatccgcgccggcctcgaagaccatttctgcggcaaactgctgggcgtgccgatgggttgcgatatctgctacaccaaccatgccgaagccgatcaggacgacatggacaccttgttgacgctgctgggggtggccggcatcaacttcatcatgggcatccccggctccgacgacatcatgctcaactaccagaccacctcgttccatgacgcgttgtacgcgcgccagaccctgggcctgaagcccgggccggaattcgaggcatggctggcccgcaccggtatcttcacccaggccgatggccgggtgcgcttcggtgacaacctgccgccggccttccgccaggccttggcacagcttgca

SEQ ID NO: 31872 - DNA, 618 bp, Pseudomonas putida
atggcacgttacattggtccaaaatgcaaactgtctcgtcgtgaaggcactgatctgttcctgaagagcggcgttcgcgctctggaatcgaagtgcaatatcgaagcagccccaggtatccacggccagcgccgtggccgtcagtccgactacggcacccagctgcgtgagaaacaaaaagtccgtcgtatctacggtgttctggagcgtcagttccgcggttactaccaagctgctgcctcgaaaaaaggcgcaaccggtgagaacctgctgcaactgctcgagtgccgtctggataacgtcgtttaccgtatgggcttcggctcgactcgttccgagtcccgtcagctggtttcgcacaaagcgatcagcgtcaacggtaagactgtaaacattccatcctaccaagttcgtccgggtgacgtggtcgcagtccgcgagaaatcgctgggccagttgcgcattgttcaagcccttgaactgtgcgcccagcgtggccgcgttgagtgggttgacgtggatgctgctaaaaagtcgggcgttttcaagaacgttcctgctcgcagcgacctgtctgccgacatcaacgaaaacctgattgtcgagctctactccaag

SEQ ID NO: 31873 - DNA, 174 bp, Pseudomonas putida
atggcaaccgtaaaagtaacgctgatcaagagcgtctcgggccgtctgcctaaccacaagctgtgtgttaaaggcctgggtctgcgtcgcatcggtcacactgtagaagtccaggatactcccgagaaccgcgggatgatcaacaaggcttactacatgctgaaggtcgagggc

SEQ ID NO: 31874 - DNA, 1293 bp, Pseudomonas putida
atgactcatcgcatcgtgattgtcggcggcggcgccggcggcctggaactggcgacccgcctgggtaaaagcctgggcaagcgcaagcaggccgaaatcaccctggtcgacaccaacctcacgcacatctggaagccactgctgcacgaagtggccgccggctcgctgaactcctcggaagacgaactgaactacgtggcccaggccaagtggaaccacttcaatttccagctggggcgcatgagcggcctggaccgtgaaggcaagcagattcaactggctgccaccctcgacgaagagggccgcgagctgctgcctgcgcgcaccctgggctacgacaccctggtgattgccgtgggctccaacaccaacgacttcggcaccctgggcgcagcgcagcactgcctgttcctggatacccgcaagcaggccgagcgtttccaccagcaactgctcaaccactacctgcgtgcccacgccggcgacgtggccagcgagaaaatcagcgtagccattgtcggcgccggtgccaccggtgtagagctggcggccgagctgcaccacgctgcccacgagctggcggcctatggcctggaccgcatccagcccaaggacatgcacatcacccttatcgaggcgggcccgcgcgttctgccagcgctgccggagcgcatcagcgtaccggttcacaaaaccctggaaaaactcggggtgaaggtgatgaccaacgccgcagtcagtgaagtgaccgaggacggcctgaaaaccaaggacggtgaagtgatccaggccagcctgaaggtgtgggcagccggtatccgcgcgccaggtttcctcaaggacatcgatggcctggaaaccaaccgcatcaaccagctggtcgtgcgccctaccctgcaaaccacccgcgacgacaacatcttcgccttcggtgactgcgccgcctgcccgcaacccggcagcgatcgtaacgtgccgccgcgcgcacaggcggcgcaccagcaggcttcgatgctggcgcaaagcctgaaggcgcgcctggagaacaaggccctgccgacgtacgagtacaaggactatggctcgctggtgtcgctgtcgcgcttctcggcggtgggcaacctgatgggtaacctgatgggcagcgtgaagctggaaggctggctggcgcgcatgttctatgtgtcgctgtaccgcatgcaccagatggcgctgtacgggttcttccgcacggcgttgatgatgctgggcagcaagattggccggggtaccgagccgcgcctgaagttgcac

SEQ ID NO: 31875 - DNA, 2562 bp, Pseudomonas putida
atgcgaatagaccgtttaaccagcaagctgcaacttgcaatatccgatgcccagtctttggccgttggcatggaccaccctgccatcgagcccgtgcacctgttacaggcgctgctcgaacagcagggcggctccatcaaaccgctgctgatgcaggtaggcttcgacatcaatggcctgcgccaggggctggtgaaagagctcgaccaactgccgaaaatacagaaccctaccggcgacgtgaacatgtcgcaggacttggcacgtctgcttaaccaggcagaccgcctggcacagcagaagggcgaccagttcatttccagcgagctggtgctgttggccgccatggacgaaaacagcaagctcggcaagctgctgctgagccagggcgtgagcaagaaagcgctggaaaatgccatcaacaacctgcgtggcggcgcggcagtgaatgacgccaacgccgaggaatcgcgccaggcgctggacaaatacaccgtcgacctgaccaagcgtgccgaagagggcaagctggacccggtcattggccgtgacgatgaaatccgccgtaccgtgcaggtgctgcaacgccgtaccaagaacaacccggtgctgatcggtgagcctggcgtgggtaaaaccgccatcgccgaaggcctggcccagcgcatcatcaatggtgaagtgcccgacggcctcaaaggcaagcgcctgttggcgctggacatgggcgcgctaattgccggtgccaagtaccgcggtgagttcgaagagcgcttgaaaagcctgctgaacgaactgtccaagcaggaaggccagatcatcctgttcatcgacgaactgcacaccatggtcggcgccggcaaaggcgagggcgccatggacgccggcaacatgctcaagccggccctggcccgcggcgagctgcattgcgtaggtgccaccacgctgaacgagtaccgccagttcatcgaaaaggacgccgccctggagcgccgtttccagaaggtgctggtcgaggagccgagcgaggaagacaccatcgccatcctgcgtggcctgaaagagcgctatgaagtgcaccacaaggtggccatcaccgacggtgcaatcatcgctgcggccaagctcagccatcgctacatcaccgaccgccagctgccggacaaggccattgacctgatcgacgaagcggccagccgcatccgcatggagatcgactccaagccggaagtgctcgaccgccttgatcgccgcctgatccagctgaaggtggagtcgcaggcgctgaagaaagaagaagacgaagcggcgaaaaagcgcctggagaagctgaccgaggaaatcgagcggctggagcgtgagtattccgacctggaagaaatctgggcttcggagaaagctgaagtgcagggctcggcgcagatccagcaaaagatcgagcagtctcgccaggagctggaagccgcccgtcgcaaaggcgacctgaaccgcatggccgaactgcagtacggggtgatcccggacctggagcgcagcctgcagatggtcgaccagcacggcaagaccgacaaccagttgctgcgcaacaaggtcaccgaggaagaaattgccgaagtggtatcgaaatggaccggcattcctgtggccaagatgctcgaaggcgagcgtgagaagctgctgaagatggaagagctgctgcaccagcgcgtgattggccagagcgaggcggtaaccgccgtagccaacgccgtacgccgctcgcgtgccgggctgtccgacccgaaccggccaagtggttcgttcctgttcctcggcccgaccggtgtgggcaagaccgaactgtgcaaggcgctggccgagttcctgttcgacaccgaagaggcgatggtgcgcatcgacatgtccgaattcatggagaagcactccgtcgcgcgcctgatcggtgcaccaccaggctatgtagggtatgaagagggcggttacctgaccgaggccgtgcggcgcaagccttactcggtggtgctgctggacgaggtggaaaaagcccacccggatgtgttcaacgtgctgttgcaggtgctggaagacggccgcctgaccgacagccacgggcgcaccgtggacttccgcaacaccgtgatcgtgatgacctccaacctgggctcggcgcagattcaggaactggtgggtgaccgcgaggcacagcgtgcggcagtgatggatgcggtgggggcgcacttccgtccggaattcatcaaccgcatcgacgaagtggtggtgttcgagcctttgggccgcgagcagattgccggtattacagaaatccagctcggccgcctgcgcagccgcctgctggagcgcgaactgtcgttgagcctgagcccagaggcgttggacaagctgattgccgtgggttatgacccggtgtacggcgcgcggccgctgaagcgtgcgatccagcgctggatcgagaacccgctggcgcagctgattctggccggcaagttcctgcccggtacggcgatcaccgccaaggtggaaggcgacgaaatcgtctttggc

SEQ ID NO: 31876 - DNA, 813 bp, Pseudomonas putida
atgtggtcattcagcgcctggcggcgcaagcgtactctggcgcgttacccgatcacgccacagcaatggcaggccgtacgcgagcggctgccaatgctggacggcatcagcgacgctgaagaccgctggctgcgcgaagcctgcatcctgttcctgctcgacaagcacctcacctgcctgcccggtgtcgagctggacgacgagcagcgcctaatgctggccgcccaggcacagttaccgctgcttcacctgggtgagctgaactggtaccaaggcttccacgaaatcatcctgtaccccgacgacttcaagagcccccagcgccaccgcgatgccagtggcgtggagcatgtgtgggacggcgaacacagcggcgaagcctggcaacaggggccgatcatcctggcctggaacggcgtgcaggccagtggtggctgggaggcttacaacctggtcatccatgagctggcgcacaagctcgacatgctcaacggcgatgccaacggcctgccaccgctgcacagcggcatgcccgttgatgagtgggcgagcgccatgcagcaggcgtacgacgacctcaaccagcaactggacgccaaccccgacgccgaaactgccatcgacccctatgctgcggaaaacccggcagagttctttgccgttaccagcgagtacttctttagtgcccctgacctgcttcatcaggcttatccaaaggtctaccaccagttgtcgctgttctaccggcaagacccgctggcgcgcctgtgccggctgcaggcggaacaccccgagtaccgcgaaagccacgcc

SEQ ID NO: 31877 - DNA, 390 bp, Pseudomonas putida
atgagtatgcaggacccgttagcggacatgctaactcgcatccgtaatgcccagatggctgaaaagtccgtcgtaagcatgccttcctctaccctgaaggtcgcggttgccaaagttctgaaggacgaaggttacatcgctggctaccaggtaactggtgaggccaagccttccctgtcgatcgaactgaagtacttcgaaggccgtccggtcatcgaggaactgaagcgctccagccgtccaggcctgcgccagtacaaggccgtcaccgatctgccgaaagtacgtggcggtctgggcgtgtctatcgtctccaccaacaaaggtgtgatgactgatcgcgctgcgcgcgctgccggtgtcggcggcgaagttctgtgcacagtgttc

SEQ ID NO: 31878 - DNA, 366 bp, Pseudomonas putida
atgattcagactcaatccatgctcgatgtggccgataacagcggcgctcgtcgcgtcatgtgcatcaaggtactcggcggttcgcaccgccgttacgccggtatcggtgacatcatcaaagtaaccgtcaaggaagcaattccgcgcggtaaggtcaaaaaaggccaagtgatgaccgctgtcgtcgtacgtacccgtcacggtgttcgtcgcgctgacggttccatcattcgtttcgacggcaacgctgctgttctgctgaacaacaagcaagagccgatcggcactcgcatcttcgggccagtgacccgtgaacttcgtactgagaagttcatgaagatcgtctcgctcgcccctgaagtgctg

SEQ ID NO: 31879 - DNA, 192 bp, Pseudomonas putida
gtgatgaaagcgaatgaacttcgtgaaaaatcggcacagcaactgaacgagcaactgctcggcttgctgcgcgaccagttcaatctgcgtatgcagaaagcaactggccagttggggcagtcgcacctgctctcgcaagttaagcgtgacatcgctcgcgtgaaaactgtgctcaaccagcaggcaggtaag

SEQ ID NO: 31880 - DNA, 276 bp, Pseudomonas putida
gtggccaacacaccttccgccaagaaacgtgcaaaacaggctgagaagcgtcgcagccacaacgccagcctgcgttccatggtccgcacctacatcaagaatgtagttaaagccatcgacgcaaaagacgccgaaaaagcgcaagccgcttacgttctggctgtacctgtaatcgaccgtatggccgacaagggtatcatccacaagaacaaggctgctcgtcacaaaggccgtctgaatggccacatcaaggcgctgaaagaagctgcagctgcc

SEQ ID NO: 31881 - DNA, 885 bp, Pseudomonas putida
atgattggcacctaccaggccagttgccaggcgcgcgtcgacgcagccctcgaaccgctgttcatcgccccgagcaaagagctggaacgcctttacgccgccatgcgctacagcgtgatgaacggcggcaaacgcgtgcgcccgttgctggcctacgcggcctgcgaagccttgggcgccccggccgaacaggccaacggtgcagcctgcgcggtcgagctgatccatgcttactcgctggtgcatgacgacctcccggccatggacgacgacgacctgcgtcgcggccagccgaccacccacaaggcgtttgacgaagcgtgcgccatccttgctggcgacggtttgcagagcctggctttcagtgccctgctcgacccttgcctgagccctcagatcgacagcattcgcctggccatggttcaggtgctggccaaagctgccggcccggccggcatggttggcggccaggccatcgatctcggttcggtgggccagaagctggaccagcaggcgctggagttcatgcaccggcacaagaccggcgcgctgatcgaagccagcgtacgcctcggcgccctggcaagtgcccgtgccgaaccggtgcagctggatgccctgcaaacttatgcacaggccattggcctggcattccaggtgcaggacgacatcctcgacgtggaaagcgacactgctaccttgggcaaacgccaaggtgcagacatagcgcgtgacaaaccgacctacccggccctgctgggcctggaagccgccaaagcctatgcaatcgaactgcgcgaccaggcgctggccgcactgcaagggttcggcgaaaaggccgagccgctgcgggccttggcgcgttatattgtcgaacgccgtaac

SEQ ID NO: 31882 - DNA, 1179 bp, Pseudomonas putida
atgaacctgcgaatggtgctcatcctgggcgcactcagtgcgttcgggcccttggcgatcgacttctacctgccagcctttccggccatggcgcaagcgttcgccaccgatgaaaaacacgtccaggccacgttggccgcctacttcctgggcctgtctatcgggcagttggcctatgggccggttgccgaccgctttggccgacgcaaaccgctgatgttcggcgttacgctgttcaccctggcatcactggcctgtgcctacgcccccaacctcgataccttggtggtggcgcgcttcatccaggcactgggtggttgtgccggcatggtgctttcgcgggccatcgtcagcgacaagtgcgacccggtagcttcagccaaagtgttttcgcaactgatgctggtcatgggcttggcgccgatcctggcaccgatgttgggtggggtgctggtgaacctggccggctggcagtcgatcttccttgcgctgagcctgttcagtgccggctgcctgcttgcggtaagcctgggcctgccggaaagcctgcccgagcatataccccgccaaccgctgtctggcgccttgcgccagtacctgcggctgctggctgaccgggtttttctcggccatgccctgaccggcggtatcgccattgccggcatgttcgcctatatcgccggttcacctttcgtgttcatcaaactgtatggcgtgcccgctgagcactacggctggctgttcggtaccaacgccgcaggttttattctggtggcgcaggtgaacgcccgcctgctggccaaacgcgggccggccttcctgctgggccgtgcggtgtggctgtatctggttgcgggcctggtgctgctgggcgtggcggcgttgcgccctgcgcaattgtggccgctactggtgccgctgttcatctgtatcgccagccttggttgcatcattcccaatgcttcggcctgcgccatgagtggacagggcgcgcgtgccggcagcgcctcggcactgatgggctgcgtgcagttcagcgtagctgcgggtgctgcggcgctggtcgggctactgcatgatggcagtgcggtgcccatggcaatcgtgatcagcctgtgcggggcgctggtggtcagtgttgcgctgttgacccggcgtttgcaggccaaggctcccgca

SEQ ID NO: 31883 - DNA, 2397 bp, Pseudomonas putida
atgcccgcatccaccacatacgacctgccgatctccggcatgacctgcgccagctgtgctggccgggtcgagcgcgccctgcgcaaggtcaccggcgctgaacaggtcagcgtaaacctcaccactgaaaaagctcgggttctggccccgcctgccagcctgccagccttggtcgaagccgtgcgcgaggccggttacggggtaccaacccgcaccctcgaactgcagataggcggcatgacctgcgccagttgtgtcggccgagtagagcgcgccctgggcaaattggccggggtcgagcaggtcagcgtcaacttggccagcgaacgcgcgcacctcgaagtgcttgccgcgcttgatgacaacctgctgatcgacgctgtgcaaaaggcaggctacagcgccagcctgccgcaatcgaccaaggacgaccaaagcgctgtccagcgccgcctgcgcaacgagcgcctggcagtcggtgcagccttgctgttggccctgccgctggtattacccatgctggtacaaccgttcggcttgcactggatgctacccgcctgggcgcagttcctgctggccacacccgtgcagttcattctcggtgcccgcttctacattgcagcctggaaggccgtgcgcgccggcgccggcaacatggacctgctggtggccctgggcaccagcgctggttatggcctgagcctgtaccaatgggcacaggctcccgccggcatggccccgcacctgtacttcgaagcctcagccgtggtgattgccctggtattgctgggcaagtacctggaaagccgcgccaaacgccagaccgccagtgccatccgagccctcgaagccctgcgcccggaacgcgccttgcgcgtggtcgacggcgtggaagaggacgtggccatcgcccacttgcgcgtgggcgacctggtactggtcaagcccggcgaacgcttcccggtcgacggcgtggtcgaagacggcagcagccatgccgatgaggccctgatcagcggcgagagcctgccagtgcccaagcaacccggtgacagcgtcaccggtggcgccatcaatggcgaaggccggctgctggtgcgtacccaggcgctgggcaccgagaccgtgctggcgcgcatcatccgcctggtggaagacgcccaggccgccaaagcgccgatccagaagctggtcgaccgtgtcagccaggtgttcgtcccggccgtgctggtactggcgctgatcaccctgattggctggtggctggctggggtaccgctggaaaccgcgctgatcaacgccgtcgccgtgctggtcatcgcctgcccctgcgccctcggcctggccacgcccgccgcgatcatggccggtaccggggtcgccgcccgccacggcatcctgatcaaggatgccgaagccctggagcgtgcccatgcggtcaaccgcgtagtgttcgacaaaaccggcaccctcacctccggcagcccgcaggtggttcacagccaggcgctggacggcaacagcgccgacctttaccgcctggccggcgccctgcagcgtgggagtgaacacccgctggccaaggcggtgctggtggcctgtgcagagcaagggctggacgtgccaaccgttgccgacagccagtcgctgaccgggcgcggcattgccggtcgcgttgaaggccgtgaactggcgctgggcaaccgccgactgcttgacgaaagcggtctgcagcccggcgagttggccgcccaggcccaggcctgggaagctgaagggcgcacactgtcgtggctgatcgagcgcggcaagcaaccgagagtggtgggcctgttcgcctttggtgacagcctcaagcctggcgctgcgcaggccatcgaaacccttcacgcccaacacatcagcagccacctgctgaccggtgacaaccgtggcagcgccaacgtggttgccgaggccctgggcatcgacgatgtgcatgccgaagtgctaccggccgacaaggccgcgaccgtggccgcgctcaagcaggaaggagtggtcgccatggttggcgatggtatcaacgatgcaccggcgctggccgcggccgacatcggcattgccatgggtggcggtaccgacgtggccatgcaggccgccggcatcaccctgatgcgtggcgacccgcgcctggtgcccgccgcgctggaaatcagccgcaagacctacgcgaagatccgccagaacctgttctgggccttcatctacaacctgatcggcattccgctcgccgcgctgggttacctcaacccggtactggcaggagccgccatggccctgtccagtgtcagcgtcgtcagcaatgcactgtggcttaaaacgtggaaacccaccagcagcacccaggaggcgcca

SEQ ID NO: 31884 - DNA, 1662 bp, Pseudomonas putida
atggcgttctaccgtacacctcacgatgtcactgctctgccagcctggaaggcgcttcagcaacaccgcgaagccatgcgaggcttcagcatgtccgaagcctttgccgccgatgccaagcgcttcgaccagttttcccttagcgcttgcggcctgttcctcgactactcaaaaaacctgatcaccgagcaaagccgcgatctgctggtcaacctggccaatgaagtgggcctgcaggacgccatcaagtcgatgttcagcggtgagatcatcaacgcctccgaaggccgtccggtgctgcacaccgccttgcgccggcctgtaggtgacaaactcagcgtcaacggcgtgaacgtcatgccggaagtgcacaaggtgctcaaccagattaccgaactggttggtcgcattcacgatggcctgtggcgcggctacagcgaaaagccgatcaccgacgtggtcaacattggcattggcggttcgttcctcggccccgagctggtttccgaagcgctgctaccctacgcccagcgcggcgtgcgctgccactacctggccaatatcgacggcagcgagttccacgagctgtcggccaacctgcgcgccgaaaccaccctgttcatcgtctcgtcgaagtcgttcaacaccctcgagacgctgaaaaacgccatggccgcgcggacctggtacctggcccaaggcggctcggaagccgagctgtaccgccacttcattgccgtatccagcaacaaggccgctgctgtagcgttcggtatccgcgaagaaaacatcttcccgatgtgggactgggtgggtgggcgctactcgctgtggtcggccatcggcctgccgatcgccctggccatcggcactgccaacttcaaggaactgctgtccggtgcctacaccatggaccagcacttccagaccgcaccgttcgacaagaacatgccggtgctactggccctgctgggcgtgtggtatggcaacttctgggacgcaaacagccacgcgatcctgccgtacgaccactacctgcgcaacatcaccaagcacctgcagcagctggacatggaatccaacggcaagagcgtgctgcaagacggtaccccggtgaagaccgacaccgggccggtgatctggggcggcgtgggctgcaacggccagcatgcctaccaccagttgctgcaccagggcacccagttgattccggccgatttcatcgtgccggtggtgagcttcaacccggtggccgaccaccaccagtggctgtacgccaactgcctgtcgcagagccaggcgctgatgctgggcaaaacccgcgaggaagctgaagccgaattgcgcgctaaaggcctcaacgaagcagacatcgaaaagctggccccgcacaaggtgatcccgggtaaccgcccgagcaacacattggtggtcgagcgcatcagcccgcgccggctgggtgcgctggtggccatgtacgagcacaaggtgttcgtacagagcgttatctggggtatcaacgccttcgatcagtggggcgtcgagctgggcaaggaactgggcaagagcgtttaccagcgcttggtcggtagcctggaagacagcgccgaagacggttccacccaaggcctgatcaattactttcgtggtaaacaccgtggc

SEQ ID NO: 31885 - DNA, 1215 bp, Pseudomonas putida
atgagccttttgagtgtcagtgatgtgggcaaagcctacaaaacgtaccgttcggaactgcaacgaatcgcccactggttctttttgcccactaaggcaagcagtgaacactgggtgttgaaacacatcaactttgcaattgaacccggcgaagccatcggcattatcgggcaaaatggcgccggcaagtccaccttgctgaagatgatcaccgggacgttgcagccgacccagggtcgagtgcaggtcaatggccgaatcgcagccattctggagctgggcatgggtttcaatccagagctcagtggccgccagaacgtgtaccacgctgcgggtctgatgggtttcgatgtacagcagatcaatgatgtcattgatgacattgaagcctttgccgagattggcgagtactttgatgaggcagtgcgtacctattccagcggtatgcaaatgcgcgtcgcatttgccgtggcgactgcgttccgtccagaaatccttatcgtcgatgaggcgctgtcagtaggggacagctatttccagcacaagagttttgagcgcatccgtgagttccagcggctgggaacatcgcttttgatagtgtcacatgatcgtggcgccatccaatcgctgtgcagccgggccttgcttttggaaaacggttccatcatcaaggatgggccaccagagcaggtcatggattattacaatgccctgattgccgagaaagaaaacagcaccgtgcaagtcaagcaactggctgatggcaccgtgcagacgcagtcgggcagcggcgaggcaactatcggtaccgttgctttgtacgacatgcaaggcacgcctgtcgagttcgtggctgtgggtgacaaagtgaccctgagcgtgcaagtagaggtgcacgcgccgatccctgagcttgtagtcggctacgtgatcaaggaccgtttaggccaacatgttttcggtaccaatacccaccacttgggcaaagcccagaaggcgcttgaaaccggtgaaaaactggagtaccgcttcgacttcgagatgaatctggggcctggttcctattctgtagcggttgccttgcatgccaatgaggtgcacatcggcagcaattacgaatggcgagacctggcgttggtgttcaacgtggtcaatacctcaaagccccaatttgtcggcatggcttgggttccaacagctgtggagtgcatccgg

SEQ ID NO: 31886 - DNA, 1089 bp, Pseudomonas putida
atggccccgctagccctgcaactggcgcaggacagccgcttcgaagcccgcgtgtgcgtcaccggccagcaccggcaaatgctcgatcaggtactggagctgttcggcatcagccccgaatacgacttgaacatcatgaaagccggccaggacctgaccggtgtgaccaccgccatcttgcaaggcatccgaccggtgctggctgcgttcaagcccgacgtggtgctggtgcacggcgacactgccaccacctttgccaccagcctggcggcttactaccagcaaatccccattgcccatgtagaagccggcctgcgcaccaacaacctgtattcaccctggcccgaagaaggcaaccggcgcctgaccggggcccttgccgcgctgcacttcgcgcccactgccacctcgcgcgacaacctgttgcgcgaaggcaccgatccggcgcacatcttcaccaccggtaacaccgtgatcgacgccttgctggaggtggagcaaaagctgcaaagccccgcgctgaaggcccgtttcgccagccacttcagctacctggcagccgagcgccggctgttgctggtcaccggccaccggcgcgagaactttggtggcggcttcgagcgcatctgccaggccctggtgcagattgcacggcaattccccgagttggacgtggtgtacccggtccacctcaaccccaacgtgcgcgagccggtcaaccggctgttgggggatgtgagcaacatccaccttgtcgaaccgctggattacctgccgttcgtttacctcatgacccgggcctatgtgattctgaccgactcgggtggcattcaggaggaagcgccggccctgggcaaaccggtgctggtgatgcgcgacactaccgagcgcccagaagccgtggcggcaggtacggtcaagctggtgggcaccgaagtagcatcgattgtgcgggcgttgagtaccttgctgaccgatgaggcggcgtatcgcgaaatgagcttcgcccataacccctatggcgatggcaaagcctgcgcgcgcatacgcaaagccctggccacctggccccccccccaccgctcaatg

SEQ ID NO: 31887 - DNA, 534 bp, Pseudomonas putida
atgagcattctcagcgttttccaccccgccagcccggcactgccgaacaaggtgctgactcaccacgacgacatcgccgctacgttggccgagcagggcgtgcgctttgtgcatgccgaacctggcctgcgggtgcgcccgggcacggcccaggacgaggtgctggaggtttgccgcgtgtatctggatgagttgatgacggcgcatggcagcaaggccctcgcgctgctcaaccgcgacggagaagacccggcacaggtcgatgtgcgtgatgaacatgtgcatgatgccgacgagctgtttgccgtggtcagcgggcgggcgcaggttggcctgcggctgggggactgggtgtattcggtgctgtgcgagaagggtgaccagctgctggtgccggccgggacgcggcgctgggttgagttgggtgatacaccgttttgcctggcgttgcgcttgtatggcagcgagcagggcatgcaggcgcggtttacgggcgatgtgactgcgcgggcatttcttggtatcgacgagctg

SEQ ID NO: 31888 - DNA, 999 bp, Pseudomonas putida
atgacccagaccaaccgccgcttcctgcttgccaaacgcccggtcggcgccgtgcgccgtgacgacttcagcttcgagaccgtacccgccgaacaacccggcgaaggccaggtactggtgcgcaacctgtacctgtcgctggacccggccatgcgcggctggatgaacgaaggcaagtcctacatcccgcccgtggccctgggccaggtaatgcgtgcgctgggtgtaggtgaagtggttgcctccaatcaccccggctaccagcccggcgaccatgtgagcggcgccctcggtgtgcaggactacttcaccggcgagccccagggcctgcacaagatcgaccccaagctggcccccctgccccgttacctgtcagccttgggcatgaccggcatgaccgcctacttcgccctgctggaggttggccaacccaaagctggcgacaccgtggtcatttccggcgcggccggtgcggtgggcagcattgtcgggcagattgccaagatcaaaggctgccgcgtggtcggcattgccggcggtgccgagaagtgccagtacctgaaggacgagctgggctttgacggcgtgatcgactacaaggccgaagacgtgctggccggcctgaagcgcgaatgccccaaaggcgtggacgtgtacttcgacaacgtgggcggcgatatcctcgatgccgtgctgacgcgcatcaacttcaaggcacgcattgtgatttgcggcgcgatcagccagtacaacaacaaagaagcggtgaaaggcccggccaactacctgtcgctgctggtgaaccgcgcgcgcatggaaggttttgtggtgatggattacaccaaggactacggcaaggccgcgcaggaaattgccggctggttggccaatggtcaggtgaagagcaaagaggatgtggtggaagggctggaaaccttcccggagaccttgttgaagctgttcagcggggagaattttggcaagttggtgttgaaggtt

SEQ ID NO: 31889 - DNA, 2427 bp, Pseudomonas putida
atgacacagaacgtcctcaacgagcggccggcgggtcagaaacctgtagcgctctcctcttttcgtggctgcatcaacggactttacggggatgttctgcaggggtgggctatcgatatcacgcagccagatcagcgccctgtcatcgaagttttcgttgacggggccagtgtcgcattggccagggcagaccaacatgagcccaatgctccacacggcgatcacttccatggctttaccgtgcaactgcgccagagcctgctggcggatgccaaccgaataaccgctcaaattgctaatacaggcatccacctcgaaggtgagattgaactcccttcccagcctccacaagaaactgctgccgtagcttcacaggtatggcatacgggtgggttgcgcgtcggcggctggtcttgggatccacaggcgccgcatcgccatgttgtagttacgctacgcgaaggtagccgggttgttgcccaggtcacttgcaatacccaccaccaggcactcgcgtaccgggccacaagtgatcacggtttcgcgatagacctgccgtgggaactggcagatggcaagttgcatgtcattgaagtaaccaatgaccttggacagtcgctgccgggaagccctattcgtttgcgctgccgcccggagggcctggaaggcttgttgcatcagcttgaactgaaacccgatgctgcaatgcaggcccttgtggcagaagttgcgaaggaacaatcatcgcgcttaccaaaaagcgcaggatggcagcactatccacgatggtatgacgccttccagaagcgtgagcctatcgctgccatcccatccaggttcagacccggcctgttactgctaagtgaaggtgacgccactctcgaaaaaatcagcctcgatagcctgggcgatgacgctgaaagtgtccatcaactggcgaaggctgccccggccgaccttctccccgcagttgaacaactgctggcagccggctgcgacagcattatccagatcgctgcaggtgacaaactggcgccccgagccatggcgcagcttcgcaatttgctggaggaaggttgcgcttgggcttatgccgactgtgaccgcgacgggccacaaggccaacgtagccagccatggttcaagccggtttgggacattgacctgttcattggcgcagacattttctctactggcgcaattttctctgccgccattgtcaaagaggctttggcattgctcaaagcaggcaaaaagcagtctgccattaaccgccacgatctaatcgccggtatagcactagcgacggagctaaacggcaggtctgtaacgcacctgcctcgggttctctaccatcgctctagcgatacctgtacaagcccggagcaagcagctccctcaaagcaacgcaaggacgccgtggcgtggttatgccaaggcctggccccaggtgcgcacgtcagtgccgtaccagattaccctgctctgctcagggctcactggccgctccccgagcaactgccacgtgtcagcctgatcgtacccacacgtgaccagtacaagctgctgcacgcctgcatcgaaggcctgttgaacaacacggattatcctgacctggagatcattgttgtcgacaaccagtcgactgacccgcagacattggcctacctagccgaactcaagcagcgcggcgttaagattcttgcgcacccacaccccttcaactactccacgatcaacaatcgcgcggcgagcgctgccacgggagagctgatcggcctagtcaacaacgatatcgaaatcatcgaaagcggctggcttaaagaaatggtttcgcaggcactgcgccccggaatcggcgcagtgggtgccaagttgctgtggcccaacaggatggtccagcatggtggcgtagttgttggcgtcaatggcctcgcggcccatgctggcaacaccttggagcaacgagatgccgggtacctggggatgaaccaggttaccaggaggcagagcgcggtaacggcggcgtgcctgctgctacgcaagtcgttgttcgactcgattcagggcttggatgaacgagcgtttcctgtggccttcaacgatgtcgatttatgcttgcgcattcatgaacttggcctacgtaatgtctggaccgccttcgcgcaattgatccatgccgaatccgccagccgaggcaaagatatctcgccagagaaaatggcacgcgcccagcgagagcagcagttgtttacagaacgatggtcagtcagctacagggatccgtactaccatcccgcattaagcctggactatctgaccggtccgtacgggggcttgtcactgccgccagaaccagaatattgcgcccccagaaaattggcatccagtgagactcatggtcatatctacttggctgatccttcc

SEQ ID NO: 31890 - DNA, 2064 bp, Pseudomonas putida
gtggggcgccatgctccggttgttcaatcgaggtccttttgcggtgaggagagccgaatgagcgacgcaaagaacagcagggtgcgtgagtacctagttaacttgtccaggcggaaaaagcgtcttgtgcaagtgtgcgccgacgtggtgctgatctggttggcgttatggttgtcttttatcgtgcgcctgggcatcgatgaaatgtacaacccggtcatcaaacacgcctggttgttcatggttgcgcctctcgtagccattccgctgttcattcgttttggcatgtaccgggcggtgatgcgctacttcggcaatgatgcattggtgaccattatcaaggccgttaccctgtcatcgctcattctggctgtggttgtgtactggtacagcaaccatcaggtaatcgtgccgcgctcgatcattttcaactattggtggttgagcatggtcatcattggtggtttacgcctgatcatgcgccagtatttcctgggtgactggtttaccggcgcccatcagataccgttcgccaaccgcgatgatggcctggtcaaggtagccatctatggtgcaggcaccgccggcaaccagctgctggcagcgttgcgcatggggcgggcgatgcgcccggtggcgttcattgatgatgacagtgaccttgccaaccgggtcatttccggtttgcaggtgtacaagcccaagcatctgcagcagatgatcaaggaaaccggtgcacaggaaatcctcctcgccctgccttcggtatcgcgcgcccggcgcaaggagattctcgccttgctcgaaccttacccgttgcacgtgcgcagcgtgccggcctttgccgacctggcaagtggccgggtcaaagtggatgacatccaagacgtggacattgccgatttgcttgggcgtgacccggtacccgccaaggaagggctgctcgaacgctgcatccacaagcaaacggtactggtcaccggggccggtggctccatcggctccgagctttgccgccagatcatagggcttgggccaacgacattgctgctgttcgaccacagcgagtacaacctctacgctatcctcagtgagctggagcaacgcgttgcgcgcgagtcgctgccggtgcgactgctgcccattctggggtcggtacgcaatcagcagcatcttgcccacgttatgtccacttggcgggtagccaccgtctaccacgcggcggcttacaaacatgtgcccatggttgagcacaacatggcggagggtatactcaacaatgtgttcggcacgctttgtaccgcacaggctgctttgcaatcaggcgttgccaacttcgtgcttatctcgactgacaaggcggtgcgccccacgaacgtgatgggcggtaccaagcgtctttccgagttgattctgcaagcactaagccgcgaggcggcacccgtcatgtacggtgacagcagcaagatcgcccgggtgaacaaaacccgcttcaccatggtgcgctttggcaatgtgctgggctcctctggctcggtgatcccgttgttccacaagcagatcaaggccggtggcccaattacggttacccacccgaagattacccgctatttcatgactatccccgaagccgctcaactggtggttcaggcaggggcgatggggcagggcggggacgtatttgttctcgacatgggggagccggtaaaaattgttgagctggctgagaaaatgattcatctctcgggccttagcgtacgtagctcgggtaaccccaatggtgatatcgccatcgagttcacggggttgcgcccaggtgagaagctttttgaagagttgttgattggcgatgacgtttcgcctaccgtccacccgatgatcatggtagcgaatgaagactacgtcacttgggacgtcttgcgtgaacgtattgccgtgttactcaatgcagtggcggtggatgactttggccgtatccggcaactgttgcgtgaactagtgaacgggtatgtgccggaaggagaaattgtcgactggatctaccaacagcagcggcaggacagt

SEQ ID NO: 31891 - DNA, 2769 bp, Pseudomonas putida
atgggcgaactggccaaagaaatcctcccggtcaatatcgaagacgaactgagacagtcttacctcgactacgcgatgagcgtgattgtcgggcgagcgctgcccgatgcgcgtgacggcttgaagcctgtgcatcgccgcgttctctatgcgatgagcgaactgggcaacgactggaacaagccgtacaagaaatccgcccgtgtggtcggtgacgtgatcggtaagtaccacccgcacggcgacactgcggtctacgacaccatcgtgcgtatggcccagccgttctcgttgcgctacctgctggtcgacggccagggcaacttcggttcggtggacggcgacaacgctgctgccatgcgatacaccgaagtgcgcatgaccaaactggcccacgaactgctggccgacctgcacaaggaaaccgtcgactgggtgcccaactacgacggcaccgagcagatcccggcggtcatgccgacgcgtattcccaacctgctggtcaacggttccagcggtattgccgtgggcatggcgaccaacattccgccgcataacctaggcgaggtcatcgatggctgcctggcgctcatcgacaacccggaagtcaccatcgatgagctgatgcagcacatccctggcccggacttcccgactgccggcatcatcaacggtcgccagggcatcatcgaggcctatcgcaccggccgtggccgcatctacatgcgcgcccgctccgagatcgaggacatcgacaaggttggcggccgccagcagatcgtgatcaccgagctgccgtaccagctgaacaaggcgcgcctgatcgaaaagatcgccgagctggtcaaagagaagaagatcgaaggcatcaccgagctgcgcgacgagtccgacaaggacggcatgcgcatcgtcatcgagctgcgtcgcggcgaggtgccggaggtggtgctgaacaacctctaccagcaaacccagctgcagagcgtattcggcatcaacgtggtggccctggtcgacggccgtccgcgcctgctcaacctcaaggacctgctcgaagcgttcgtccgccaccgccgtgaagtggtgacccgtcgtaccgtattcgagctgcgcaaggcccgtgaacgtggccatatccttgaaggccaggcggttgcgctgtccaacatcgacccggtcattgccctgatcaaggcctcgccgacgccgtccgaagccaaggaagccctggtctccacgccgtgggaatccagtgccgtgcaggtcatggtcgagcgcgccggcgccgattcctgccgccctgaggacctgccggagcagtacggcctgcacgacggcaagtacttcctgtcgccggaacaggcccaggccattctcgacctgcgcctgcaccgcctgaccggcctggagcacgagaagctgctggccgagtaccaggaaatcctcgagcagattggcgagttgatccgcatcctcagcagcgccgagcgcctgatggaagtgattcgcgaggagctggaggccattcgtgccgagtacggcgatgtgcgccgcaccgaaatcctcaatgccagccacgacctcaactacggcgacatgatcccggaagaagagcgtgtggtcaccatctcccatggtggttatgccaagacccagccattgtccgcctaccaggcccagcgccgcggcggcaaaggcaagtcggcgaccggcgtgaaggacgaggactacatcgagcacctgctggtcgccaacagccatgccaccctgttgctgttctccagcaagggcaaggtttactggaagaagacctacgaaatccccgaagcgtcccgcgctgcccgcggtcgtccgctggtcaacctgctgccgctggaggagggtgagcgcatcaccgccatgctgcagatcgacctcgaagcgctgcagcagaacgccgacctcgacgaagaactggacgaggctgaagacaccgtgctcgagggtgagctggtagaggccgaggaagtcgacgaagaagacggcgacaccccggagtgggttgcagagccgaccggcgcgtacatcttcatggcgaccgcttccggtaccgtcaagaagaccccgctggtgcagttcgcccgtccgcgctccaacggcctgattgccctgaagctgaaggaaggcgacaccctgattgccgcggccatcaccgatggcgccaaggaagtcatgatgttctccgacgctggcaaggtcattcgctttgccgagagcgtcgtgcgtgaaatgggccgcaacgcccgtggtgtgcgcggcatgaagctgggcaaaggccagcggatcatttcgatgctgatcccggagtccggctcgcagatcctcaccgcctccgagcgtggctttggcaagcgcaccccgctgtccaagttcccgcgtcgcggccgcggtggccagggtgtgatcgccatgggtaccaaagggcgcaacggcctgctgatcggggctatccaggtgcaggaaggcgaggagatcatgctgatttccgaccagggcacgctggttcgcacccgggttggcgaggtgtccagcctgagccgcaacacccagggtgttacgctgatcaagctggcggccgatgagacactggtgggcctggagcgtatccaggagccgtccgaggacgaactcgatgaagtgatcgagacggacgaggagggtgtcgaggctgtagcgccagacaatgaaaatgaagaagctgcaggtgccgacgaggccccgcaagag

SEQ ID NO: 31892 - DNA, 726 bp, Pseudomonas putida
gtgcgccgaagtggggattcgcgtggcagaagagggcaagtcgtgaattcaatggcaccggttatcaccatcgacggaccaagcggctcgggcaagggcacggtcgccgggctgattgcccgcgagctgggctggaagctgctggactccggcgcgctgtatcgcttgctggcattcaatgccagcaaccacggcgtcgacctgaccaacgaagagctgctgaccaagcttgccgcccatctggatgtgcagttcatcgctgccgagcccggtaagctacaacagatcatccttgagggtgaggacgtcagcaacgtcatccgtaccgaaaccgtcggtgccggtgcatcgatggtggcctcgctgccggcagtgcgtgatgcgctgctggttcgtcagcgtgagttccgcgaagtgccggggctgattgctgatggtcgcgacatgggtaccgtggtgttcccggatgcgccattgaaggtcttcctcaccgccagcgcggaggagcgcgcacgtcgccgctacctgcagttgaagggcaagggtgaagatgttagtctgtcgagtctgctggatgagattcgtgcgcgtgatgagcgcgacacccaacgtgcagtggccccgctgaaaccagcggccgatgccattcagttggactctaccgagttatccatcgagcaggtgttgcaacgtatcagaagcgagatcgcccagcgcgaccttatc

SEQ ID NO: 31893 - DNA, 291 bp, Pseudomonas putida
atgaaacgcatttgctcgatctacaagagcccacgcaagaacgaaatgtacctgtacgtactcaaggctgacggcctggaacgcgtgcctgaaggcctgctgccgttcttcggcacccccgtgcacgctttcgacctggtgctcacccctgagcgcaaactggcccgcgaggacatcaccaaggtgctggagaacctcgaaagccaaggctaccacctgcagatgccgccgctggaagatgagtacatcgagcacctgcccgaagagctgctgcgccgcaacgaccccgtc

SEQ ID NO: 31894 - DNA, 2244 bp, Pseudomonas putida
ttgaagctcagcctggttggcctggtgatcgttgccggcttcgcggtttacctcgatgccgtcgtccaggaaaagttctccggcaagcgctggaccatcccggccaaagtgtatgcccgaccgctggagctgttcaccggccagaagttgagcaagaacgacttcctcaccgagctcgatgcgctcggctaccgtcgcgaaagcgcggccaacggcccgggcgctgcgtccgtcaacggcaataccgtcgacctcaatacccgtggcttccagttctacgagggcatggaaccggcgcagttcgtccgcgtgcgcttctctggcgattacgttgcgggcctttccggtgccaacggcaaggcgcttgacgtggtgcggctggagccgctgatgatcggcggcatctacccgaaaaatctcgaagaccgcatcctgatcaagatcgatcaggtacccaaatatctgctcgaaaccttggtggcaacggaggaccgcgagttctacagccacttcggcgtgtcgccaaagtccatcgtccgggccatgtgggtcaacacgtcgtccggctcgatgcgccagggtggcagtaccctgacccagcagttggtgaagaacttctacctcagcagcgagcgcagcctcagccgcaagctgaccgaggcgatgatggcggtcctgctcgaactgcactacgacaaacgcgaaatccttgaggcctacctcaacgaggtgttcgtcggccaggacggtcagcgcgcggtgcacggctttggtctggctagccagttcttcttcagccagccgctgtccgagctgaaactgcatcagatcgccctgctggtaggcatggtcaaaggcccgtcctactacaacccgcggcgtcaccccgagcgggccctggctcgccgcaacctggtgctcgacctggtggccgagcagggcgtggccagccaggcagaagtcgatgcggcgaagaaaatgccgctgggcgtgaccaagcgtggcagcctggccgacagctcgttcccagccttcctcgacctggtcaagcgacagttgcgccaggattaccgcgacgaggacttgaccgaagaaggcctgcgcatctttaccagcttcgaccctatcctgcagatgaaggccgaaacctcgatgagcgagaccttcaagcgcctggcgggccgcaagggggcagacgatgtggaagcggcgatggtcgtgaccaaccctgagaccggtgaagtacaggcgctgatcggtagccgccaggcaggcttcgccggcttcaaccgggccatcgatgctgtgcggccgatcggctcgttggtcaagccgtcggtatacctgactgcgctggagcagccgagcaagtacaccctgaccagttgggtgcaggacgagccattttcggtcaagggcgctgacggccaagtctggcgcccgcaaaactatgaccgccgcccgcatggcacgatctacctgtaccaggggctggccaactcctacaacctgtcgaccgccaagctcggcctggaagtgggtgtgccgaacgtgatcaagaccatcggtcgcttgggcgtgaatgtcgactggcctgcattcccggccatgttgctgggggcaggtggcatgtcgccgatgcaggtggcaaccatgtaccagaccatcgccaacggtggcttcaacacgccgatgcgcggcatccgcagcgtgctcaccgccgagggcgagccgctcaagcgctacccgttccagatccagcaaaccttcgacccaggtgccatttacctggtgcagaacgccatgcaacgcgtaatgcgcgaaggtacagggcgctcggtgtacaacaccttgccacgctcgctgaccctggcgggcaagaccggtaccagtaacgactcgcgtgacagctggttctccggcttcagtcaggatctgctggccgtggtgtggatggggcgtgacgataacggcaagacaccgtttaccggcgccaccggcgccttgcaggtgtggaccagcttcatgaagaaggccgacccgctgccgctggacatgccgcaaccggataacgtggtgcaggcctggatcgacccctacagtggccatgggtctgatgccagctgtccgggagcggtgcagatgccgtatattcgcgggagcgaaccgccggccggcgcagcctgtggcggcgagcaggacccagtagaatcggtaatggactgggtcaaaggctggatgaat

SEQ ID NO: 31895 - DNA, 462 bp, Pseudomonas putida
gtgagaggcggtctattcatgtccaccctagaaaagcaaaaagccaaccagaatctttatggggttgcaccctatcaggagaccaagggtgaggagtacatgggtgagcccatgcgcaagcacttcaccaagatcctcactggctggaagcaagagctgatggtcggcgtcgacaagaccgttgaccatatgaaagaagaagcagccaactttgcagatcccgcagaccgcgcatcccaggaagaggaattcgccctcgaactgcgcaaccgcgaccgcgagcgcaagttgatcaagaaaatcgataaaaccctgcagaagattcaggacgaagagtacggctggtgcgagtcgtgcggcatcgagatcggcctgcgccgcctggaagcccgccctaccgccgacctgtgcttcgactgcaaggaaattgccgagaaaaaggaaaaaacggtcggcaaaggc

SEQ ID NO: 31896 - DNA, 2322 bp, Pseudomonas putida
atgccgttgcgccccaacccgttcgttcacgccctgctgctcaccaccaccctcggcctggccatgcccgccgcccaggccgaaacccgcagctaccacatcgccgccggttctcttgaagacgccctcaaccagttcggccgcgaaagcggtgcactgatctcgttcggctcgcaactgacccagggcatgagcactcaaggcctggacggccagtacgacacgcgccaggggctcgacgccctgctgcgcggcagcggcctgcaagcacgccaggaaaccgacaacgcgttcagcctgcaacccatcacagcccctgctgctggcgcagcagtcgagctaggcgcctccaccgtggtcggcgactggctggccgaggcgcagcaggacaacgtattcgagcaccccggcgcccgcgacgtagtgcgccgtgaggaattcgaacgcaacggtgctaccaccgcccgcgaagtgctcaaccgcatccccggggtcaacgcccccgacaacaacggtaccggcagccatgacctggcgctgaacttcggcatccgcggcctcaacccgcgcctggcatcgcgctcgaccgtgctgatggatggcatcccggtgcccttcgcgccgtacggccagccgcagctgtcgctggccccgctgagcatgggcaacatggacgcagtggacgtagtgcgcggtggcggcgcggtgcgctacggcccgcagaacgtcggcggcatcgtcaacttcgtcacccgggcgatccctgaacaggccacgttcaaggccgccatgcaaaaccagatcagcccgtcttcgagccacgaaggtttcaagaacagcgccaacctgctggtcggtggcaccaacgacaacggtctgggcggcgccctgttgtactccggcacccgcgggggtgactggcgcgaacacagcgacacgcagatcgacgacctgatcctcaagggcaagctgcaactggacgaagccaacagcctgcacgccatggcccagtactacgagggcgaggccgacatgcccggcggcctgagcaccgccgatttcgatgccgacccgtaccagtccacgcgcctgaaagacaagttctggggccgccgcacgctgttcaacttcggctacgactacaagcaggatgaccgccagttcagcgtcaacagcttcttcaccaagaccctgcgcagcggctacctggaccaaggcagcttcgtctcgctgtcgccacgcgagtactgggtgcgcggcatcgaaacccgcttctcgcagggcgtggccctgggtgacagctggcacgagctgggcatcggctaccgctacgtcaacgaagccggccacgaactgcgcttccgcgagccggtgaacggcagcctgcccaccaccgccagccgcaacgaccgcgacacccgtggcagcaccgaagcccatgccatctacctggatgaccgcatcgacatcggccgctggaccatcaccccgggcgtgcgctacgagatgatcgactccgagcagagcaacaagctcaacggccagcgctaccagggcagctacaacactgcactgccagccctgaacgtgatgtaccacctgaccgacagctggaacctgtacgccaacaccgaaggatcgttcggcagcgtgcagtacagccagatgcccaaccgggtcagcagtggcgaagtgaaaccggaaaaagcgcgcacctgggaagtgggtacccgttacgacaacggcgacttgcaggccgagatcggcgcgttcctgatcaacttcgacaaccagtatgaaagcaaccagaccaacgactcggtgatcgcccgtggtgaaacccgccaccagggtatcgagaccagcgtccgctatgcgctggacggcctgagcccggccttggccggcttcgacgtgcacgccagctatgcgttcgtcgacgccaccatccgtgaggacgggccgaacaaaggcaaccaggtgccgttctcgtcgcgccacaagggcaacctgggcgtgggctacaccgagggcccttggcagctgaacctggacggcagcttccagagcagccagtacgccgacaacgccaacaccagcaccgaaagcgccgatggaagcaccgggcgcattccgggctacatgctggtcagcacccgtgccgggtacgactttggcccgcagttgtcgaacctcaaggtggcagtcggggtgaagaacctgttcaaccgcgagtactacacgcgttcttacgatgacaacaacaagggcaagtatgtgggtgaaccacgtaccttgtatttgcagacgtcggtggaattc

SEQ ID NO: 31897 - DNA, 900 bp, Pseudomonas putida
atgcccagcctgaccatgaccgactccagctacatcgggcgcttcgcccccacccccagcggcttcctgcacttcggctcgctggtcgccgccctcgcctcctggctcgatgcccgcgccgtcaacggccgctggctgctgcgcatggaagacaccgacccgccccgggagatgcccggcgcccgcgatgccatcctccagacgctggaacgttacggtctgcactgggatggcgaggtggtattccagagccagcgccacgatgcctatgctgccgtggtagaccgcctgttcaacatgggcctggcgtacgcatgcacctgctctcgcaagcagctggaaagctacaacggcatctacccaggcttttgccgcaacgccgggcatgcccgtgaaggggcagccatccgcttgcgggtgccggagctgatctaccgctttaccgaccgggtgcagggtgagtaccagcaacacctggggcgtgaggtgggcgacttcgtcatccagcgtcgtgacgggttgtacgcctaccagctggccgtggtgctggacgatgcctggcagggtgttaccgacatcgtgcggggggccgacctgctcgacaacaccccgcgccagctgtacctgcaggaactgctgggcttctcacagccgcgttacctgcatattccgctgatcgtgcagccggatgggcacaagctgggcaagtcgtaccgttcgccgccactgcaggcggagcatgctacccccctgctgctgcgggcactgcgggcgctggggcaggagacagacccggaactgctgttggcgacgccggcagaggtgctggcagtcgcgcgcgcgcaatggcggccggaagcgatcgcgcagcggaccacggtgccagaggctgatttgcgc

SEQ ID NO: 31898 - DNA, 942 bp, Pseudomonas putida
atgcctcacgacgccttctggctgcccgccagtgagcactgcagcctgtacgtacaccaatggctgccggccacaccggtaaaggccgtggtgctgctggcccatggcatggccgagcatgccgggcgctaccagcgcctgggccaggctctgagcgaggccggctttgccctgttcgctgccgatcagcgtggccacgggcgcactgccgaactgggcaacctcggcctgttcgcccgccatcatggctggaatgccgtggtcaatgacctggggtgtgtggcccagcacatcggccagcagttcccgtgcacgccgctgttcctgttcggccacagcatgggcagctacatcgcccaggcgtacctgctgcatcacagtggcagcctgcacggggcgatccttagcggttccaactaccaaccggccgtgctgtaccgctttgcgcggctgattgcccggctggagtcctggcgccaggggccactgggcaagagtgcactgatcgaatggttgtccttcggttcgttcaacaacgccttcaagcccaaccgcacggccttcgactggctcagccgcgacccgggcgaggtcgatcagtacgtgaatgacccgttgtgcggctttcgctgcaccaaccagttgtggctcgatctgctgcagggcttggcgcagatcagtcagccgggtaacctcgcgcagatcgatcccaacctgccgatgctggtgatcggcggtgaatgtgatccggtcagtgccggcaagcgtctcacccatctggccgacgccctgcgcgcgaccggcaaccgacatgtacagctgcgcgtctatcctgaggcgcggcatgaagtactcaacgaaaccaaccgtggcgaggtcatcgccgatattctcggctggctggaacaggcgctggcccttggccgccctgcgcgcagtgaa

SEQ ID NO: 31899 - DNA, 477 bp, Pseudomonas putida
gtgaccattcgcgcctacgtaggtctgggcagcaacctggacgcacctgccgagcagctgcgtagcgccttgcaggcgctggaccaggtcgaagccacgcgcctggtagccgcctcggccctgtacaccagcgattcgctgctgcccggccaaccgcgctacaccaatgctgtcgccgccctggacaccgccctggcaccactggcattgctcgatgcgctgcaggccatcgaaaacgaccagggccgcgtgcgcaaagagcgctggggcccacgcacgctggacctggacatcctgctgttcggtgaccaggtgctcgaccagccacgcctgaaagtgccgcattaccacatgcatgcccgcccgttcgtgctgtatccgttggccgaactggtaccgggggatttccgcctggccgatggccgcgccctcgcacaactgctcgacgaatgcccgttcgtcggcctggaacgcctg

SEQ ID NO: 31900 - DNA, 840 bp, Pseudomonas putida
atgcagtcgttttttacagcgcctgaacgaggaatttcctacatgcctgaagtaacccttaccacccttaacggcctcaaggccaagggtgaaaaaatcaccatgctgacctgctacgacgcgaccttcgccaaggccgccagccaggccggcgttgaagtgttgctggtgggcgactcgctggggatggtcctgcagggccacgacagcaccttgccggtcaccacggcggagatggcctaccacaccgccagcgtcaaacgcggcaacgacggcgcgctgatccttaccgacctgccgttcatggcccatgccacccccgagcaggcctttgccaacagcgccacactgatgcaggccggcgcccacatggtcaagatcgaaggcgcagcctggctggccgaaaccatccgcttgctggccgaacgtggtgtaccggtgtgcgcgcacatgggcctgaccccgcaaaccgtcaacgtgctgggcggctacaaagtgcagggccgccaggaggcccaggcccggcagatgcgcgccgacgccattgccctggaacaggccggtgcggccatgctgctgctcgagtgcgtacccagcgaactggcggcggaaatcaccaatgccgttggcatcccggtaatcggcattggcgccggcagcgccaccgatggccaggtactggtactgcacgacatgctcggcctgtcgctgagcggccgggtaccgaagttcgtgaagaacttcatgcagggccaaccggatatccatagcgccctcgtcgcttacgtcgaggcggtcaagcaagtcagtttcccaggcagcgaacacgggttcagtgca

SEQ ID NO: 31901 - DNA, 1662 bp, Pseudomonas putida
atggcgtattaccgtacaccccacgatgtgacggccctgcccgcctggcaggcgcttcagaaacaccgcgacgccatgcaaagcttcagcatgcgcgaagccttcgccgccgatgccaagcgcttcgaccagttttccctcagcgcttgcggcctgttcctcgactactcgaaaaacctgatcaccgagcaaagccgcgatctgctggtcaatctggccaatgaagtgggcctgcaggacgccatcaagtcgatgttcagcggtgagatcatcaacgcctccgaaggccgtccggtgctgcacaccgccttgcgccggcctgtaggtgacaaactcagcgtcaacggcgtgaacgtcatgccggaagtgcacaaggtgctcaaccagattaccgaactggttggtcgcattcacgatggcctgtggcgcggctacagcgaaaagccgatcaccgacgtggtcaacattggcattggcggttcgttcctcggccccgagctggtttccgaagcgctgctaccctacgcccagcgcggcgtgcgctgccactacctggccaatatcgacggcagcgagttccacgagctgtcggccaacctgcgcgccgaaaccaccctgttcatcgtctcatcgaagtcgttcaacaccctcgagacgctgaaaaacgccatggccgcgcgtacctggtacctggcccaaggcggctcggaagccgagctgtaccgccacttcattgccgtatccagcaacaaggccgctgctgtagcgttcggtatccgcgaagaaaacatcttcccaatgtgggactgggtgggcgggcgctactcgctgtggtcggccatcggcctgccgatcgccctggccatcggcactgccaacttcaaggaactgctgtccggcgcctacaccatggaccagcacttccagaccgcaccgttcgacaagaacatgccggtgctactggccctgctgggcgtgtggtatggcaacttctgggacgcaaacagccacgcgatcctgccgtacgaccactacctgcgcaacatcaccaagcacctgcagcagctggacatggaatccaacggcaagagcgtgctgcaagacggtaccccggtgaagaccgacaccgggccggtgatctggggcggcgtgggctgcaacggccagcatgcctaccaccagttgctgcaccagggcacccagttgattccggccgatttcatcgtgccggtggtgagcttcaacccggtggccgaccaccaccagtggctgtacgccaactgcctgtcgcagagccaggcgctgatgctgggcaaaacccgcgaggaagccgaagccgaattgcgcgctaaaggcctcaacgaagcagacatcgaaaagctggccccgcacaaggtgatcccgggtaaccgcccgagcaacacgttggtggtcgagcgcatcagcccgcgccggctgggtgcgctggtggccatgtacgagcacaaggtgttcgtacagagcgttatctggggtatcaacgccttcgatcagtggggcgtcgagctgggcaaggagctgggcaagggcgtttaccagcgcttggtcggtagcctggaagacagcgccgaagacggttccacccaaggcctgatcaactacttccgcggccgtcaccgcggt

SEQ ID NO: 31902 - DNA, 1932 bp, Pseudomonas putida
atgttcgatatccgcaaatacccccaggccctggccgtcagccagtccgccgccctcacccccgaagactaccgccgcctctaccgccagtcggtcgaagacccagacaccttctgggccgaacaggccaaacgcctggactggatcaaaccgtggtcaagcgtgcagcaatgcgacctgcataccggcaaggcccgctggttcgacggtgcgcaactcaacgtcagctacaactgcatcgaccgtcacctggcccagcgcggcgagcaaacggccctgctgtgggaaggcgacgatcccaaggactccaaggccatcacctaccgcgaactgcaccgtcaggtctgccgcctggccaatgcaatgaaagcgcgcggtgtgaagaaaggcgaccgggtaagcatctacatgccaatgattcccgaggccgccttcgccatgctcgcctgcacccgcatcggcgccatccactcggtggtgttcggcggtttctcccccgatgccttgcgagaccgcattctcgatgccgactgccgcaccgtgatcaccgccgatgaaggcgtgcgtggcggcaaacgcatcccgctgaaacagaacgtcgacaaggccctggccagctgcccagcggtcagtagcgtgttggtggtgcgccgcactggcggcgatgttgcctggaccgagggccgcgacctctggtatcacgaagcgacgaaggatgccggcgacgactgccccccagaaccgatggaggccgaagacccgctgttcatcctctacacctccggcagcaccggcaaacccaaaggggtgctgcataccaccggcggctacctgctgcaggcaacgatgaccttcaaggtggtgttcgattatcgtgacggcgaggtgttctggtgcaccgccgatgtcggctgggtgaccggccacagctacatcgtctatggcccgctggccaatggcgcaatctcgctgatgttcgaaggcgtgcccaactaccccgatacctcgcgcttctggcaggtggtggacaagcaccaggtgaacatcttctacaccgccccgaccgccctgcgcgcactgatgcgtgagggctccgcgccactgcagagcacctcacgcaaaagcctgcgtctgctgggcagcgtcggcgagccgatcaacccggaagcctgggaatggtacttcgaggaggtcgggcaaaagcgctgcccgattgtggatacctggtggcagaccgaaaccggcggcatcatgctcaccccactgcccggcacacagtcactcaaacccggctgcgccacccagccgatgttcggcgtgcaaccggtgctgctggacgaaaaaggcaaactgatcgaaggccccggcgccggcgtgctggcgatcaaagccagctggcccgggcagatccgcagcgtctacggcgaccaccagcggatggtcgacacctacttcaagcccctgcccggctactacttcactggcgacggtgcccgtcgcgatgccgacggcgactactggatcaccgggcgcatcgacgatgtgatcaacgtgtccgggcaccgcatcggcaccgctgaagtggaaagtgcactggtgctgcatgacagcgtggccgaagccgcggtggtcggctacccccacgacctcaagggccaaggcgtctacgccttcgtcacgaccatgaatggcgtgacaccagatgacacgctcaaggccgagctgctggccctggtcagcaaggaaatcggcagcttcgccaagcctgagctgattcagtgggcgccagcgctacccaagacgcgctcaggcaagatcatgcggcgtatactgcgcaaaatcgcctgcaatgagctggaaaacctgggcgatacctcgaccctggccgacccgagcgtggtacagggcctgatcgacaaacgcctcaaccag

SEQ ID NO: 31903 - DNA, 411 bp, Pseudomonas putida
atgtccgaattgcctgcacgccctggccgcctgaatggcttgcgccacatcgccctgctggtgcctaacctggaagagtgtgaacgcttctacgtcgatgtgctgggcatggaagtgctgaatcgcgccaatgaggacctggtgtacctcacttgcggtaacgacaacctgtcattggggcgtggggcaggggcggccaacgggttgcagaccctggatcactacgggttcattgtcgacagcgtggaggagttggaagcctggtaccagtacttcaaggctcatggcgtgaccttgctcgaccggccgttcaaccatggtgacggcgcacgcagcttccacctgctggacccggccgggaacaaggttcaaccgctgtatcacccggcggtgtcggggcagcggttggtt

SEQ ID NO: 31904 - DNA, 918 bp, Pseudomonas putida
gtggaaccgccaggccgcacttgcatctaccttctggccagcctgaggaaggaacagcacatgccgctacgcctgcccaaagccctgcttatcgccatcggcttcgccctggccttggccgcctgcagccgcatcgacctggcctatcgcaacctcgaccgcctggtgccgtggtcgctgagcgactacctggacatgaaccgcgagcaaagggcgctgctggatgatcggttgcgcgagcacctggcctggcattgcaagactcaactgcccggctacctcgactggctcgaccggctacgtgacatggtcgccgacgaccaggtcaccgaccaggccctgcagcaaagcacccgcgaggtccgtgaggcaattggtcgattggccgaggaaatcaccccttcggccaccgaactgctgcgcggcatgagcgacaaccaggtagcgcagatgcgtgaggccttccgcgaagacatcagtgaacggcagaagcagtatgtggatacgccattgcccaagcagatggcccgccgtagcgaacgcatggaaaaacgcctgacgccatggtttggcgagttgacggcggtacagaagcaacgcatccaggcctggtctcaagcgctgggtgaccagaaccgtgaatggatcgccaaccgtgcccactggcagcagcaactgctgttggcaatgaaccagcgcaacgactccagcttcgaaccgcgcctggcgaccttgttgcaacgcaaggagagtttgtggacacccgaataccgggcggcgtatcggaatagcgagcagcaggcacgcagcctgctggtggacctggtgcggcagagcaccccgcagcaacggaggttcctgcaggaacggttgggcaaggtgcgtacccatttgagcgagatgaagtgtttgaaggcg

SEQ ID NO: 31905 - DNA, 2538 bp, Pseudomonas putida
atgacgcaagtcacggtgaaagaactggcccaagaggtcgaggcaccggtagagcgcctgctgcagcagatgcgtgaggcaggtctgccgcacaccgacgccggtcaggtagtgaccgacaatgagaagcagaccttgctgactcatttgaaaagcagccacaagagcaaggcggaagagccgcgcaagattaccttgcagcgcaaaaccaccagcaccctgcgtgtcgccggtagcaagagcatcagcgtagaagtacgcaagaagaaagttttcgttcagcgcagccctgaagaaatccaggctgagcagaagcgtgagctggatgagcgccgcgcggctgaaaatgccgctcgcgacaaggtcgaggccgaagttcgccagcgcaacgaagagcaggctcgccgtcaggccgccggctccgcagccgccgcccctgcgcctgctgccaagccagagccggctcctgccgctgctccggtcgctgctccggccccggtagtcgcagacgccccggcctctgaagacgccgcagcccgtgctgccgagcgcaagaaagacgagacccgtcgcaacgaaagccgtacccgtgatgacgaccgtcgtcgtggcgaagcgcctcgtgtgtcgatcaaggtcaaggtcaaggagaaggaaaaggcgccgactccgcgtgctgctccgcgcactaccgacgaagagagcgatggcgctcgtcgtggtcgtggtggcaagagcaagctgaaaaagcgtaatcagcacggcttccagaacccgactggccccgtcatccgtgacgtgaccatcggcgagaccatcacggtctccgagctggccaaccagatgtccgtcaagggcgctgaagtggtcaagttcatgttcaagatggggaccccggttaccatcaaccaggtgctcgaccaggaaaccgctcagctgatcgccgaagagctgggccacaaggtcacgctggtcagcgataccgccctggaagactccctggccgaatcgctgaagttcgaaggccagaccgagtcgcgtgcgccggtggttaccgtcatgggtcacgttgaccatggtaagacctcgctgctcgactacatccgtcgtgccaaggttgccgctggcgaagccggtggtatcacccagcacatcggtgcctaccacgtggaaaccgaccgcggcatggtcaccttcctcgataccccaggtcacgctgcgtttacccagatgcgtgcccgtggtgccaaggcgaccgacattgtcatcctggtggtggcggcggacgacggtgtgatgccacaaacccgcgaagccgttcagcatgccaaggcagccggtgttccgctggtcgttgcggtgaacaagatcgacaagccaggtgctgacctcgatcgcatccgtaacgagctgtccgtagaaggcgttacctctgaggactggggtggtgacacgccgttcgtcaaggtttcggcgaagatgggtaccggtgtcgacgagctgctcgaagccgttctgctgcaggccgagatcctcgaactgaccgctaccccaaccgcgccaggtcgtggtgtggtcgtcgaatcgcgcctggacaagggccgtggcccggtcgcgaccatcctggttcaggacggtaccctgcgtcagggcgacatggtcctgtgcggttccaactatggccgcgttcgcgccatgctcgacgagaacggcaagcctgtgaaggaagctggcccgtcgatcccggtcgaaatcctcggcctggacggtactccggaagccggtgacgagctgtccgtggttgccgacgagaagaaagcccgtgaagttgccctgttccgtcaaggcaagtatcgcgaggtcaagctggcccgtgctcacgccggcaagctggaaaacatcttcgagaccatgggtcaggaagagaagaaaaccctcaacatcgttctcaagaccgatgtgcgtggttctctggaagcgctgcagggttcgctcggcggcctgggcaacgacgaagtgcaagtgcgcgtgattggtggtggcgtcggtggtatcaccgagagcgatgccaacctggcgctggcttcgaatgcagtactgttcggcttcaacgtgcgtgccgatgccggtgcgcgcaagatcgtcgagcaggaaggtctggatatgcgttattacaacgtgatctacgacatcatcgaagacgtcaagaaggccctgaccggcatgctcggcagcgatgttcgcgagaacatcctgggtgtcgccgaagtacgtgacgtgttccgttcgccgaagttcggcgccatcgctggctgtatggtcatcgagggtaccgtgtaccgcaaccgtccgattcgcgtactgcgtgatgacgttgtgatcttcgaaggcgagctggaatcgctgcgtcgcttcaaggacgatgcttccgaagtccgttcgggcatggagtgcggtattggcgtcaagagctacaacgacgtcaaggtcggcgacaagatcgaagtcttcgagaaagtccaggtggctcgtaccctt

SEQ ID NO: 31906 - DNA, 1341 bp, Pseudomonas putida
gtggaaatcaaccgccacaccggtagctacgagactttccgtcgctggaccgtggtcgacgaagccgatcttgatgatccggcgatcgagacctggctggacaagatcaaggacacccaccctgaagccaaggtcggtgacgtgatcgaagagaagatcgagtccatcgagttcggtcgtattgccgcccagaccgccaagcaggtcatcgtgcagaaggtccgtgaggccgagcgtgcccaggtggtcgatgcctaccgtgagcgcgttggcgagattatctccggtaccgtaaaaaaggttacccgcgacaacgtcatcgttgacctgggcaacaacgccgaggccttgctggctcgcgaagacatcattccgcgcgaaaccttccgtgttggtgtgcgcctgcgtgcgctgctcaaggaaattcgcaccgaaaaccgtggcccacagctgatcctgtcgcgcaccgcgccgcagatgctgatcgagcttttccgcattgaagtgccggaaattgccgagggcctcatcgaagtcatggctgcttcccgtgatccgggttcgcgagccaagattgccgtccgctccaaggacaagcgtatcgacccgcaaggtgcctgcatcggcatgcgtggttcgcgcgtccaggccgtatccggggagctgggtggtgagcgtgtggatatcgtcctttgggacgataacccggcgcagttcgtcatcaacgccatgtcgccggctgaagtcgcggcgatcatcgttgatgaagatgcccatgccatggacatcgccgtcgccgaggacaacctggcccaggccattggccgtggcggtcagaacgttcgcctggccagtcagttgaccggctggaccctgaacgtgatgaccgagaaggacatccaggccaagcaacaggccgaaaccggtgacatcctgcgcaatttcatcgaggaactggaagtcgacgaggagctggcccaagtgctggtcgacgaaggcttcaccagccttgaagaaattgcctacgtaccgttggaagaaatgctcaacatcgatggctttgacgaagacatcgtcaatgagctccgcgctcgagccaaggaccgtttgttgaccaaggccatcgctaccgaagaaaaactggcagacgcccacccggccgaagacctgctctcccttgagggcatggacaaagacctggcggctgaactggcggtgcgcggcgtggttaaccgcgaagacctggccgagcagtcgatcgacgatctgctcgacatcgacggcatcgacgaagagcgtgccggcaagttgatcatggccgcccgagcccactggttcgag

SEQ ID NO: 31907 - DNA, 783 bp, Pseudomonas putida
atgaagaagctcgcactgcttggcgccctggcgctgtctgtgttttccctggtgtcgcaggctgctgaaaaaccgctgaaaatcggcatcgaagctgcctacccacccttcgccttcaagcaacctgacggcagcattgccggctttgactacgatatcggcaacgcgctgtgcgaagagatgaaaaccaagtgtacctgggtcgagcaggagttcgacggcctgatcccggcgctgaaagtgcgcaagatcgacgccatcctgtcgtccatgtcgatcaccgatgaccgcaagaagtcggtcgacttcaccaagcgctactacctgactccggcgcgcctggtcatgaaggacggcaccaccgtcagcgacagcctggacgaactgaaaggcaagaagatcggcgtgcagcgcggctccattcacgaccgcttcgccaaggaagtgctgggcgccaagggtgccaccgtggtgccttacggcacccagaacgaaatctacctggacgttgcagctggccgcctcgacggcactgtggctgacgccaccctgctggaagatggcttcctcaagactgacgccggcaagggcttcgcgttcgtaggcccggccttcaccgacgccaagtacttcggtgacggtatcggtattgccgtacgcaagggtgacaaggccaatgtcgaccgcatcaacgcggcgatcgacgccattcgtgccaacggcaagtacaaagaaatcgaaagcaagtacttcaatttcgacatctacggtccagactcgaag

SEQ ID NO: 31908 - DNA, 1338 bp, Pseudomonas putida
atgagcagaaaatactttggtaccgacggcattcgtggccgcgtcggcgaatacccgatcacgcctgacttcatgctgaagcttggctgggcggccggcatggccttccgcaagcaaggccattgccgcgtgctggtgggcaaggacacgcgtatctccggctacatgttcgagtccgcactcgaagccggcctgtccgcggcaggtgccgatgtgatgctgctcgggccgatgccgacaccggccatcgcttacctcacgcgtaccttccacgccgaagccggcatcgtcatcagtgcctcgcacaacccgcacgatgacaacggcatcaagttcttctcgggccagggcaccaagctgccggacgaggtcgagctgatgatcgaagagctgctcgaccaaccgatgaccgttgtcgagtcgggcaagctgggcaaggtttcgcgtatcaacgatgccgccggccgctacatcgaattctgcaagagcagtgtgccgagcagcaccagcttcgaaggcctcaagctggtggtcgactgcgcccatggtgctacctacaaggttgcgcccagcgtattccgtgagctgggtgccgacgtgaccgtgctgcatgcgcaaccggacggcctgaacatcaacgaaggttgcggctcgacacacatcgaatcgctgcaggccgctgtactggtcggacatgccgatctcggcattgcctttgacggtgacggcgatcgcgtgctgatggtcgaccacacgggcgccatcgtcgacggtgacgagctgctgttcatcattgctcgcgacctgcaggaacatggcaagctgcaaggcggggtggtcggtacgctgatgagtaacctgggcctggagctggcgctcaaggacctggacatcccgtttgtgcgagccaaggtcggcgaccgttacgtcatggccgagctgttggagcgtgaatggctggtcggcggtgaaaactccggtcacgtcgtgtgctgcaaccacaccacaaccggcgacgcgatcattgccgcgctgcaggtgctgatggcgctcaagcgccggggcgaaaccctggcccaggcccgtcaggccctgcgcaagtgcccgcaggtgctgatcaatgtgcgctttggcgccagcaaggtcgacccgctggagcaccccgccgtcaaggaagccagtgccaaggttaccgaagcgctggcggggcggggtcgtgtgctgttgcgcaagtccggtaccgagccgttggtgcgggtcatggttgagggcgaggacgaaagccaggtgcgggcccatgctgaagcgctggccaaactggtcggcgaagtttgtgtc

SEQ ID NO: 31909 - DNA, 1176 bp, Pseudomonas putida
atgaacgacgtggtgatcgtcgccgcaacccgtaccgccatcggcagcttccagggcgccttggccacagtgcctgcggttgacctcggcgccgccgtgatcaagcaactgctgaaacaaaccgggctggacccggcgcaggtcgacgaagtcatcctcggccaagtgctcactgccggtgccggtcagaacccggcacgccaggcagcgatcaaggctggcctacccttcagcgtaccggccctgaccctgaacaaggtctgcggctcgggcctcaaggccctgcaccttgccgcccaggcgatccgctgtggcgatgccgaggtggtgattgccggtggccaggagaacatgagccttgccccctacgtgatgccctcggcccgcaccggccagcgcatgggccatggccaactgatcgatagcatgatcacggacggcctgtgggatgccttcaatgactaccacatgggcatcactgccgaaaacctggtggacaagtacggcctcagccgtgagcagcaggatgcctttgctgccgaatcgcagcgcaaggcagtggcagcgatcgaggccggccgtttcgacgctgaaatcacccccatcgtgctgccgcagaaaaagggcgagcccaaggtttttgcccgtgacgagcaaccacgcccggacaccaccgccgagtccctggccaaactgcgcccggccttcaagaaggacggcagcgtcaccgcaggcaatgcctccagcctgaacgacggcgccgccgccgtgcttttgatgagcgcagcgaaggccgaggcgttgggcctgccggtgctggcgaagatcgccgcctacgccagtgccggggtagaccccgcgatcatgggcattggtccggtttcggcgacccagcgttgcctggacaaggccggttggcaactggccgaactggacctgatcgaagccaacgaagcctttgccgcccaggcgctggccgtgggcaatgcgctggcatgggatgccgcgcgggttaacgtcaatggaggagcgattgccctgggccacccgattggtgcttccgggtgcagggtgctggtgaccctgttgcacgagatgatcaaacgggatgtcaagaaaggcctggcgaccttgtgcattggtggtggacaaggggtggcgctggccatcgagcgc

SEQ ID NO: 31910 - DNA, 1911 bp, Pseudomonas putida
ttgaacgacatggcaaagaatctgatcctgtggttgatcatcgcagctgtcctggtgacagtgatgaacaacttctccagccctaacgagccgcagaccctcaactactccgacttcatccagcaggtcaaggatggcaaggtcgagcgtgtgaccgtcgatggctacatcattactggcaagcgcaccgatggcgacaacttcaagactgtgcgcccggccatcaccgacaatggcctgatcggcgatctggtcgacaaccacgtggtcgtcgaaggcaagcagcctgagcaacagagcatctggacgcagttgctggtggcgagcttcccgatcctggtgatcattgccgtgttcatgttcttcatgcgccagatgcaaggtggcgcgggcggcaagggcgggccgatgagcttcggcaagagcaaggcgcgcctgctgtccgaagaccaggtcaagaccacgctggctgacgttgcgggctgcgacgaggccaaggaagaggttggcgagctggtcgagttcctgcgcgatccgggcaagttccagcgcctgggtggccgtatcccgcgcggtgtgctgatggtcggcccacccggtaccggtaagaccctgctggccaaggccatcgcgggcgaagcgaaagtaccgttcttcaccatttccggttcggacttcgtggaaatgttcgtgggtgtcggtgccagccgtgtgcgcgacatgttcgagcaggccaagaagcacgccccgtgcatcatcttcatcgacgaaatcgacgccgttggtcgccatcgtggcgccggcatgggcggcggtcacgacgagcgtgagcaaaccctcaaccagttgctggtggagatggacggcttcgagatgaatgatggcatcatcgtcatcgccgccaccaaccgtccggatgtgctcgaccctgcgctgctgcgccccggccgcttcgaccgccaggtggtggttggcctgccggacatccgtggtcgcgagcagatcctcaaggtgcacatgcgcaaggtgccgattggcgagaacgtcaacccggcggtcatcgcgcgtggtaccccaggcttctccggcgccgacctggccaacctggtcaacgaggcttcgctgtttgccgcgcgttccaacaagcgcctggtcgaaatgaaagagttcgagctggccaaggacaagatcatgatgggcgccgagcgcaagaccatggtcatgtccgaaaaggaaaagagaaacactgcctatcacgaggctggccacgccattgtcggtcgcctggtgcctgagcacgacccggtctacaaggtttcgatcatcccgcgtggtcgtgccttgggtgtgaccatgttcctgccggaagaagaccgctacagcctctccaagcgtgcgctgatcagccagatctgctcgctgtatggcggccgtatcgccgaggagatgaccttgggcttcgatggcgtgaccactggcgcgtccaacgacatcatgcgcgccagccagctcgctcgtaacatggtgaccaaatggggcctgtccgagaagctcggcccgctgatgtatgcagaggaagagggcgaggtgttcctcggccgcagtgccggtagccagcatgccagcgtgtccggcgagactgccaaattgatcgactccgaggtgcgcagcatcatcgatcagtgctacgccactgccaagcagttgctgatcgacaaccgcgacaagctcgaggcgatgaccgaagcgctgatgaagtacgagaccatcgatgccgatcagattgacgacatcatggctgggcgcacaccacgtgagccacgtgattgggacgatgacaagcactcgggcacgcctgcggcccaggatgagcgtccggaatcgccaatcggcggcccagcggctgaacac

SEQ ID NO: 31911 - DNA, 975 bp, Pseudomonas putida
gtgcagatgcccattcccgtaaccgtcctcacaggcttcctcggtgccggcaagaccaccttgctcaagtacatgctcaaggccgagcatggcctgaagctcgccgtgatcgaaaacgaattcagcgaggccggcatcgacagccaactgctgggggaacagccggtgcaggtcatgaccttggccaacggttgtgtatgctgcagcatccatggcgacctgactcgcgcgctgtacctgctgcttgaacgcctggatgccggggaaatcgccttcgatcgcctggtgatcgaatgcaccggcctggccgacccggcgccggtcgcgcaaacgttcttcatcgacgaagagctgcgtgagcgctacatcctcgacggcatcatcacccttgtcgatgccgcgcatgccgaactgcacctgacccagaccatcgctcaggcgcaggtcggctttgccgatcgtctgctgctgagcaagaccgacctggtcgagccggctgcggttgaagccctgcgcgaacgcctggcccgcatcaatagcagggctgcgatccgtgtggtcgaacacggctgcatcgacctggctgagttactggatgtgcgaggtttcaacctcaaccctgaccttggggtgaacctgaaaccgatgttgcgaccggtgctcaagcctgccaccccggaccgcatttccacgatggtgctgcgtaccgaagccccgctggatatcgaccgcctcagcagcttcatgaacgagctgctggaaactcacggcaaacagctgctgcgctacaagggcgtgctgaacattgccggcgaggagcgcaagctggtgtttcagggcgtgctcaagctttatggcttcgactgggacgccgagtgggccgcaggcgaagcgcgcgagagcgtgatggtgttcattgccgatgaactgcccgaggctacgattcgggctggcttcgaggcaatggctgcgggc

SEQ ID NO: 31912 - DNA, 195 bp, Pseudomonas putida
atgttcaacgacttgggtcgactgggcaaatacctggggcaggcagcccgcctgatggtcggcatgcccgactacgacaactatgtcgaacacatgcagaaaacgcatccggacaagccggtgatgagctacgaggcattcttccgcgaacgtcaggaagcacgttacggtggcaagtccgggcccaagtgctgt

SEQ ID NO: 31913 - DNA, 2064 bp, Pseudomonas putida
atgaacaacaataatagcctgctacgccatattccgtggctggcgctggcagtcataggcgcctgcgcactgggtgtggttgccctgcgtcgcggcgaggcgatcaacgccttgtggatcgtggtcgcggcagtggccatctacctggtcgcctatcgttactacagcctgttcatcgccaccaaggtgatgcaactcgacccgcgccgtgccaccccggcggtgctcaacaacgacggcctggactacgtcccgaccaacaaacacattcttttcggtcaccacttcgctgccatcgccggcgcaggccccttggtcgggccggtactcgccgcgcaaatgggctacctgcccggcacgctctggctgatcgccggcgtggtgctggccggtgcggtgcaggacttcatggtcctgttcctgtctacccgccgcaacgggcgctcgctgggcgacatggtgcgcgaggaaatgggcagaatcccgggcaccatcgccctgttcggctgtttcctgatcatgatcatcatcctcgcggtgctggcgttgatcgtggtcaaggccctggccgaaagcccatggggcatgttcacggtgatggcgaccatcccgatcgcgatgttcatgggcatctacatgcgctacatccgtccgggccgtattggcgaaatctcggtcgttggtgtggtactgctgctggcctcgatctggctgggcggcgtgatcgctgcggacccggtgtggggcccggcgttcacgttcaccggcgtgcagatcacctggatgctggtgggctacggttttgtcgccgccgtgctgccagtgtggctggtgctggcgccgcgtgactacctgtcgaccttcctcaagatcggcacgatccttggcctggccatcggtatcctgatcatcgcacctgagctgaaaatgccggcgctgacccagttcaccgacggtacgggcccggtgtggaagggtaccctgttcccgttcctgttcatcaccattgcctgtggtgcggtgtccggcttccacgcgctgatttcctcggggaccacccccaagctgctggataacgaaaccaacgcccgctatatcggctacggcggcatgctgatggaatcgttcgtcgccatcatggccatggttgcggcctcggtgatcgaaccgggcgtgtacttcgccatgaacagcccggcggcagtggtcggtaccgatgtcgcgtcggtggcgcagactgtcagcagttggggcttcctgattacacccgagcagctcgaagccgttgcccgtgacatcggcgagcacaccatcctggcccgtgccggcggtgcgccaaccctggcggtcggtatcgcgcagatcctgcaccaggtgttgccaggtgaaaacaccatggccttctggtaccacttcgcgatcctgttcgaggcgctgttcattctcacggcggtagacgctggtacccgtgccgggcgcttcatgctgcaggacctgctgggcagcttcgtgcctgcgctcaaacgcaccgaatcgtggggggcaaacctgcttgccactgctggctgcgtggcgctctggggctatctgctgtaccagggcgtcatcgacccgctgggtggcatcaacaccctgtggccgctgtttggtatctccaaccagatgctggccggtatcgccttgatgctcggtactgtggtgctgatcaagatgaagcgtcagcgctacatctgggtcaccctgctgccggccgtatggctgctgatctgcaccacggctgcaggcctgatcaagctgttcgaccccaacccggctgtcggcttcctggccttggccaagaagtacagcactgcgctggacgccggccaggtactggccccggccaaggacatcgggcagatgcagcacgtgatcttcaacgcctacaccaacgcgggcctgacgatcttgttcctgctggtggtcttcagcatcctgttcttcgccatcaaggtcggctacgccgccttgggccgcaaagaacgcagcgacaaggaaaccccgttccaggcgttgcctgacgcg

SEQ ID NO: 31914 - DNA, 1029 bp, Pseudomonas putida
atgaccggctaccaggaaatccttacagacccttcctacgcgcagcaaatcgttaccctgacctacccgcacatcggcaacaccggtactaccccggaagacgccgagtcgagccgcgtctggtccgctggcctggtcatccgtgacctgccgctgctggccagcaactggcgtaacacccagtcgctgcctgagtacctcaaggccaacaacgtcgtcgccatcgccggcatcgacacccgtcgcctgacccgtatcctgcgtgaaaagggcgcccagaacggctgcattctggcgggtgacaacatcagcgaagaagctgccatcgctgctgcccgcggcttcccgggcctgaagggcatggacctggccaaggtcgtctccaccaaggaacgttacgagtggcgctccagcgtgtgggagctgaaaaccgacagccacccgaccatcgacgctgccgacctgccgtaccacgtggttgccttcgactatggcgtcaagctgaacatcctgcgcatgctggtggcccgcggctgccgcgtgaccgtggtaccagcccagaccccggccagcgaagtactggcactcaacccggacggcgtgttcctgtccaacggccctggtgaccctgagccgtgcgactacgcgatccaggcgatcaaggaaatcctcgaaaccgagatcccggtattcggcatctgcctcggccaccagctgctggccctggcgtccggcgccaagaccgtgaaaatgggccacggccaccacggtgccaaccacccggtccaggacctggatactggtgtggtcatgatcaccagccagaaccacggtttcgccgttgacgaggcgaccctgccgggcaacgttcgcgccattcacaagtcgctgttcgacggcaccctgcagggtatcgagcgtaccgacaagagcgcgttcagcttccagggccaccctgaagcgagcccgggcccgaccgacgtcgcgcctctgttcgatcgtttcaccgatgccatggccaagcgccgc

SEQ ID NO: 31915 - DNA, 1368 bp, Pseudomonas putida
atggccaaggccaagcgcttgtatggctgcaccgaatgcggcgcgaccttccccaaatgggccggccagtgcggcgaatgcggggcctggaacaccctggtcgaaaccatgatcgaaagcggcggcgctgctgcacccagcagcggtcgcgctggctggacagggcagcaggcgcagatcaagaccctggccgaagtcagtgtcgaggaaatcccgcgtttcacgaccagcagcaccgaactggaccgcgtgctgggtggcggcctggtggatggctcggtggtgctgattggcggtgaccccggcatcggcaagtcgaccattttgctacagaccttgtgcaacattgccgtgggcatgccggccctgtatgtcacgggggaggagtcgcagcagcaggtggccatgcgctcgcggcggctgggcctaccccaggaccaactcaaggtgatgaccgaaacctgcatcgagacgatcattgccacggcgcgggtcgagaagccgcgggtaatggtgatcgactcgatccagaccattttcaccgagcagttgcaatcggccccgggcggcgtggcccaggtgcgcgaaagcacagcgttgctggtgcgctatgccaagcaaagcggtacggcaatcttcctggtcggccacgtgaccaaggagggctcgctggctggcccaagggtgctggagcacatggtcgacacggtgctgtatttcgaaggtgagtccgatggccgcctgcgcttgctgcgggcggtcaagaatcgttttggcgcggtcaatgagctgggcgtgttcggcatgaccgatcgtggcctcaaggaggtatccaacccgtcggcgatcttcctcaaccgtacccaggaagaggtgccgggtagcgtggtgatggcaacctgggagggtacccggccaatgctggtcgaggtgcaggcgctggtcgacgatagccatctggccaacccgcggcgggtaaccttgggcctggaccagaaccgtctggccatgttgttggcggtgctccaccgccatggcggtatcccgacccatgaccaggatgtgtttctcaacgtggtcggcggggtgaaggtgctggaaacggcttcggacctggccctgctggcggcggtgatgtcgagcttgcgcaaccggccactggcccatggtttgctggtgtttggcgagatcggattgtcgggcgaggtacgcccggtacccagtggccaggagcgcttgaaggaagcggccaagcacggcttcaagcgtgccatcgtgcccaagggcaatgcgccgaaagaagcgcctgcggggttgcaggtgattgccgttacccggctggaacaggcgctggatgcattgttcgaa

SEQ ID NO: 31916 - DNA, 1122 bp, Pseudomonas putida
atgcccctgttgaccaccccctacgccgaactcgacctgatccgccagccggagcaggccaacgacccgttgcaggccttcgatgccgccgacgagtacctgcttgcgcagctacacgatcaggcacccgacgccaattgccgggtactggtgctcaatgacagcttcggtgccctggccgcaagccttgcaggccagctgcaggtggtcagcagcggtgactcgcacctggggcacctggccctggaaaagaacctggcgcgcaatggcctgccgttcgacagtgtgccgttcgtaccggccagcgaacactggcaaggcccgttcgaccgggtgctggtgcgtgtgcccaagaccctggcccttctggaagaacaactgatccgcctgcaaggccagttggcaccaggtgcgcaggtgattgcaggggcgatgatcaagcacctgccgcgcgcggccggcgacctgatggagaagtacatcggccccgtacaggcttcgctggcactgaaaaaggcccgtttgctgacagcaacggttgccgagcggccgctcgccaagtccccctaccccagctgctaccgcctcgacgcgccggcacttgacttggtcaaccacgccaacgtgttctgccgtgaaggcctggatatcgggacgcgggcgttcctcccgcatctaccacgcaacctcggccgtgcgcgggtggcagacctgggctgcggcaacggcgtgctcgcgatcgccagcgccctggccaacccggaggccgagtacaccctggtcgacgagtcgtacatggcagtgcaatcggcgcaggagaactggctggcagcgttgggcgagcgcccggcgaccttcctcgcggccgatggcctggccgggctggagaaacagtcgctggacgtggtgctgtgcaacccgccgttccaccaacagcaggtagtaggcgatttcctcgcctggcgcatgttccagcaggcgcgtgaagcgctggtggtaggtggggcgctgtacatcgtaggtaaccggcatctgggctatcacagcaagctggcgcggttgttccggggggtggagcaggtggcggcaacgcccaagttcgtcattctgaaagcccgcaag

SEQ ID NO: 31917 - DNA, 1401 bp, Pseudomonas putida
atgcagtttgcctttaccgtgtcgttccacatcctgttcccggccatcaccattggcctggccagctacctggcagtcctcgaaggcctatggctgcggacccacaaccaggtctaccgtgacctctatcacttctggtcaaagatcttcgccgtcaacttcggcatgggcgtcgtctccggcctggtcatggcctaccagttcggcaccaactggagccgcttctccgactttgccggcgccgtcaccggcccgctgctcacctacgaagtactgactgcgttcttcctcgaggccggtttcctgggcgtcatgttgtttggctggaaccgcgtcggccgtggtctgcacttcttctccacggtgatggtagcgctcggtacgctggtctctaccttctggattctcgcctccaacagctggatgcaaaccccgcaaggtcacgagatcatcgatggtcgggtggtgccggtggactggtttgcggtggtgttcaacccctccttcccctaccgcctgatgcacatggctactgccgcgttcgtgtccaccgcgttcttcgtcggtgcctcggcggcctggcacctgctgcgcgggcgtgacaacccggctgtacgcaagatgctgtcgatggccatgtggatggcattgatcgtcgccccgattcaggcagtgatcggcgatttccacggcctcaataccctcaagcaccagccggtgaaaattgctgcgatcgaaggccactgggagaacgtgcccggtgagccgactccactgatcctgttcggcattcccgacatggaggccgagactacccggttcaagatcgagattccggccctcggcagcctgatcctgactcacagcctggacaagcaggtgccggcgatgaaggagttcccgcccgaggaccggcctaattcgaccattgtgttctggtcgttccggatcatggtcgggcttggtttcctgatgatcttcgttggcctgtggagcctgtggttgcgcaaacgcggcacgctgtacagttcacgcccgttcctgcatgtggccctgtggatgggcccatctgggctggtcgcactgctggccggctggttcaccaccgaaattggccgccagccctgggtggtgtacggcctgatgcgcacggcggacggtgtttccaaccacagctacgctcagctcggcttcacccttgtggcgttcgtggtggtgtacttcgccctgtttggcaccggccttggctacatgatgcgcctggtgcgcaaagggccgcaaaccggtgagggtgacgagcacacaccgggaggcccaggccagaaacgcacgccggcacggcctttgtccgccgccgatgatggccgcgaggccacctctgccagcctgaacgaggggaac

SEQ ID NO: 31918 - DNA, 480 bp, Pseudomonas putida
atggctaagcaaaaaaaacatccgaccgggaccatcgcgcaaaacaagaaagcgcgacacgattacttcatcgaacacaagttcgaggccgggctggtcctgtccggctgggaagtaaaaagcctgcgagccggcaaggcgcacctgactgacagctacgtgctgctcaaggacggtgaggcctggctgttcggcagccacatcaccccgctgaccacggccagcacccacgtcatcgccgaccctacacgcacccgcaagctgctgctgaacaagcgcgagctcgagcgcgtggaagcggccgtggcgcaaaaaggctacacctgtgtggctttggcgctgtactggagcaagcacctgatcaagtgcgaaatcgcactgggcaagggcaagaaggaattcgacaagcgcgacaccatgcgcgaacgcgattccaaccgcgagctgcagcgggctgtgcggaacaagggcaaggaagag

SEQ ID NO: 31919 - DNA, 1143 bp, Pseudomonas putida
atgatcatttctgcctctaccgactatcgcgccgcggcccaacgcaagctgccccccttcctgttccactacgctgacggcggcgcctacgccgagcacaccctgcgccacaacgtctcggacctggccggcatcgccctgcgccagcgcgtgctgaacaacatgtccgagctcagcctggaaaccaagctgttcgacgaaaccctgagcatgccggtggccttggccccggtcggcctcaccggcatgtacgcccgccgtggcgaagtgcaggccgcacgcgcagcggcggcccatggcatcccgttcaccatgtcgactgtgtcggtgtgcccgatcgaagaagtggcacccgccatcaaccggccgatgtggttccagctgtatgtactcaaggaccgcggcttcatgcgcaatgccctggagcgcgccaaggccgccggcgtcaagaccctggtgttcaccgtggacatgcccgtacccggtgcccgctaccgcgacgcccactctggcatgagcggcaagaacggcccgctgcgccgcgtgctgcaagccatgacccaccccgagtgggcatgggatgtgggcgtgatgggccgcccgcatgacttgggcaacatctccaaataccgtggcaaccccaccggccttgccgactacatcggctggctgggcaacaacttcgacccgtccatttcctggaaagacctggagtggatccgcgagttctgggacggcccgatgatcatcaagggcattctcgatgccgatgacgcccgcgatgcggtcaagttcggtgccgacggtatcgtggtgtccaaccacggcggccgccagctcgacggcgtgctgtccagcgcccgtgccctgccggccattgccgacgcggtcaaaggcgacctgaagattctggccgactcgggcattcgcagcggcctggacgtggtgcgcatgatcgccctgggtgccgacaccgtactgatcggccgcgccttcctttacgcccttgccgtgcatggccaggccggcgtgaaaaacctgcttgagctgttcgaaaaggaaatgcgcgtggccatggtgctgaccggtgccaagtcgatcagcgagatcacccgcgactcgctggtacgcgaactgggcgcc

SEQ ID NO: 31920 - DNA, 369 bp, Pseudomonas putida
atgagctccacctcttctgccgccgctaccgcgcgcctcgaccgcatcctggccgatgccaagcgcgacaaggaaatgggctaccgcgacaaggccctgagaatgtacccgcacgtgtgcggtcgctgcgcccgcgagttcgctggcaagcgcctgagcgagctgaccgtgcatcaccgtgaccacaaccacgacaacaatcctcaggacggctccaactgggagctgctgtgcctgtactgccacgacaacgagcactcgcgctacaccgaccagcagtacttcagcgaaggctccaccagcaccccgagcattgccaaggctacgcacaacccgtttgccgggctggcgggcatgctgaagaaagac

SEQ ID NO: 31921 - DNA, 1467 bp, Pseudomonas putida
atgtccatcagctccaccatcaagtccatccaggacatcatgcgcaaagacgtcggcgtcgatggcgacgcccagcgcattggccagctggtctggctgctgttcctcaagatcttcgatgaccgcgagctggaatgggaactgatggacgacaactacaagtcgcccatccccgacagctgccgctggcgcacctgggcggccgacccggaaggcatgaccggcgatgcgctgaaggactttatcgacaacaacctgttcccgcagctgcagaacctgcacgaatacagcaacacaccctcggcctttgtggtgcgcagcgtgtttgaagacgcctacaactacatgaaatccggccagctgctgcgccaggtgatcaacaagattcaggaaggcgtggacttcaacagggcccaggaacgccacgagttcggcaacctctatgaacaattgctgcgcgacctgcagaacgccggcaacgccggtgagttctacacacctcgaccagtcaccgaatttatggtgcgcatggttgatcccaagctggctgaaaaggtcatggacccggcctgcggcaccggcggctttctcacctgcgccatcgagcacaagcgcagacgctatgtaaaaaccgccgaagacgaacgcaccttgcaggccagcatttttggcgtggagaaaaaaccgctgccgcacctgctggccaccaccaacatgatcctgcatggcatcgaagtgcccagccagatccgtcacgacaacaccctgagcaaaccgctgatcagctggggcccaagcgagcgcgtgcattgtatcgtcgccaacccgccgttcggcggcatggaagaagacggtatcgaaacaaattttcctgccgctttccgcacccgggaaaccgccgatttgttcttggtattgattatgcagctgctcaaagatggtggccgcgccgcagtggtactgcccgatggcttcctttttggcgaaggcatcaaaagccgcatcaaggaaaagctgctcaccgagtgtaacctgcacaccatcgttcgcttgcccaatggcgtgttcaacccctacaccggcatcaagaccaacctgctgttcttcaccaaaggcacaccgaccaaacaggtgtggttctacgagcaccaatacccggcaggcgttaaaaactactcgaaaacccgccccatgcgcatcgaagagtttgccgtggaagaagcctggtggggcagcgaggccgatggctttgctgctcgcgcggagaacgcatttgcctggcaagtcagcgtcgaagagctgcaagcgcgcaactggaacctggactgcaaaaacccgcataccggcgagcaggtcagccacgacccggacgaactactgcgcaactacgccagcgtgcaagacgaaatcagcgatctacgcgatcagcttaaagcggtattggccgaagccctgaggcgcaaggta

SEQ ID NO: 31922 - DNA, 1641 bp, Pseudomonas putida
atggccaaggccgccgatgtcgttgtgcaatgcctggaaaacgaaggtgtcgagtatgtattcggcattcccggtgaggaaaacctcgacctgctcgaatccctgcgcaagtcgaagatcaagctggtactgacccgtcacgagcagtccgcaggtttcatggctgccacctacggtcgcctgaccggcaagaccggcgtcagcctgtcgaccctcggccctggtgccaccaacctggtgaccgccagcgcctacgcctacctgggcggcatgccgatgatgatgatcaccgggcagaagccgatcaagaagtccaagcagggtcgcttccagatcattgacgtgtgcggcatgatggaccccatcaccaagtacacccaccagttcgcctcggccgacaacatcccggcccgcatgcgcgaagccttccgcctggccgaagaagaaaagccgggtgcggtgcacctggagctaccggaagacatcgccgccgagcagaccgacgcgctgccgatcccgcgcagcctgcaccgccgcccgctggccgagcacgtggccattgaagctgccgtcgagaaactgcagaacgcgcgtaatccgatcctggtgatcggtgccggtgccaaccgcaagatgaccgccaaggtcctcaagcagctgatcgacaagaccggcatcccgttcatcaccacccagatgggtaaaggcgtggtcgacgagcgccacccgcgcttcctcggcaacgctgcgctgtcgtcgggcgacttcgttcaccgcgccgtcgaagccgccgacctgatcatcaacatcggccacgatgtgatcgagaagccgccgttcttcatggtccgtggcggcaccgaagtcatccacatcaacttccgctctgccgaagtcgatgccgtgtacttcccgcaagtagaagtgatcggcgacatcgccaacgccgtgtggcagatcagtgaagcactgaacgacacgtcgcactgggacttcacccgcctgatggccatccgtgaagccaacgaagcacagatcgccgaaggcgccgacgacgaccgcttcccggtctacccacagcgcatggtggctgacatccgtcgtgtactgccgtccgaaggcatcgtcgccctggacaacggcatctacaagatctggttcgcccgcaactacaaagcgcacaagccaaacaccgtgctgctggacaacgccctggcgaccatgggcgccggcctgccatcggcaatggccgcgcacctggtgcacccggaccgcccggtaatctcggtgtgtggcgacggcggcttcatgatgaacagccaggaactggaaactgcagtacgtctgggcatgcacatcaccgtggtgatcctgcgtgacgacggctacggcatgatccgctggaagcaggccaacatgggtttcaccgatttcggcctggactacggcaacccggacttcgtcaagtatgccgaagcctacggcgccaacggccaccgcgtggaaagcgccgaaggcctgctgccgctgctggagcactgcatcaagaccccaggtgtgcacgtgatcgactgcccggtcgattacagcgagaacgaccgcatcctcaacagcgagctgcgtgagcgcgcgctggcggtg

SEQ ID NO: 31923 - DNA, 804 bp, Pseudomonas putida
atgcgtatgtgccgccgtgtagtaaccgtcctcgcactcagcctgccgcttgcggcctgggctgaggtccctgtagtagatgacaacgcaggcagctatccgcctgcgggttatggcacgagcggcgcctatgccgggtcaggggcttcggcccctgcctctgcacagggccagctgttcatgcagctgcaacagatgcaggatcagctttcccgccagcaaggcatcatcgaagagctgcaaaacgatgtgtcccgcatgaagcaggaaaacctggagcgttaccaggacctggaccgtcgcatcaacagtggcgctgcgcctgccgcaacccctgacaattcctccggtggtggcgcgtccaatgccgcccccgatgccgcagcaggtgctgctgcgcaacaaccggccggcagtagccagcccggtgatccggcgaaagagaagctctattacgacgcagctttcgacctgatcaaacagaaagacttcgacaaggccagccaggcgttcaacgccttcctgcgcaagtaccccaacagccagtacgccggtaatgcccaatactggttgggtgaagtgaacctggccaagggtgacctgcaaggcgccagccaggcctttgcccaggtcagccaaaagtacccgaagcacagcaaggtgccagattcgctgtacaaactggctgatgtcgagcgccgtatgggccataccgacaaggtaaaaggcatccttcagcaggtcgtgacccagtaccccggcacctctgccgctcaactggcccagcgtgacctgcagaagctc

SEQ ID NO: 31924 - DNA, 1254 bp, Pseudomonas putida
atgaacagaaatctcaaacaggcgttcttcagcgccttgctggtctgggccgtggccttcccggtactgggcctgaaactgagcatcgacggcatcagcctggtcgtgcacagtcagggctcgttcaccatcagcatcatcgccgtgtgttccgtgctgatgttcctgcgcgtgctgttcgacaagcagtggagttcggtgatgggccgccgatcggatcgcaagctgatccccccggcagtcagcaactacctcaccctgcccaagacccagcgctatgtcatcatcgggttgatcgtggtggcactggtatggccgttcttcggctctcgtggtgcggtcgacattgccacgctgatcctgatctacgtgttgctgggcctgggcctgaatatcgtggtcggtctggcgggcctgctcgacctcggctacgtgggcttctatgccgtcggtgcctacagctacgccatgctctcgcattacctgggctggagcttctgggtgtgcctgccgattgccggcctgatggctgccacgttcggcttcctgctcggcttcccggtgctgcgcctgcgtggtgactacctggcgatcgtgaccctcggtttcggtgagatcatccgcctgttcctgcgtaacctcaccgactggaccggcggccccaacggcatcagcaacatccccaagccggagttcttcggcctgaccttcgaacgccgtgcggccgagggcatgcagaccttccacgagttcttcgggctgcaatacaactcgatcaacaaggtcatcttcctgtatctggtggccctgctgctggccctgctggcgttgttcgtgatcaaccgcctgctgcgcatgccgatcggccgtgcctgggaagccctgcgtgaagacgagatcgcctgccgtgctctgggcctgaacccgaccgtgatcaagctctcggcattcaccctgggtgcctgcttcgccggcttcgccggcagcttcttcgccgcgcgccaaggcctggtgacgccggagtcgttcaccttcatcgagtcggcgatcatcctcgccatcgtcgtgctgggtggcatgggttcacaactgggcgtgattctcgcggccatcgtgatgatcctgctgcctgagctgatgcgtgagttcagcgaataccgcatgctgatgttcggtgcgctgatggtgttgatgatgatctggcgtccgcaaggcctgctgcctatgcaacgtccacacatggagctgcgtcga

SEQ ID NO: 31925 - DNA, 1116 bp, Pseudomonas putida
atgcaacagcgagagccatccgcctcggaaagctacttctggcccagtgtctgggccatcggcctgcatgtgctggtgttcgccctgctgttcgtcagttttgccatgacgccggagctgccgccttccaagccgatcgttcaggctaccctgtaccagctcaagtccaagagccaggcaaccacccagaccaatcagaagattgccggggaggcgaagaaaaccgcttcgcgccagaccgaagtcgagcagctggaacagaagaaggtcgagcaggaggccgtgaaggccgcggaacaaaagaaagctgacgccgctcaaaaggccgaagaggcccgcgaagccgccgaggcgaaaaaagccgaggatgctgccaaggccgctgaagccgccaaggctgccgaggccaagaaagctgccgaagccaagaaggccgacgaggcgaagaaagctgccgagaaacagcaggccgacatcgccaagaagaaggccgaggacgaagccaagaaaaaagccgaagaagaggccaagaaagcggccgctgaagaggcgaagaagaaagccgccgaggacgccaagaaaaaggcagccgaagaggccaagaagaaagcagccgaggacgccaagaagaaagcggcggccgaggacgcgaagaagaaggcagctgaagaggccaagaaaaaggccgctgcagatgcccagaagaagaaggcacaggaagcggcccgcaaggcggcagaagacaagaaagcccaggcactggccgagctgttgtccgataccaccgagcggcagcaggcgctggccgacgagcagggtgaccaggtggccggcgacttcgacgacctgatccgcatgcgcgcggccgagggctgggcacgtccgccttccgcgcgcaagggcatgacggtggtcctgcagatcaacatgttgccggacggtaccatcaccaatgtcagcgtggcccggtccagtggtgacggcccgtatgacagttcggcggtggctgcggtgaagaacattggtcgtttgaccgagatgcagggtatgaagccgagcgatttcaaccaatatcgttcgttcaagatgacatttacacctgaggatctagcgttg

SEQ ID NO: 31926 - DNA, 2034 bp, Pseudomonas putida
atgcaacaatctcctgatcaccgcccctcgccctggcatgcgggtgaaaagaccctgcaggaaaaggtcggtgtagcagaacgcatggaggcgttcgggcaaaaggtcattcgtgaccacatgcccgaccagcaccgaacgttctatcaccagttaccgttcatggtcgccgccagtgtggatgcccagggtcggccttgggccacgctgctggaagggccagaagggttcgtaagctcgcctgaccctcgtatgctgacgatccacaccacgttgccagcagatgaccccgccacccccgggttggcagccgggcaggcggtcggcctgctggggatcgaactgcacacccgtcggcgcaatcgcatcaacgggcagatccgccacgctgcccaagggcaactgcaagtggccgtagagcaggcgtttggcaactgcccgcagtacatccagttgcgtgactacacccgcgtcaccgaacccgccctcgggcgcatcgatgcgacaacactggatacttcaaccgtcagcatgatccaggcggccgataccttcttcgtcgccagctatgtcgagcatgcttacggccagcgctcggtggatgtctcccaccgtggtggccggccagggttcatcaaggtcgaaggcaatcggctcacgattcccgactatgctggcaatctgcatttcaacaccttgggcaacctggtggtcaacccgcgggccggcttgctgttcatcgacttcaaaaatggcaatgtgttgcaactgtacgggcgtgccgaggtgctgctggacagcccggccatccaggcttttgaaggcgctgagcggttatggacactgcaggtcgagaaggtggtgtggcgtccggcagccgttgccctgcgctgggctttcaaggagtacgcgccgaccagtctgatgactggtacctgggccgaggccgatgcgcgcctggagcagcggcaacaacagcgccaatggctggcctggcgggtgctgcgggtggagcaggaaagccgcgacatccgctcgttctatctcgaaccaccggcaggctgccgtgtggcctttgcccctggccagcatctgcctgtgcaagtgccgcgtgatggcgagtcagcgctgatccgcacctacagcctttcaagtgcccccgacgatggattcttgcgcatcagcgtcaaagcccagggcccggcttcgcggtatctgcatgagcgcgttgtggccggcgatgtgctgaatgtgcgcccgccgatgggcagcttcacgcttgaccagcaaagcacgcgcccgttggtgctgatcggcgcgggcgtgggcatcacgccgttgctggccatgctgcgccagcagttgaggacagggcaggcccggcgcattcatctgttccatggcgcacgcagcctggccgacttgccgttccagcaggaactggcggccttgcggcaacaggctggcgatctactgcaggtacaccgcgcactgagccagcctgaagggcacgcgcaggtcggtcgtgattacgagtttgccggccggttgggtatcgaacaggtcaaggcaacgctggcgttggacgactacgatttctacctgtgtggcccgggcagcttcacccagcagctttacgaagggctgcgtggggtgcatgtgccggatgcgcggattcacgccgaagcgtttggcccgtcgacgctgcggcggcacaccgacgcagaccagccagtcctgcaacagccacctgccgctgacgaaccggtgccggtgtattttgccgcgtcggccaaggaggctcgctgggtacccggtagcggcaccttgctggaactggccgaggcgcgtgggctggccccggagttcagttgccggggtggttcgtgtggtacctgcaagacccggctggtaagcggccaggtgcattatccgaatccgccggcagagttgccggaggcaggatcggtgctgatctgttgtgctgtgccagcgaaggtggaggaggggatgcaggcgttggtgctggatgtc

SEQ ID NO: 31927 - DNA, 1611 bp, Pseudomonas putida
atgtcaggcaaattcaaaaaacagttatcactgctggacctcaccttcatcggcctaggcgccatcttcggctccggctggctgtttgccgccagccacgtctcggccatcgccggcccggccggcatcctctcctggttccttggcgggttcgccgtactgctgctgggcatcgtctactgcgagctgggcgccgccttgccccgcgccggtggcgtggtgcgctacccggtgtactcgcacggtccactgttgggctacctgatgggcttcatcaccctgatcgccttttccagcctgatcgccatcgaagtggtcgcctcacgccaatacgccgccgcctggttccctgggctgaccaaggccggctccagcgacccaaccgtgctcggctggctggtgcagttcgccctgctggggctgttcttcttcctcaactaccgcagcgtgaaaaccttcgccaaggccaacaacctggtcagcgtgttcaagttcatcgtgccgctgctggtgatcggcgtactgttcaccttcttcaaaccggaaaacttcgaggtccagggctttgccccgttcggcctgtccggggtggaaatggccgtatccgccggcggcatcatcttcgcctacctgggcctgacgccgatcatttcggtggccagcgaggtcaagaacccgcagcgcaccatcccgattgcgctgattctttcggtgttgctgtccaccgcgatctacgccttgctgcaactggccttccttggcagcgtgccgaccgaaatgttggccaacggctgggccagcgtgaccaaggaactggccctgccctaccgtgacatcgccctggcgctgggtgtgggctggctggcctacctggtggtggccgacgcagtgatctcgccaagcggctgcggcaacatctacatgaacgccaccccgcgcgtgatctatggctgggcgcagaccggcaccttcttcaagtacttcacccgcatcgatgcagagtccggcatcccgcgcccggccctttggctgacgtttggcctgtcggtgttctggaccctgccgttcccgtcgtgggaagcgctgatcaacgtggtatccgccgctctggtactgagctacgccgtggccccggtcagcgttgccgccctgcgccgcaatgcaccacacatgccgcgcccgttccgggtcaagggcatgactgtgctcggcccgctgtcgttcatcatcgctgcgctgatcgtgtactggtcgggctggaacaccgtgtcgtggctgctggccctgcagatcgtgatgttcgtgctgtacctgctgtgcagccgtttcgtacccacccagcacctgtcgctgggtcagcaagttcgctcgtcggcctggctgatcggcttctacgcgctgaccatcctgctgtcgtggctgggcagcttcggcggcctgggcgtcatcggccacccattcgacaccgtggtcgtggcggcctgtgcactgggcatctactactggggcgccgccacgggtgtgcctgcccacctggtgcgcctggaaggcgacgacgaaagcgaagcctgcgctgaaacctctaacggccgccctgttgccgtcgcttcc

SEQ ID NO: 31928 - DNA, 924 bp, Pseudomonas putida
atgaaacagattcacgtcatcgactcccacacgggtggcgaaccaacccgcctggtgatgaagggctttccgcaactgcggggccgaagcatggccgaacagcgcgacgaactgcgcgaactgcacgaccggtggcgccgcgcctgcctgctggagccacgcggcaacgatgtgctggttggcgcactgtactgcccgccagtgtcggccgacgccacctgcggggtgatcttcttcaacaacgccggttacctgaacatgtgcggccacggcaccatcggcctggtcgcctcgctacagcacatgggcctgatcacgcccggggtgcacaagatcgacaccccggtcggccaggtcagcgccaccttgcatgaagatggcgccatcaccgtcgccaacgtgccctcctaccgctaccgccaacaggttgcggtggacgtgcccggccatggcgtggtgcgcggcgacatcgcctggggcggcaactggtttttccttgtgtccgaacacggccagcgcatcgagctggataaccgcgaggcgctgaccgagtacacctgggccatgctcaaggccctggaaacccagggcgtcaccggcgaaaacggcgcgcccatcgaccacatcgagctgttcgccgacgaccccaacgccgacagccgcaacttcgtgatgtgccccggcaaggcctacgaccgctccccgtgcggcacaggcaccagcgccaagctggcctgcctggccgccgacggcaagcttgccgaaggccagacctgggtgcaggccagcatcaccggcagccagttccatggccgctacgcgcgcgacggcgaacgcattcgcccgttcatcaccggccgcgcctacatgaccgccgacagcaccctgctgatcgacgaacaagaccctttcgcctggggcatc

SEQ ID NO: 31929 - DNA, 471 bp, Pseudomonas putida
atggcaatcgatatcggtatcagtgaagaagatcgcaagtccatcgtcgatgggctgtcccgcctgttgtcggatacctacgtgctgtatctgaaaacccataactttcactggaacgtcaccggcccgtcgttccgcaccttgcacctgatgttcgaagagcagtacaacgaactggcgctggcagtcgattcgatcgccgagcgcatccgtgccttgggcttcccggcaccgggttcgtatgcattctatgcacggcactcgtcgatcaaggaggaggaaggcgtccccccggcagacgagatgatccgccagcttgttcaggggcaggaggccgtggtacgcactgcgcgcagcattttccctgtggtggacaaggtcagtgacgagccgaccgccgacctgctgacgcagcgcatgcaggttcacgagaaaaccgcctggatgctgcgggtactgctcgacgacaag

SEQ ID NO: 31930 - DNA, 591 bp, Pseudomonas putida
atgttcaagatcgtccatctggtgacgggcgtggcagctttgctgctatcgctcatacccagcctgaaaaccgatgcgacacccttcctgcaacaacccgacgcggtctacctggccctgctcggcctgctcaaccttgtgctggccccggtcgtgccgctgtatcatcgcggcgcgcggcaacaactgcagcacctggcctgcgccctgctggtagtcgccgtcgtgctgcagaccctgacgctactggcccgccccgaaatgggcaacctggcagccctggtgtgtgcggcgctggccgtggccgtgcatctggccgtgggctttgcccgcagcacgcgcaaggcacgcggcactcaacacgtggcacaagatgccggcaaccgtgataccggcaccgtcaaatggttcaacacgtcgaaaggctttggtttcatctcccgagactcgggcgatgacatcttcgtgcactttcgggccatccgcggtgagggccaccgcattctggtcgaaggccagcgcgtggagttttcggtgatgcaccgcgacaagggcctgcaggccgaagacgtggttgcagtaaaccgccgt

SEQ ID NO: 31931 - DNA, 1845 bp, Pseudomonas putida
gtgggcctgctggtggcggcggtcggggtggtttatggcgatatcggcaccagcccgttgtataccctcaaggaagtctttaccggcggctacggggtgtcggtcaaccatgatggcgtgctggggatcctctcgctgatcctgtggtcgctgctgtgggtggtgtcgttcaagtacgtgatgttcatcttgcgcgccgataaccagggggagggcggcaccatggcgctgaccgcactggcgcggcgggccacggcggcgtacccgcggctgcgcacactgatggtgatctgtggcttgatcggcgcttcgctgttctatggcgacagtatgatcaccccggcggtgtcggtgctgtcggcagtggagggcgtgggcctggccttcgacggtatcgaccactgggtggtgccaatttcgctggtggtgctggtggcactgttcctggtacagcggcacggcaccgagaagatcggcaagctgtttggtcctatcatggttacctggttcctggcgctgggcgcgctgggtgtgcatggcatctcgcagagcccggaagtactcaaggcgttcaacccggcctgggcagtcaatttcttcgtggtgcaccctggcatcggcgtggccattctcggcgcggtcgtgctggcgctgacgggggccgaggcgctgtacgccgacatggggcactttggccgcaagccgattgcccgggcctggttcatcctggtgctcccggcgctggtgctcaattacttcggccagggtgcattgctgctgcaaaacccggaggccgcgcgcaatccgttctatctgctggcgccgggctgggcgctgctgccgttggtcgggctggccaccatggccacggttatcgcctcgcaggcggtgatttccggggccttctccctgacccgccaggccatccagctgggctatattccgcgcatgcagattcagcacacctcaagcgacgagcaggggcagatctacattggtgcggtgaactggacgctgatggtgggcgtggtgttgctggtcatcggtttcgagtcgtcaggtgcccttgcggctgcctacggggttgcggtgaccggtaccatgctgatcaccaccgtcctggtgtcagcggtgatgctgctgctgtggaagtggccgccgctgctcgcagtgccgattctggtcggcttcctgctggtcgacgggctgttcttcgccgccaacgtgccgaaaatcgcccagggcggtgccttcccggtgttggccggtggtgtgctgtacctgctgatgagcacctggaagcgcggcaagcagattctggtcgagcgcatcgatgaaggggcgctgccattgccattgttcatcagcagcatccgcattcagccaccgcaccgggtcgagggtacggcggtgtttctgactgcacgctccgatgccgtgccgcatgcgctgttacacaacatgttgcacaaccaggtgctgcacagccaggtggtgctgctgactgtggtcagcgaggaccggccccgggtgccggaacatgagcgtttcgaggtggaagcctatggcgacggattcttccgggtgttgctgcactttgggttcatggatgagccggacgtgcctgccgcgttgaagctgtgtcatctggatggcctggacttcacgcccatgcgcaccacttacttcctcagccgcgagacggtgatcgcgtcacggctggaggggatgtcgcgctggcggggcaacctgttcgcgttcttgctgaagaatgccaacggcaacttgcgcttcttcaacctgccgttgaaccgggtgatcgagctagggacccaggtcgagatc

SEQ ID NO: 31932 - DNA, 1305 bp, Pseudomonas putida
atgatccgttcttcgaacatgcgggaaaagctgttggctgccgcaataataggcacattttcctcgcaagcattctccggaacagtaaccactgacggagctgacatcgttctgaagaccaagggcggtcttgaagtatcgacttctgacaaggaattcagtttcaaactgggcggccgagttcaggccgactacggccgtttcgatggtgtcttcaccaagaatggcgataccgctgacgcaggctacttccgtcgcgcctaccttgagctcggtggcgtgctgtaccgcgactggaagtatcagctcaactacgacctttcccgcaacacgggcaacgactccgacggctacttcgacgaagccagcctgacctacacgggtttcaagccggtgcaactgcgctttggccgtttctacaccgacttcggtcttgagaaagccaccagttcgaagtggaccaccgccatggagcggaacctctcgtacgacctggcggactggatcaacgacaacgccggcatgggtgttcaagccaccagcaccatcgctgacatggcttatgtttccggtagcgttttcagcgaaaccaataacaactcggatggcgacagcaccaagcgctacaacgtacgtggcgtgttcgcaccgctgcacagtgatggcaacgtcctgcacgtcggtgctcagtacgcttaccgcgacctcaaaaacagtgcggtcgatacccggattcgttcgcgtctgggcgtccgcggtgtagataccaatggcggcggcgatgccggcaccaacggcaaccgcatgctgtttggcggtgctgctgcacaagatggcctgtggaaggacgactcggtctggggtctcgaaggtgcctgggccaccggcccgttctcggttcaagcggaataccttcgccgcaagctgaaagctgaccaggccaacaacgacatgaaggcctccggttactacgcccagatggcttacaccctgaccggcgagccgcgtatctacaagctcgatggtgccaagttcgacactatcaaaccagagaacaaggaactgggggcctgggaagtcttctaccgctttgacgatatcaaggtcgaagacggcaacctggtcaccgcggcggaccaatcgaacgagcgcaaggccaagagccacacggtgggtgtgaactggtacgtcaacgaggcggtgaaagtcagtgccaactacatcaacgtgcgcaccgacaacaacgagaacaccgtgggcgacgacagcggcaatgccatcgtgacccgcctgcaatacgtcttc

SEQ ID NO: 31933 - DNA, 1389 bp, Pseudomonas putida
gtgcatcccatgctgaagaagctgttccagtctttccgcccgcccgtaccgggcccgcaccacaggcgcaccacgcccgaggtgatcaacaagagccagcactcgctgcagcgccaccagttcagccgtcatgcggtgaacatcgtggagcgcctgcaaagcgccggctaccaggcttacctggtcggtggctgtgtccgcgacctgatgctgggcatcacgccgaaggacttcgacgtcgccaccagcgccacccccgaacaggtccgtgccgagttccgcaacgcccgcatcattggtcgtcgcttcaaattggtccatgtgcatttcggccgtgagatcattgaagtcgccaccttccgcgcccaccactccgaggacgaccagggcgatgcccaccgttcgtcgcataacgccagtggccgcattctgcgagacaacgtgtacggcaccctggaagaggacgcgcaacgccgcgacttcaccatcaacgccctgtactacgatccggtcagcgagcgcattctcgattacgccaacggtgtgcacgacgtgcgcaatcgcctgctgcggctgatcggagacccgacccaccgctaccaggaagacccggtgcgcatgctgcgcgcggtgcgctttgctgccaagctcgactttggcatcgaaaagcacacttacctgccgattcgcggcctggccccgatgctgcgcgagattccacccgcgcgcctgttcgaggaatgcctcaagctgttcctcagcggccaaggtgccatcgccttcgaaatgctggttgacctggagttgttcgaaccactgttcccggccagtgcccacgcgctggacgagcggccgacctacacccacacgctgatcagccaggcactgaacaacaccgacctgcgcgtgaagcagggcaagccggtgacgccagccttcctgtttgctgctctgctctggccagccctgccggcccgtgtgctgcacctgcagaaccagggcgtgccgccgatcccggccatgaacggtgcggcccacgacctgatcgccgagcagtgcgcgcgcattgccatccccaagcgttttaccctgccgatccgcgagatctgggacatgcaggagcgcctgccgcgccgcagcggcaagcgcgccgacatgctgctggacaacccgcgtttccgcgccggttacgacttcctgctgctgcgtgaaagcgccggggaagaaaccgacgaactgggccagtggtggaccgattaccaggacgcaaacgacagcgagcgccgcgagatgatccgcgagcttggtagccgtgacgaaagtgccggcccgcgcaagcgcaagcgcagcggcagcaaacgcaagcgcagtggcgacgaggcgttcgag

SEQ ID NO: 31934 - DNA, 1617 bp, Pseudomonas putida
atgtcggattacatccaagagcagggggcggcggccagtagctccagccgccgtgaagaacgcaagatcattttcgcgtcatccctcgggacggttttcgagtggtatgacttttttctctatggtgcgctggcagcggtcatcagcaagcagttcttcgctggcgtgaacgataccaccgctttcatcttcgccctgatggccttcgctgcgggctttctggtgcggccgtttggcgcgctggtgttcggccgcctgggtgacatgatcgggcgcaagtacaccttcctggtcaccatcgtgctgatgggcctgtccactttcgctgtggggttgttgcccacctacgccagcatcggcatcgccgcaccgatcatcctggtgatcctgcgcatgcttcaagggctggcgctgggcggcgagtatggcggtgcagccacttacgtggccgagcatgcgccgcctggcaagcgtggcttgcacactggtttcatccagtccaccgcaacgctgggcctgttgttgtcgctcttggtggtgctgggtagccggtatatcagtggcgaccagttcgaaacctggggctggcgcttgccgttcctgctgtcgatcgtgctgttggcgatctccacctggattcgcatgagcatgcacgagtcgccggcctttgtgaaaatgaaggctcagggcaaggtcagcaagtcgcccatccgtgagtcattcacctcctggccaaacctgaaagtggtgcttaccgccctgttcagcatcaacgcggggcaggctgtgaccttctacacggcgcagttctacgttctgttcttcatgacccagatgctgaaaatggactcggctcaggccaacaccctgctcatcatcagcgttgtgattggcgcgccgttcttcgtgttcttcggctggttgtccgaccgtatcggccgcaagccgatcctgatgctcggcctgttgctggccacggtactgtacttcccactgttcaaggcgctgagccactacgccaacccgcagatcgacgctgccagccgtcaggcgccgatcgtggtcaccgccgacccgcaaggctgcacattccagttcgaccccgtgggcaaggctcgttttgacagcccgtgcgacaaggtcaagaccttcctggtcaagcagggcctgccgtacagctcggttagcgtggccggcagtgaagtggtggtcaacatcggtgacaagaccatcaacggctttgacgaaaccgccatgcgtgctgcaatcgagcaggctggttacccggccaaggcggaccctgcgcaggtcaaccaggtaatggtggtggtactgatcgtggcgatgatcctgatcgcgaccatgacctatggcccgttggcggcggtgatggtcgagctgttcccgacccgcatccgctacacctcgatgtcgctgccctatcacattggtaatggctggtttggtggtttcctgcctaccgtatcgtttgcgctggtggtctataccggggatatcttctacgggctgtggtacccggtgctggtgaccgggatcagcctggtggttgggatcttctgtctgagagaaaccaaggatgtagatatcgacaaagta

SEQ ID NO: 31935 - DNA, 479 bp, Pseudomonas putida
tgcaagcaaaaccgtggttgcgtacaatcgcgcaccctaacttcctgggcagcacctgccttacgcaattgcgccgggccgttccagccctgtgcagccatgccagccaatactcatcatataaagcgctgggtgagcaggattatcggagaaataccatgtcttacgcagtaatcgttaccggcggcaagcagtacaaagtcgctgaaggtgaattcctcaagatcgaaaaactggaagtcgccactggcgaatccgtgaccttcgatcgcgttctgctggtcgccaacggtgaagaagtcaccatcggtgctccagttgttgctggcgctaaagtagtggccgaagtcgtttcgcaaggccgccacgacaaggttcgcatcatcaagttccgtcgtcgtaagcaccacatgaagcgtatgggccaccgccagtggttcaccgagatcaaaatcaccggcatccaggcttaatcccct

SEQ ID NO: 31936 - DNA, 495 bp, Pseudomonas putida
atgccgaactggaccctgcaacctgtggcgcgtgacgccattgccgaagtgctggcgtttgtcgacagcgcccggcgtgcgcttttcccgatgctcgccaacgcacccttgccgcgtgacctggcgcatttcgccgacacttacctggacggtgcgggctgctttctggaagcccgtgagggtgggcggctggttgcggtgatcggttacttgccctatgaccatcgctttgcccagcttgattaccgcgcagagcgggtagtcgaggtggtgcggctgttcgtgttgccggcctaccgcaggcatggcctggctgctgccttgtttggtgccttgcgcgaacgggcgatgcaagcgggcttggactgcctttacttgcatactcatccgtttctgccgggtgccattgcgttctgggagcggcaaggcttcacggtggtggacgtggagcaggacccggtgtggcagaccacgcacatgcagttgcgattacgc

SEQ ID NO: 31937 - DNA, 531 bp, Pseudomonas putida
gtggctaagcgttggtatgttgtgcatgcttactcgggttacgagaagcatgtaatgcgctccctcatcgagcgcgtcaagctggctggcatggaagacggtttcggcgagatcttggtcccgaccgaagaagtcgtcgaaatgcgcaacggccagaagcgcaagagtgagcgtaaattcttccctggctatgtactggtccagatggagatgaatgaagggacttggcacttggtcaaggacacccctcgcgtgatgggctttattggcggtactgctgacaagcctgcgccgattaccgataaagaagctgaggccatcctgcgtcgcgttgctgacggtagcgataagccgaagcccaagacgctgttcgagccaggtgaagtggttcgagtcattgatggtccgttcgctgacttcaatggtagtgtcgaagaagttaactacgaaaagagtcgcctgcaggttgcggtgctcattttcggtcgctctactccggtggagctcgagttcagccaggtcgaaaaggtc

SEQ ID NO: 31938 - DNA, 189 bp, Pseudomonas putida
atgaaaaagctgttcaaggccaccgtagccgttgccgtcgtttcgggtgtcgccctgctgtcgggttgcactggccaggtttacaaccaaccgaaaaactgcacctacgactacctgttccacccttcggtttccatctccaagatcatcggtggctgcggcccgatcgataaactgcctcagcagcag

SEQ ID NO: 31939 - DNA, 2604 bp, Pseudomonas putida
atgcacgaacaatacacgccccgtgatatcgaagccgccgcccagaagttctgggacgagcaacaatcgttcgctgttaccgaacagccaggcaaagacacctactattgcctatcgatgttcccgtacccgagcggcaagctacacatgggccacgtgcgcaactacaccatcggtgacgtgattgcccgctaccagcgcatgctgggcaagaacgtcctgcagccgatgggctgggacgctttcggcatgcccgcggaaaacgcggcgatgaaaaacaacgtcgccccggccaagtggacgtacgaaaacatcgactacatgaagacccagctcaagagcctgggcctggccatcgactgggcacgtgaagtcaccacctgcaaacccgactattaccgttgggagcagtggctgttcacccgcctgttcgaaaaaggcatcatctaccgcaagaacggtaccgtgaactgggacccggcggaccagaccgtactggccaacgaacaagtcatcgacggccgtggctggcgttcgggcgcgctgatcgagaagcgcgaaatcccgatgtactacttccgcatcaccgattacgccgacgagctgctggagagccttgacgagctgccgggctggcctgagcaggtcaagaccatgcagcgcaactggatcggcaaatcgcgcggcatggaagtccagttcccgtacgacaaggccagcatcggccacgaaggcaccctcaaggtcttcaccacccgtccggacacgctgatgggcgccacctatgtcgccgtcgccgccgagcacccgctggccacccaggctgcgcagggcaacccggcgctgcaggcgttcatcgatgagtgcaagagcggcagcgttgccgaagccgacatggccacccaggagaagaaaggcatggccacttccctgctggtcgagcacccgctcaccggcgagaagctgccagtatgggtcgccaactacgtgctgatgcactacggcgatggcgcggtaatggccgtgccggcccacgacgagcgcgacttcgagttcgcccacaagtacaacttgccggtcaaggccgtggtgcgcaccagcgctggcgatgaagtcggcagcgagtggcaggccgcctatggtgagcacggccagctgatcaactccgcagaattcgacggcctggactttgctggcgccttcgacgccatcgaagcggccctgatccgcaaggaactgggcaaatcgcgtacacagttccgcctgcgcgactggggtatcagccgccagcgctactggggctgcccgatcccgatcatccactgcccgtcctgcggcgacgtcccggtgccggaagaccagctgccggtcaccctgccggagaacgtggtgccggacggcgccggttcgccactggcacgcatgcctgaattctacgaatgcagctgcccgaaatgcggtgctgcggccaagcgcgaaaccgacaccatggacaccttcgtcgagtcgtcctggtacttcgcccgctacgcctcgccaaactacgacaaaggcctggtcgaccccaaagccgccaaccactggctgccggtagatcagtacatcggcggtatcgaacacgcgatcctgcacctgctgtacgcgcgcttcttccacaagctgatgcgtgacgaaggcctggtcacctcgaacgagccgttcaagaacctgctgacccagggcatggtggtcgccgaaacctactaccgcgttgccagcaacggcggcaaggactggttcaacccggccgatgtcgaaatcgagcgtgatgccaaagccaagatcattggcgcccgcctgaagaccgacggcttgccggtggaaatcggtggcaccgagaaaatgtcgaagtcgaaaaacaacggcgtcgacccgcagtccatgatcgaagcctacggcgccgacacctgccgcctgttcatgatgttcgcctcgccgcccgacatgagcctggaatggtccgactccggcgtcgaaggtgccagccgcttcctgcgccgtgtctggcgtctggctcaggctcacgtcagccagggcctgccaggcaagctggatgttgccgccctggacgacgcgcaaaaggtcatccgccgcgccattcacgctgccatcaagcaggccagcaccgacgtgggccagttccacaagttcaataccgccatcgcccaggtgatgaccgtgatgaacgtgctggaaaaggccccgcaagccaccgaacaggaccgcgccctgctgcaggaaggcctggaagccgtcaccctgctgctggcgccgatcactccgcacatctctcacgcgctgtggcagcacctgggccacgcaggctcggtgatcgatgccgcctggccaagcgtcgacgaacaggcgctggtgcaggactccattaccttggtggttcaggtcaacggtaaactgcgcggccaggtcgagatgcctgccgctgccagccgcgaagaagtcgaagccgctgcccgcagcaacgagaatgtcctgcgcttcatcgatggcctgaccatccgcaaggtcatcgtggtaccgggcaagctggtcaacatcgtcgccaac

SEQ ID NO: 31940 - DNA, 1659 bp, Pseudomonas putida
gtggtcatcagccatcagctcatgctgcgtgccggcatgatccgcaaactggcctccggcctgtacacctggctgccgatgggcttgcgggtaatgcgcaaggtcgaagccgtggtgcgtgaggaaatgaacgccgccggcgccctggaagtgctgatgccgagcatccagcccgccgagctgtggcaggaatccggtcgctgggagcaatacggccctgagctgctgcgcctgaaagaccgccaccagcgcgacttctgcgttggccctacccacgaagaagtgatcaccgacctggcccgtaacgagctgtccagctataaacagctgccgctcaacctgtaccagatccagaccaagttccgtgacgagatccgcccgcgcttcggcctgatgcgtggccgcgagttcatcatgaaggacgcctactcgttccatgccgaccaggcttccctgcaggaaacctatgatcgcatgcaccaggcgtacagcaatgtgttcacccgcctgggcctggacttccgcccagtgcaggccgacaccggctcgatcgggggcagctactcgcacgagttccacgtgctggcagagtctggtgaagatgacgtgatcttcagcgacagctccgactacgccgccaacatcgagaaggccgaagccatcccgcgtgaaaccgtgcgccctgcccctaccgaggagctgcgcctggtcgacaccccgaatgccaagaccattgcccagttggtggaaaaccacggcctgccgatcgaaaagaccgtcaagaccctgatcgtacgcggtgccgaagagggcaagctgattgccctgatcgtccgtggcgaccacgaactgaacgaaatcaaggccaccaagctggaacaggttgccgacccgctggtcatggccaccgaagccgaactgcgcgacgccattggcgccggcgccggctcgctcggcccgctcaacctgccactggaaatcatcatcgaccgctcggttgccctgatgagcgacttcggcatcggcgccaacatcgacgacaagcactacttcggcgtcaactgggagcgcgacctgccggtgccacaggttgccgacctgcgtaacgtggtcgaaggcgacccaagcccggacggccagggcaccctggttatcaagcgcggcatcgaagtgggccacatcttccagctgggcaccaagtacagcgaggcgctgaagtgccaggtgctgggcgagaacggcaagccggtcgtactgtcgatgggttgctacggcattggcgtgtcccgtgtggttgcagctgccatcgagcagagctatgacgacaagggcatcatctggaacgacgccctggctccgttccagattgccctggtcccactgcgctacgaaaccgacgtggtccgcgaagcaaccgacaagctgtatgccgaactgactgccgccggctatgaagtgctgctggacgaccgcgacaagaaaaccagcccaggcatcaagtttgccgacatggagctgatcggcatcccacaccgcatcgtcgtcagcgatcgcggcctggccgaaggcaacctggagtacaagcaccgcaccgagcaggacgcccaggcgttgccgctcaatgaagtgctgaccttcctgcaggcccgcgttcgccgc

SEQ ID NO: 31941 - DNA, 1380 bp, Pseudomonas putida
atgaacgcgcctttcgccccgcaacgccagacccgtgactaccaggcagccgatgccgcccaccacattcatgccttcctcgaccagaaggcgctgaacgccgaagggccgcgggtgatcgtcggtggcgaacgcctgcacctgtgggacagcgagggcaagcgttacctggatggcatgtccggcctgtggtgcacccagctcggttatggccgtcgtgacctgacggccgccgcggccacgcagatggatcagctggcctactacaacatgtttttccacaccacccacccggcggtgatcgaactgtccgagttgctgttcagcctgctgccggggcactacagccacgcgatctacaccaactccggctccgaggccaacgaggtactgatccgcaccgtgcgccgctactggcaggtggttggccagccaggcaagaaaatcatgatcggccgctggaacggctaccacggctcgaccctggcggccacggcgctgggtgggatgaagttcatgcacgacatgggcgggttgattccggatgtggcacacatcgacgaaccctactggtacgccgagggcggtgaactgactccggccgagttcggccgccgctgcgccctgcagctggaggaaaaaatcctcgaactgggtgccgagaacgttgccggcttcattgccgaacccttccagggggccggcggcatgatcttcccgccggaaagctactggccggaaatccagcgtatctgccgccagtacgacgtgctgctgtgcgccgatgaggtgatcggtggctttggccgcaccggcgaatggttcgcccatgaatacttcggcttcgagcccgacaccttgtcgattgccaagggcctgaccagcggctatgtgcccatgggcggcctggtgctgagcaagcgcattgccgaggcgttggtggagcgcggcggggtatttgcccacggcctgacctattccggccacccggtggcggcggcagtggccatcgccaacctgaaggcgctgcgtgacgaaggcatcgtgcgccaggtgaaggacgacacggggccgtacctgcagcgcatcctgcgggaagtgtttgccgaccacccattgatcggccaggtgcaaggggccgggctggtggcggcgctgcagttcgccgagcacaagccgacgcgcaagcgctttgccaacgagaacgacctggcctggcagtgccgcacctttggtttcgaggaaggggtgatcattcgctcgaccctgggccggatgatcatggccccggccttgatcgccaaccacagcgagctggatgagctggtggagaagacccggatagccgtagaccgcacggcgcggctggtcggcaagctg

SEQ ID NO: 31942 - DNA, 1662 bp, Pseudomonas putida
gtggaacgcgaatacatggaattcgacgtggtcatcgtcggcgccggcccggcgggcctgtccgccgcctgccgcctgaagcagaaggccgccgaagccggtagcgaaatcagcgtctgcgtggtggagaaaggctctgaagtcggcgcccacatcctctctggcgcagtgttcgagccccgcgccctgaacgagctgttccccgactggaaagagctcggtgcaccgctgaacaccgaagtgaagcgcgacgacatctacgtactcaaggatgccggcagcgcgaccaaggtgcctgacctgttcgtgcccaagaccatgcacaaccatggcaactacatcatctcgctgggcaacctgtgccgctggctggcccagcaggccgaaaacctcggcgtggaaatctacccgggcttcgccgcccaggaagcgctgttcgacgacaacggcgtggttcgcggcatcgtcaccggcgacctcggtgtcgaccgcgaaggcaacccgaaagacggcctgtataccccgggcatggaactgcgtgccaagtacaccctgttcgccgaaggctgccgtgggcatatcggcaagcagctgatcaagcgcttcaacctcgacagcgagtccgacgtccagcactacggcatcggcttgaaggaaatctgggaaatcgacccggccaagcacgagcaaggcctggtggtgcacaccgccggctggccgctggacgtggtggccaaggaaaacaccggtggctcgttcctttatcacctggaaaacaaccaggtggtggtcggcctgatcgtcgacctgtcctacgccaacccctacctgtcgccgttcgacgaattccagcgcctcaagcaccacccggtgatcagccagtacctcgaaggcggcaagcgcatcagctacggcgcccgcgccttggccaagggcggcatcaactcgctgccgaaaatggtcttcaatggtggcgcgctgatcggttgcgacctgggcaccatgaacgtggccaagatcaagggcagccataccgcgatgaagtccggcatgctcgccgccgaagcagtggccgacgctttgatcgccggtagcgaaggcggcgatcaattgaacagctatgtcagcgccttcaaggccagctggctgtacgaagaactgttcgccagccgcaacttcggcccggccatgcacaagttcggcccgctgctgggcgcggcgttcaactatgtcgaccagaactggttcggtggcaagctgccgttcaccctgcatgacaccaagccggactatgcctgcctcaagctggccgccgattcgaaaaagatcgactacccgaaaccggacggcaagctcagcttcgacaagctcagctcggtattcctctccagcaccaaccacgaagaggaacaaccctgccacctgaagctgaccgatccgagcgtaccgatcgccagcaacctgccgctgtacgacgagccagcccagcgctactgcccggccggcgtgtacgaagtggtcacccaggaagacggcaacaagcgtttccagatcaacgcgcagaactgcgtgcactgcaagacctgcgacatcaaggacccggcccagaacatcacctgggtcacccctgaaggcgctggcgggccgaactatccgaacatg

SEQ ID NO: 31943 - DNA, 1701 bp, Pseudomonas putida
atgagcaagcccactgccgacaacgcgcccaacgccgctgccaaaggcgcccccgctgtccctgcgaacttcctgcggccgatcatccaggccgacctggactcgggcaagcacagcagcatcgtcacccgtttcccgccggagcccaatggttacctgcacatcggccacgccaagtcgatctgcgtcaacttcggcctggccaaggaattcggcggcgtctgccacctgcgtttcgacgataccaacccggccaaggaagaccaggagtacatcgacgccatccagagcgatgtcaaatggctgggcttcgagtggggcggcgacgtgcgttacgcctccgactacttcgaccagctgcacgactgggcggtcgagctgatcaagcgcggcaaggcctacgtctgcgaccttactcccgagcaagccaaggaataccgcggcaacctcaaggagccgggcaagaacagcccgttccgcgagcgcagcgtggaagaaaacctcgacctgttcgcccgcatgaaggccggcgagttcaaggacggcgagcgtgtgctgcgggccaagatcgacatggcctcgccaaacatgaacctgcgcgaccctatcctgtaccgcattcgccatgctcaccaccaccagaccggcgacaagtggtgcatctaccccaactacgacttcacccacggccagtcggacgccatcgagggcattacccactcgatctgcaccctggagttcgaagggcatcgtccgctgtacgactggttcctcgacaacctgccggtgccggcacacccgcgccagtacgagttcagccgcctgaacctgaactacaccattacctccaagcgcaagctcaagcagcttgtggacgagaagcacgtcgacgcctgggacgacccacgcatgtcgaccctgtccggcttccgtcgccgtggctacacgccggcttctatccgcaacttctgcgaaatgatcggcaccaaccgttccgacggtgtggtcgacatgtcgatgctcgagttcagcatccgtgacgacctggaccgcaccgcgccacgcgcgatgtgcgtgctgcgcccgctgaaagtggtcatcaccaactacccggaaggccaggtcgagcagcttgagctgccacgtcacccgaaggaagacatgggcgtgcgtgtgctgccgttctcccgcgagctgtacatcgaccgcgacgacttcatggaagaaccgccgaagggctacaagcgcctggaaccggccggtgaagtgcgcctgcgcggcagctacgtgattcgtgctgacgaagcgatcaaggacgccgacggcaacatcgtcgaactgcgttgctcgtacgaccccgacaccctgggcaagaaccctgaaggccgcaaggtcaagggcgtgatccactgggtgccggccgaaggcagcgtcgagtgcgaagtgcgcctgtacgaccgcctgttccgctcgccgaacccggaaaagaccgaggagggcggcagcttcctggacaacatcaaccctgcttcgctgcaagtgctcagcggttgccgtgccgagccgtcgctggcccaggcgcagcccgaggaccgcttccagttcgagcgcgaaggctacttctgcgccgacctgaaagacagccagccgggtcgcccggtgttcaaccgcactgtcaccctgcgtgactcctggggcagc

SEQ ID NO: 31944 - DNA, 773 bp, Pseudomonas putida
cgatccgccgcgatttccagcccccacaagacaggcgcctgccgatccgcaatgtcgtagtgattctgatggagagttttgctgggcactttgttggcgcgctcggcagcgaagctggcatcacaccgaacttcgaccgactggctcaggagggtgtgctgtttcgccgcttcttcgctaatggcacccatacccatcaaggcatgtttgccagcatggcctgtttcccaaatttacccggtttcgagtacttgatgcagactccggaaggaggccaccaattctccggtctggctcagttgcttagcactcgcgacttcgacgatctgtatgtctacaacggcgattttgcctgggataaccaacgtggctttttcagcaaccagggcatgacacggtttatcggtcgtaatgactttgttgaccccgtggtatctgacccgacatggggagtggctgaccaggatatgtttgatcgcgctgcagaagaactgttcaagcaagacccgaagaaacccttctatgcactcctgcaaacgctttcaaaccatacgccttacgcgctgccaggtgtgttgcctgttgagcccgtgacagggcaaggttcgcttgatcagcacctgacagctatgcgttattctgactgggctctgggacgattttttgaaaaggctcgtaaagcgccttatttcaaagacaccctattcgtggtcgtgggtgaccatggctttggtgctcaagagcagttaaccgagatggatctgtaccggtaa

SEQ ID NO: 31945 - DNA, 1075 bp, Pseudomonas putida
acttttttacccacgctttccccagggtcactttcccatgttcaagaaactgcgtggcatgttttccagcgatctttctatcgatctgggtactgccaacacccttatttacgtgcgtgagcgcggtatcgtcctgaatgagccctcggttgttgccatccgtacccatggcaaccagaaaagcgtcgtcgccgtcggtaccgaagccaaacgcatgctgggccgtacgcccggcaacattgcagccattcgtccgatgaaggacggcgtcattgccgacttcagcgtctgcgaaaaaatgttgcaatattttatcaacaaggttcacgagaacagcttcctgcagccgagcccgcgcgtgctgatctgcgtgccgtgcaagtcgacccaggtcgagcgccgcgccatccgcgagtcggccctcggcgcgggtgcccgtgaagtgttcctgatcgaagagccgatggccgctgccatcggtgccggcctgccggttgaagaggcccgcggttcgatggtcgtcgatatcggtggcggtaccactgaaatcgccctgatctcgctgaacggcgtggtctatgccgagtccgtccgcgttggcggtgaccgcttcgacgaagccatcgtgacctacgtgcgccgcaactacggcagcttgatcggcgaatccaccgccgaacgtatcaagcaggaaatcggtactgcctacccaggtggcgaagtacgtgaagtcgacgtgcgtggtcgtaacctggccgaaggtgtaccgcgtgccttcaccctgaattccaacgaagtgctcgaagcgctgcaggaatcgctggcgaccatcgtccaggcggtcaagagcgccctcgagcaatcgccgccggaactcgcctcggacatcgccgagcgcggcctggtgttgaccggtggtggtgcgctgctgcgtgacctcgacaaactgctggcccaggaaaccggcctgccggtgattgtcgccgaggacccgctgacctgcgtcgcccgtggcggcggtcgcgccctggagatgatggacaagcacgcgatggacctgctctccagcgagtga

SEQ ID NO: 31946 - DNA, 273 bp, Pseudomonas putida
atggctgacttccaggccttggtgcgcgacaccgagaagctgctggccgacaccgccaacctggccggcgaccaggccgacgaattgcgcgagcagattcacgagcgcctggcccaggcccgcgaaaccctgcaactgacccaggactcggtacgtgaacgcggtcaggcagcgcttggcagcgccgagcagtacgtgcaggaaaacccgtggcgggcaatcggcatcgccgccggcgtcggcctgttgatcggtctgctggccaaccggcgc

SEQ ID NO: 31947 - DNA, 957 bp, Pseudomonas putida
gtgggcctgttcggcgctgtacagctggcccatgccggcgaatacgacggctcgcccgaggtagccgcgtttgttggcgaaatgagccgcgactatggttttgcgcctgagcaactgatgggtgtgtttcgtgaggtgcagcgcaagcagtcgattctcgacgccatctcgcgcccggccgagcgggtcaaaccgtggaaggactaccggccgatgttcatcaccgatgcgcgtatcgctcgcggtgtggatttctggcgtcagcacgaggctgtattggcacgtgccgagcaggagtacggcgtacctgcgcagtacattgtcgcgatcatcggcgtggaaaccttctttggccgcaataccggcaactaccgggtgatcgacgccctgtcgacgctgggcttcgactacccgccacgggccgagttcttccgcaaggagctgcgagagttcctgctgctggcccgtgaggagcagcttgatcccttgacgctcaagggctcgtacgccggcgccatggggctgccgcagttcatgccaagcagcttccgcaactacgcggtggacttcgacggggacggccatatcaatatctggaacaaccctgacgatgccatcggcagcgtggccagctacttcaagcgccacggctgggtggccggcgagggtgtggtcagtcgcgcctgggtggaaggtgagcgcgccgacgaaggcctgaccaccggcatcgagccggtgaaaacggtaggggagttgcgtacgcttggctggtcggttcatgattcgctgcgcgatgatctgccggttaccgccttccgtctcgagggcgagagcggccccgagtactggatgggcctgaagaacttctacgcgatcactcgctacaaccgcagcgtgatgtatgccatggcggtacatcagcttgcggaacagctggttcaagtacggggcgtcaag

SEQ ID NO: 31948 - DNA, 975 bp, Pseudomonas putida
atgaacgcctttacgcagatcgacgaacttgtcatgccactgcctctcgaaccgcagggctacaccatcgccccctcgaaacagtcgccgcgcctgctggagctgacctttgcccgggaaaccgtcgaagcgttcgtgcaggccgttgcccaatggccggtgcaggcattggagtacaagtcgttcctgcgttttcgtgtaggcgaaatccttgacgagctgtgccagggcacgctgcgtccggtgctgctcaacaccatcctcgaccgcgccacaggcggcatgctgattaccccgatcggcctggatgacgtgagccaggccgaagacatggtcaagttcaccaccgcctgcgctcacctgatcggccgttccaactatgacgccatgagtggccagttctatgcgcgcttcgtggtggtcaacagcgacaactccgacagctacctgcgccagccgcaccgggtcatggagctgcacaacgacggcacgttcgtgaaccagatcaccgactacgtgctgatgctgaagatcgacgaaaagaacatggaaggcggcaactcgctgctgctgcacctggacgactgggagcagtgcgaggcgttcttccgtcaccctctggcccgccgcgaaatgcgctggaccgcaccgccgagcaaaaaggttgccgaagatgtgttccattcggtattcgacaccgatgccgaaggccggccgaccatgcgctacattgaccagttcgtgcagccggaaaactacgaggaaggtatctggctgaacgccttgtccgagtcgctggaaggcagcggcaagaaggtctcggtaccggtaggcgtaggcagtttcctgctgatcaacaacctgttctggctgcatggccgcgatcgcttcaccccgcacgagggcctgcgccgcgaactgatgcgccagcgtggttacgtcgccttccccaagccgctgtaccagcgcggtcaa

SEQ ID NO: 31949 - DNA, 705 bp, Pseudomonas putida
atggcccaatcggaaaccgttgaacgcattctcgacgctgccgagcagctgttcgcggaaagggggttcgccgaaacctcgttgcggctgattaccagcaaggccggggtcaacctggcggcagtcaactatcatttcggctccaagaaggcgctgatccaggccgttttctcgcgtttccttggcccattctgcgccagtctggagcgtgagctggagcgccgccaggccaagccggagcacaagcccagcctcgaagaactgctggaaatgctcgtagagcaggcgctggccgtgcagccgcgcagcaacaacgacctgtcgatcttcatgcgcctgctgggcctggcgttcagccagagccagggtcacctgcggcgctatctggaagacatgtacggcaaggtgttccgccgctacatgctgctggtgaacgaggctgcgccacgcattccgccactggaactgttctggcgtgtgcacttcatgctgggtgccgcggccttcagcatgtccggtatcaaggccctgcgggcgattgccgagaccgacttcggcatcaacacctcgatcgagcaggtgatgcgcctgatggtgccgttcctggcggcaggcatgcgcgctgacagcggtgtgaccgacgaggcgatggccactgcgcagctgcgcccgcgcacaaagaccggttcggctaccgccaaggcc

SEQ ID NO: 31950 - DNA, 1521 bp, Pseudomonas putida
atgaccgtgatcaagcaagacgacctgattcagagcgtcgccgacgccctgcaattcatctcgtactaccaccccgtcgatttcatccaggccatgcacgaggcctatctgcgtgaggaatcgcctgctgcacgcgattccatcgcccagatcctgatcaactcgcgcatgtgcgccaccggccatcgtccaatctgccaggacaccggtatcgtcaccgtgttcatccgcgtgggcatggacgtgcgctgggatggcgccaccatgagcgtcgacgacatgatcaacgaaggtgtgcgtcgcgcctacaacctgcctgaaaacgtcctgcgcgcttcgatcctggccgacccggccggtgcccgcaagaacaccaaggacaacaccccggcagtgatccactactccatagtccccggcgacaaggtggaagtcgatgtcgcagccaagggcggcggctcggaaaacaagtcgaagatggccatgctcaacccgtccgactcgatcgtcgactgggtactgaagaccgtgccgaccatgggtgctggctggtgcccgcctggcatgctcggcatcggcatcggcggtaccgccgagaaggccgcggtcatggccaaggaagtgttgatggagtccatcgacattcacgaactgaaagcccgtggcccacagaaccgcctggaagaaatccgcctggagctgttcgacaaggtcaaccagctgggcatcggcgcccagggcctgggtggcctgaccaccgtgctcgacgtcaagatcatggactacccgacccacgccgcgtccttgccggtgtgcatgatccccaactgcgctgctacccgccacgcccacttcgtgctcgatggcaccggcccggcagaactggaagcgccgtcgctggacgcttacccggaaatcgtctgggaagccggcccgagcgcccgtcgcgtcaacctcgacgacatcaccccggaagaagtggccagctggaagccgggcgaaaccatcctgctcaacggcaagatgctgaccggccgtgatgccgcgcacaagcgcatggttgaaatgctcaaccgtggcgaagagttgccggtagacctgaaaggccgcttcatctactacgtcggcccggtcgacccggtgggtgacgaagtggtaggcccagccggcccgaccactgctacccgtatggacaagttcactcgccagatccttgagcagactggcctgctgggcatgattggcaagtccgagcgtggcccgaccgccatcgaggcgatcaaggacaacaaggccgtgtacctgatggccgttggcggcgctgcctacctggtcgcccaggccatccgcaagtcgaaggtactggccttcgccgagctgggcatggaagcgatctacgagttcgaagtcaaggacatgccggtgaccgtcgccgtggacagcaacggtgaatcggtacacatcactggccctgccctgtggcagagcaagattgccgaaagcctggccgtcgaagtgaag

SEQ ID NO: 31951 - DNA, 1104 bp, Pseudomonas putida
gtgcctgtatggctttgcctgtggccaacggcgcgtgtctgccggtgtctgctgcccctcggtgggcctctctctgtcttcaatgaaggattacccatgactgtcagcctgcaaggctccctgatggtggatatcgccggtaaatggctgaccgccgaagaccgtcaactgcttcgccagccggaagtggctggcctgatcatcttcgcccgcaatatcgacaacccgcgccaggttcgcgaactgtgcgcgtccatccgcgccattcgccccgatctgatcctggcagtggaccaggaaggcgggcgcgtacagcgtctgcgccagggctttgtgcgcctgccggccatgcgtgcgctggccgataacgacaatgccgagtatctggctgagcagtgcggctggctgatggcgaccgaggtgctggcggttggcctggacctcagcttcgctccggtgctcgacctggaccaccagcgtagcgccgtggtgggcagccgcgcgttcgagggtgacccgctgcttgcaacgcgcctggccggcgcgttcatccgtggcatgaatgcggcgggtatggccgcctgtggcaagcatttcccggggcatggctgggccgaagccgattcgcacgtggccatccccactgatgaacgcagcctggaacaactgcgccagtccgacctggtgccgtttacccgcctgagtgggcaactggcggcagtgatgccggcgcatgtcatctacccgcaggttgacaaccagcccgctggcttctcgcggcgttggttgcaggacatcctgcgtggcgagctgggctttgatggggtgattttcagtgatgacctgtcgatggccggtgcgcatgtggtgggcgacgcggccagccgtatcgaggcggcgctgagcgccggttgtgatatgggcctggtgtgcaatgaccgggcggcggcggagctggcgctgagtgcggcgcagcgcatgaaggtcaagccatcgccgcggattgcgcggatgcgtgggcaagggtttgcgcgaaccgattatcgccagcagccgcgctggctggaggcgttgggggcgttgaaggaagctcagctggtcgat

SEQ ID NO: 31952 - DNA, 458 bp, Pseudomonas putida; identical to SEQ ID NO: 31314

SEQ ID NO: 31953 - DNA, 1110 bp, Pseudomonas putida
atgtcgcgcctgaaccacaccctgcgcctgggcctgaaagaactgaccagcctgcgccatgacagcgtcctgctgctgttcctgctatatgccttcagcgtggcgatctacatgccggcagccggctcggtgatcggcgtacacaacgccagcgtggcggtggtggatgaagaccatagcctgctctcgcgcaagctcagcgaagccctgcaaccgcccgagttccagccagccgtgccgctgcctccgcagcgcctggaccaggccatggacagcggccagtacaccttcgtcatcaacgtgccggttaacttccagagcgacctgctggccgggcgctcgccggagctgcagatcaacgtcgatgctacggccatgagccaagcgttcatgggcgccggctacatcggccgcatcttcgagcgcgagctgctcgactacagccagcgtggtaacgagcaaagcccggtgctgatcaaccccaaggcgctgttcaaccccaacctggaggggggctggtttctggccgtgatccagatcgtcaacaacattaccatcctggcgatcatcctcactggcaccgcgctgctgcgcgagcgtgagcatggcaccctcgaccacctgctggtgctgccgctgaccgcgctggagatcatgctggccaagatcggcagcaacgcgctggtggtggtgatctgcacctggatttcgttggtggtagtcgtcaaaggtgcactgggcgtgccgctgtctggctcgatggggctgttcctggccgtgaccgcgctgtacctgttcgccagtacatcgctgggcattttcctcgccaccctggcgcgctcgacgccgcagttcggcctgctggcgatcccggtgatcatcccgatgctgttgctgtccggcggcagcacacctctggacagtatgccgcagtggctgcagtgggtgatgcaagggtcaccctcaacgcactttgtcagcctgagtgccgcaatcctgttcagggatgccgggtgggcggtggtatggccggatatcctggcgctgacgttgatcggcctggtgttcttcagcgtggcgctggcacggtttcgtcggagcctggcgtct

SEQ ID NO: 31954 - DNA, 402 bp, Pseudomonas putida; identical to SEQ ID NO: 31313

SEQ ID NO: 31955 - DNA, 666 bp, Pseudomonas putida
atgggcatcgaagccgcctacccaccgttcaacaacaaggatgccagcggtaacgtggttggcttcgacaaagacattggcgacgccctgtgcgccaagatgaaagtcgaatgctcggtcgttacctccgactgggacggcatcatcccggccctgaatgccaagaagttcgacttcctggtgtcgtcgctgtcgatcaccgacgagcgcaagcaggctgtggacttcaccaatccgtactactccaacaaactgcagttcatcgcgccgaaaaacgtcgacttcaagactgacaaagagtcgctgaaaggtaaggtcatcggcacccagcgcgccaccctggccggcacctaccttgaagacaactacccggatgtcgagatcaaactctacgacacccaagaaaacgcctaccttgacctggtttccggtcgtatcgacggcatcctggccgacaaatacgtgcagtacgagtggctgaaaagcaaagacggctcgaacttcgagttcaagggcgagccggtgatggacagcgacaagatcggcattgccgtgcgcaaaggtgacaccaagctgcgcgacgacctgaacaaagccctggcagaaatcaaagccgacggtacgtacaagaaaatcaacgacaagtacttcccgttcagcatcgaa

SEQ ID NO: 31956 - DNA, 897 bp, Pseudomonas putida
atgaaacgccagctggaggcttattgcgcacacctgcgcaacgagcgccaggtgtcggagcacacctcgcagggctaccgtcgcgacctggaaaaagtcatcgcctactgcgaagaacacggcattgccgattggcaggcgctgcaaatccagcagctgcgccagctgatcgcccgcttgcaccaccatggccaatctccgcgcagcctggcacgcctgctgtcggcagtgcgcggcctgtaccgctacctcaaccgcgaaggcctgtgccagcacgacccggccaacggcctgagcgcgcccaaaggtgagcggcggctgcccaaggtactggataccgaccgcgcactgcagctgctcgatggtggcgtcgacgacgacttcatcgcccggcgtgaccaggcgatcctcgaactgttctattcctcgggcctacgcctatcggaactgaccaacctcgatcttgatcacctcgacctcgccgccggcctggtgcaggtactgggcaagggtggaaaagcccgcgtactgccggtgggtcgcaaggctcgcgaggcgttgcaggcctggtaccgtttgcgcggcatcggcaacccacgcgaccgtgcagtgttcattacccgccagggcaatcgcatcagcccccgggcagtgaggctgcgggtaaaggttgccggtgagcgtgagctgggccaacacctgcacccgcacatgcttcgccattccttcgccagccatgtgctggaatcatcccaggacctgcgcgcggtgcaggagatgctcggccacgccgacatcagcacgacgcaaatctacacccacctggacttccagcacctggccgcggtgtacgacagcgcccaccctcgggccaaacgcagcaaaggcacagactca

SEQ ID NO: 31957 - DNA, 1734 bp, Pseudomonas putida
atgaaagacaccattcgccagctgatccagcaagccctcacccaactcgtcaccgacggtgtgctgcctgaagggctgtcgccggcgatccaggtggaaaacgcccgggacaagacccacggcgacttcgccagcaacatcgccatgatgctggccaagccggccggcatgaagccgcgcgacctcgccgaaaaactgatcaacgccctgccggccagcgccgacatcagcaaggtcgagattgcaggccccggcttcctcaacttcttccagaacaccgacgccctggccaaccgcctggatgccgccctggccgacgcccacctgggtgcgcgcaaagccggcccggcgcaaaaggtggtgatcgacatgtcggcacccaacctggccaaggaaatgcacgtcggccacctgcgctcgaccatcatcggtgacagcgttgcgcgcgtgctggagttcctgggcgacaacgtcatccgccagaaccacgtcggcgactggggtacccagttcggcatgctgatggcctacctgcaggaaaacccgatcaccagcgacgagctgtcggacctggaaaacttctaccgcgcggcgaagaaacgcttcgatgaatcggaagagttcgccactcgcgcccgcggcctggtggtcaagctgcaagccggtgaccccgagtgtctggccctttggacacgcttcaaggacatctcgctgtcgcactgccagaagacctacgagctgctcaacgtcaagctgaccatggccgacgtgatgggcgaaagtgcctacaacgacgacttggccaacgtggtggccgacctcaaggccaagggcctgctggtcgaagaccagggcgcccaatgcgtgttcctcgaagagttcaagaacagcgacggcgaccccctgccggtgatcgtgcagaaggctgacggcggctatctgtacgccaccaccgacctggctgccgtgcgttaccgcagcaacgtgttgaaggctgaccgcgcactgtacttcgtcgaccagcgccaggccctgcacttcaatcaggtgttcgaagtggcccgccgcgctggcttcgtcggccacccgatgcaaatggagcacatgggcttcggcaccatgaacggcgccgacggccgcccgttcaagacccgtgacggcggcaccgtgaagctgatcgacctgctcaccgaggccaaggagcgcgcctacgcgctggtcaaggaaaagaacccgagcctggccgacgacgaactgcgccacatcggcgaggtggtgggcattggcgcggtgaaatacgccgacctgtccaagcaccgcaccagtgactacagcttcaacttcgagctgatgctcaacttcgaaggcaacaccgcgccttacctgctgtacgcttacacccgcgtagccggcgtgttccgcaagctgggcaaaggctttgacgaagtcgacggcaagatcgtgctgcaagctgcccacgagcaggacttggccgcacgcctggcgcagtttggcgaaatcctcaacaacgtcgccgaaaaaggcacgccgcacgtgctgtgcagctacctgtacgacttggccggcctgttctcgagcttctacgagaactgcccgatcctcgctgccgaaaccccttcgcagcagcagagccggctgcgcctggccgccctgactggccgcaccctcaaacaaggtctggaactgctcggcctggaaaccctggagcgcatg

SEQ ID NO: 31958 - DNA, 693 bp, Pseudomonas putida
atgagcatcaagctgatcaccttcgacctcgacgataccctgtgggacaccgcgccggtgattgccaccgcggaagtcgtgctgcgcgactggctcgaggccaacgcaccaaccctcggcagcgtgccggtggaacacctgttcgccatccgcgagcgcctggtgcaagcagagcccggcctcaagcaccgcatcagcgccctgcgcaggcgcgtgctgtttcatgccctggaagaggtcggctacagcgaacagcacgcacaggcgctggccaacgaaggcttcgaagtgttcctgcatgcccgccaccaggtggagatcttcccagaggtgcagccggtgcttgaaatcttgcgccatcaatacatcctgggggtggtcaccaacggcaatgccgacgtcagccggctggggttggccgattacttccgctttgccctgtgcgccgaggacctgggcattggcaagccagacccggcgccgttcctcgaagcgctacgccgtggcgaggtggacgcgggtgcggcggtgcacatcggcgatcaccctggcgatgacattgccggtgcccagcgcgccggtttgcgcgcggtgtggttcaacccgcagggcaaggcctggactggcgatcaggcgccggatgccgaaatccagcgcctgtcgcagctgcccgacgtgctcgcgcgctggcgc

SEQ ID NO: 31959 - DNA, 303 bp, Pseudomonas putida
atggccaagaagagcatgaaaaaccgcgagctgaagcgtcagctcacggtagcaaagttcgctaagaagcgtgctgagctgaaagcgaccatcgtcaacctgaacgcctctccagaagagcgtttcgctgccgttgtcgctctgcagaagcagccacgcgacgctagcgcctcgcgcctgcgcaaccgttgccgcctgaccggtcgtcctcacggtgtataccgtaagttcggcctgggccgtaacatgctgcgtcaagctgcaatgcgcggtgacgtaccaggtctggtcaaggcctcctgg

SEQ ID NO: 31960 - DNA, 1101 bp, Pseudomonas putida
atgcatttcaccattcaacgcgaagccctgttgaaacccctgcaactggtcgccggtgtcgtcgagcgccgtcagaccttgccggtcctgtccaacgtattgctggtcgtacaaggccagcaactgtcgttgaccggtaccgacctggaagtcgagctggtaggccgcgtgcaactggaagagccggccgagcctggcgagatcactgttcctgcgcgcaagctgatggacatctgcaaaagcctgcctaacgacgccctgatcgatatcaaggtcgatgagcagaaattgttggtaaaggccggccgcagccgcttcaccctgtcgaccctgcctgccaatgacttcccgactgtggaagaaggcccgggttcgctgacctgcaacctggagcagagcaagctgcgccgcctgatcgagcgaaccagcttcgccatggcccagcaggatgtgcgctattacctcaacggcatgctgcttgaggtttcccgcaacacgttgcgcgctgtatccaccgacggtcaccgcctggcgctttgctcgatgagcgcgccgatcgagcaggaggatcgacaccaggtcatcgtgccgcgtaaaggtatcctggagttggcgcgcctgctgaccgatcctgaaggtatggtcagcatcgtgctgggccagcatcacatccgcgccactactggtgagttcacctttacctccaagctggtggacggcaaattcccggactacgagcgcgtactgcccaaaggcggtgacaagctggtcgtcggagaccgccaggcgctgcgtgaagccttcagccgtacagcgattctttccaacgaaaagtaccgcggtattcgcctgcagctggcagccggtcaactgaagatccaggctaacaaccccgagcaggaagaagccgaagaagaaatcagcgtggactacgaaggtagctcgctggagattggtttcaacgtcagctacttgctggacgtgctgggcgtgatgactactgagcaagttcgtctgatcttgtccgattcaaacagcagtgcgctgctgcaggaagctggcaatgacgattcttcctacgttgtcatgccgatgcgcctg

SEQ ID NO: 31961 - DNA, 2418 bp, Pseudomonas putida
atgagcgaaaatcaaacgtacgactcctccagcatcaaggtgctgaaaggtttggatgccgtacgcaagcgtcccggcatgtacattggcgacaccgatgatggtagtggcctgcaccacatggtcttcgaggtggtcgacaactcgatcgacgaagccctcgccggtcactgcgatgacattaccgtcatcatccacccggacgaatctatcagtgtgcgcgacaacggtcgcggcattccggtcgatgtgcataaggaagaaggcgtttccgcagccgaggtcatcatgactgtgctgcacgccggcggtaagtttgacgacaactcctacaaagtatccggcggtctgcacggtgtaggtgtgtcggttgtgaacgccctgtccgagaagctggttttgactgttcgccgtagcggcaagatctgggaacagacttacgttcacggtgttccacaagcgcccatggcggttgtcggtgacagtgaaaccacgggtacccacatccacttcaagccatcggctgaaaccttcaagaacattcacttcagctgggacatcctggccaagcgcatccgcgagctgtcgttcctcaactcgggcgttggcattctgctgaaggatgagcgcagcggtaaggaagagttcttcaagtacgaaggcggtctgcgtgcgttcgtcgagtacttgaacaccaacaagacgccggtcaactcccaggtgttccacttcaacgttcagcgtgacgatggcgtgggtgttgaagtcgccctgcaatggaacgacagcttcaacgaaaacctgctgtgctttaccaacaatattccgcagcgtgatggcggtacccacctggtgggtttccgttcctcgctgacccgtagccttaacagctacatcgagcaggaaggcctggccaagaagaacaaggtggcaaccactggcgacgacgcccgtgaaggcctgaccgcgatcatctcggtgaaggtaccggacccgaagttcagctcgcagaccaaggacaagctggtctcctcggaggtgaaaaccgccgtggaacaggagatgaacaagtacttcgccgatttcctcctggaaaacccgaacgaggcgaaggccgtcgttggcaagatgatcgacgccgctcgcgcccgtgaagccgcccgtaaagcccgtgagatgacccgccgtaaaggtgcgctggatatcgcgggtctgccgggcaagctggccgactgccaagagaaggatcctgctctctccgaactgtacctggtggagggtgactccgcgggtggctcggccaagcaaggccgcaaccgtcgtacccaggcgatcttgccgctgaagggtaaaatcctcaacgtcgagaaagcgcgcttcgacaagatgatttcgtcccaggaagtgggcacgctgatcactgcgctgggctgtggcatcggccgcgaagagtacaacatcgacaaactgcgttatcacaacatcatcatcatgaccgatgctgacgttgacggttcgcacatccgtacgctgctgctgaccttcttcttccgtcagctgccggagctggtcgagcgtggctacatctatattgcccagccgccgctgtacaaggtgaaacgaggcaagcaggagcagtacatcaaggacgatgaggccatggaagagtacatgacccagtcggctctggaagatgccagcctgcacctggacgaatcggcgccagcagtttccggcgtgcagctggaagcgctggtgaatgagttccgtagtgtcatgaagactctcaagcgcctgtcgcgcttgtacccggaagagctgaccgagcacttcgtctacctgcctgaggtgaccctggagcagttgggtgaccacgcagtgatgcaggcctggctggcccagttccaggcgcgtctgaactccagccagaagtctggcctggcttacaacgccagcctgcgtgaagacaaagagcgcaacgtatggctgcctgaagtggaaattacctctcacggtctggccagctacatcaccttcaaccgcgatttcttcggcagcaatgactaccgtaccgtagtcaacattggtgccaagctttcgagcctgttgggtgaaggtgcgtacgtgcagcgcggtgaacgccgcaaggcaatcgtcgagttcaaagagggcctggattggctgatgaacgagaccaccaagcgccatacgattcagcgatacaaagggctgggtgagatgaacccggatcaactgtgggaaaccaccatggacccgaccgttcgccgtatgctcaaggtcacgatcgaagatgctatcgccgctgaccagatcttcaacaccctgatgggtgatgcggtcgagccgcgtcgtgacttcatcgaaagtaacgcgctgtcggtgtcgaacctggacttc

SEQ ID NO: 31962 - DNA, 417 bp, Pseudomonas putida
atgcggcctttcaccatcaagcacatcgaccacctggtgttgcgggtcagcgacctgccgcgcagtgttgccttttacaccgaactgcttggctgcaccgtcagccgcgtgcgcgaagacctgggcatggtgcacctggccacgggcacggcgatgatcgacctggtaaccctggatggcccgctggggcagccaggcggagctgcaccgggcgtggaagggcgcaacctgcaccatttctgcctgcgcatcgagccgttcgacgaggccgcgttgacggcctatctggaagccgccggggtaaaggtggagcctgccgagaagcgttatggtgccgaaggggaggggctttcgctgtactgctacgacccggatggtaatcaggtcgagttgaaggggccggtagtgcctggcggg

SEQ ID NO: 31963 - DNA, 528 bp, Pseudomonas putida
gtgaatggctgggtcagggccgcagccttggtccttgtggtggcgtcctactggggcgcctaccagcatggccggtcggtggagcgtgcggttgccggccaggcgtcagcgcagcgagacagcggtgatcgcctagccgaggtaatcggcgagcgtggtgcccgtcaggaagaacagcgacgcgccgaggcgcaggaggaggcgagggcccatgcacaggacgaaagaaccattgctgatgctggcgctgctgacgccgatgctgctggtctgcggctgcggagtgatgccacccagctcgccgccaccatcagttgccccggctcggataccgccgctgtcgccagaggccaggcagccacccgcgccgccatggtgctctccgacctgctcgcacgggctgatgctcgagcgggagagttggcgacggcgtatgaccgagccaagatagcgggagaccagtgcaccatggagtacgactatatgagcaggcgacagtcgcggaaccagtctcacccaccggtgcca

SEQ ID NO: 31964 - DNA, 2109 bp, Pseudomonas putida
atggcccgcacaacgcccatcgagctgtaccgcaatatcggcatcgtcgcccacgtggatgccggcaagaccacgaccaccgagcggatcctgttctacaccggggtcaaccacaagatgggcgaagtgcacgatggcgcggcgaccatggactggatggcccaggagcaggaacgcggcatcaccatcacctcggcggcgaccacagcattctggcaaggctcgaccaagcagttcgcccacaagtaccgtttcaacatcatcgacaccccaggccacgtcgatttcaccatcgaggtggagcgctcattgcgcgtgctcgatggcgcggtcgtggttttcagcggcgcggacggcgtcgagccgcagtccgagacagtctggcgccaggccaacaagtaccacgtgccacgcttggcctacatcaacaagatggaccgccagggggccgacttcctgcgcgtggtcaagcagatcgatcaacgtctggggcaccacccggtgcccatccagctggccatcggcagcgaagaaaacttcatgggccagatcgacctggtgaagatgaaggccatctactggaacgatgccgaccagggcaccagctaccgcgaagaagaaatccccgccgaactgaaggctctggccgacgaatggcgcgcgcacatgatcgaagctgcggccgaggccaatgacgagctgaccatgaagtttctcgatggcgaggagctgagcatcgaagagatcaaggccgggttgcgccagcgcaccattgccaacgaaatcgtgcccaccatcctcggctcatcgttcaagaacaagggcgtgccgctgatgctcgacgcggtgatcgactacctgcccgccccgtcggaaattcctgccatccgcggcaccgacccggatgatgaagaaaagcacctggaacggcacgccgacgacaaagagccgttctcggcactggctttcaagatcgccaccgacccgttcgtcggcaccctcaccttcgcccgcgtttattccggcgtgctcagttcaggcaatgcggtactcaactcggtcaaaggcaagaaggaacgcatcggccgcatggtacagatgcatgccaaccagcgtgccgaaatcaaggacgtgtgtgccggcgatatcgccgcactgatcggcatgaaggacgtgaccaccggcgacaccctgtgcgacatggacaaaccgatcattctcgaacgcatggacttccccgacccggtgatttccgtcgcagtagagccgaaaaccaaggccgaccaggaaaaaatgggcatcgcgctgggcaagctggcccaggaagacccctcattccgcgtgcgtaccgatgaagagactggccagaccatcatctcgggcatgggcgagctgcacctggacatcatcgtcgaccgcatgcgccgcgagttcaacgtcgaggccaacatcggcaagccgcaggtggcctaccgggaaaaaatccgcaatacctgcgagatcgaggggcgtttcgtgcgccagtccggtggccgtggccaatacggccattgctggatccgtttcgcccccggtgatgaaggcaaagaaggcctggagttcatcaatgagatcgtcggcggcgtggtaccccgcgagtacatcccggccatccagaagggtatcgaggagcaaatgaagaacggcgtgcttgccggctacccactgatcaacctcaaggccgccgtgttcgacggctcgtaccacgatgtcgactcaaacgagatggcctacaagatcgccgcgtcaatggccaccaagcagttgtcgcagaaaggcggcgcagtgttgctggagccggtgatgaaggtagaggtggtgacgccggaggaatatcagggcgacatcctcggcgacttgagccgacgtcgcggcatgatccaggacggtgatgaaacaccggctggcaaggtgatacgtgccgaagtgccgttgggtgaaatgttcggctacgccacctcgatgcgctcgatgacccagggccgggccagcttctcgatggagttcacccgctatgccgaggccccggcgagcattgccgatggcatcgtcaagaagagccgcggggag

SEQ ID NO: 31965 - DNA, 495 bp, Pseudomonas putida
atgaacagcacgcttatccagacagaccgtttcgccctgagcgaaaccgagcgctcggccatcgagcacgaaatgcatcactacgaggacccgcgcgcggcgtccatcgaagccctgaagatcgtccagaaggagcgtggctgggtgccggacggcgccattcacgccatcggcgaagtgctgggcattccggccagcgacgtcgagggtgtcgccaccttctacagccagatcttccgccaaccggtcggccgccacatcatccgcgtgtgcgacagcatggtctgctacatcggcggccatgagtcggtggtcagccagatccagagcgagctgggcatcggcctcggccagaccactgccgacggccgtttcaccctgctgcccgtgtgctgcctgggcaactgcgacaaggctccggcactgatgatcgacgacgacaccttcggtgacgtgcagccggctggcgtttccaaactgctggagggttacgta

SEQ ID NO: 31966 - DNA, 1269 bp, Pseudomonas putida
gtgaccatcagtattcttggcgcccgggtgatcgaccccaacagtggcctggaccaggtcaccgacctgcacctggacggcggccgcattgtcgccatcggcgccgcaccggccggtttcagcgccagccgcacgatccaggctgatggcctggtcgctgcgcccggcctggtcgacctgggcgtgtccctgcgcgagccgggttacagccgcaaaggcaacatcgccagtgaaacccgcgctgccgttgccggcggtgtcaccagcctgtgctgcccgccacagaccaagccggtgctggacacctcggcggtagccgaacttattcttgaccgcgcccgcgaagccgccaacagcaaggtctacccggtcggcgctctgaccaagggcctggagggcgagcaactggccgaactggtggccctgcgtgacaccggttgcgtagcgtttggcaacggcctgaaggaaatccccaacaaccgtaccctggcccgcgccctggagtatgccgccaccttcgacctgacggtggtgttccactcccaggaccgcgacctggcccagggcggcctggcccacgaaggtgccatggccagcttcctcggcctgccgggcatcccggagagcgccgaaaccgtggccctggcgcgcaacctgctgctggtggaacagagcggcgtgcgtgcgcacttcagccagatcaccagcgcccgtggcgcgcggctgatcgcccaggcccaggccttgggcctgccggtaaccgccgatgtagcgctgtaccagctgatcctcacggacgagtcgctgcgcgagttctccagcctgtaccacgtgcagccgccgctgcgcaccgctgccgaccgtgacggattgcgcgaggcggtgaagtcgggggtgatccaggccatctccagccaccaccagccgcacgagcgcgacgccaagctggccccgttcggcgccaccgagccgggtatcagcagcgtcgagttgctgctgccactggccatgaccctggtgcaggacggcctgctcgacctgccgaccttgctggcccgcctgagcagcggcccggctgccgccctgcgcctgccggccggtgagctgaaagtgggtggcgcggccgacctggtgctgttcgacccgcaagcgtccaccgttgctggcgaacaatggttctcccgtggcgagaactgcccgttcatcggccactgcctgccgggcgcggtgcgttataccttggtcgatggccacatctgccacgaggcc

SEQ ID NO: 31967 - DNA, 768 bp, Pseudomonas putida
atgaacgaccagcgcaaaggcgaccacgccgaacccaccacccatttcggctaccaggacgtgcctgaaagccagaaagcgaagaaagtcgccgaagtgttccactcggtagcagccaagtacgacctgatgaacgacgtgctttccggcggcatgcaccgcctgtggaagcgctttaccatcgagctgtcgggcgtgcgcagcggcaaccgcgtgctggacatcgccggcggtaccggtgacctggcggccaagttctcgcgtcttgtcgggccgaccgggcaggtggtgctggccgacatcaacgattcgatgctcaaggttggccgtgaccgcctgcttgaccgtggcgtggccggcaacatcgagttcgtccaggccgacgctgaaaagctgccgttcccggacaaccacttcgactgcgtgaccatcgctttcggcctgcgcaacgtcacccacaaggacgccgccatccgttcgatgctgcgcgtgctcaagcccggtggccgcctgttgatcctggagttctccaagccgaccaacaagctgatgtccaaggcctacgacgcctactcgttcgccttcatgccgctggctggcaagctgatcaccaatgacgccgagagctaccgttacctcgccgagtcgatccgcatgcacccggaccaggaaaccctgaagagcatgatggtcgaggccggcttcgaccgcgtcacctaccacaacatgaccagcggcatcgttgccgtgcaccgggggatcaagccc

SEQ ID NO: 31968 - DNA, 1482 bp, Pseudomonas putida
gtgcccgtcgtccggaacaacacatggagtcgtagggcgaatggccacgaggctggtagactatgcggcatttttcgcttcgcaccgcaggcccgcctcgtgaccaccgaatccaccgcctttgccaccttgccgctgtccactgccatgctggccaacctggaggcccttggctatgcctcgatgacgccgatccaggcccagagcctgcctgtcatcctcaaaggccaggacctgatcgcccaggccaagaccggtagcggcaagactgccgccttcggcatcggcctgctcaacccgatcaacccgcgctacttcggctgccaggcgttggtgctctgccctacccgcgaactcgccgaccaggtggccaaggagctgcgccgcctggcccgtgccgaggacaacatcaagatcctgaccctgtgcggcggcgtttcgctgggcccacagatcgcttcgctggagcacggcgcgcacatcatcgtcggcaccccagggcgcatccagcagcacctggacaaaggcaccctggtcctggacgggttgaacaccctggtgctggacgaagccgaccgcatgctcgacatgggcttcttcgacgccatcgccagcatcatcggcaagaccccgtcgcgccgccagaccctgctgttctcggccacctacccggccggcatcaagcaactggccgccgacttcatgcgcaaccctcagcaggtcaaggtcgaaagcctgcacaccgacaaccagatcgagcagcgtttcatcgagattgacccgcagcaacgcctggaagccgtcacccgcgtgctcggccattaccgcccgcagtcgtgcgtagcgttctgcttcaccaagcagcaatgcgaggacgtggttgcccacctgaccgccaagggcatcgtcgcccaggccctgcacggcgacctggagcagcgcgaccgtgaccaggtgctgaccatgttcgccaaccgcagcagctcggtgctggtggctaccgacgtggccgcgcgcggcctggacatcgatggcctggacatggtcatcaacgtggagctggcgcgtgatgccgaaatccacgtgcaccgcgtgggccgtaccggccgcgccggcgagaaaggcgttgcggtcagcctggtggcaccggccgaaggccaccgcgcccaggccatcgaagcgctgcagaatagcccgctgcgctgggaccagctggacagcctgaaaaacaagggcggcgagcccctgctgccggtgatgaccacactgtgcattgccgctggccgcaaggacaagctgcgccctggcgacatcctgggggccttgaccggtgatgccggcatcccgggcaagcaagtgggcaagatcgccatcttcgacttccaggcgtttgtggccgtggagcgggcgctggccaagcaggccatgcagcggctgaacagcggcaagatcaagggtcgcgccctgaaagtccgcattatc

SEQ ID NO: 31969 - DNA, 1179 bp, Pseudomonas putida
gtgcactccaccgacgtgatcatccttggcgccggcgccgccggcctgatgtgcgcccagctcagtgcccgtagcggccgccgggtgctgctgctcgaccacgccaacaagccaggcaagaaaatcctcatgtccggcggcgggcgttgcaacttcaccaacctgtacaccgagccggccaacttcctttcgcacaacgcgcacttctgcaagtcggccctggcccgctacacccagtgggacttcatcgagctggtgtgcaagcacggcgtggcgtaccacgagaagaagctcggccagctgttctgtgacaacaaggccagcgacatcctcgacatgctgctggccgagtgcgacgaggccggtgccgagatccgcatgcacaccagcatcgaacagatcgagaagaccgaaagcggctacctgctgcagaccagcggcggccagttcgcctgccagtcgctggtcatcgccaccggcggcctgtcgatcccgaccctgggcgccaccggtttcggctaccaggtggcccgccagttcggccacaccctgctgccaacccgcgctgggctggtgccattcaccatcaccgagccccaactcaaggcgatgtgcaccgagttgtccggcacctcgctggactgcaccgccagctgcaatggcaccagcttccgcgaaaacctgctgttcacgcaccgcggcctgagcggcccggcaatcttgcagatctcgtcgttctgggaagccggtgacacggtcgagatcaacctgttgcccgaccgcgatgcgctttcctggctgcaacagatgcaggccgaacgcgccaacgccgaactgaagaccgtgctgggcgaggtgttcacccgcaagctggccaacttgctggccgagcagtggttcgagtcgaagccaatgaagcagtacaccccggcggaactggcgcaaatcgccgaaaagctggcgaactggcaggtagtaccggccggcaccgaaggctaccgcaccgccgaagtgaccctgggcggcgtggatacccgcgaggtgtcgtccaagaccatggaatcgctgaaaagcccggggttgtacttcatcggtgaagtgctggatgtcaccggccacctgggcggcttcaacttccagtgggcttgggcatcggcgaacgccgccgcgcagttcgtg

SEQ ID NO: 31970 - DNA, 2181 bp, Pseudomonas putida
atgtcatcgagctcgttccgtcagtcactgcgtcgcctgtggggccaagacaagttcagctacagcatccgggtcaccattgccctcaccggcagcctggccctgtgctggtaccagaacgagatggccctgctgattccgctgttcctcggcatcatcgccagcgccctggccgaaaccgacgacagctggcagggccgcctcagcgccctggccgttaccctggtgtgcttcgccatcgctgcactggcagtcgagttgctattcccctacccctggatcttcgtcgttgccctggccctggctgcctttggcctgaccatgctcggggcgctgggcgagcgctacggcgccatcgcttcggccaccttgatcactgcggtctacaccatgatcggcgtggaccagcgcggcggccaggtcaccgacttctggcacgaaccgctgctgctggtggcaggtgcggcctggtacgggctgttgtcggtgctgtggcaggcgctgttttccaaccagccggtacagcagagcctggccagactgttcttcgagctgggcagctacctgaagctcaaggccagcctgtttgaaccggtccgcacgctcgacgtcgaggcacggcgcctggaactggcccagcagaacggcaaggtggtggccgcgctgaacgcagccaaggagatcatcctgcaccgggtgggcaacagccaaccaaactcgaaggtaagccgctacctcaagctgtacttcctggcccaggatatccacgagcgtgtcagtgcctcgcactacccctacaacgcactgaccgaggcgtttttccacagcgacgtcatgttccgctgccagcgcctgttgcgtaagcagggttcatcctgccaggaactggcccgctcgatccgcctgcgccaaccgttcgtgctggccagcggttatccagaagccctcgaagacctcaacgcctcgctggagcacctgcgcatccagagcaacccggcctggcgcggcctgttgcgctcactgcgggcactcgccgccaacctggcaacactggaccgcctgctcagtgccgccagcaacccggacagcctggccgacgccagcgacagcagcctgctcgaccgctcgccgcgctcgctgaaggacgtgtggacgcgcctgcgcacccagctcacaccgacctcgctgttgttccgccatgccttgcgcctgccgctggcgctgtcgatcggctatggcatggtgcacctgattcacccgacccaaggctactggatcatcctcaccacgctgttcgtctgccagcccaactatggggccacgcggcgcaagctggtgcagcgaatcttcggcactgccgttggcctgacagtgggttgggccttgttcgacctgttccccaacccggtcatccagtcgttgttcgccgtggttgccggggtggtgttcttcgtcaaccgcaccacccgatacaccctggccactgccgcgatcaccctgatggtgctgttctgcttcaaccagatcggcgatggctacggcctgttcctgccgcgcctgttcgataccctggtcggcagcctgattgccattcttgcagtgttcctgttcctgcctgactggcagggccgacggctgaacaaggcgctggccaataccctggcctgcgccagcgtgtacctgcgccagatcatgcagcagtatgcccacggcaagcgcgacgacctggcctaccgcctggcccggcgcaatgcccacaacgctgacgcggcgttgtccaccaccttggccaacatgctgatggagccggggcatttccgtaaggaggccgacgttggctttcgcttcctggtgctgtcgcacaccttgctcagctacctctcggggttaggcgcgcaccgcgacacggcgttgccagccgaggtgcaggagcagttgatcgaaggcgccgggcaaagcctggccagcagcctggacgaaattgccaacggcctggccgcgcggctgccggtggcgattcacagtgattccgaagaggcgttggccaatgccctggagcagatgccggaagatctggatgagcatcagcggttggtgcagacgcagctggcgttgatatgccggcagctggggccactgcggaccctggcggcacacctgatcaaggagaatgccccggcc

SEQ ID NO: 31971 - DNA, 798 bp, Pseudomonas putida
atgatcaagaaatacctttcgcgactgctggtcggtgtgaccgccctggtcgccgtgaccgcggcccaggcgggcgccatcgacgacgcggtcaagcgtggcaccctgcgggtgggcatggacccgacttacatgccgttccagatgaccaacaaacgtggcgagatcatcggcttcgaagtcgatatcctcaaagccatggccaagtccatgggcgtgaagttcgaggcagtgtccaccgcctatgacggcatcatcccggccctgctgaccgacaagttcgacatgatcggcagcggcatgaccctgacccaggagcgcaacctgcgcctgaacttcagcgaacccttcatcgtggttggccagaccctgctgatccgcaaggagctggctggcgagatcaagtcgtacaaggacctgaacaacgagaagtaccgcctgacctccaagcttggcaccaccggcgaaatggtctccaagaagctgatcagcaaagccaagtaccacggctacgacaacgaacaggaagccgtcatggacgtggtcaacggcaaggccgacgcctttgtctatgacgcgccgtacaacgtggtggcggtggataaagccggtgcaggcaagctgctgttcctcgacgagcccttcacctacgagccgctggccttcggcctgaagaaaggcgactacgacagcatcaacttcatcaacaacttcctgcaccagatcaagcacgacgggacctacgatcgtattcacgacaagtggttcaagaacaaggactggctgaaggaaatggaa

SEQ ID NO: 31972 - DNA, 2451 bp, Pseudomonas putida
ttggcggccaacccggccgccagctctgccgaggccgtgcaggcctcggtgggcccgcgcctgaccgtgggcagcgccgccgagctggaagaagccgaaatgctcggcgtcgacggcagcggccgcctgtgcctgaagatcgccccgccgatcaaacgcaccaaggtcgtgcccgagccatggcgcaccaatgtgctgatccgcatgtggcgacgcatgaccggccgccccaatgccccgcagccgcccaagcgcgagctgccgccggcccgctggcgcacggtcggctctatccgccgttacattctgctggcgctgatgatcggccagaccatcgtcgctggctggtacatgaaaggcatcctgccgtaccagggctggtcgttcgtggactttgacgaaatcgtcaaccagccgctgtgggacacggtggtgcaggtgtggccgtatgccctgcaaacttccatcctgatcctcttcggcatcctgttctgctgggtgtcggcgggcttctggaccgcgctgatgggcttcctcgagctgctcaccgggcgtgacaaatacaagatttccggtagcagcgcaggcaacgagccgatcgcgcccgaggcgcgtaccgcgctggtgatgccgatctgcaacgaagacgtgccgcgggtgttcgccggcctgcgcgcaacgttcgagtcggtggccgccagcggcaacctcgaccggttcgacttctttgtgctcagcgacaccaacgacaccgacattgccgtggccgagcaacaggcctggctggatgtgtgccgtgaaaccaaaggctttggccgcatcttctaccgccgccgtcggcgccgtgtgaagcgcaagagcggtaacctcgacgacttctgccgtcgctggggtggcgagtacaagtacatggtcgtgctcgacgccgacagcgtcatgagcggcgagtgcctgagcagcctggtgcgcctgatggaggccaacccggacgccggcatcatccagaccgggccgaaagcctcgggcatggacaccctgtatgcacgcatgcagcagttcgctacccgcgtgtacggcccactgttcactgccggtctgcacttctggcagttgggtgagtcgcactactggggccacaacgcgatcatccgcatgaagccgttcatcgagcactgcgccctggcgccgttgccgggcaaaggcgcgttcgccggtgccatcctttcccacgacttcgtcgaagctgcgctgatgcgccgtgccggctggggtgtgtggattgcctacgacttgccgggcagctacgaagaactgccgccaaacctgcttgacgagctcaagcgcgaccgccgctggtgccacggcaacctgatgaacttccgcctgttcctggtcaagggcatgcacccggttcaccgtgcggtgttccttaccggggtgatgtcttacctgtcggcgccgctgtggttcctgttcctggtgctgtcgaccgcgctgctggcaaccaacacgctgatggagccacagtatttcatcgagccgtaccagctttacccgctgtggccgcagtggcacccggagaaggctgtggcgctgttctccaccaccattgtgctgctgttcctgcccaagctgctcagcgtcatcctgatctgggccaagggcgccgtcgagtacggtggacgcgtcaaggtcaccttgtcgatgctgatggagatgctgttctccatgttgctggcaccggtacgcatgatcttccacacccgcttcgtgctggccgcattcctcggctgggctgcgacctggaactcgccgcagcgtgacgacgactccacgccgtggggcgaagcggtgcgccggcatggcccgcagacgctgctgggcattgcctgggccgcactggtggcgtggttgaacccgagcttcctgtggtggctggcgcctatcgtcggttcgctggtgctgtcgatcccggtatcggtgatttccagccgcacccgcctgggcctggcggccaaggacgagaagctgttccttatcccagaggaatacgccacgccacaagagctgttggctaccgaccagtacacccacgaaaaccgctggcatgccctgcatgatggcttcgtgcgggccgtggtcgacccgcggcagaatgccctggcctgtgccatggccactgcccgccatggccaggcggcaccgatcgaagcgttgcgtgccgagcgcgttgccaaggcgattgaagtcgggccgaaaggcctggacctcaatactcgcctggctctgctcagcgacccggtggcactgagccgcctgcacgagcaggtgtgggccgagcacaatgcggcatggatcgatgtgtggcgtgcgtcgatcaacaatgacccgcattcgccgctgttgccgttgcaccctgaaaacgcaggccaaccgagcctcgtcggcgct

SEQ ID NO: 31973 - DNA, 1530 bp, Pseudomonas putida
gtgaccgaactcaccctcaagcctggcaccctgaccctggcccagctgcgcgcgatccatgccgcgcccgtgcgcctgcaactggatgccagcgccgcaccggccatcgacgccagcgtcgcctgtgtcgagcagatcattgccgaagaccgtactgcctacggcatcaacaccggtttcggcctgctggcctcgacccgcatcgccagccatgacctggagaacctgcagcgctcgctggtgctgtcccacgccgccggtatcggcgcgccgctggatgacgacctggtgcggttgatcatggtactgaagatcaacagcctcagccgtggcttctccggcatccgccgcaaagtcatcgacgcgcttattgccctggtcaacgccgaagtctacccgcacatcccgctgaaaggctcggtaggcgcatccggtgaccttgccccgctagcgcatatgtcgctggtgctgctgggcgaaggcaaggcccgctacaagggccagtggctgccggccaccgaagccttggcgattgccggcctcgaaccgctgaccctggccgccaaagagggcctggccctgctcaacggtacccaggcctccaccgcctatgccttgcgtggcctgttccaggccgaagacctgtatgccgcggccatcgcctgcggcggcctgagcgtcgaagccgcattgggctcgcgctcgcccttcgatgcgcgtgtccacgaagtgcgtggccaacgcggccagatcgacaccgcggcctgcttccgcgacctgctgggcgactccagcgaagtgtcgctgtcgcacaagaactgcgacaaggtccaggacccgtactcgctgcgctgccagccgcaggtcatgggtgcctgcctgacccagctgcgtcaggccgccgaggtactgggcatcgaagccaacgctgtgtcggacaacccgctggtgttcgctgccgaaggtgatgtgatctccggcggcaacttccacgccgaaccggtggccatggccgccgacaacctggccctggccatcgccgaaatcggctcgctcagcgaacgccgcatctcgctgatgatggacaagcacatgtcccagctgccgccgttcctggtggaaaacggtggggtcaactccggcttcatgatcgcccaggtcaccgctgccgccctggccagcgagaacaaggctttgtcgcacccgcacagcgtcgacagcctgccaacttcggccaaccaggaggaccacgtgtcgatggccccggccgccggcaagcgcctgtgggaaatggccgaaaacacccgtggcgtgctggccatcgaatggctgggcgcgtgccagggcctggacctgcgcaaaggcctgaagacttcggccaagctggagcaggcgcgccaggcgctgcgcagtgaggtgccgcactacgaccgtgaccgtttcttcgcgccggatatcgaaaaggccgtggacctgttggccaagggtagtctgaccggcttgctgccggcgggtgtactgccaagcctg

SEQ ID NO: 31974 - DNA, 1188 bp, Pseudomonas putida
atgagcgaatactcccttttcacctccgagtccgtgtccgaagggcatccggacaagatcgccgaccagatttcggacgcagtccttgatgccatcatcgctcaggacaaatacgcccgcgtagcctgcgaaaccctggtcaagaccggtgtcgccatcatcgccggcgaagtcaccacttcggcctgggtcgacctggaagacctggtacgcaaagtcatcatcgacatcggctacaacagctccgacgtcggcttcgacggcgccacctgcgccgtgatgaacatcatcggcaaacagtcggtagacatcgcccagggcgtggaccgctccaagccggaagaccagggcgccggtgaccagggcctgatgttcggctatgccagcaacgaaaccgaagtcctgatgcctgcaccgatctgcttctcgcaccgtctggtagaacgccaggccgaggcgcgcaagtccggcctgctgccatggctgcgcccggatgccaagtcgcaggtcacctgccgctacgagaacggcaaagtggtcggtatcgacgccgtggtgctgtcgacccagcacaacccggaggtttcgcagaaagacctgcaagaagccgtgatggagctgatcgtcaagcacacgctgccggccgaactactgcacaaaggcacccagtaccacatcaacccgaccggcaacttcatcatcggtggcccggtgggtgactgcggcctgactggccgcaagatcatcgtcgactcctacggtggcatggcccgtcacgggggtggcgcgttctccggcaaggacccgtccaaggtcgaccgttccgctgcctacgccggccgctacgtggccaagaacatcgtcgccgccggtttggccgagcgttgcgagatccaggtgtcgtacgccattggcgtggcccagccgacctccatctcgatcaacaccttcggtaccggcaaggtctccgacgacaagatcatccagctggtgcgcgagtgcttcgacctgcgtccgtacgccatcaccaccatgctcgacctgctgcacccgatgtatcaggaaaccgctgcctacggccacttcggccgtactccgcagcagaagactgtcggcgacgacaccttcaccaccttcacctgggagcgcaccgaccgcgcccagtcgttgcgtgacgctgccggcctg

SEQ ID NO: 31975 - DNA, 1602 bp, Pseudomonas putida
atgaacctggtgactgcgcacagcctcaggcctgagccttcactccggcaccacatcctgcagggctttgctctgtgcatggcagcaggctcgaatggaccagcccccacctccattgaacggcagcggttgtcctgccctgcggcattgcttaggcttacgcggtcgaaccacgccgcaaagccaggagaagtgcccatgggcctcaatgatcagtggatgcaacgcgacctcaaggtcctgtggcacccctgtacccagatgaaagaccacgagcagctgccgctgatccctatcaagcgcggcgaaggcgtgtggctggaagacttcgagggcaaacgctacctggatgcggtgagcagctggtgggtcaacgtgttcggccatgccaacccgcgcatcaaccagcgcatcaaggaccaggttgaccagctcgagcacgtgatcctggccggtttcagtcatcagccagtgatcgagctgtccgaacgcctggtcgccatgaccccggccggtctcgaccgggtgttctatgccgacaatggctcgtcgtgcatcgaagtggcgctgaaaatgagcttccactactggcagaacatcggcaaaccggacaagaagcgcttcgtcaccctgaccaacagctaccacggcgaaaccattgccgccatgtcggtgggtgatgtgccgctgttcaccgaaacctacaaggcgctgctgctcgacaccctcaaggtgccaagccctgactgctacctgcgccccgagggcatgagctgggaggagcactcgcgcaacatgttccaggccatggagcagaccctggccgaacaccacgcctcgatcagcgccgtgatcgtcgagccgctgatacagggtgccggtggcatgcgcatgtaccacccggtgtacctcaagttgttgcgcgaggcctgcgaccgctatgacgtgcaccttatccacgacgagatcgccgtgggcttcggccgcaccggcacgatgttcgcctgcgagcaagccggcatccgcccggatttcctgtgcctgtccaaggccctgaccggcggctacctgccgctggccgcctgcctgaccaccgacaaggtgtaccaggcgttctatgacgattacccgacactgcgcgcattcctgcactcgcacagctacaccggcaacccgctggcgtgcgctgcagcgctggcgaccctggatatcttcgagcaggacaacgtgatcgaggccaacaaggccctggccacgcgcatggccacagccactgcacatttggccgatcatgctcatgttgccgaaatacgccagactggcatggccctggccatcgaaatggttcaagacaaggcaggcaagcttgcctacccctggcaggagcgccgtggcctgaaggtgttcgagcacgccctgacccgcggcgccctgctgcgaccgctgggcagcgtggtgtacttcctgccgccgtacgtgatcacccccgagcagatcgacttccttgccgaagtggccagcgaaggcatcgatatcgccacccgcgacagcgtcagtgtcgcagtaccggccaacttccaccccgacttccgcgacccgggc

SEQ ID NO: 31976 - DNA, 719 bp, Pseudomonas putida
atgagactgtcccgcttcttcatcgacgcccccctgagccttggcgagacgacctgcccgaggcccaggcccattacattggccgcgtgctgcgcatggcacccggcgacgccgtgcagctgttcgatggcagcggccaggaataccgtggtcagttgctcgaggtgggcaagaaaactgtccgcgtcagccttgaccaggcctttgccggccaggccgattcaccgctgcatgtgcacctgggccagggcctttcccgtggcgagcgcatggactgggcgatccagaaggccaccgagcttggtgccaacgaaatcaccccgatcgtcagcgagcgctgcgaagtgcgcctgaaagacgaacgcgccgacaagcgcctggcccactggcgccaagtggcgatcagcgcctgtgaacaatgcgggcgttctaccttgcccgtcatccacccacccgtgaccctggccgaatggttgagcagcaccaaggctgacctgaagctggtcctgcacccggtggctgagccgcttatcagccatgaaaagcccgccaccctggccttcgtgatcggccccgaaggcggccttagcgaagccgaggtcgagcaggccaaagccgccggcttccacgcagcacgccttggcccgcgcgtgctgcgcaccgagaccgcgccggtggtggcgctgtcggtggcacagcagttgtggggcgacttttaa

SEQ ID NO: 31977 - DNA, 615 bp, Pseudomonas putida
atgtattacggtgaacgcttcaacgcctggacccacctggtcggtgccgtcctcgctgctattggtgccatctggctgatcgtggccgcgggcctgcaaggcgacccgtggaagatcgtcagcttctccatctacggcggcacgctgctgttgctgtacagcatttccaccctgtaccacagcacccgtgggcgggcgaaagtgatcatgcgcaagctcgaccacctgtcgatctatctgctgattgccggcagctacacgccgttttgcctggtcagcctgcgcggcccttggggatggagcctgttcggcgtggtctgggggctggcgatcatcggcatgttgcaagagatcaagccgcgctccgaggcgcggatcctgtcgatcatcatctatgcggtaatgggctggatcgtgctggtggcagtcaagccgctgctgaactcgctgggcacggccggcttcgcctggctggctgccggcggcgtgttctacaccgtcggcatcattttcttcgccttcgacagccgtttccgccactggcatggcatctggcacctgttcgtcatcgctggcagcctgatgcacttcgtggcggtgtcgctctacgtgcgc

SEQ ID NO: 31978 - DNA, 2058 bp, Pseudomonas putida
gtgaacaagcctgccacccccgtcactgccaccaccgtgagcccacgtacccgcagcatcgcgcagatcaccgtgctgttcctgatcctgatcctttcgatcatcttgctgttcgccaactttgcttacctgaatacccaatccaactacgacaagcagtacatcggccatgccggcgagctgcgcgtgctgtcgcagcgtatcgccaagaacgccaccgaggcggccaccggcaaggccctggccttcaagctgctgtcggatgcgcgcaatgacttcgaacgacgctggggttacctgcgccagggtgacaagtccactggcctgccgcctgcgccacctgcggtgcgtgacgagatggaatcggtacgccgcgactgggaaaacctgcgcaagaacaccgacatcatcctggccagcgagcagaccgtgctgtcgctgcaccaggtggcagcgaccctggccgagaccgtgccgcagctgcaggtggaatacgaaaaagtggtcgagatcctgctgcagagcggtgccccggccaatcaggttgcggtggcccagcgccagctgttgctggccgaacgcatccttggctcggtcaacaccgtgctggccggtgacgacagcgccgcccaggcggccgacgccttcggccgtgacgccgggcgctttggccaggtgctggagggcatgatcaatggcaatgcgacaatccaggtcacccgcgtcgaggacgccgacgcgcgtgcgcggctggccgaaatcgccgagttgttccagttcgttgccggttcggtggatgaaatcctcgaaacctcgcccgaactgttccgtgttcgagaggccgcgggcaacatcttcagcctttcgcaaaccctgctcgacgaagcgtcgcacctggcgaacggtttcgagaacctggctggcgggcgcaccctcgacaccgttggcggctatgtcctggggctgctggcgctggcctcgatcatcctcatcggcctggtcatggtgcgcaccaccaaccgccaactgcgcgagaccgcagaaaagaacgaacgcaaccagcaggccatcatgcgcctgctcgacgaaatcgaagagctggcagatggcgacctgacggtgaccgtatcggtgactgaagacttcaccggtgccattgccgactcgatcaactattccgtggaccagttgcgcgacctggtcgccaccatcaaccacagtgcagtgcaggtcgccgccgccgtgcaggacacgcagaacactgcgcggcaactggccaaggcctccgagcaccaggctgcacagatcagcgaggcctccgaggcggtgggtgacatggtcgagtcgatcgaccgggtttcggcgcatgcctacgaatcggccaaggtggccgagcgttcggtggccattgccaacaagggcaacgaggtggtgcacaacaccatcaacggcatggacaacattcgcgagcagatccaggacaccgccaagcggatcaagcgtctgggcgagtcctcacaggaaatcggcgacatcgtcagcctgatcgacgacattgccgaccagaccaacatcctcgccctgaacgccgccatccaggcctcgctggccggtgaggccggccgcggctttgccgtggttgccgacgaggtgcagcgcctggccgaacgttcatcgtctgccacccgccagatcgaggcgctggtgcgtaccattcaggccgataccaacgaagcggtgatctccatggagcagaccaccgccgaagtggtgcgtggcgcacgcctggcccaggatgccggggtggcgctggccgagatcgaaggggtgtcgcagaacctcgccgaccttatccacagcatctccgacgctgcccagttgcagacctcgtcggccgggcagatctcccacaccatggcggtgatccagcagattaccgcgcaaacctctgccggctccggtgccactgccgacagcatccgccacttggcccgcatggccagcgagatgcgccgttcggtgtccggtttcaccctgccaccccctaccgagccgcgt

SEQ ID NO: 31979 - DNA, 423 bp, Pseudomonas putida
atggctgatctacgcctgctgctgggcttcgactatggcagcaaacagatcggcgtggccgtcggccaggtgattaccggccaggcccgcgaactgtgcaccctgaaggcgcagaacggcgtaccggactgggcccaggtggaaaagctgattgccgaatggaagccagatgccattgtcgtcggcctgccgctgaacatggacggcacacccagcgaaatgagcgcccgcgccgaaaagttcgcccgccgcctgaacggccgcttcaacctgcccgtgcacacgcacgacgagcgcctgaccaccttcgaggccaaaggcgagcgcatggcccgtggcggccagcgtggcagctaccgcgacaacccggtcgatgccattgccgccgccttgttgctgcaaggctggctggaggccaatacc

SEQ ID NO: 31980 - DNA, 894 bp, Pseudomonas putida
atgctaaccatgttgcccgagctgaaaatcgcccagttgcgttacttcgtactggtcgccgaactcaagagtttccacgcggccgcccgccaggcctttcgcacccagcctgcgatatccctggccctgcgtgaactggagcagaagctggggcaggcactggtcgaaaagggcggtggccgggtagagctgacgccatatggcgagcattgcctcccgttgtttcgtggcttgatcgagcaccatgaccgtattgcgcgtgaagccatgctgtttgcccggcatgaaatcggccaggtcagcatcgccaccgtgccttctgtggccagccgaatgctgccagggccgctggcccgctttgtggccgcgcaccccaatgtgcaggtcagcattcaggacggcacggccgaacgtgtgcagcagttgctcgctcaagggcaggtggatttcggcatcagcagcctgtgggtggacgatgaccagctcgaattcgcccccatcgtgaatgatcaggttggcgtggtgtgccgcagcgaccacccgctggcgcaggcgggcgggcggctgcattgggcgcagttgctgggcgtgccgatgatccgcaacggtacctcgcaattgctggcgggtaccgaggccgagggtttgctggccgatagccggctgttcatttccaacatgatttcgttgatcgccatgctggaggagggggtagggatcagtaccttgccgtacctcgcttttccgcaggagaacgacaaactggcgttcgtaccccttgaggagcccagggtagaacggcatatcggcatgctcacccgcaaagggcgcagcttgtcacctgtggcgggggcactgatggcgtttctgcaagtgcagttggcgaaggctggc

SEQ ID NO: 31981 - DNA, 345 bp, Pseudomonas putida
atgatcacaccgcccgatgtcttcaaaagcctctctgacgaaacccgcgctcgcgccactctgcttatcgccagcctgggcgaactgtgcgtctgcgagctgatgtgcgcgctcaacgacagccaacccaagatcagtcgccatctggcacaactgcgcagcaatggcatgctgctggatcgccgtcagggccagtgggtgtattaccgcctgaatccggagctgccttcctgggttcacgaaatgctgcaggtcaccttgcaggccaattcgcaatggctggctgacaatgcccttcggctgaagaacatggacggtcgccccgtgcgtgattccgtctgctgc

SEQ ID NO: 31982 - DNA, 366 bp, Pseudomonas putida; identical to SEQ ID NO: 31315

SEQ ID NO: 31983 - DNA, 2835 bp, Pseudomonas putida
aagacctaccagccgcacgcaatcgaaacttcctggtacaacacctgggagtccgagaactatttcgctccacaaggtgcaggcgagtcctacaccatcatgatcccgccgccgaacgtaaccggcagcctgcacatgggccacgggttcaacaacgcgatcatggacgccctgatccgtttccgccgcatgcaaggccgcgacaccctgtggcagccaggcaccgatcacgcgggtatcgccacgcagatgctggtcgagcgccaacttgaagccaaaggccagaaccgtcatgacctgggccgcgaaaagttcctggaaaaagtctgggaatggaaggatcagtccggtggcaacatcagccgccagattcgccgcctgggctcgtcggtagactggagccgcgagcgcttcaccatggacgacggcctctccgaagcagtgaaagaagcgttcgtgcgcctgcatgaagatggccttatctaccgcggcaagcgcctggtcaactgggacaccaagctgcacacagccatctccgacctcgaagtggaaaaccacgacgagaaaggccacctgtggaacctgcgctacccgctggccgacggcgccaagaccgccgaaggccaggactacctggtagttgccaccacgcgtccggaaaccctgctgggtgacgctgccgtggccgtcaacccgaacgacgaacgctatcaggcactgatcggcaaattcgtcgaactgccattggtcggccgccgcatcccgatcatcgccgatgactactgcgaccccgagttcggtaccggttgcgtgaagatcacaccggcccacgacttcaacgactacgaagtcggcaagcgtcataacctgccgctgctgaacatcttcgacaagaacgccttcgtgctgtccagcgcccaggccttcaacctcgacggcagcgttaacgagcaggtcgacacccagctgccggcccagtacgccaaccttgaccgctttgtcgcgcgcaagcagatcgtcgccgacctggacgcccagggcctgctggtcagcatcgacgaccacgccctgaaagtgccgaaaggcgaccgctccggcacggtcatcgagccgtggctgaccgaccagtggtacgtttccaccaagccgctggcagagcctgccatcgccgccgtggaagatggccgcatccagttcgtgcccaagcaatacgagaatatgtacttctcctggatgcgcgatatccaggactggtgcatcagccgccagctgtggtggggccatcgcattcctgcgtggtacgacgaggccggccaggtctacgttggccgcaacgaggaagaagtgcgcgccaagcacaagctgggcgccgacgtggtcctgcgtcaggatgacgacgtactcgacacctggttcagctcgggcctgtggacattctccaccctgggctggccggagcagaccgaattcctcaagaagttccactccaccgacgtgctggtgactggcttcgacatcatcttcttctgggttgcgcgcatgatcatgctgaccatgcacctgatcaagaacgaagacggcaccccgcaggtaccgttcaagaccgtgtacgtgcacggcctggtacgtgacggccagggccagaagatgtccaagtccaagggcaacgtgctggacccgctggacatcgtcgacggcatcaccctcgacgccctgctggaaaaacgcaccagcggcatgatgcagcccaagcttgccgagaagatcgccaagcagaccaaggccgagttccccgaaggtattgccagctacggcaccgacgccctgcgcttcaccttctgctcgctggcctcgaccggccgcgacatcaagttcgacatgggccgcgtcgaaggctaccgcaacttctgcaacaagatctggaacgcagcccgctacgtgctggacaagggtgaagactgcggccagaacggcgaagcctacgagctgtcgctggccgaccgctggatcatctcgcagcttcagcgtaccgaagccgaagtaacccgccagctggagcagttccgctttgacctggccagccaggcgctgtacgagtttatctggaaccagtactgcgactggtacctggagctgtccaaaccggtactgtgggacgaaaacgccccggtagagcgcgcccgtggcacccgccgcaccttggtgcgcgtgctggaagtggcactgcgtcttgcgcatccgttcatgccgttcatcaccgaagaaatctggcagcgcatcgcgccgctggccggcatcgacggcaagaccatcatgctgcagccatggccagtggccaacgaagcacgtattgacgccgctgccgaaggcgacatcgagtggctgaaagagttgatggtcggcctgcgcaatatccgcgccgaaatgaacatcggccccggcaagccgctgccgctgttcctgaagaacgccaacgccgacgaccagcgccgcctgcaggaaaacgaagcgctgctgaagaagctggccaaggtcgagtcgttcaccgtactgggtgatgccgacgaagcgccgctgtccgctaccgccctggtcggtgacctgcaagtgctggtgccaatggccgggctgatcgacaaggatgccgagctggcgcgcctgaacaaggaaatccagcgtctgcaaggtgaagtgcaacgtgttggcggcaagctgtccaacacagccttcgtcgacaaggccccgcctgcggtgatcgagaaggaacgcgccaagctggccgagtccgaacaggccctggccaacttcaccgagcagcatgcgcggattgcagcg

SEQ ID NO: 31984 - DNA, 366 bp, Pseudomonas putida; identical to SEQ ID NO: 31315

SEQ ID NO: 31985 - DNA, 1425 bp, Pseudomonas putida
atgagcgaaccgggacagaagctgcgcctgggcgcgctgatcgcgctggtggtcgggtcgatgattggcggcgggatcttctcgctgccgcagaacatggccgcgcgtgctgatgtgggcgcagtgctgatcggctgggggatcaccgcggtcggcatgttggccctggccttcgtgttccagaccctggccaaccgcaagccggaactggactcgggggtatatgcctacgccaaggccggctttggcgagtacatgggcttttcctcggcctggggctactggatcagcgcctggctgggcaacgtcggctatttcgtgctgctgttcagcaccctgggcttctacttcccggtgttcggcgaaggcaacacacccatcgccatcggttgtgcatcgctgctgctgtggtcggtacattttctggtgctgcgcggtatcaaggaggcggccttcatcaaccaggtcaccaccgtcgccaaagtggtgcctttgctgattttcgtggtgatcgctgcattcgccttccgcgccgatatcttcacccgggatatctggggcttgagcaacccacaattcggcagcgtgctggagcaggtgcgcaacatgatgctggtgaccgtgttcgtgttcatcggcatcgagggcgccagtgtgtattccgggcgcgcccagcgtcggtcagacgtgggcaaggccacggtcatcggttttctgggtgtgctggcgctgctggtgctggtcaacgtgttgtcgctgggcatcatgacccaaccggaactggccgggctgcagaacccctcgctggcctcggtgctggagcatatcgtcggcccctggggcgccttgctgatcagcctcggcctggcggtctcgctgcttggcgccttgctttcatgggcgctgctgtgtgccgaaatcctttacgccacggcgcgggacaagaccatgccgcgctttctggccaaggaaaacgccaaccatgtgccggctaacgccctgtggctgaccaactgcatgattcagggtttcctgctgattacgctgttctccgccggtacgtacaccagtctgatctacctggcctcgtcaatgatcctggtgccctacctgtggtctgcggcctatgccgtgctgctggcgatgcgcgcagaaacctatgccgggcagccgaggttgcggcgcaaggacttgctggtggcgctggttgccctgctgtatgccgtgtggctgctgtatgccggcgggctcaagtacctgctgctttcggcgctgctgtacgcccccggcgtcatcttgttcgcgagggccaagcatgagcaggggcagacgttgttcacggcctgggaaaagctgattttcgccgccgtgctggtgggtgccgcgctggcggcctacgccttgtattcagggctgctgagcttg

SEQ ID NO: 31986 - DNA, 1479 bp, Pseudomonas putida
atgaccctcgttcgtttccagatgtgcatcgacggccaatggcgcgatgcccagagcggcaagaccttcgacagcctcaacccggccaccgcccaggcctgggcgcaactgcccgacgccgatgaagccgatgtggagctggccgttcaggccgcccagcgtgccttcgacagcaaggcgtggcgcagcatcaccgctaccgcccgcggcaagctgctgcgtcgtctgggtgacctgattgccgagaacaaggagcacctggcccaactggagagccgtgacaacggcaagctgatccgcgaaacccgcggtcaggtcggctatctgccggagttcttccactacactgcgggcctggccgacaagctcgaaggcggcaccctgccgttggacaaacccgacctgttcgcctacaccgtgcacgagccaatcggcgtggttgccgggatcatcccgtggaacagcccgctgtacctcaccgcgatcaagctggcgccggccttggctgccggcaacaccatcgtgctcaaaccgtccgagcacgcctcggcaaccatcctcgagctggcccgactggcccttgaggccggcttcccggccggtgtggtcaacgtggtcaccggctacggccccagcaccggcgcggcgctgacccgccacccgctggtgcgcaagatcgccttcaccggcggtgccgccaccgcccgccacgtggtacgcagcagcgccgaaaacttcgccaagctgtcgctggaactgggcggcaagtcgccgaacatcatcttcgccgacgccgacctggacagcgccatcaatggcgccgtggccggcatctatgccgcgtccgggcaaagctgcgtggccggctcgcgcctgctggtgcaggatgaaatcttcgacgagttcgtcgagcgcctgattgcccgcgccaagcgcatccgcatcggcaacccgcaggacgacgccagcgaaatgggcccgatggccaccgcgcaacagctggcagtcgtcgaaggcctggtggcggcggccaaggccgaaggcgccaaactgcacatgggcggaaagcgtgccgacgttgaaggtgacggctggttctacgagccgaccctgttcgagtgcgacagcaacgcgatgaccatcatgcaggaagaagtgttcggcccggtcgccgcagtaattcgcttcaagaccgaagaagaagccctggccatggccaacgactcgcaattcggcctggctgccggcatctggacgcgcgatctgggccgtgcccaccgcctggcccgcgacgtgcgttcggggatcatctgggtcaacacctaccgtgccgtgtcggccatggcaccgataggtggtttcaagaacagcggctacggccgtgagagcggcatcgattcggtgctggcctataccgagctgaagaccgtgtggatcaacttgtccaccgcgccgatgcccgacccgttcgtgatgcgc

SEQ ID NO: 31987 - DNA, 147 bp, Pseudomonas putida
ttggccaacgaagcgatcggcaacgtgaaacagggtgttggcaaggtgaccgacaacgaaaagctgcgggccgaaggcaaggcgcaggagctcaaaggcgaggcgcagcaggtcaagggaaatgtgaaggatgcggtgaagaagcct

SEQ ID NO: 31988 - DNA, 1350 bp, Pseudomonas putida; identical to SEQ ID NO: 31321

SEQ ID NO: 31989 - DNA, 480 bp, Pseudomonas putida
atgatgagtgtctcggtctgcccttgtggcagtggcaacctgcttgacgcctgctgcgggcattaccatgccggtaccccggcaccggatgcccaggccctgatgcgctcacgctacagtgcctacgtgctgggcctggtcgactacctggtagccaccaccctaccagcccagcaagccggcctggaccgtgctgccatggccgactggagtgcacagagcacctggctgggcctggaggtggaaagcgcagaagtgctgggcggccaacccgagcacagcttcgtcaccttcaccgcgcgctggcacgaccaagacggcgatcatcagcaccgcgaacgctcggccttcgtccagcatgccggtcgctggtacttcatcgacccaacggtcgggctgaaggccgggcgcaacgacccctgcccctgcgccagcgggcacaaattcaagaaatgctgcaacaattacctaccaaaaggt

SEQ ID NO: 31990 - DNA, 1605 bp, Pseudomonas putida
atggctaccttgcacacccagatcaacccgcgttcggcagaatttgccgtcaacagcgcggccatgctcgaacaggtccaggccctgcgcggcctgctcgcccaggttgcccagggcggcgggcccaaggcccaggaacggcatacctcgcgtggcaaactgctgccgcgcgagcgtatcgaccgcctgctggacccgggctcgccgttcctcgagatcggccagctggccgcccatgaggtgtacggcgaagacgtgccagcggcgggcgtgattgccggcatcggccgcgtggaaggcgtggaatgcatgatcgtggccaacgacgccacggtaaaaggcggttcgtactacccgctgacggtgaagaagcacctgcgtgcacaaaccatcgccctgcagaaccgcctgccgtgcatctatctggtggactccggcggcgccaacttgccccgccaggacgaagtgttccccgaccgcgagcatttcgggcgcattttcttcaaccaggccaacatgagcgcgcaaggcatcccgcagatcgccgtggtgatgggctcgtgcaccgctggcggcgcgtacgtgccggccatggccgacgaagcgatcatggtgcgccagcaggcgaccatcttcctcgccggcccgccgctggtgaaagccgccaccggcgaagtggtgagcgccgaagacctcggcggcgccgatgtgcattgccgcaccagcggcgtcgccgaccattatgccgacaacgacgaacacgccctggccatcgcgcgacgcagtgtggccaacctcaactggcacaagctcggcaagctgcagcggttggcaccagtggcaccgctttatgcggccgatgagctgtacggcgtggttccggccgatgccaagcaaccgttcgacgtgcgcgaggtgatcgcccgcctggtcgatggctcggtgttcgatgaattcaaggcgctgttcggcaccaccctggtgtgcggcttcgcccacctgcacggctacccggtggcgatcctggccaacaacggcatcctgttcgccgaagccgcgcaaaaaggcgcgcacttcatcgaactggcctgccagcgcggcatccctttgctgttcctgcagaacatcaccggtttcatggtcggcaagaaatacgaagaaggcggcatcgccaagcacggtgccaagctggtcaccgccgttgcctgcgcccaggtgccgaagttcacggtgatcatcggcggcagctttggcgccggcaactacggcatgtgcggccgcgcctacgacccgcgcttcctgtggatgtggcccaacgcgcggattggcgtgatgggcgccgaacaggccgccggcgtgctggcccaggtcaagcgcgagcagagcgaacgcagcggccagccattcagtgccgaagacgaagccaggctcaagcaaccgatcctcgaccagtacgagcgtcagggccacccctattattccagcgcccgcctgtgggacgacggcgtcatcgacccggcacagacccgcgacgtcctcgggctggcgttgtctgccgcgctgaacgcgccgatcgaacagagccgcttcggcattttccggatg

SEQ ID NO: 31991 - DNA, 4590 bp, Pseudomonas putida
atggcgcagaccgttcacgccgcccgaatgggcgacgcaattcttcatccatcgcttgccgctgaaatgatcagcgcagttgccgaggccgttatctatgcagcggccaccgcggccgtcgccgcagccatcagcttggccgtggttggcaccgtagccactggcggtgcggctggcgtcgccatcgccgcagtcgcgggtgtggcagtcggagcagtgagcaccctttccgtcggcgaagaccagactgtcggcgacgccatctccagcttttgcgacagccttggcaacagcgtggactcgcccgatccctacggaaaaatcgagagcgggtcaaccaatgtgctcattaacagtgagcccgctgcgcgcgcggccggcatcactggcccacctggaggcggcgcagccgatactgaacaagaggaaccgtccatcctggagaacgtcggttccatggccatggctgcggtgccttatctcgtcccgttcgtggggctggggatggccatacgtgacatcttcaacccgcccgtgaccacaccggccaacccaggctcggagcccgctgaaggagacaagatcagctgttcgcgccacccgcccctgcccgacaccttcattgcgcaaggctcggacaaggtattcatcaatggccaacccgcagcgcgttcaggtgacaagaccacctgcgatgccacgattgatgtgaatgaaaacgtatcgcccaatgtgcgcattggtggcggtacggcgacggtccgggacattcgcaacggcaagagcaagattgcgatgtttaccgggattattgcggggatgcttatctcccgaaggtttggccgcatcaaagggtgcacattaggcaacccggttgctgttgccaccgggagcaagctgcaggagggtccggaggacatcgacttcaatctcccaggcttgctggccatccaatgggcacggcgctacgacagcagggacatgcgcagcgacggtctactggggatgggttggagtgtcccctatgaagtggagctggcccgcgtcccacatcctcaaggcggtacgctgtggatctacatcgacaacgacggtaaccgactggaactgggccgcctcagtgccggtgatgccttcatcagtgccgtggacggcttggccttcttccagctggaggacggccagaccgttgtcgaagatatcaatgaagggctttatcgggtcttcgataccgacccgctgaatccgaaacgctcacggctgatcaggctcggcgaccgcaatctcaattgcctcgacctgctgtacgacgaacaagggcgcctgaaagccctctatgacaagtacggccaaacggtcgtgcagcttcactatgccgccaggcatccccagcgtgtcagtgaggtatcacgggtgttcctgaaaaacggtggaacacctacggtagaacgcagcgaactgctggtcagctatcgctacaccgacaacgggcaactgcatgaggtattggatgcgacggatcaacgagtccgccgcttcacttacacccccgagggctatctcaatagccatcaactggctagcggtgctgtccgcgaatacgaatgggcgcgcttcgccattcctgaaacgcgccctactcccaagcgcctggacggcacgccctaccgcttgcctccactgctggagccccaacccgatcacgaatggcgagtgattcgccactggggcagcgatggtgaagagtaccggttcgagtacaacctggaagccggtgaaaccctcgtcacggacaacctcggccgccgtgatcactactactgggggccactgtacgaggtctataagcacatcgaccctcagggcaactgctggctggcggaagtgatcgccggacagttgatcaagcgcatcgacccgcaaggaggcgaatggcgctacagctacgacgatatcggccgcctgatcgaaacccgcgatcccctcggccgcagcgaacacatcaaatacctacgacattgggcgctacccatccaggtcaccgatacagccggacggactcggcaatacggctacgacagccacggcaatctgctctggcagcaggacccgctggggcgcgagacacagtaccaatacgacccggaaggccgtgttacccaggtcaccgatgccctcgaaaagagcaagtacctgagctggaacacgtgcggtcagttgctcagctaccgcgactgcagcaatgcccagacgctgtatcactacgacgcccatggccgcttgcgcgaaagcatcaatgcccggggtgaacacacccacttccgctacgacgcacgtggttatctggtcgaaagcgaacgcccggacggtcgcattgatcgttatgaaattgatgtcgctggtcaactgacgcgctatatcgaccctgcccagaaaaccctgcaatttcgctacgaccccagcggccggctggtcgaacgcacggacgccatgggctacagcgtgaaattccgctacgacgcctatggtcggctactgcaacttaccaacgagaatgacgagtcataccgcttcggctgggacgaactggaccggctggtggcacaaaaagacctggatggcagtggccgcctctatgcctacaacgtgctggatgaggtcattcgtcttacccatgtgccctcgcctgacgagcagccgcccctgtccgacaacgccccgccgacacggacgactgccatccgccatgacttcgagcgggacgccatcggccggcttgtcagcaagcgcaccgaagatggcaccaccgactaccgctacgacgcggccgacaatctgctgtccatcaccttcacagacaataaaggagaaaaacagcaactcgactacacctacgacgccaacgggcaactgctcagcgaaaccaacagcgctggcttgctgcagtaccgctacgacgaactgggtaacctgcagacgctagtcctgcccgaccaacgcgaactcaaccacctgtactacggcagcgggcacctgcaccagatcaacctgaacggccgggtgatcagcgatttcgagcgtgatgcggtgcacgacgaggtcctgcggacccaaggcaaactggtcacccgcacgcgctacgacaccagcggtcgcttggccggcaaggctattcactaccgcgatgcccctgctgaagtgctgccgctgctggacaaggcctatcgctacgatgccagcgacaacctgattgccgaggtactgacccagacacagcgccgagggatgtccaacgctgccaatgacgaaaacgctaacctcgaacagatcatcggtcgcttccttgacctaccccacacgggcaagacctattcgggacacaaccgctacggctacgacctcaacgagcaactgcagaccgttcaccagtcacgccccaactggcaggccacgcaggtcgaggatttcaagtacgacaaggccggcaacctgttcgacggccccaaactcaatggcctgatcaagcacaaccgggtgttggtgtatcaggacaagcgctatcgctatgaccgctttgggcggctgtgcgagaagcggatcggcagcaattgggtgcagtatttcgagtatgacgccgagcagcggctggtttgcgtggagcagtaccgcagtggcgagcgtgagcgggtggtgtttgcctatgacccgttggggaggcggatcagcaaggaggtttatcagagggactatccagagccgcgtcggcgggtgctgtttcactggcaagggtttcgcttgcttcaagaagtgcagagtggtttggctagcttgtatgtgtatgccactgtggagagctatgacccgttggcgcgggttgacggtaaacctggcagcgaagcaattcactattttcataccaccttggttgggcaaccggagcagctgactgattctgatggcaacacgatctggcgtagtgaccatcacggttggggaaagataattaatgagtggcacagccaacaaaatggacgtgaacaaaacctgcgaaatcaaggccaatacattgatcgcgagactgggctacacttcaatatattcagattttacgaccccgatataggccgcttcacaacaacagaccctctcgggatcgaaggaggagtcaatctctacagctacgccccaaatatagtaaactactcagatccgcttgggctctgccccgaaaatgtcaaagaatatgatatcaccccatacaggcctagcaatagccccctcgaaaaccatcatggcatcctagatatctgggcggcacaaaacgtgccctcatatggaggaaaatatcccaaagggtctcctacgatcgtattgtctagtaaaaatcatgcagccaccaaggcggtgtatcgtgagtggctaagagaaaaaactggaaaacctgtgggaggcaaagtagattggtcgcaaatcagcaatcgagaggtcatgcaactttcggagcgaatgtttgacgtcgcaggagttccagccaccagccgaacctcctactacagggcattgaatagatatttacacacaggcactttc

SEQ ID NO: 31992 - DNA, 1401 bp, Pseudomonas putida
gtgtatcgcaggacagctgatcaagcgcatcgatccgcaaggggggaatggcgctacagctacgacgatatcggccgcctgatcgaaacccgcgatcccctcggccgcagcgaacacatcaaatacctacgacattgggcgctacccatccaggtcaccgatacagccggacggactcggcaatacggctacgacagccacggcaatctgctctggcagcaggacccgctggggcgcgagacacagtaccaatacgacccggaaggccgtgttacccaggtcaccgatgccctcgaaaagagcaagtacctgagctggaacacgtgcggtcagttgctcagctaccgcgactgcagcaatgcccagacgctgtatcactacgacgcccatggccgcctacgcgaaagcatcaatgcccggggtgaacacacccacttccgctacgacgcacgtggttatctggtcgaaagcgaacgcccggacggtcgcattgatcgttatgaaattgatgtcgctggtcaactgacgcgctatatcgaccctgcccagaaaaccctgcaatttcgctacgaccccagcggccggctggtcgaacgcacggacgccatgggctacagcgtgaagttccgctacgacgcctatggtcggctactgcaactcaccaacgagaatgatgagtcataccgcttcggctgggacgaactggaccgactggtggcacaaaaagacctggatggcagtggccgcctctatgcctacaacgtgctggatgaggtcactcgtcttacccatgtgccctcgcctgacgagcagccgccgctgtccgacaacgccccgccgacacggacggctgccatccgccatgacttcgagcgggacgccatcggccggcttgtcagcaagcgcaccgaggatggcaccaccgactaccgctacgacgccgccgacaatctgctgtccatcaccttcacagacaacaaaggagaaaaacagcaactcgactacacctacgacgccaacgggcaactgctcagcgaaaccaacagcgctggcttgctgcagtaccgctatgacccgctgggcaatctgcagaccctggtcctgcccgaccaacgtgaactcaaccacctgtactacggcagcgggcacctgcaccagatcaacctgaacggccgggtgatcagcgatttcgaacgtgatgcggtgcacgacgaggtcctgcgcacccaaggcaaactggtcacccgcacgcgctacgacaccagcggtcgcctggccggaaaggctattcactaccgcgatgcccctgctgaagtgctgccactgctggacgaggcctatcgctacgatgccagcgacaacctgattgccgaggtactgacccagacccagcgccgcgga

SEQ ID NO: 31993 - DNA, 906 bp, Pseudomonas putida
atgggctacagcgtgaagttccgctacgacgcctatggtcggctactgcaactcaccaacgagaatgacgagtcataccgcttcggctgggacgaactggaccggctggtggcacaaaaagacctggatagcagtggccgcctctatgcctacaacgtgctggatgaggtcattcgtcttacccatgtgccctcgcctgacgagcagccgcccctgtccgataatgccccgccgacacggacggctgccatccgccatgacttcgagcgggacgccatcggccggcttgtcagcaagcgcaccgaagatggcaccaccgactaccgctacgacgcggccgacaatctgctgtccatcaccttcacagacaaccagggcaagaagcagcaactcgattacacctacgaccccaacgggcaactgctcagcgaaaccaacagcgcgggcctgctgcagtaccgctacgacgcgctgggcaatttgcagaccctggtgctgcccgaccagcgcgaactcaatcacctgtactacggcagcggacacctgcaccagatcaacttgaacggccgggtgatcagcgatttcgagcgcgatgcggtgcacgacgaggtcctgcgcacccaaggcaaactggtcacccgcacacgctacgacaccagcggtcgcctggccggcaaggctattcactaccgcgatgctcctgctgaagtgctgccgctgctggacaaggcctatcgctacgatgccagcgacaacctgattgccgaggtactcacccaaacacagcgccgagggatgtccaacgccgccaatgacgaaaacgctaacctcgaaaagatcatcggtcgcttccttgacctaccccacacgggcaagacctattcgggacacaacgtaaccgatcca

SEQ ID NO: 31994 - DNA, 2016 bp, Pseudomonas putida
atgttcggtaaattaagcctggaggcgataccctatcacgagccgatagtcatggtgacgcttgccatgatcgcgctcggcggtatcgctgtcgtcggtcttatcacctatttccgcaagtggacctacttgtggagcgagtggctgactactgtcgaccacaaaaagatcggcgtgatgtacatcatcgtcgcgatggtcatgctgctgcgcggctttgccgacgccatcatgatgcgtacccagctggctgccgcaaccggcggctccgaaggctacctgccgcctgaacactatgaccagatcttcaccgctcacggtgtgatcatgatcatcttcatggcgatgccgttcttcaccggcctgatgaacctggcggttcctctgcagatcggtgcacgtgacgttgccttcccgttcctgaactccctgagcttctacctgctgctggcaggcgtgctgttggtcaacatctcgctgggcgttggtgaattcgccaagaccggctgggttgcctatccgccgctcgcgggcattcagtacagccctggggtgggtgtcgactactacatctgggcgctacagctatccggattgggtacgacgcttactggcgtgaacttcctcgtcaccgtgatgaagatgcgcgcacctggcatgaaactgatggacatgccgatcttcacctggacctgcacctgggccaacgtgttgatcgtcgcttcgttcccgatcctgactgctgcactcgctctgctgactgttgaccgttatctggacttccacatcttcaccaacgagcttggtgggaacccgatgatgtacgtcaacctgttctgggcgtggggtcaccctgaggtttacatcctgatcctgccggccttcggcgtgttctcggaagtaacttcgacgttctctggcaaacgcctgttcggccaccactcgatgatttacgcatcgggcgcgatcgccatcctcggctttgctgtatggctgcaccacttcttcaccatgggtgccggcgccagcgtcaacaccttcttcggcctggcgacgatgctgatctccattccgaccggtgtgaagctgttcaactggctgttcaccatgtaccaaggccgtgtgcgcttcaccgcaccgatgctctggaccctgggcttcatggtcactttctccatcggtggcatgaccggcgtactgctggccgttccgggtgctgacttcgtcctgcacaacagcctgttcgtaattgcgcacttccacaacgtgatcatcggtggcgcggtattcggctacatcgccggtttcgccttctggttcccgaaagccttcggcttcaccctgaacgagaagtggggcaaagctgccttctggttctggctgtcgggcttctacgttgcgttcatgccgctgtacgccctgggcttcatgggcatgacccgtcgtctgaaccactccgacaacccactgtgggaaccctacctgtacgtagccgttgtcggcgccgtgctgatcctgttcggtatcgcttgccagctgatccagatcgtcgtttcggtccgcgaccgcaaccagaacctggacgtgaccggcgacccatggggcggccgtaccctggaatggtcgacttcttcgccacctccgttctacaacttcgctcacatgcctgagaaagttggcctggactgctggcacgaagccaaggaagcaggcgttgcgtacaaggctccggccaagtacgaagccattcacatgccgagcaacaccgctaccggtctgttcatgggcctgttcctgactgtcttcggcttcgccttcatctggcacatctggtggctggttggcgcgagcctggttgcaaccatcgctgtcttcgttcgccacgctgcacgtgacgaccagggctacatggttccggccgaagaagtggcgcgcatcgaaggcgagcgtatgaaagcgctggccaaagcaggtgctctgcctgccggcgcacgtgtcgaatcgtttgagcgggtg

SEQ ID NO: 31995 - DNA, 1206 bp, Pseudomonas putida
atggccaacccaggttcgccgcgccgctttgcgcgcatcgatcgtctccccccttacgtcttcaacatcactgccgagctcaagatggccgcccgccgccgtggcgaggacatcatcgacctgagcatgggcaaccccgatggcgccaccccgccgcacatcgtcgagaagctggtacaggtcgcccagcgtgaagacacccacggctactccacgtcgcgcggcatcccgcgcctgcgccgggccatctccaactggtacaaggaccgctacgaggtcgacatcgacccggaaagcgaagccatcgtcaccatcggctcgaaagagggcctggcccacctgatgctggccaccctcgaccagggcgatacggtgctggtgcccaaccccagctacccgattcacatctacggcgcagtgatcgccggtgcccaggtgcgttcggtgccgctggtgccgggtgtggacttcttcaacgagcttgagcgggccattcgcgagtccatccccaagccgaagatgatgatcctgggcttcccgtccaacccgactgcccagtgcgtggagctggacttcttcgagcgcgtggtggccctggccaagcagtacaacgtactggtggtgcatgacctggcctatgccgatatcgtctacgacggctggaaagccccgtcgatcatgcaggtgccgggtgccaaggacattgctgtggagttcttcaccctgtccaagagctacaacatggccggctggcgcatcggcttcatggtcggcaaccccgagttggtcagcgccctggcacggatcaagagctaccacgactacggcaccttcaccccgctacaggttgcagccattgccgcgctggaaggcgaccaacagtgcgtgcgcgacattgccgagcagtatcgccagcgccgtaacctgctggtcaaagggctgcacgaactgggctggatggtcgagaaccccaaggcgtcgatgtacgtgtgggcgaagatcccgccggagtatgcgcacctgggttcgctggagttctccaagaagctgctggccgagaccaaggtctgcgtgtcgccggggatcggctttggtgactatggggacgaccatgtgcgctttgcgttgatcgagaaccaggaccgtattcgccaggccatccgcgggatccggcaaatgttccgggctgatggtttggctcgcaag

SEQ ID NO: 31996 - DNA, 1275 bp, Pseudomonas putida
atggcctttcttgcacttggtatcaaccataagactgcctcggtagacgtacgcgagcgcgtggcgtttaccccagagcagctggtagacgccctgcagcagctctgccgactgacgtccagccgcgaggcggcgatcctgtcgacctgcaaccgcagtgagctctatatagagcaggaccacctgtccgccgacgccgtgctgcagtggctggccgactatcaccgcctcagcatcgacgagctgcgcgccagcgcctacgtgcatgaagagcacgacgccgtgaagcacatgatgcgtgtggcttcgggcctggactcgctggttctgggcgagcctcagatcctgggccagatgaagtccgcctacgccgtggcccgcgaagccggtaccgtcgggccgttgctcgggcgcctgttccaggccaccttcagcgccgccaagcaggtgcgtaccgatacggccatcggtgaaaacccggtttcggttgcgttcgccgcggtcagcctggccaagcagattttcgccgacctgggccgcagccaggccctgctgatcggtgccggcgaaaccatcaccctggtcgcccgccacctgcacgagcagggcgtacgccgtatcgtggtggccaaccgcaccctggagcgcgccagcatcctggccgagcagttcggcgcgcatgccgtgctgctggcagacatcccccaggaactggccaacagtgacatcgtgatcagttccaccgccagccagttgccgattctgggcaagggcgcggtcgagagcgcactgaaacagcgccgacacaagcccatcttcatggtcgacatcgctgtacctcgcgatatcgaaaccgaagtcggcgagctggatgatgtctacctgtacaccgtcgacgacctgcacgatgtagtggcggaaaacctcaagagccgccagggcgcggcccaggcggccgaagagctggtatccgtgggcgccgaagacttcatgctgcgcctgcgcgaactggctgcagtggacgtgctcagggcctatcgccagcaaagtgagcgccttcgcgacgaagaactgcaaaaggccttgcgcctgctggccaatggcggcaaccccgaagacgtgctggcccagctggcccggggcctgaccaacaaactcctgcatgcgcccagcgtgcagctgaaaaagctctcggccgagggtcgcctcgatgcgctggccatggcccaggaactctttgccctcaacgagggctccacggacaaatccccgcaa

SEQ ID NO: 31997 - DNA, 1080 bp, Pseudomonas putida
atgaaagcgtcgctgctgaacaaactggaaatcctccaggaccgttttgaagaactcaccgccctgctcggtgacgccgaggttatttccgaccagacgcgttttcgcgcctactcccgcgagtatgccgaggtagagccggtctacgctgcttataaagagtggcgtaaagtccaggacgacctcgaaggcgcccaggcgctgctcaaggacagtgacccggacctgcgtgaaatggccgtggaagaggtgcgtgaagccaaggagcaactgttgaccctggaggcgcagctgcaacgcatgctgctgcccaaagaccccaacgacggtcgcaacgtgtttctcgaaatccgcgccggtacgggtggcgacgaggcagccatcttctctggtgacctgttccgcatgtattcgcgctacgccgaaaagcgcggctggcgcctggagatcttgtccgagaacgaaggcgagcacggcggttacaaggaaatcattgcccgcgtcgagggcgagaatgtctacggcaagctcaagttcgaatccggtgcacaccgggttcagcgtgtgcccgagaccgagtcccaaggccgtgtccacacttccgcgtgcacggtggcggtgctccccgagccggacgagcaggccgccatcgaaatcaacccggccgacttgcgcgtggatacctaccgtgcctccggtgccggcggccagcacgtcaacaagaccgattcggcgatccgtatcactcacttgcccaccggtatcgtggtcgaatgccaggaggagcgctcgcagcacaagaaccgtgctcgcgccatgtcctggctgtcggccaagctgaacgacatgcagaccagtgccgcgcagaacgcccttgccagtgagcgcaagctgctggtgggttccggtgaccgctccgagcgcatccgcacctacaattatccacaggggcgggtgaccgatcaccgcatcaacctgaccctgtattcgttggacgacatcctcagcggtggcgtagacgcggtgatcgaaccgctgctggccgaataccaggccgatcaactggccgccttgggggac

SEQ ID NO: 31998 - DNA, 828 bp, Pseudomonas putida
atgactgtcatcgccagcctgttgcgcaacgcgcagttgcctgaatcgcccactgagcgcctggatgccgaactgctgctggctgcggccatcggtaaatcgcgcagctacctgcatacctggcccgagcgtattgtcagcagcgaagatgccgagacctatgccggctacctgaagcgccgccgtggcggcgagccagtggcctatatccttgggctgcagggcttctggaagatcgacctggaggtcgcgccgcataccctgatcccgcggccggataccgagctgctggtcgagacggcgcttgaactgcaacccgcttcgcccgccaaggttctcgacctgggtaccggtacgggtgccatcgctctggcgctggccagcgagcgcccggcctggcaggtgacagcggttgaccgggtagaggaggctgctgccctcgccgagcgcaaccgccagcggttgggcctggccaacgctcgggtacggctgagccactggttcgacagcctggccgcggagcgtttcgacctcattgtcagcaacccgccctacatcgccgctgaagacccgcacctggtggccggcgacgtgcgcttcgaacccagcagtgccctggtggccggtgccgatggcctggacgaccttcgcgtgatcgccgcccaggcccccgcgcacttgttgccaggtggttggctgctgctggaacatggctacgatcaggcggcagcggtacgtgctctgctggctgaacatggctttatcgaggtggccagccgcacggacctgggcggccatgaacgcattaccctggggcgactgtcatgc

SEQ ID NO: 31999 - DNA, 753 bp, Pseudomonas putida
atgctgagtgatcaggaactgctgcgttacagccgccaggtgctgctgtcccagatcgacatcgatggccagctgcggctcaagcagagcaaagcgctgatcatcgggctgggtggcctgggctcgccagtcgccctgtacctggccgccgctggcgtgggtgagctgcacctggccgacttcgacaccgtcgacctgaccaacctgcaacgccaggtcatccacgacagtgccagcgttggcatgagcaaggtcgactcggccttgcagcgcttgcaggcaatcaacccggaagtcagcctggttgctcaccgccaggcactggacgaggactcgctggtggctgcggtggcggcggtcgacctggtgctggactgctccgacaatttctctacccgcgaggcggtcaacgctgcctgtgtcgccgccggcaagccgctggtcagcggagcggcaatccgtctggaaggtcagctgtcggtgttcgacccgcggcgtgactacagtccgtgctatcactgcctgtacgggcatggtagcgaagctgaactgacctgcagcgaagcaggcgtcattggcccgctggtggggctggtgggtagcctgcaggcgctggaggcgatgaagctgctggcgggcttcggtgagccgttagtcggccgcttgctgttgatcgatgccctcggcacccgtatccgcgagcttcgtgtcaagcgcgacccggcttgcacggtctgtggtaagcgcgatggc

SEQ ID NO: 32000 - DNA, 1437 bp, Pseudomonas putida
atgtccgtgcagacaaccacaactagaaatgcctcggcgcataccttcaagcaggatatgcaaacccgccacatcgtcatgctggcgctgggcggagtgataggcaccggcctgtttctcacgtcgggctacaccgttaaccaggccggcccgttgggcgcggtcatcgcttacatactcggcgcaatcatggtgtacctggtcatgatgtgcctgggcgagctggcggtacacatgccggaagtcggctcgttcagcagttacgccacgcgttacctcggcccgggcaccggctacatggtggcctggatgtactggctgacctggacggtggcaatcggctccgaattcaccgccgcgggcatcctgatggtgcgctggttccccgacacgccggtatggatgtggagtgcgctgttcggcgctgcggtgttcatcagcaatatcatttcggtgcgatcgttcgccgaaaccgaattctggttgtcactggtcaaggtgttggccgtcatcgcctttctggtggtgggcggcggggccattctgggtggcttcgagatccagcaggcgcacagtgcagggctgggcaatttcacccgtgaagggttgttccccaccggtttctggtccattgcaatgaccctgctggcagtggccttcgcgttctcgggtaccgagctgatcggcatcgctgccggcgaaaccaaagacccggaaaagaacgtgcccaaggccattcgcaccacggtcctgcgcctggcgctgttcttcatcggcaccatctttgtactggccaccttgctgccgcgtgaacaggccggggttattgaaagcccgttcgtgatggtctttgcgatgattggtatcccgtatgcggccgatatcatgaacttcgtcatcatcaccgcgctgctgtctgccgccaactccggcctctacgccgcttcgcgcatgctctggaccctcagcgaccaaggcaacatgccccgccgttacgccacgctgtcgcgccgcggcacccccttcaatgcgatcgtgctgagcatggctggcggcatggcttcgctgttgagcagtgtgtttgcccccgacaccatctacctggcgctggtgtcgatttcagggttggccgtggtagtggtgtggatcagcatcgcggccagccagatcgcattccgccgtcattacatcgccagcggcggcaagctcgaggacctcaagttccgggtgcgtggctacccgttcgtaccactgggggccattttctgctgcgtactggcctgcgtcggcattgccttcgacccagctcagcgggttgccctgtacttcggcttgcccttcattgcctggtgctacctggcctattggctgacgtgcaagtaccgcagccgccgtacggccccgctggaaatcgtcgccccaggttccgaggccgcc

SEQ ID NO: 32001 - DNA, 795 bp, Pseudomonas putida
atggctgagcgctcggcgccgatcggcgtcatggactcgggggttggcggattgtcggtgctggccgagatccagcgcctgctgcccaacgaaacgttgctgtatgtgggcgattgcgggcatataccctacggtgagaagtcgccggactatatccgcgagcgctgccgacgcattgccgggttcttccatgaacaaggcgcaaaggccatggtcctggcctgcaacactgccacggtggcggcagtggccgacctgcgtgagttgtatccgacctggccgttggtgggcatggaaccggccgtcaagcctgcagcggcagccacccgctcgggcgtggtcggtgtgctggccaccaccggtaccctgcagagtgccaagttcgcagccttgctcgatcgcttcgcaaatgacgtacaggttattacccagccttgcccggggctggtcgagctgatcgaagccggtgacctggtaagcccggcggtgcgccagctgctgcaaggttatgtgcagccgctactggctgcaggttgcgatacgctgatcctcggctgcacccattaccctttccttcgcccattgctggccggcatggtcccggatgacgtggccatcatcgacaccggcgcggccgtggcgcgtcagttgcaacggctgttgggtgccaatgatctgttggccgaaggcccggccggcgctgcacgcttctggaccagcgctgacccagaagccttaagaaaaatcctacctgtgctgtggcataagtccgacgatgtgcaaagctttgcgttg

SEQ ID NO: 32002 - DNA, 903 bp, Pseudomonas putida
atgcatatattgctgacaggtggcaccggtttgattggcaagcatctgtgccagtactggctgggccaagggcatcggcttacggtttggagcaggcgtcctgaacaggtggcgaaaatctgtggtagcggggtgcgtggtatcgcgcgcctggagcagttagaggccgacgatcatcttgatgcggtggtcaaccttgccggtgcgccgattgccgacaggccctggacggccgcccggcgcaacgtgctgtgggccagccgtgtcacccttaccgagcaattgctggcttggttgggcacccgtgagcagcgcccggaggtgttgatctccggctctgcggtaggttggtacggagacggtggcgaacgcgaactgaccgaggcctctcccccggtgcgtgaagatttcgccagccagttgtgtattgcctgggaagagaccgcccagcgttcgcaagcgcagggaatacgcgtggtactggtccgtaccggcctggtgctggccagcgatggcggctttttgtcgcgcctgcgcatgcccttcaaactggggctgggcgggcctttgggcaatgggcggcaatggatgccctgggttcatatagacgaccaggtcgccctgattgattttctcttgcagcacaaggatgccagcggtccttataatgcctgcgcgccggagcctgtgcgcaaccgtgagtttgccaggcgactgggccgcgccctgcatcggccggcgctgttgccagtgccggcattgctgctcaaggccgggcttggcgagatgtccaccttgctgctgggaggccagcgggcgcgcccggtacgcttgctggaagccggcttcaccttccgcttcaacgatctgcaatcggcgctggacaacctgtccagtcgcctc

SEQ ID NO: 32003 - DNA, 3801 bp, Pseudomonas putida
ttgcgttccgccccacaagcacccgcgactctcctgcgcgggtcgatcaagggtgcgctggcgctgctggccctgatcctgctgggcctgctgctgtggcagctgttcgcccagttcaatcatacccaggccgaattgcgcaaacagagcctggacgcctccgcggaactggccgaccacctgagcctgaacatggcgctcaaggcgcaacaggccgtgaacgtggtgcaaccctaccctgatgcaccgacacctgccgccctgcccagcctgctcggtaccctgcgcgaacgccttcccgccctgcagagcgtggcctggctggacaacgtcgggcagctacgcgccgacagcctggccggcagccccgaccgccagtcacttgacgagttgctcgtgctgagccagggacgcccgtacttcttcaccaattcggccgacaaccacctcctgtacctgttgctgcgccaggatgccgcacagggtagcggctactggctgctgcgcctgtcaccggactattaccgcgagctcaccctccacctcgagggcagtggccacccgcagtggctgctggaaaacagccgcagcggcgaggtgctgcagcgccatgccgcagccgacaccagcgacgagccgctgcaaagcgtgatgctggcctttatcgaaaacagcacctggcagctacgcggtctgttcgacgccaaactggcccagcaaaaattattgccggcgctgctcggcaagtgcctgctggtgctgttctgcgccctgctgccagtgctggcgctgatcaacatgcgtcgccgccaacgggctctgcaggaagaccgccggcgttatcaggaaatttttgaaggcaccggcgttgccctgtgcgtgctcgacctgtccagcctgcccggccagctcgaccgctaccacctgcgtaaccgggccgcgctcaagcacagcctggcgctggacccgaacctgcgccgctcgctgctgctggagctgaagatcaccgaggtcaaccaagtggcgcgccagctgctgaacatcgactgccacgaaggtgcctggcagcggctgatcgatggcactggcgacagccgagacagcgtcggcatgcaactgatcgacgcactgatcgaacaacgcccgttgctggagctggaagtgcgcctgccgacaccgcagggcaccgagctgcacctgtggctgatggcgcgcctgccgctgcagcgccgtgattatcaggcggtgatcctcagcatcagcgatatcaccagccgcaaacaggtggagctgtcgctactggaacgcgaaagtttctggtcggacgtggtacgcaccgtacccgaccagttgtatgtgcaggatgtgccgagccagcggatgatcttcagcaaccgccacctcggccagaccctgggctacgaccgcaccgagctggcacagatgggcgaccgcttctgggagctgctgctgcaccccgaggacgccgcacactaccaggcactgcgccgccaacagcgcgacaactgtcatgaccaaccgctgcactgccagctgcgcttccgccaccgcgacggaagctggcgctgctacgacatccgcgagcaggtgctgacccgcaacgccgaaggcctggtgacgcgcatcatcggtgtgggcaaggatgtgaccgttcagatcgaggccagccagtcgctacgtgacagcgagcaacgctaccgcatgctcgccgaaagcatcagcgacgtgatcttttccaccgacaaccagctcaagctcaactatgtcagcccctcggtacagagcgtgctgggctaccaggccgactggatcttcgccaacggctggcagtcgatcgtcgccaacccggcccagctcactggcatctacagcctgatggagcgtgtcagcaaggccatgggcgatccggcgcagatggcgcaactgtgcagccagttacccacccaactgttcctgttcgactgcctgcgtgccgatggccgcaagatcccgatcgagctgcgcctggtgctggtgtgggacgatgaccagcgcttcgaaggcgtactcggggtgggccgcgacatcagccagcaacgtcgtgccgaaaaagacctgcgcatggccgcgaccgtattcgaacattccacgtcggcgatcctcatcaccgacccggccggctatatcgttcaggccaacgaggcgttcagccgcgtcagcggttacgccgtcagtgaagtgctcgaccaactgccgggcatgctcactgtcgacgaacagcaggaaggccacctgcgctatgtggtcaagcaactgcaccagcgcggcagctgggaaggtgaggtgtggctcaagcgccgtgacggcgaccactacccggcctgggtcggcatcaccgcggtactggacgacgaaggcgacctggccagctacgtgtgcttcttcaccgacatcagcgaacgcaaggccagcgaacagcgcatccaccgcctggcctactacgacgcccttacccacctgcccaaccgcacactgttccaggaccgtttgtacaacgccctgcagcaggccgagcggcagaaggcctgggtggtgctgatgttcctcgacctcgaccgcttcaaaccgatcaacgactccctcggccatgcggccggcgaccgcatgctcaaggacatggccctgcgcctgctggcctgcgtggatgacgacgacacggtggcacgcatgggcggcgacgagttcaccctgttgctgcaaccgcgccccacccgtgaaatggccctgaaccgcgccatccacgtggccgagaacatcctcggcagcctggtgcggccgttcgtgctggaaaaccgcgagttcttcgttaccgccagcatcggcatcgccctcagcccgcaggatggcagtgagctgagccagctgatgaagaacgccgacaccgccatgtaccacgccaaggagcgcggcaagaacaacttccagttctaccaggccgaaatgaacgccagcgccctggagcgcctggagctggaaagcgacctgcgccatgccatggagcagaacgaattcatcctctattaccagccgcagttcagcggcgacggcaagcgcctgaccggcgccgaagcgctgctgcgctggcgtcacccgacccgaggcctggtgccgccgggcgacttcatcccggtgatcgaggaactgggcctggtggtggacgtgggcgactgggtgctgcgcgaggccagccgccagctcaaggcctggcacaaggccaaggtgcgggtgccgaaagtgtcggtgaatatttcggcgcggcagttctccgacggccagctaggcacgcggattgccaacatcctggaagaaagcggcctgccgccggcatgcctggaactggagttgactgaaagcatcctgatgcgcgaggtgaacgaggcgctgcagattcttgccagcctgaagaacctcggcctgagcattgcggtagacgacttcggcaccggctactcgtcgctcaactacctcaagcagttccccatcgacgtcctgaagatcgaccggaccttcgtcgacggcctgcccgaaggcgagcaggacgcgcagattgcccgggcgatcatcgccatggcccacagcctcaacctggcagtcatcgccgagggcgtggaaacccacgaacagctggagttcctgcgcgagcatggttgcgacgaggtgcagggctatctgttcgggcggccgatgccagcgcatcagttcgaggcgcaattctccaacgagaccttgttcatgttccat

SEQ ID NO: 32004 - DNA, 1644 bp, Pseudomonas putida
atgcatcggctgagcaaggtcgtgccgccgaagcgggaaattctcaagaacatttccctgtcgttcttcccaggcgccaagattggcgtacttggcctgaacggcgccggtaaatcgaccctgctgcggatcatggcgggcgtcgacaaggaattcgacggcgaagcccgtccgatgcccgacatcaacgtgggttacctgccacaggaaccgcaactggacccaaccaagaccgtgcgtgaagtggtcgaggaagcggtcagcgtaatcaaggacgcccaggcccgcctggacgaggtctacgcggcctacgccgagccggatgccgacttcgacaagctggccgccgagcaggccaagctggaagccatcctgcaggccgccgatggccacaacctggagcgccagctggacgtcgctgccgacgccctgcgcctgccggcctgggatgcgcgcatcgaacacctgtccggtggtgagaaacgccgtgtggccctgtgccgcctgctgctgtcggcacccgacatgctgctgctcgacgaaccgaccaaccacctggacgccgactcggtggcctggctggagcgcttcctgcacgacttcccgggcaccgtggtagccattacccacgaccgttacttcctcgacaacgtcgccggctggatcctggagctggaccgcggcgccggcatcccgtacgaaggcaactactcgggctggctggaagccaagtcggagcgtctggcgcaggaatccaagcagcagagcgcccacgaaaaggccatgaaagaggaactggagtgggtgcgcaaaggcgccaaagcccgccagtccaagtccaaggcccgtctgcagcgctttgaagaaatgcagtcgcaggaattccagaagcgcagcgaaaccaacgaaatctacatcccggccggtccgcgcctgggtgacaaggtcatcgagttcaagaacgtcaccaagggctacggcgaccgtgtgctgatcgacaacctgtcgttctccatgcccaaaggtgccatcgttggcgtgatcggtggtaacggtgccggtaagtcgaccctgttccgcatgttgatgggcaaggagcaaccggactcgggcagcatcgagatcggtgaaaccgtacagttggcctgtgttgaccagagccgtgaggacctggacggcgccaagaccgtgttccagcagatctccgacggttccgaccagatccgcatcggcaactacgagatcccttcgcgtacctacgttggccgcttcaacttcaaaggtggcgatcagcagaagttcgtcaaggacctgtccggtggtgagcgtggccgcctgcacctggccctgaccctgaaggaaggcggtaacgttctgctgctcgacgaaccgtccaacgacctcgacgtcgaaaccttgcgttcgctggaagaagccctgctggacttcccgggcgccgcgatcgtgatttcccacgaccgttggttcctggaccgtgtggctacccacatcctggcgtacgaagacgactcgaacgtggtgttcttcgaaggtaactacaccgagtacgaagccgaccgcaagaagcgtctgggtgatgctgctgcccagccgcaccgtgtacggcacaagaaactggcccag

SEQ ID NO: 32005 - DNA, 384 bp, Pseudomonas putida
atggcatacagtgaaaaggtcatcgaccactacgaaaacccgcgcaacgtcggcaagatgaatgccgaggacccggatgtcggcaccggcatggtcggcgccccggcctgcggtgacgtgatgcgtctgcagatcaaggtcaacgagcagggcgttatcgaagacgccaagttcaagacctacggctgcggttcggccatcgcgtccagctccctcgccaccgagtggatgaagggcaagaccctggacgaggccgaaaccatcaagaatacccaactggccgaagagctggcgttgccgccggtcaagattcactgctcggtactcgccgaagatgccatcaaggcagccgtacgcgactacaagcagaagaaaggcttgatc

SEQ ID NO: 32006 - DNA, 2436 bp, Pseudomonas putida
atgcccgatcctgtcgctgcgcgcctgcgtcttgcgcctgaagccctgacccggcgtttctcccccgagcagtttgcttttacccataccgacgatctggagccgtttcgcggagttctgggccaggaacgtgctgttgaggccctgcagtttggcgtggccatgccgcgtcctggttacaatgtgtatgtgatgggcgagcccggcaccgggcgcttctcgttcgtcaagcgctacctcaaggccgagggcaagcgccagcagaccccggccgactgggtctacgtcaaccacttcgacgacacccgtgaaccacgtgcactggagctgccgtccggaagcgccgccgagttcatcagcgacatgggcggattgatcgacaacctgctgtcgacgttcccggcggtgttcgaacacccgtcctaccagcagaagaagggcgccatcgaccgcgctttcaaccagcgttatgaccgtgctctggatgtgatcgagcgcgcgtcgctggaaaaggacgtggccttgtaccgcgatgccagcaacgtcgccttcacgccgatggctgatggcaaggcgctggatgaagctgaatttgcccaattgccggaggaggtgcgcgagcaattccacgaggacattgccctgcttgaggagcgcctcaacgaagagctggccagcctgccgcaatggaagcgcgaatcgaacaaccagctgcgccagctcaacgaagaaaccatcaccctggcactgcagccgttgctggcgccgctgtcggaaaagtacgccgaaaacgcggcggtgtgcgcctacctgcaatcggtgcagttgaacctgttgcgtacgctggtcgagcaactggtcgatgacagcaagtccgacgccgtggcccgcaagctgctcgaagagcagtacgcgcccagcctggtggtgggccatcacgctgacggtggggcgccggtggtgttcgagccgcacccgacctatgacaatttgtttggccgtatcgaatacagcaccgaccaaggtgcgctgtatacctcctatcgccaactgcgcccaggcgcgctgcaccgtgccaacggcggcttcctgattctggaagccgagaaaatgctgggtgagccgttcgtatgggacgcgctcaagcgtgcgttgcagtcgcgcaagctgaagatggagtcgccgatcggtgagctgggccgtgttgccactgtcagcctgcagccgcaggtgattccgctgaacgtcaagctggtgatcatcggctcgcgccagctgtactacgcactgcaggaccacgacccggacttccaggagatgttccgcgtgctggtggacttcgatgaagacatgccgatggtcgacgagaacctggagcagttcgcccagctgttgcgcacccgcaccaacgaagagggcatggcgccgctgaccagtgacgcggtagcgcgtctggccacctacagtgctcgtctggccgaaaaccagtcgcgcctgtcagcgcgtatcggtgacctgttccagctggtcagcgaggctgatttcattcgccagctggccagtgacgaaatgaccgacgcaggccacatcgagcgtgcgctgaaggccaaggccacccgtaccggccgtgtgtcgcaacgggtgctggacgacatgctcgccggcatcatcctgatcgacacggagggcgcggccatcggcaagtgcaacgggctgaccgtgcttgaagtgggtgactcggcgttcggcatgcccgcgcgtatttcggccaccgtctaccccggcggcagcggtattgtcgatatcgagcgtgaggtcaaccttggccagccgatccactccaaaggggtgatgatcctcaccggttacctgggcagccgctatgcccaggagttcccgctggcgatctccgcgagcatcgccctggagcagtcctacggctacgtggacggcgacagcgcctcgctgggcgaagcctgcacgctgatctcggccttgtcgcgcacgccgctcaagcagtgcttcgccatcacaggctccatcaaccagtttggtgaagtgcaggcggtgggtggggtgaacgagaagatcgagggcttcttccgcctctgcgaggcgcgtggcctgaccggcgagcagggggtgatcattccgcgtgccaacgtcgccaccctgatgcttgacgagcgtgtgttgcaggcggtggagaacggcatgttccacgtctacgcggtcagccaggctgatgaggcgctgagcctgttggtgggcgaggaggccggggtactcgacgacaaggggctgttcaccgagggcagcgtcaatgcccgggtggtggagcgcctgcgtgaaattgccgagatgatcagtgaggaagacatcgagaaggcagaaaaggaacgcctggaagaggtgattgcccaggccaaaccggcc

SEQ ID NO: 32007 - DNA, 966 bp, Pseudomonas putida
atgcaaccccaaaccttctaccgcgcggtggctgatgatttcagcgccgtcgacgagatcatcaagaagcagctgacctcgcgcgtgccgctggtatcgaagatcggcgactatatcacgtccgccggtggcaagcgcctgcgtcccctgctggtactgctttgtggcaaggccctgggccgcgaaggcgacgacctgcgcctgctggccgccaccatcgaattcctgcacaccgccaccctgctgcacgacgacgtggtcgacatgtccggcatgcgccgtggccgctctaccgccaatgccctgtggggcaacgcgccgagcgtactggtgggcgacttcctttattcgcgctcgttcgaaatgatggtcgagctgggctcgatgccggtcatgcagatcctgtccaaggccacccgggtgattgccgaaggtgaagtgctgcaactgtcgcgcgtacgcgacgccagcaccaccgaggaagtctacatggaggtcattcgcggcaagacggcgatgctgttcgaagcttctacccacagtgctgcggcgctggcccaggccaccgacgagcagcgcgaagccctgcgtacctttggcgaccatctgggcgtggccttccagctggtcgacgacctgctggactacaagggtgactcgcagaccctgggcaagaacgtcggtgacgacctggccgagggcaaacctaccctgccgctgatctacaccatgcgcgaaggcactgccgagcaggcggcgctggtacgccaggcgatccagaagggtggcctggaagatctggaacagattcgcgttgcggtcgaagaatcgggcgcactgaaatacaccgccgagctggcgcgcgattacgtgaaacgcgccatcgcctgcctcgaagtgctgcctgccagtgaataccgggatgcgctggttgaactgagcgagtttgcggtcgcgcgtacgcac

SEQ ID NO: 32008 - DNA, 255 bp, Pseudomonas putida
atggctcacaagaaggctggtggtagtactcgtaacggtcgcgactcagaatcgaaacgccttggcgtgaagatgtatggcggccaggttatcaagccaggcaacatcatcgtccgtcagcgcggtaccgaattccacgctggctacggcgttggcatgggcaaggaccacaccttgttcgccaagatcgaaggcgtgatcaagttcgagaagaaaggcgagttcatgcgccgttacgtgagcatcgtcgccgct

SEQ ID NO: 32009 - DNA, 3819 bp, Pseudomonas putida
atggccatgggacgtctgaaccgcgttcttgttgctctgacccgctgggggttgggcatatgtgccctgctggccgtattggtggcgctgtatgtcagccttggtcgtgaactggtgccgctggtagccgagtaccgtgccgacgtagaaagcaaggccgagcaggcgctgggcctgcccgtgcatgtcggtgccctggaagggcactggagcggactggcccctgtgctgcgggtgcgcgacctgcaattgggcgaaggcaccaaggcgctccggctggatgacgtcatggtggtgcccgacatctgggccagcctcaccgcccgcgaagtgcgcctggcgcgcatccagctgggcgggctgcaactgatccttcgcgagaacgagcagggcgcctggaacctggaaggcctgccgaagaaggacgacgcgccgctggaccctgccgacttgctgcagcgcctgcgccagctggggcgcatcgatgtgttcgacagtctggtcaccctgcacccctggcagcgcgacccgctgaccctgacatatgtgagtgccggcctgcaggccggtgctaaacgccaggccctggatttgcgtgcgaccctgcctgacggccagcccctggcgttgagcctgaacagccgtatgtcggccgaggcctggcgtgatggcgaggtagaagcctatgtgagcctgccgcaaagtgactgggcacattggttgccgcccagggtgttggggcagtggcatgctgacaccctgcgggcgggcggtgagttctggatcggctggggcaaggggcagttgcaacgggccgtcgtaaggctcaatgcacccaggctggagggggcctatgccgggcgcaaggctgccaacctgaataatctggctttgggcgcctggttccagcgccgggagcaaggcttcgatgtggtcgtcgactcgttggccatggacctcggcaaggcccgctgggagtctcacctgcagttgcagcagcgccctggccagaatgcagccgatgaaagctggcagttacaggccgaccgcctcgacctcaccccgctgactccgctgatcgatgccctcgcccccctgtcggacaaggtcaaggatgtggtcgatggcttgaaggtgaccggtgcgttgcgcaatgtgcgcctcgaggccaggcccaaggccgagggtgaccagcggctgcagttcgcagccaacctggagaaggtaggcttcgatgcttatcacaacgccccggcggccggtaacgtcagtggcagcatcagtggtgacctgggccacggcgaactgcgcctggataccgatgcgttcatgctgcatctgtacccgatcttcgccaagccctggcattaccagaaggcgaatgcgcgcttgacctggaccttggacaaagacggtttcaccctgattgcgccctacctcaaggtgctgggcgaggagggcaagatcgccggtgacttcctgattcgcctgttgttcgaggaaggccgcgaggactacatggacctgcgcgtcggcctgaccgaaggcgatggccgctatactgccaagtatctgcccgaggtgctcagcccggccctcgacgagtggctgcgcagcgctatcgtcaaaggcgctgtggatgaaggctacttccagtatcagggctcgctgaaccatggcgcatccccgcaagcgcgcagcatcagcctgttcttcaaggtgcatgacgccgccctggacttccagcccggttggccacaggtgcagcacgtcgatggcgatgtgttcatcgaggacagtggcgtgcgcatcaaggctcagcgaggcgtgctgctcgacaccaaggtcagcgatgtgaatgtcgatatcccgcatgtcgacggcgaccagcacagccatctctacctggatggcgacttcgacggtagcctgggtgatggcctgaagattctcaaggaagcgccaatcggcaccggggagattttcgccggctgggaaggtgaggggccgctgaagggcaaggtcaagctcgatatcccgctggcccatgggcagcgcccaaaggtgcaggtggacttcgccacccacgatgcgcgcctgaaagttgccccgccaagcctggagttgaaccgcctgaagggcgacttcagcttcgacttcgacaagggcctgagtggcaagggcatcagcctgcaggcctttggcaagccggtaacggcgcaaataaccgctgaaggtcaggctgggcagatgcagacccgcatcaatgccaatggccaggtatcgctcaagacgctgactgactggctgcagttcaagcaggccttgccggcctccggtgacctgccctatcagttgcagctcagtctggggagccgggacaaccgcctgagtgtcacttccagcctcaaggggctggccatcgacctgccggctccgttcggcaaagcggcagctgatacccgtgacagccgtttcagcatgagccttcagggcccggagcggcaattcgatgctgcctacgccgaccttgctcgctttgcctatgctgcaccggctgaaaacttgacccagggccgcggcgagctagtgctgggcacaggcgacgcccgggtacctgccagccaggggctgagggtgcgcgggcgcctggagaccctggacctggccccttggcaagagcaggcgggccggctggctggggacgaccccggtggcagcgcgcggcagaacctgcaaagcgtcgacctgagcatcggccagttgaaagccttcggcatggacctgaaccaggccgtggtccgcctggcccggggcggcccggcctgggatttgcgcctcgacagcaaggaagtcattggtaatgcgcgcgtaccggatgccaagggcgcgcccgtggtcgtgcgcatgcagaccttgcggctgcctgccgccagcgccgctgaacagcaggctgaagacggccccgacccgctggcctcgttcgatccgcgcaaagtcccggcactggacctgagcatcgacaagctctatcgcggtgacgatctttacggtagtgccgcgatcaagctgcggccgaccccacgtggcgttacagccagtgatatcgacctcgacctcaaggggttgcgcatcgatggcggtggtggctgggagggggaaacgggtaaaaccagcagttggtacaaagggcgccttgacggcaagaacctggcggatgtgctcagcgcctggggctttgccccgacggtgaccagccgcgacttccgcctggacgtggatggccgctggccgggttcgccggccgcagtgggcctgaagcgcttctcgggcagcatggatgcggcgctgcgcaccggccagttcgtcgaggtcgaaggcagcgcacaggcactgcgggtgttcggcctgctcaacttcaactcgattggccggcgcctgcgtctggacttttccgacctgtttgacaagggcctggcctatgaccgggtcaagggcttgctggtggccagcagtggcgtgtacgtgacccgcgaaccgattactgtgaccggcccgtcgagcaacttcgagctcgacggcacgctggacatggtcagcgaccgggtcgatgctgacttgcaggtgagcctgccggtgaccaacaacctgccgctggcggcgttgatcgtcggcgcgccggcggtgggcggtgcgctgttcctggtcgatcggctgatcggtgaccgcgtgtcacgctttgccagcgtgcactaccgtgtcgaagggccgtggaaagagcctagaatcacatttgtgaaacctttcgagaaatcccgc

SEQ ID NO: 32010 - DNA, 2043 bp, Pseudomonas putida
gtgcctgctggctatagtcggggccaggggattttcaggaatgggggagggcgacatgcgcaagctgtgtcgccgcaggtgcaagcctgcaatccggtcgctcgggccgttcttgaaaggactcactgccataacaaaaaagtacatggagtagcgtcgatgaaatctgcaaacctgttctggcgccgggccaagctgcccttggccgtcagccttgcttccacgctcgcaagtcctgctttcgctgtcagtttcaacattggtgaaatcgaaggccagttcgactcgtcgctctccatcggcgccagctggtcgacggccaaccccaacaagaacctgataggggtgaacaacggcggcaagggcctgtcacagacatccgacgatggccacctgaacttcaagaagggcgaaaccttctccaagatcttcaagggtattcatgacctggagctcaagtacggcgacaccggtgtgttcgtgcgcggcaagtactggtacgacttcgaactgaaggacgaaaaccgcgagttcaaggacatcagcgactccaaccgcaaggaaggcgccaagtcgtccggggccgagctgctcgacgcctttgtctaccacaactactccatcggcgatcagcctggctcggtgcgttttggcaagcaggtagtgagctggggcgaaagtaccttcatcggcggcggcatcaactcgatcaaccccatcgacgtgtcggcgttccgccgtcccggagccgagatcaaggaaggcctgattccggtcaacatgttctacatctcgcagagcctgaccgacaacctgtcggccgaggccttctaccagctcgaatgggaccagacggtcgtcgataactgcggcaccttcttttctcagccggacatcatcgccgacggctgtaccgacaacttgcgcgtgctcaatagcagccgcacggtgccgggcgctgcccagcagttcctcgccacgcggggcgtgaacatcaacgaagagggtgtgatggtgcgccgtggtgccgaccgcgatgcgcgtgacagcggccagttcggtgtggccatgcgctatatgttcgagccgttggacacggagttcggcgcctacttcatgaattaccatagccgtgcacccatcttcagtgccacaggggccccgccgtccgtgttcgccgggctgagcgccctgcctgcgcagctgcgcgcattggcgcctctgatcgtggcgggtaattccgagtactttgtggaataccccgaggacatccgcctttatggcttgagtttctccaccacgttacccactggcaccgcctggagcggcgaagtcagctaccgccccaacgcgccagtgcagctcaataccacggatatcctgttcgctggtgtccgtcccattggcggcgcgttgagcaacgcatcgctgctgaccggtacgccggggcaagacctgcatgggtatcgccgtaaggagatcacccagttccagaccacactgacccatttcttcgaccaggtgatgggtgccagccggatgactgtagtcggtgaagtgggtgttacccatgtcggcggcctggagaatgcccacgatacccgctacggtcgcgacccggtgttcggcccaggtccgttgccatccaccggtggcgccgatacctgccaggcgctcaatggcagcaccatcgccggcgccggtgcgggggcgtccaccgccaacctgaaccgcaaatgcgagaacgacggctacaccaccagcacttcctggggttaccgcggccgtgtcatctgggactacaacgacgtattcgcgggtatcaacctgaagccgagcgtggcctggtcgcatgacgtgtccggttattcgcctggccctggcgccaacttcgaggaaggccgcaaggctgtcagcctgggcctggacgccgagtatcagaacacctatacggcgagcctgtcgtacaccaacttcttcgacggcaagtacagcaccgtggatgaccgcgacttcgtcgccctcagcttcggcgtgaacttc

SEQ ID NO: 32011 - DNA, 1227 bp, Pseudomonas putida
gtggaagccgacgtactgctcgacaacggcatcatcggcagcgcttgcgcgccgtccggtgcttctaccggctcgcgcgaagcgctggagctgcgtgatggcgacaagagccgttacctgggcaagggcgtgctgaaggccgtcgccaacatcaacggcccgatccgtgacctgctgctgggcaaggatccttccgatcagaaggctctggaccgcgccatgatcgaactggacggtaccgagaacaaggccaagctgggcgccaacgccatcctggctgtttccctggctgccgccaaagctgctgcccaggaccaggacctgccgctgtacgcgcacatcgccaacctgaacggcaccccgggccagtactcgatgccggttccgatgatgaacatcatcaacggtggcgagcacgccgacaacaacgtcgacatccaggagttcatggttcagccggttggcgccaagaccttctctgacggcctgcgcatgggtaccgaaatcttccaccacctcaaggctgtactgaaggcccgtggcctgaacaccgccgtaggtgatgaaggtggtttcgcccctaacctggcatccaacgaagacgccctgggcgccatcgctgaagctgtcgaaaaagccggctacaagctgggcaccgacgtgaccctggccctggactgcgcggcttccgaattctacgaagacggcaagtacaacctgtccggcgaaggcaagtcgttcgacgccgaaggcttcgccgactacctgaaaggcctgaccgagcgtttcccgatcatttcgatcgaagacggcctggacgagtccgactgggctggctggaaaatcctcactgacaagatcggtgaaaaagtccagctggtcggtgacgacctgttcgtgaccaacaccaagatcctcaaggaaggcatcgagaaaggcatcggtaactcgatcctgatcaagttcaaccagatcggctcgctgaccgaaaccctggaagccatccagatggccaaggctgctggttacactgcagtgatctcgcaccgttccggtgaaaccgaagactcgaccattgccgacctggctgtgggtactgctgctggccagatcaagacaggctcgctgtgccgttccgaccgcgtttccaagtacaaccagctgctgcgcatcgaagagcaactgggcgccaaagcggtttaccgcggtcgtgccgagtttcgcggc

SEQ ID NO: 32012 - DNA, 1263 bp, Pseudomonas putida
atggacaaactgattattactggcggcgctcgccttgacggcgagatccgcatttcgggcgcgaaaaacgcagccctgccgattctggcagccaccctgctggccgatggcccggtcaccgtgggcaacctgccgcacctgcacgacatcaccaccatgatcgagctgttcgggcgcatgggcatcgagcctgtgatcgacgaaaagctgtcggtggagattgatccacgcaccatcaagaccctggtcgcgccgtacgagctggtcaagaccatgcgcgcctcgatcctggtgctgggcccgatggttgcccgtttcggcgaggccgaagtggccctgcctggcggttgcgccattggttcgcgtccggtcgatctgcacatccgtggccttgaggccatgggggcgaagatcgaagtggaaggcggctacatcaaggccaaggcgcctgaaggtggcctgcgcggcgcgcacttcttcttcgacaccgtcagcgtgaccggtaccgagaacatcatgatggccgctgccttggccaagggccgcagcgtgttgcagaacgccgcgcgtgagcctgaagtggtcgacctggccaacttcatcaacgccatgggcgggaacattcagggcgccggtaccgacaccatcaccatcgatggtgtcgaacgactggattcggccaattaccgcgtgatgccggaccgcatcgagaccggtacctacctggttgccgctgccgtgaccggtggccgcgtcaaggtcaaggacaccgaccctaccatccttgaagccgtgcttgaaaagctcaaggaagcgggtgccgacatcaacaccggcgaagactggatcgaactggacatgcatggcaagcggccgaaagccgtcaacctgcgtactgccccgtatccggcgttcccgaccgacatgcaggcgcagttcatctcgctgaatgccattgccgaaggcactggcgcggtgatcgagaccatcttcgaaaaccgcttcatgcatgtttacgaaatgcaccgcatgggcgcgcagatccaggttgaaggcaacaccgccatcgtcactggcgtcaaggcgctgaagggtgccccggtcatggccaccgacctgcgtgcttccgccagcctggtgctgtcggcgctggttgccgaaggcgataccctgatcgatcgcatctaccacatcgaccgtggttacgagtgcatcgaggaaaaactgcagatgctcggcgcgaaaatccgccgcgtaccgggc

SEQ ID NO: 32013 - DNA, 2829 bp, Pseudomonas putida
atgaccgactacaaagccacgcttaaccttccggacaccgccttccccatgaaggccggcctgcctcagcgcgaaccgcagatcctgcagcgctgggacagcattggcctgtaccagaagctgcgcgaaattggcaaggatcgtcccaagttcgtcctgcacgacggcccgccctatgccaacggcaagattcacatcggtcatgcgctgaacaagatcctcaaggacatgatcgtccgttccaagaccctggccggcttcgatgcgccgtacgtgccaggttgggactgccacggcctgccgatcgagcacaaggtcgaggttacccacggcaagcacctctccgccgaccgtacccgcgagctgtgccgcgagtacgctgccgagcagatcgaagggcagaagaccgagttcatccgcctgggcgtgctgggtgactgggacaacccatacaagaccatgaacttcgccaacgaggccggtgaaatccgcgccctggccgagatggtcaagcaaggcttcgtgttcaagggcctgaagccggtgaactggtgctttgattgcggttcggcgctggctgaagcggaagtcgagtacgccgacaagaagtcgcagaccatcgacgtggccttcccggttgccgatgaagccaagctggccgccgccttcggcctggcctcgctggccaagccggccgccatcgtgatctggaccaccaccccgtggaccatcccggccaaccaggctctgaacatccacccggaattcaagtacgccctggtcgacaccggcgagcgcctgctggtgctggctgaagagctggtcgagtcgtgcctgaagcgctacaacctggaaggttcggttgttgccagcgcccaaggttcggcgctggagctgatcaacttccgtcatccgttctacgatcgcctgtcgccaatctacctggccgactacgtcgagctgggcgccggtaccggcgtggtgcattcctcgccagcctacggtgaagacgacttcgtcacctgcaagcgctacggcatggtcaacgacgacatccttaccccggtgcagagcaacggcgtgtatgtcgactcgctgccattcttcggcggccagttcatctggaaggccaacccggccatcgtcgagaagctgagcgaagtcggtgcgctgatgcacaccgaaaccatcagccacagctacatgcactgctggcgccacaagaccccgctgatctaccgcgccaccgcgcagtggttcgtgggcatggacaagcagccgagcaccggcgagccgctgcgtgagcgtgcgctgaaagccatcgaagacaccaagttcgtcccggcctggggccaggcgcgcctgcacgcgatgatcgccaaccgcccggactggtgcatctcgcgtcagcgcaactggggtgtgccgatcccgttcttcctgcacaagcagaccggcgatctgcatccgcgcactgtcgaactgatggaagaagtggccaagcgtgtcgagcagcaaggcatcgaggcctggttcaagctggacgccgccgaactgctgggcgctgaagccgaccagtacgacaagatcgccgacaccctcgacgtgtggttcgactcgggcaccactcactggcacgtactgcgtggctcgcacgacatcggccacgccaccggcccgcgcgctgacctgtacctggaaggttccgaccagcaccgcggctggttccactcgtccttgctgaccggttgcgccatcgataaccatgcgccataccgcgagctgttgacccacggcttcaccgtggacgagaacggccgcaagatgtccaagtcgctgggcaacaccatcgaaccggagaaggtcaacaacaccctgggtgccgatatcctgcgcctgtgggtttcggccaccgactattccggtgaaatggccgtttccgagcagatcctgcagcgcagtgccgacgcctaccggcgtatccgcaataccgcccgcttcctgctgtccaacctgtccggcttcgacccggcccgcgacctgctggcaccggaagacatgctggcgctggaccgctgggccgtggaccgtaccctgctgctgcaacgcgaactggaagagcactacagcgagtaccgtttctggaacgtctactccaaggtgcacaacttctgcgtacaggagctgggcggcttctatctcgacatcatcaaggaccgccagtacaccaccggcgccaacagtgtcgcccgccgttcctgccagactgcgctgtaccacatcagcgaggcgctggtgcgctggatcgcgccgatcctggcattcaccgccgacgaaatctggcagtacctgccgggcgagcgcaacgagtcggtaatgctcaacggctggtaccaaggcctgagcgagctgccggaaggcaccgagttggaccgcgcctactgggaccgcgtgatggcagtgaaggcatcggtcaacaaggagctggaaaaccagcgcaccgccaaggtcatcggcggcaacctgcaagccgaagtgaccctgtacgccgacgaaggcctgagtgccgacctgggcaagctgggtgacgagttgcgcttcgtgctgatcacctcggccgccagcgtggtgccgttcgcacaggcgccggccgaagcggtagccaccgaagtcgaaggcctcaagctgcaagtggtcaagtccggccacaccaagtgcggccgttgctggcacttccgcgccgacgtcggcagccatccggagcacccggaaatctgcggccgttgcgtcgacaacctgaccggctcgggtgaggtgcgccactatgcc

SEQ ID NO: 32014 - DNA, 930 bp, Pseudomonas putida
atgtctcaagccatcgtcgtcgcggcgctgtacaagttcgtcaccctggaagactacgtcgagctgcgcgagccgctgctcaagaccatgctcgacaacaacgtcaaaggcaccctgctgctggcccaggagggcatcaacggcaccgtgtcgggcacccgtgaaggcattgatggcctgctggcctggttgcgcagcgacccgcgtctggtcgatatcgaccacaaagaatcgtactgcgacgaacagccgttctaccgcaccaaggtcaagctcaagaaagagatcgtcaccctcggcgtgccgggcgtggaccccaacaaggccgttggcacctatgtcgagcccaaggactggaacgccctgatcagcgacccggaagtgctgttgatcgacacccgcaacgactacgaagtggccatcggtacgttcaagggcgccatcgacccgaagaccgaaaccttccgtgagttcccggagtacatcaaggccaacttcgacccgagcaagcacaagaaggtcgccatgttctgcaccggcggcatccgttgcgaaaaagcctccagctacatgctcggtgaaggcttcgagtcggtctatcatcttaagggcggcatcctgaaatacttcgaggaagtgcctcaggaagaaagcctgtgggacggcgactgcttcgtcttcgacaaccgggtcacggtgcgtcatgacctgagcgaaggcgagtacgaccagtgccacgcctgccgccatccgatcaatgcacaggagcgcgcgtccgagcactattcgccaggtgtcagctgcccgcattgctgggacagcctgagcgagaagacccggcgcagtgccatcgaccggcagaagcagatcgagctggccaaggcccgcaacctgccgcacccgatcggttactactacaaagccgaggct

SEQ ID NO: 32015 - DNA, 2850 bp, Pseudomonas putida
atgctcgagctcgccaatgagcagatagccatgggccagaaggccgccgacaaggccgaggcgttacgccttctggcggatcggctggttgcggacggcctggtcgccgagggttacctgcaagggctgcaggcccgggaggcacaaggctccactttccttggccagggcatcgccattccccatggtacgccgcaaacacgtgacctggtgtatgccaccggcgtacgcctgctgcagttccccgagggggtagactggggtgacgggcaaatggtctacctggccattggtattgccgcccgctccgacgaacacctgcgcctgctgcagctgttgacccgggcgctgggcgagaccgacctggccgaagccttgcgccgtgccagctctgccgaagcgctgctcaagctgctgcagggcgcgccccaggcgctggcgctggatgcgcagctggtcggcctgaacgtgccggcagaagacttcgacgaactggcctggcgcggtgcccgcctgctgcaacgtgccgactgtgtcgacagtggctttgccgccgtgctgcagcaggccgagccgctgccgctgggtgagggcctgtggtggctgcacagcgagcgccaggttcgtcagccaggcctggccttcatcaccccgcagcagccgctgcgttaccgcgaccagccgctcaacggtctgttctgcctggccagccttggcgccgctcacgaggccctgctcgagcggctgtgcgaagtgctgatcgaaggccgtgggcaggtgctctaccaagccaccagcagccgtgcggtgctggaagtgctgggcggcgaagtgccggcggactggcccagcgcacgggtcgtgctggccaatccacatggcttgcatgcgcgaccggccaaggtgcttgcacaactggccaaaggctttgaaggggaaatccgtgtgcgcctggtcgatagcgcgcagccagccgtatcggtgaagagcctgagcaagctgctcagcctcggcgcacgccgtggtcaggcactggaactggtcgccgaaccgagcatcgctgccgatgccttgccggtgctgctggctgctatcgaacaaggcttgggtgaagaggtggaaccgctaccgcagagcgtcgcgcccattgccgatgacgtccccgaagtactgcaagcgccagcggccggcagccgtatccagggtgtgggcgccgcccccggcattgccagcggcccggcgcatgtctgtgtcgagcgtgagttcgactatcccttgcggggtgaatcgtgcgccctggagcggcagaaactgcgcgaagccttggctaccgtcaatggcgaactgcaggctttggtcctgcgcagcgacaaggccattggcgaaattttcgtcacccaccaggaaatgcttgccgacccggccctgaccgatgatgtcgaacagcgcctggcccagggcgaaagcgctgcggccgcgtggatggccgtgatcgaagctgcggcccgtcagcaagaggcgttgcacgatgcgctgctcgccgagcgcgccgccgacctgcgcgatattggccgccgcgtgctggcgcagttgtgtggtgtgcaggcgcaggttgaacccgagcaaccctatgtgctggtgatgaccgaagtcggtccatccgatgtcgcccgcctggaccccaaccgggttgccggcattgtcaccgcccagggcggcgccacggcccacagtgccatcgtcgcccgggcgttgggcataccagcagtggtcggcgcgggtgcatcgatactgctgttggagagtggtacgccgctgctgctcgatggccagcgtggtgtggtcagcgtcgcaccgccagcggatgagctgcagcgggcgctggccgagcgtgacctgcgcgagcaacgcctgcaggccgcctgggccaaccgcttcgagccggccatcacccgtgatgggcatgccgtcgaggtgtttgccaacatcggcgatagcaacggcatcgccaaggtggtggagcagggcgccgaaggtgtcggcctgctgcgcaccgaactgattttcatggcccaccctcaagcgccggatgtggctacccaggaagccgagtaccgccgcgtgctcgatggcctcgatgggcgcccgctggtggtgcgcaccctggatgttggcggcgacaaaccgttgccttactggccgatcgctgccgaggaaaatcccttcctcggcgtgcgcggtgtgcgtttgaccctgcagcgcccgcaagtgatggaagaccagttgcgcgcgttgctgcgggccgccgaccagcgcccgttgcgtatcatgttccccatggttggccaggtgcacgaatggcgtgaggcgcgggccatggtggagcgcctgcgtgcagaaatcccggtagccgacctgcaattgggcattatggtcgaggtgccttcagcggccctgctggcagcgcaattggcgcgcgaagtggacttcttcagcatcggcaccaacgacctgactcagtacaccttggccatcgaccgtggccaccccagcctctctgcacaggccgacggcctgcacccggcggtattgagcctgatcgacatgaccgtgcgcgccgcccatgcccacggcaagtgggtgggcgtgtgtggcgagctggcagccgacccgcaggcggtggccgtgctgctggggctggacgtggacgaactcagcgtctccgcgcgcagcattgccgaagtcaaggcactggttcgccaggccgatcatcagacagcccgcgccctggcgcgcgaggccctgcaacaggacagcgccgcagcagttcgcgcgctggtggagcgttac

SEQ ID NO: 32016 - DNA, 705 bp, Pseudomonas putida
atgcgtaggatcggtgccagtgtgatcgaacgagtcacccaggcctgtgtctgcgccagcttgctgctggcgcccgcggcagccacccaggccgccaccgaggaagatccctgggaagcggtcaaccgcccgatcttccgcttcaacgacaccctcgacacctatgccctcaaaccattggccaagggctaccaggcggtcactccacagttcctcgaagatggcatccacaacatctttcgcaacctgggggacgtgaccaacctggccaacaacgtgttgcagctcaagccgcatgcggcgggcgtggatacggcgcggttgatcgtcaacaccaccttcggcctgggtggcttcttcgatgtgggtaccaagatgggcctgcagcgcaacgacgaggactttggccagaccttgggctactggggtgtgccgagcgggccgtatgtggtcatcccgctgctgggcccaagcactgtgcgtgatggtgtggccaagtacccggacacctacaccaaaccctatcgctacatcgaccacgtgcctacgcgcaattcgatcttcgcgctggacctgatcgacacccgcgccagcctgctctcggccgaaaagctgattcagggtgacaagtacatcttcattcgcaatgcctacctgcaaaaccgcgagttcaaggtgaaggatggcgaggtcgaagacgacttc

SEQ ID NO: 32017 - DNA, 1281 bp, Pseudomonas putida
atgactgacacccgtaacggcgaggacagcggcaaattgctttattgctccttctgcggcaaaagccagcacgaagtgcgcaaactgattgccgggccctcggtatttatctgcgacgagtgcgtcgacctgtgcaacgacatcatccgtgaggaggtgcaggaagcccaggccgagagcagcgcgcacaaattgccttcgccgaaagaaatcagcggcatcctggaccagtacgtgattggtcaggagcgcgcgaagaaggtgctggccgtagcggtgtacaaccactacaagcgcctgaaccagcgtgacaagaagggtgacgaagtcgaactgggcaagagcaacatcctgctcatcgggccaactggctcgggcaagaccctgctcgccgaaaccctggcacgcctgttgaacgtaccgttcaccattgctgacgccaccaccctgaccgaagccggttatgtgggtgaggacgtcgagaacatcatccagaagctgttgcagaagtgcgactacgacgtggaaaaggcccagatgggcattgtctacatcgacgaaatcgacaagatttcgcgcaagtcggacaacccgtccattacccgtgatgtctcgggcgagggcgtgcagcaggcactgctgaaactgatcgagggcaccgtggcctcggttccgccgcagggcggccgcaagcacccgcaacaggaattcctgcaggttgatacccgcaacatcctgttcatctgtggtggtgcgttctcgggcctggaaaaggtcatccagaaccgttccaccaaaggtggcatcggttttggtgccgaagtgcgcagcaaggaagagggcaagaaggttggtgagtccctgcgtgaggtcgagccggacgatctggtcaagtttggcctgattccggagttcgtcggccgtctgccggtactggctacccttgacgagctggatgaggctgcgttgatgcagatcctcaccgagccgaagaatgcgctgaccaagcagtatgccaagctgttcgagatggaaagcgtcgacctcgagttccgcagcgatgcgctcaaggccgttgcacgcaaggccctggagcgcaagactggcgctcgtggcctgcgttcgatcctcgaaggcgtgttgctcgataccatgtatgagatcccttcgaaaaaggatgtcagcaaggtggttatcgacgagagcgtcattgagggcacctcgcagccgctgatgatctacgaaaacagcgaaccgcaagccaaggccgcgccagacgcc

SEQ ID NO: 32018 - DNA, 762 bp, Pseudomonas putida
ttgagcatgattgaagtcaaaggcctgaccaagcggttcaagggccagaccgtgctcaacggtatcgacctgaccgtgcagcccggtgaagtggtggccatcatcggccctagtggctcgggcaaaaccaccttcctgcgctgcctcaacctgctggaaacccccgatgccgggcagatccagataggcgccatcagtatcgatgccaaccgccctttgggcgggcagcagagtgcgattcgccgtctgcgccagcaggccgggttcgtgttccagaacttcaacctgttcccccatcgcaccgccctggagaacgtgatcgaggggccggtgatcgtcaagaaaacgcctcgcgagcaggccatcgagcttggccggcgcctgctggccaaagtcggcctggcgggcaaggaagacgcctacccacggcgcctgtccggcggccagcagcaacgcgtggccatcgcccgtgccctggccatggaaccagaggtaatcctgttcgacgaaccgacctcggcgctggacccggagctggtcggtgaagtattggcgaccatccgcggcctggccgaggaaaagcgcaccatgatcatcgtcacccacgagatgagctttgcccgggacgtggcgaaccgggtgattttcttcgacaaaggcgtgatcgtggagcaaggcgaggccaaggccctgtttgcagcgccgaaggaagagcgtacgcggcagttcttgcgcaagttcctcgggactgcggcctccgag

SEQ ID NO: 32019 - DNA, 1941 bp, Pseudomonas putida
atgttctctttcgcatttcctccgagactggccatgaaaacccgttcccgtctgcttgcctggctgccggctgcattgctcggcccggtgctggcgctgtgcagcaccttggcgctggccgagtcccccgccgaggctgccaaagcccagcacttgctggactacattggtgccgactacccgccgaccgtgcaggacggcaaggtgatcgacgagggcgaataccgcgagcaacaggagttcagtgcggtattggctgacctggtcaaaggcctgcccgcaaatactgaacaagcggctttggaacagggcgtccaggcgctgcgccaggccatcgaccagcgtcaggaaggtactgcggtcgccaaacaggcccggcagctgggtgcgcgactggcggtggcctacgagatcagccaggccccggtgattaccccggaccccgcccgcggcgctgcgctgtacgcacagaactgctcgatctgccacggcgacaccggcgccggcgatggcccggctggcgtgggcctggagcctgcacccgccaacctgcgcgatgtctcgcgcctggaccagttaagcctgttcgacctctataacaccctggccctgggtatagacggcaccgaaatgccgtcgtttgccgaccagctggacgaccgccaacgctgggatgtggccgcgtatatcgccagcttcaccgccaagccggaagcgggcaaaggtgacaagacctggaacctcgccgacctggctcgccaaaccccggccgaagttgctgctaacgaaggcactgcggccgtcgaggcattccgcgcccagcgtgcccagccacctcaggtaaagcgcggcccggcgcaattgctcgaatacactgccagcacactggagaagagcctggcggcctaccgcgcaggcgaccacgatcaggcctatgacctgtcggtggcggcctacctggaaggtttcgagctggtggaaagctcgctggacaacatcgatacccaggcgcgcaaggacaccgagaaatcgctgatggcctaccgtcagtccctgcaggacggcctgcccgtggagcaggccgaacagcgtctggccgacgccaaaaccaagctcgagcaggcggccaagctgctgggcagcgatggcctgagctggacgctgagctatatctccggtttgctgatcctgctgcgtgaaggcctcgaggcgattctggtgctggcggcgatcctggccttcctgcgcaataccgggcagcagtcggcagtgcgcagcgtcaacatcggctggggcctggcgctggttgccggcttcgccacctgggcgctggcggcctatgtgatcgatgtggggggcgctcagcgcgagctgctggaaggctgcacggcgttgttcgccgcggtaatggtgctgtggcttggcgtgtggatgcatgaccgccgtcacgctgccgcctggaaggactacatcaagagcagcctggtcagcggtggcgggcgcttcggctttgccgtgctggcattcttctcggtataccgcgaattgttcgaagtgatcctgttctacgagaccctgtggctgcaggcaggccccgccgggcatcaggcggtgctggcgggtggcgcgacggcactggtgctgttggtgggcctggcctgggtgattctgcggggttcggccaagctgccgctatcgctgttcttcagcatcaacgccgcgctgctgtgcgcgctgtcggtagtattcgccgggcatggcgtgaaggcgttgcaagaggccggtgtgctgggcacacggccagtggcgttctttgagttcgactggctggggattcatgccgatgcctactcgctgtcggcgcaagcggtggccttgctggccatcgtgttcctttacggccgctcgtggctggccgaaaagcgcagtgctgcggccaac

SEQ ID NO: 32020 - DNA, 861 bp, Pseudomonas putida
ttgctgaccttgggccgtgtggtcctgaccttgctggtagtgaccttcgccgccgtgctcgtgtggcagatggtggtctactacatgtttgccccctggacccgagacggccatatccgcgctgacgtgatccagatcgcccccgatgtgtcgggattgatccagaaggtcgaggtgcgcgacaaccagaccgtcaaacgtggcgacgtgctgttcaccatcgaccaggaccgcttcaccctggccctgcgtcaagccaaggcaacccttggcgagcgccaggagaccctggcccaggcttcccgcgaagcgcagcgcaaccgcaagctgggcaacctggtggccgccgagcaactggaagaaagccagtcccgcgaggcccgtgcccgttcggctgtcagcgaggcgcaagtggctgtcgatactgcccagctcaaccttgaccgctcggtggtgcgcagcccggtagacggctacctcaacgaccgcgcgccgcgtaaccacgagttcgtcactgctggccgcccggtgctttcggtggtcgacagtgcctcctaccacgtcgacggctacttcgaggaaaccaagctggggggtatccatattggtgacgccgtggatatccgcgtgatgggcgacaacacccgcctgcgtggccatgtgcagagcttcgccgctggcatcgaagaccgcgaccgcagcagtggcgccaacctgctgcccaacgtcaacccggcgttcagctgggtacgcctggcccagcgcattccggtgcgcatcgcctttgacgaagtgccgcaagacttccgcatgatcgccgggcgtactgcgacggtgtcgatcatcgagggccagcgccca

SEQ ID NO: 32021 - DNA, 642 bp, Pseudomonas putida
atgtggattgatcgcctgctggaaggcttgcttgatacgctgctgatggttggggtttcgtcactgatcgccctgctggtgggtgtacccatggcggtgctgctggtgaccagcgacaagggcgggatcttcgaggcgcggctgctgaaccgggtgctgggcgccttcgtcaacctgttccgctcgattccctttctgatcctgatggtggcgctgattccattcacccgcctggtggtgggtaccacttatggtgtgtgggcggcagtggtgccactgaccattgccgccacaccgttctttgcgcggattgccgaggtcagcctgcgtgaggtcgaccatggtctggtggaagccgcacaggccatgggctgccggcgctggcacatcgtctggcatgtactgttgcccgaggcgctgccggggatcgtcgggggcttcaccattaccttggtgaccttgatcaactcgtcggcgatggccggggcgattggtgccggcgggctgggggatatcgcctatcggtatggctaccagcgtttcgacagccagatcatgctgaccgtgatcgccatgctggtagcgttagtggcgttgatccagctgggcggggaccgcctggcgaagggtttgaacaagcgt

SEQ ID NO: 32022 - DNA, 1519 bp, Pseudomonas putida
gtgtacaccgacctgagcgtcgatgagctggtaaaagaagcgctgcaacgcggtgaaggcgtactagccgatactggcgcactggtcgtggagactggtcaccgtaccggccgttcgccggctgaccgtttcatcgtcgaagaaccttccacccaggacgccatttcctggggcccgatcaaccgcaagttcccggccgacaagttcgatgccctgtgggctcgcgtcgaggcgttcaacaacgcccaggatcacttcgtttcctatgttcacgtaggggccgcagccgagcactacctgccggtgaagatgaccacccagactgcctggcagaacctgttcggtcgttgcctgttcatcaacccggagcagttcaacccggctggccgcgaccaatggcagatcctcaacgtcgccaacttcgtgtgcgagcctgagcgtgacggcaccaactccgacggttgcgtgatcatcaacttcgctcagaagaaagtgctgatcgctggcatgcgctacgccggcgaaatgaagaaagccatgttctcggtgcagaacttcctgctgccggctgccgatgtactgcctatgcactgcgcggccaacatcggcgaagaaggcgatgtgaccttgttcttcggcctgtccggcactggcaagactaccctttcggctgacgaaaggttacctgatcggtgacgacgagcacggttggggcgaaggcgttgtcttcaacatggaaggcggctgctacgccaagtgcatcgacctgtccgagaagaacgagccggtcatctggaaagccatcaagcacggcgcagtactggaaaacgtcgttctcgacgccaacaagcacgccgactacaccgatgtcagcctgactcagaacagccgtgcggcctacccgctggagcacgttgccaagcgttcggaagcgaacctgggcggcgagcctaacgcagtgatcttcctcacctgcgacctgacaggtgttctgcctccggtttcgatcctgaacaacgagcaggcggcctaccacttcctgtccggctacaccgcgctggtcggttccactgaaatgggttctggcggcggcatcaagtcgaccttctccacctgcttcggcgcaccgttcttcccgcgtccggctggcgagtacgccgagctgctgatcaagcgtatcaacggcttcaactccaaggtctacctggtcaacaccggctggaccggtggtggctacggcgttggcaagcgcttcagcatccccaccacccgtgccgtgatcgctgcaatccagagcggcgcactggtcggtgccgaaaccgagcacctggacatcatcaacctggacgtgccgaaggccgttccgggcgttgaaaccgaactgctcaacccgcgcaccaactgggctgacaaagcggcctacgacgaggctgccaaaggtctggccaagctgttcatcgaaaacttcaagaagttcgaagtttccgacgccatcaaggccgctggcccgcagctgtaa

SEQ ID NO: 32023 - DNA, 897 bp, Pseudomonas putida
atgagcgatttgcctgataccgatttcacccaacgtttcatcttcgacgagcgcgatgtgcgcggcgagtgggtgtctctcgatgacagctacgccgcggtgttggcgcgtcatgagtacccccagccggtccaggtgctgctcggcgagttgatggccgccaccgccttgctggtgggtgcaatgaagttcgatggcctgctgattctgcaggcgcgttcggccgggccgattccgctgctgatggtggaatgttccagtgagcgcgagattcgtggcatggcccgctacgaagcggaccagattccggctggtgccaccctgtcgcagctgatgcccgacggccacctgaccctgaccatcgacccggtcaagggccagcgctaccaggggaccgtcgacctcgatggcgccaacctgtctgaatgtttcaccaactacttcgtccagtcgcagcagctcaatacccgtttctggctcaatgcccaaggcggcaaggcccgtgggctattgctgcagcaactgccacgtgatcgccagccggatgatgaagagcgcgaagacagctggcagcatgtggtcgccctggccaagacactcaagcctgaagagtggacagagggcaacgaaacactgctgcaccgcctgtatcacgaagacgccgtgcgcctgttcgatatccagccactgcgcttcaattgcagctgttcgcgggaacgctccggcaatgcgctggtcagtctgggcgagcacgacgccaaggcgctggtggacgaatgtggcgggacggtagagatcgattgccagttctgcaacgagcgctacttcttcgatgccagcgatgtggcgcaattgtttgcgggtggcggtactgacgtggcctcagaaactcgtcac

SEQ ID NO: 32024 - DNA, 399 bp, Pseudomonas putida
atggcacaaaaagccgaagacgacgacaaggttcgcctggacaaatggctgtgggcggcgcgcttctacaagacgcgagcgctggccaaggcggcgatcgagagtggcaaggtgcattgccggggcgagcgatgcaagccgggcaaggaaccgcgggtgggcgacgagttcgtgctgcgtaccggcttcgatgagcgcacggtggtggtgaaggcgctgtcggtggtgcgtcgtggtgccccagaggcgcaggcgttgtacgaggaaaccgaagaaagtgtgcgtcgccgtgaacaggcggctgaaatgcgtaaggccggggccatgggcgtgaccaccgatggccggccgaccaagaagcagcggcggcagattcaccagctgcatggaagttacgat

SEQ ID NO: 32025 - DNA, 1440 bp, Pseudomonas putida
atgcagctcaaagacgctcagttgttccgccagcaagcctatatcaatggtgagtggctggatgcggacaacggccagaccatcaaggtgaccaacccggccaccggcgaagtcatcggtaccgtgccgaagatgggtaccgcggaaacccgccgcgccatcgaagccgccgacaaggccctgccggcctggcgtgccctgactgcgaaagagcgctcggccaagctgcgtcgctggttcgaactgatgatcgagaaccaggacgacctggctcgcctgatgaccaccgaacagggcaagccgctggccgaagccaagggcgaaatcgcctacgctgcctcgttcatcgagtggttcgccgaagaagccaagcgcatctacggtgacaccatcccgggccaccagccagacaagcgcctgattgtcatcaagcagccaatcggcgttaccgcggccatcactccgtggaacttcccggccgccatgatcacccgtaaagccggcccggccctggccgctggctgcaccatggtcctcaagccggcttcgcaaaccccatactccgctctggccctggtcgagctggcccaccgtgccggcatcccggctggcgtgctgagtgtggttaccggcagcgccggcgaagttggcggcgaactgaccggcaactccctggtacgcaagctgtccttcaccggctcgaccgaaatcggtcgccagctgatggaagaatgcgccaaggacatcaagaaggtttccctggagctgggtggcaacgccccgttcatcgtgttcgacgacgccgacctggacaaggcggtcgagggcgcgatcatctccaagtaccgtaacaacggccagacctgcgtctgcgccaaccgtatctacgtgcaggacggcgtctacgacgcgttcgccgagaagctggccgctgcagttgccaagctgaagatcggtaacggcctggaagaaggcaccaccactggcccgctgatcgatggcaaggctgtcgccaaggtccaggaacacatcgaggacgccgtcagcaaaggcgccaaagtgctgtccggtggcaagctgatcgaaggcaacttcttcgagccgaccatcctggttgacgtaccgaagaccgctgctgtcgccaaggaagagacgttcggcccactggcgccgctgttccgcttcaaagacgaagccgaagtcatcgccatgtccaacgacaccgagttcgggctggcctcgtacttctacgcccgcgacatgagccgtgtgttccgtgtcgccgaagccctggaatacggcatggtgggtatcaacaccggcctgatctccaacgaagtggcgccgttcggtggtatcaaggcttcgggcctgggccgcgaaggttccaagtacggtatcgaggactacctcgaaatcaaatacctgtgcatcagcgtc

SEQ ID NO: 32026 - DNA, 1665 bp, Pseudomonas putida
atgaaacactctcttcccagccgctacgcctgcctcgtactctgccttgtcttcactttcgccagcctgcccctgctggcccaacatgcctggctgtggccggtaacgctgatcaccgcgctgctcagcctggtcggtctgaatgacctgcgccaaagccaccatgcggtgcgacgcaactacccgatcctgggcaatatccgttacctgatcgaaaccatccgcccggaaatccgccagtacctgatcgaaggtgacgacgacaagctgccgttctcccgctcgcaacgctcgctggtctacgcccgcgccaagaacgaaagcgccgagaaagcgttcggcacgctcaacgacgcctacaaacctggtttcgaattcatcagccattccatgctaccggtggccacgccagaccctgcgtcgttccgcattgccatcggcgggccgcaatgccgaatgccctactcggcctcgatcttcaacatctcggcgatgagtttcggcgccctcagcgccaacgccatcgccgcgctcaaccgcggcgcgcgcatgggccggtttgcccatgacactggcgaaggcagcatcagcccttaccaccgtgaacacggcggcgatctgatctgggaaattggcagcggctacttcggctgccgcaccgaggacggtcgtttcgatccacagcgcttcgccgaacaggcccgctcggcacaggtgaagatgatcgagatcaagctcagccagggcgccaagcctggccacggcggcattttaccggggcacaaggtcagccccgaaattgccgagacccgtggcgtacgcgcaggcgaggactgcatctcgccggcggcgcacagcgccttccgcacaccggtcgagctgctgcagttcgtagccggcctgcgcgagctttcgggcggcaagcccgtgggcttcaagttctgcctgggccacccttgggaattcatgggcattgccaaggccatgctcgccaccggcatcacccctgacttcatcgttgtcgacggcaaggaaggcggcaccggcgcggcacctcgcgagttcagcgacaacatgggcgtgccgatgcgcgaaggcttgatgttcgtgcacaacacgttggtcggcctgaacctgcgctccagcatccgcattggtgcggcgggcaagatcgtcagcgccttcgacattgccagcgtattggccatcggcgctgactgggtcaattcggcacgcggtttcatgtttgccattggctgtattcagtcgcagagctgccacaccaacaagtgcccgaccggcgtggcgacccaagaccctctgcgccagcgcgccctggtggtgccagacaaggccgagcgggtagccagcttccaccgcaacacactgcacgcactggccgagatgctggctgccgcaggcctggagcacccttcggagctcaagcccaaacacctggcacggcgcgtcagccccagcgaaatcgggttgttttcagacttgcacacattcctcaaaccaggtgagttactcagtggctcgatcgaaagcgagttttatgcgcggatgtggcggatggcgcgtagcgacagctttgcaccggagaccgtaagcccagcgccggctcaaacagtaaccgttcgccgaaaagaaacagccccggca

SEQ ID NO: 32027 - DNA, 1311 bp, Pseudomonas putida
atgaaaacaccgctctggtttccgcaaagtttcttcgcccgcaccctgtggctggtgttgatcgtcgttctgttctccaaggcgctgaccctggtctacctgctgatgaacgaggacgtgctggtcgaccgtcagtacagccatggtgtggcgctgaccttgcgcgcctattgggccgccgacgaagaaaaccgcgacaagatcgccgaggcggcaggtcttatccgggtgaccggctcgggtgtgcccgaaggcgagcagcattggccctacagtgagatctaccaacggcagatgcaggccgagctgggtgacgacaccgaagtgcggctgcgcatccatgcaccgcccgcgttgtgggtcaatgcgccaagcctggggccgggttggctgaaagtgccgctgtacccgcacccattgcgtgggcagaagatctggaacgtgctgggctggttcctggccattggcttgttgtccaccgcctcggcgtggatttttgtacgtcagctcaaccagccgctcaaacgcttggtgttcgccgcccgccagcttggccaggggcgcagtgtgcgcctgccgatcagcgatacccccagcgagatgaccgaggtgtacaaggcgttcaaccagatggccgaggatgtcgagcaggccgggcgcgagcgtgagttgatgctggccggggtttcccacgacttgcgcacgcctctgacgcgcctgcgtctgtcgctgtccttgctgaacagcgacaacgagctgagcgatgacatggttcgcgatatcgaggacatggacgcgattctcgatcagttcctggccttcatccgcgatggccgtgacgagccggtggaagaggtcgaccttgctgacctggtgcgtgaggtggtggctccgtacaaccagccggaagagcgtgtgcgcctgtgcctggagccgattccaccgttcccgctgcgccgggtttcgctcaagcgcatgctgggcaacctgatcggcaacgccctgcaccatgctggcaagggggtcgaggtggctgcctatgtgtcaggtgacgagagtgcgccgtatgtggtgctcagtgtgctggaccggggcaccggtattgacgagtcggagctggaaaccatcttcaacccgttcattcgcggtgatcgggcacggggcggcaagggcaccgggctggggctggcgatcgtcaagcggattgctgcgcaacatggcgggaacgtggagttgcgtaaccggtctggcggcgggatcgaggcgcgggtcaggttgccgctggggctgctgctgccgcgtaatgctgtg

SEQ ID NO: 32028 - DNA, 2322 bp, Pseudomonas putida
atggacagcatcaacagccgtatcgccgaggaactgggcgtacgcccgcagcaggtcgaggcggccgtgagcctgttggacgaaggctcgaccgtgcccttcatcgcccgctatcgcaaggaagtgaccggtagccttgacgacactcagttgcgccacctggaagagcgcctgcgctacctgcgcgaactcgacgagcgccgcgccagcatcctttccagcatcgaggaacagggcaagctgaccccggaactggcccgcgagatcaagctggccgacaccaagacccgcctcgaagacctgtacctgccgtacaagcagaagcgccgcaccaagggccagatcgccctggaagccggccttggcgaactggccgatggcctgttcaacgacccgaccctggccccggaaagcgaagccgcacgcttcgtcaacgccgaaaagggcgtggccgacgtcaaggccgcgctggaaggcgccaagtacatcctgatggagcgctttgccgaagacgccgccctgctcgacaagctgcgcagctacctcaagcaggaagccgtgctcagcgcccgcgtcgtggccggcaaggaagaagaaggcgccaagttccgcgactacttcgctcatgacgagctgctgcgtactgcgccatcgcaccgtgccctggcgatcttccgcgggcgcaacgaaggcgtgttgagcgtctcgctgaaggtcggcgaagaactgcccggcaccctgcacccatgcgagctgatgatcggcaaccacgtcggcatcgagaaccgcagccggccggccgacaagtggctgggtgaagtggtgcgctggacctggaaggtcaagctgtacacccacctggaaaccgacctgttcggcgagctgcgcgacagtgccgaaggcgaggcgatcaatgtgttcgcccacaacctgcatgacctgctgctggccgccccggccggcccccgcgccaccctgggcttcgacccgggcctgcgcaccggctgcaagatcgccgtggtcgacgcaaccggcaaactgctggaccacaccacggtctacccgcacgcgccgaagaacgactgggaccgcaccatttccatcatggccgcactgtgcgccaaacactcggtggagctgatcgccattggcaacggtaccgccagccgcgaaagcgacaagctggtgaccgagttggtcaagaaatatcccgccctgaaaatcaccaagatcatggtttccgaagccggcgcttcggtgtactcggcatcggaattggccgcccgcgagttcccggacctggacgtgtcgatccgcggcgccgtgtcgatcgcccgacgcctgcaggatccgctggccgaactggtgaagatcgatccgaaatccatcggtgtcggccagtaccagcacgacgtgtcccaactgaaactggcacgtggcctggacgcggtagtcgaggactgtgtgaacgccgtgggcgtggacgtgaacaccgcttcggtggcgctgctgacgcgcatctccggcctcaatgccaccctggcacagaacatcgtcgcccaccgcgatgccaatggtccgtttgccacccgggcagcgttgaaaaaggtcagccgcctgggtgagaaaaccttcgagcaggccgccggcttcctgcgcgtgatgaacggcgacaacccgctggacgcctctgcggtgcaccctgaggcctatccactggtgcagcgcattgctgccgataccgaccgcgacatccgctcgctgattggtgacagcagcttcctcaagcgcctggacccgaaaaagttcaccgacgaaaccttcggcctgccaaccgtcaccgacatcctgcaagagctggacaagcccggccgcgacccacgtccggagttcaagaccgccaccttccaggacggcgtcgaagacctcaaggacctggaaccgggcatgatcctcgaaggcgtggtgaccaacgttaccaacttcggtgccttcgtcgacatcggcgtgcatcaggacggcctggtgcatatctcggcgctgtcggagaagttcgtcaaagacccgcgtgaggcggtcaaggccggcgatgtggtcaaggtcaaggtcatggaagtggacatcccgcgcaaacgcgtcggcctgtccatgcgcatgagcgacaccccgggcgagaaggtcgaaggcaaccgcggtggtaatcgtggcaatggcggcaatcgccagcagcaggcaccgcgtcagcgcgaaaccgccaccgcagccccggccaacaacgccatggccgccctgttcgccaacgccaagcaactgaagaagaag

SEQ ID NO: 32029 - DNA, 1728 bp, Pseudomonas putida
atgcagttgaaaaaactcaccgccaccaccctgctgctggccggcatcggcctgtttactctgcctgctcaagccaacctcacccagcagcagtccgcagccatcatcaaaaccttcgacggcagcgacccaagcgacttcaggcaattcctcggcaagctcaaagacagcgaccagggcaaggccgacaacctcgaggcaaccgtcgacgcctacctggccgacaagccattggccgccgggcaacaagacgagatcaaccgcctgctcggcctgtatacccgcatcaagtatggcaaagccgctaccgaaaccctgcgcgaactggtagccatccccaccttcaatgtcgagggtacgccgcagtacgaaaaccctgaattcctcaagatcgccgacaagatcaaggccttggccgaccgcttcggcctggccttccgcaacatcgacaaccgggtgtacgagatctcactgggcagcgggaaggaagtgatcggcatccatgcccacgctgacgtcgtgccggtcaacccggacaactggaagctggccgacggtacgcgcctggacccgttcaaggtcacccttgtaggtgaccgcatgtacggtcgcggcaccgaggacgacaagaacggcatcgtggtggcgatgtacgcgctgaaagtggccaaggacgaaaacctgccgctcgcccggcagttcaagctgctgatcgacaccaccgaagaaaccagcggtgatgccataccctactactttgagcgcaaccctacgcccgattacaacctggccctcgacggcggctacccggtggtgattgccgagaaaggctacggcacggtcatggccagcttcaccaagcgcccggccagcggcaagggtgccgagatcgtcaacctgaccggtgggctggccactaaccagatcccaacaacgtcggttgcgaccctgatttctgacaacccggcacagctggtcaagcacctgcagcaagccggtgccagatatgtgaagcagcatggaagcgacttcagcatcgacgccaaggccgacggcaagcaagtcttgctcaccgtgaccggtgtttccgcacactcttcggagccggaatccggcatcaacccggtggcgcgtatgctcgacttcatcaatggcctcggccagcaggtgtcgctcaagcacaaccactttaccgacgcggcccgctacgccgccgaaaactggggcctggactacctgggcaacaagctcggcgtggccttcaaggacccgttcatgggcccgctgaccacctcgctgacttttgtcggggtggatgaaaaaggcgtgaaactggcggtgaatctgcgcattcccaaggggaagccgatcgccacgatcaaggatgaactggccgacaaactgggcaaatggacccggcaaagcaacacttcggtggccttcgacttcagcctggacgagccgatgtaccgcaaccctgaaggcgagtgggtcaaggccctgctcgctgtggccaccgagaacctgggtatgaagcatgagttcggtacctcggccggcgcgacttcggtgcacgatcttcccaacggtgtgcaatttggcctggccatgccggaggtgaagtacaccgggcacaacgacaacgagttcaagaccgtggagcagttcatgctggacttgcaggtggtgagcgaaatggtggcgcggatcgggcagatgccgaagctt

SEQ ID NO: 32030 - DNA, 1083 bp, Pseudomonas putida
atgagccattggcccgaccgccgtatcctcaacctgctgggcatcgagctgcccattctgcaggcacccatggcgggggcgaccggctcggccatggccatcgctgtgggccaggcaggtgggctgggcgccctgccctgcgccatgctcagcggcgaacaggtgcgcgccgagatcgctgcattccgcgccggctgcccggggcgcccgctgaacctgaacttcttctgccaccagccgccagcgcccgatgccgagcgcgatgcgcgctggaagcaggcacttgagccttattacagcgaagtgggcgccgatttcacggcgcccacgccggtgtccaaccgtgcgcctttcgacgagcagagctgcctgctggtcgaagcgttgcgcccggaggtggtgagcttccatttcggcctgccgcaggccgaactgctgcagcgggtaaaggccagcggtgccaaggtactgtccagcgccacgaccgtggaagaagcggcctggctggagcgcaatggctgcgatgcgatcatcgccatggggtatgaagccggtggccatcgcggcatgttcctcagcgatgacatcaccagccagataggcaccttcgcgctcgtaccgcaggtggccgatgccgtcggcgtgccggtgattgccgccggtggtatcggcgaccaccgcgggctgttggcggcactggccctgggtgcctcggcagtgcagatcggcacggcttacctgttctgccccgaggccaaggtgtcgccagcgcatcgccaggcgctggacagcgcgcctgccagcgacaccgccctgaccaacctgttcaccggccgcccggcgcgcggcatcaacaatcgcctcatgcgcgagctggggccgatgagcgagcttgcaccgcgcttcccgctggcgggcggggcattgatgcctttacgggcgatcaccgatccgcagggtaagagtgatttcagcaatctgtggtcggggcaggcgttacggctaggccggcacatgccggcgggtgagctgacccgggagattgccggtaaggcattggcagtgatcggtcaccaggcattc

SEQ ID NO: 32031 - DNA, 756 bp, Pseudomonas putida
atgcgtatccgctcgccccagctggtcatcactgccctggccagcctgctcggcttcaacactgcctgggccgacgaagtccaggtcgcggtcgcagccaacttcacagcccctgtccaggccatcgccaaggacttcgagaaagacaccggccacaaactgatcgcggcctacggcgccaccgggcagttctacgcgcagatcaagaacggtgcaccgttcgaagtgttcctcgccgctgacgactccacccccaagaagctggaagcagaaagggaaaccgtacctggctcacgctttacctacgccatcggcaccctggccttgtggtctgcgaaggaaggctacgtagatgccaagggtgaagtgctgaaaaagaacgaatacaaacacctgtccatcgccaacccgaaagcggcaccttacggcctggccgccacccaggtactggacgggctgaagctcaccgaggccaccaaaggcaagatcgtcgaaggccagaacatcacccaggccttccagttcgtctccaccggcaacgccgagctgggcttcgtcgccctttcgcagatctacaaggacggcaaggtaacccatggctcggcatggatcgtgccgtccaacctgcacgacccgatccgccaggacgccgtcatcctcaacaaaggcaaggacaatgcggccgccaaggcactggtcgaatacctcaaaggcccgaaagccgcagcggtgatcaaatcctatggttatgaacgc

SEQ ID NO: 32032 - DNA, 1021 bp, Pseudomonas putida
agacacggaggctctcatgaaagctgctgtcgttgcaccaggccgtcgcgtggacgtgatagagaaaagcctgcgccctctcgaacacggcgaagcgctgctgaagatgcagtgctgcggtgtgtgccacaccgacctgcacgtcaaaaatggcgactttggtgacaagaccggggtagtactgggccacgaaggtattggcgtggttcaggaagttggcccgggcgtcacctcgctcaagccaggcgaccgagccagcgttgcctggttctaccagggttgcggacattgcgaatactgcaacagcggcaacgagaccctgtgccgcgacgtgaagaattccggttacaccgtggacggcggcatggccgaggcctgcatcgtcaaggccgactactcggttaaagtgcccgacggcctcgactccgccgccgccagcagcatcacctgcgccggcgtcacgacctacaaggcagtgaaaatctccaacgtccgccccggccaatggatcgccatctacgggctcggcggcctgggcaacctggccctgcaatatgccaagaatgtgttcaacgccaaagtcatcgccatcgacgtcaacgaagagcaactgcgcttcgccagcgagatgggcgcggatctggtcgtcaacccgctcaacgaagatgccgcgaaggtcatccaggccaaaaccggcggtgcacatgctgccgtcgttactgctgtggccaaaggcgcgttcaactcggctgtcgatgccttgcgcgctggcgggcgactggtggccgtcgggcttccgtcggagtccatggacctgaatattccccgcctggtgcttgatgggatcgaagtggtgggctcgctggtaggtacacgccaggacctgcaggaagccttccagtttgccgctgaaggcaaagtggtgcccaaggtaacgctgcgaccgatcgaggatatcaaccagatctttgacgagatgctggagggcaagatcaaaggccggatggtgatacagttcgaa

SEQ ID NO: 32033 - DNA, 294 bp, Pseudomonas putida
atgaagaccctgcatgtaattgcccattccccgtttggcgacgagcgcctggccagttgcctgcgcctgctcggtgccgaagatgccctgctgctgtgcggcgatgccgtgtatgccctgcgcagcggcagcgagccgcatggccatctgcaagccgccggcctggcccagcgcctgttcgccctggacgaggatgtacaggcccgcgcggtcggcaacgacctggcaaaggccgtggactacgccgggttcgtcgaactgtcgctgcaatacgacaaggtcaacagctggcta

SEQ ID NO: 32034 - DNA, 957 bp, Pseudomonas putida
atgggcctattgatcgacggccgctggcacgaccagtggtatgaaaacggcaaggacggcacgttcaagcgggagaatgcccagcgccgtaatcagctgcccgcccccgaggccggccgctaccacctgtatgtgtcgctggcctgcccatgggcccaccgcaccctgatctttcgcgcgctgaaaggcctggagccgttgatcgacgtgtcagtggtcagctggctgatgcaggaccatggctggaccttcgatcagcagcaaggctccagtggggaccacctcgacgccctgcagtacctgcaccagcgctacactcaggatgacccgcattacacagggcgcgtgacggtgcctgtactgtgggacaagaaagagaagcgcatcgtcaacaatgagtcggcagaaatcatccgcatattcaacagcgcgttcaacgagctgaccggcaataccctggacctttaccccgcatcgctgcgcccgaccatcgaagcactgaacgagcgcatctacccggcggtgaacaacggtgtgtaccgcgcaggctttgctaccacgcaagacgcttacgaggctgcctttgaggatgtgttcaacgagctggattacctggaggccttgctaggccgcaatcgctacctggcgggcgagtacctgaccgaggctgatgtacgcctgttcactacactggtgcgcttcgatgccgtgtaccacgggcacttcaagtgcaacctgcgccgcctgagcgactaccacaacctgtcgaactggctgcgtgagctgtaccagtggcctggggtggcgggtacggtgaacatggagcatatccagaagcactattacatgagccacaagaccatcaacccgaacgggatcgtgcctaaagggcctttgcaggactttggcttgccgcatgatcgagagcggttggcgggcaaagggatttggcaggct

SEQ ID NO: 32035 - DNA, 561 bp, Pseudomonas putida
atgccaatcatcaacagccaggtcaaacccttcaacgccaccgcctaccacaaaggcgagttcgttcaggtcagcgaagccgatctgaaaggcaagtggtctgtcgtgttcttctacccggccgacttcaccttcgtttgcccgaccgagctgggtgaccttgctgacaactacgccgagttccagaagctgggcgtggaaatctacggtgtttccactgacacccacttcactcacaaagcctggcacgacacttcggacaccatcggcaagatcgaatacccgctgatcggtgacccgactcacgtcatttcgcgcaacttcgacgtgctgatcgaagaagccggcctggccgaccgcggtaccttcgtgatcaacccggaaggccagatcaagattgtcgagctgaacgacggtggtgtaggccgtgatgctgctgagctgctgcgtaaggtcaaggctgcccagtacgttgccgctcacccaggcgaagtgtgcccggccaagtggaaagaaggcgaagccactctggcgccgtcgctggacctcgtaggcaagatc

SEQ ID NO: 32036 - DNA, 216 bp, Pseudomonas putida
atgtcgaaagaagacagcttcgaaatggaaggtactgtcgtcgacaccctgcccaacaccatgttccgcgtggagttggaaaacgggcacgtcgtaaccgcgcacatctccggaaagatgcgcaagaactacatccgcattctcactggcgacaaggtccgcgtcgaactgacgccgtacgacctgagcaagggccgcatcacctaccgtgcgcgc

SEQ ID NO: 32037 - DNA, 1119 bp, Pseudomonas putida
gtgactggccgttcccgatccgccaaggatgtattaaggtggcatggtgcgcatataacagcagcccgagcgatcgggcacttgcaagacaatgagggtgtcatgagcaacgaaagcattaattgggacaagctgggtttcgactacatcaagaccgacaaacgctacctgtccgtatggcgcaatggcgagtgggacaagggcaccctgaccgaagacaacgtactgcacatcagtgaaggctccacggccctgcactacggccagcagtgcttcgaaggcctgaaggcctaccgttgcaaggacggctcgatcaacctgttccgcccggaccagaacgcggcccgcatgcagcgcagctgcgcacgcctgctgatgccgcacgtgccgaccgatgtgttcatcgaagcgtgcaagcaagtggtcaaggccaacgaaaagttcgtgccaccgcacggcaaaggcgccctgtacctgcgcccgttcgtgatcggcaccggcgacaacattggcgtgcgcaccgcccccgagttcatcttctcggtgttcgccatcccggttggttcgtatttcaagggcggcatgaagccgcacaatttccagatttccagcttcgaccgtgctgccccgcagggcaccggagcggccaaggtcggtggcaactacgctgccagcctgcagccgggcgctgaagcgaagaaggccaacttcgccgacgccatctacctcgacccgctgacccacaccaagatcgaggaagtcggttcggccaacttcttcggcatcaccgccaacaacgagttcgtcaccccgaaatcggcctcggtactgccaggcatcacccgcctctcgctgatggaactggcgcaatcgcgcctgggcatgaccgtgatcgaaggcgatgtcgagatcagcaagctggaccgcttcgtcgaagccggtgcctgcggcaccgcggccgttatcaccccgatcggcggcatcgagtacaacggcaagctgcacgtgttccacgacctggaaaaggtcggcccggttacccagaagctctacaacgagctgaccggtatccagagcggcgatgtagaggcaccggcaggctggatcgtcaaggtcgcc

SEQ ID NO: 32038 - DNA, 954 bp, Pseudomonas putida
atgcccacagaactctcgacccacggctggccacagccagagcgccaggtacgctgggccgaagccatcagtgacacctatttcccattgagccttgaatttgctgccggacagccgttcgatggccacctgcagcgctggagtacgccgagcacgccgctcagcctgtcgcgcctgcggtccagccagctgggttactcacgcagcaaagcgcacatcggccaggaccatgaagcgttctacctggtgaccgtgccgcatggcagcgaggtgcactttgaacaggacggccaccagatcagttgcagcccgggcggtttcatcgtcgagcgcggcgatgcaccctaccgcttccactacggcacgcagaacgacttgtgggtgctcaagctgcccgagcgtgcgctcaaagccaacctgctggggcacaagcgctatacccggcattgcttcgacgcccgtcagggcctggggcgcatcttcgtcgagcaactcgacctgtgtgcccgccatttcgacaccagccccccggcagcccggcatttactgctggaacaggcctccgccaccctgctgctggccttgcagcaggatgagcgcgtgctgggcagcgaaggcagcaacctcagcaccctgcacctgacgcgggtcgagcagtacgtgcagcaaaacctgggtgaccccgagctgtcgccacaaaccatcgccggcgcctgtgggctgtcgctgcgttatctgcacaagctgttcgcgatcacgccctacacccttaatgagtgggtacgccttcaacgcctggaggccgtgcaccggcaactgcgcgacccgcattgccacctggccatcggcgaactggcatttcgctggggttttgccgaccaggcgcaattcacccgcgcgtttcgccagcagtatgggtgcacggcgagcgaagtgcgggctacgcgtacgcac

SEQ ID NO: 32039 - DNA, 1407 bp, Pseudomonas putida
atgaaacgctacgaacgcttcgccgatgacattgccgaactgatccgctccggggtgctgggccccggccagcgcgtgccgtccgtgcgctacgccagccagacccacggggtcagcccgtctaccgtgttccaggcctattacctgctggaacggcgcgggctgatccgcgcccggccgcgctccgggtatttcgtcaacgcccacgttccgcgtcagttcagcgagccgcaggcgctgcagccggtgagcgagtctaccgatgtcgacgtcagcgccttggtattttcgatcctcgactcgatcaaggaccccaacaccattgccttcggctcagcctttcccagccctgaactgttcccgctgcaacgcctgtcccgctcactggccagtgccagccgcagcatggacccgcgcatggtggtgaccgatctgtcccccggtaacccgcagttgcgccggcagatagccctgcgctacatggtcggtgggctgatgctgccgatggaagagctgctgatcaccaacggcgcactggaggccctgaacctgtgcctgcaggcagtgacccagccgggcgatctggtcgccatcgaggccccggccttctatgcctgcctgcaggtgctggagcggctcaagctcaaggctgtggaaatccccgtgcacccgcgcgagggcatggacctgggggtgctggcgcagaccctggaaatgcacccggtaaaggccgtgtggtgcatgaccaatttccagaacccggtgggtgcaagcatgccggaggccaagaaacaggccatggtggagttgctggcgcgccatcaggtgccgttgatcgaagacgacgtgtacgccgagctgtactactcgcaacaggcgcccaaacccgccaaggccttcgacactcagggcctggtcatgcactgcggctcgttcgccaaaagcctggcaccgggctatcgcattggctgggtggccgccgggcgctttgcgcaaaagatcgagcggttgaaactgatgacctccctttgtgcttccatgccggcccaggcggccatcgccgactacctgcaacacggcggctacgaccgccacctgcgcaagctgcgctacgcgctggagggccagcaggccaacatgctggcagccatcgcccgccacttcccggcgcagacacgggtcagccagccttccggcggctacttcctgtggctggaactgcccgagcagatggacgccctcaagctgttccacatggccctggcccaaggcatcagcatcgcgcccgggccgatcttttcgcccacccgacgcttcggcaattgcatccgcctgaactacggcagcccctggcatgacggcgccgaacaggccatggaaaccctcgggcggatcattcgctcgttc

SEQ ID NO: 32040 - DNA, 1299 bp, Pseudomonas putida
atggccaaacttgccttggagcaggccattgcgccggagtgggtcgatcaggttttcgaggagcaccgccaacggcagtattctcgcgagctgctgttctcgaccattatcaagttgatgtcgcttgtttcattgggcttgaagccatcgctgcatgctgcggcaagacaactggacgaccttcccgtcagcctggcagctctgtacgacaagatcagtcgaaccgaacctgccctgttgcgtgctctggtgacaggctgcgcgcagcgcttggcgccgacaatccatgagttgggctgctcagccatgcttcctgattggcaagttcgggtggtcgatggcagccacttggcctctaccgaaaagcgtcttggcgcgttgcgccaagagcgcggagcggctcgccccgggttttcggtggtggtttacgaccccgacctggatcaggtaattgacctccagccgtgcgaggacgcctacgcaagcgaacgagtttgtgttttgccgttgctggctgaagcaaagaccaatcaggtttggatcgctgaccgtctctactgcacgctgcctgtaatggaggcgtgcgaacaggtgaagacatcatttgtcattcgccagcaggccaagcatccacgcttgatccaggaaggtgagtggcaagcaccgatgcccgtcgccacaggcactgtgcgcgagcaatccatcgaagtaaaaggcgggcaccgctggcgacgtgtcgagttaacgcttcattcaccaaacgactcaggtgataacagcttgatgttctggagcaacctgcccgagagcatcagtgcgcaacagatcgcagacttctatcggcgccgctggagcattgaagggatgttccagcggttggaagcaattctggaaagtgaaattgaaaccctcggcagtccgcgagccgccttgcttggattcaccactgccgtgctggcatacaacgttctggccttgctcaagcgaagtgttgaacaggctcaccgcgatgccttgcccgagaattgggaagcctcgatctatcacttggcggtgcagatcagagggggttacgaaggcatgcagattgccctgccatccgagtacatgcccgttgttccgatggaaaacctggctcagcgcctgctggagctggccagaaacatccagcccagacaggttgcgaaaagcccacgaggccccaaggtgctcaaagcgaaggcctgggtgcaagggacggctgtacatgctcatgtttcgacggatcgggtcatcaaagccgccaaaaccaaaagacct

SEQ ID NO: 32041 - DNA, 1155 bp, Pseudomonas putida
ttgtcgaagatgcataagtcctacacggcagtggttgtcggcctgggggtggtgggcagtgccacgctgtggcgcttggctcagcagcagcaggatgttctggggctcgaggccggcgcgccgatcaatctgcagggaagttcctatggtggctcgcggatatttcgccaggcgtactgggaaggttcggattacttatcacttctggcggaagcggatctgggctggcgagagctgcaagcgactagccaccggccattgctgcattacagcggggggcttttcatcgggcccattcgctctggagttgtttcaggcagtgcggcatccgcgaaggctggcggtattgctcatcaacgactgaccgctgctgaggtcgaggccaggttctcggtcttccgtgcagatgaaaacatggaggcggtatttgaacaaggagcgtttaccatcgctgcggacgatgctcggctgcagatgctgaaccaggcggtggcgcatggtgcgcagatgcgttttggaagccacgtgcaggacatcacccgtgtcgaaagcgaattcctgctacgcctgagcgatggtcaatcggtgctcgcgcaaaaggtggtgttggcgacgggcgctggacttgctggctctctcatacccgacctgtccgggttgctgaggcctcgcagcgtgccgatttactggtgcgccttcaaatcgggtgccgagcaattgttcgcgaactttccggcgtttctctacgaactcgaggatggccgcctgttgtatggcacaccgcaaatcgataatgccgagcctggcatcaagattggcttccacaatcaccagcaatcggcgctggatccgcgcacgcaactggagccggccagcgacgcgcagatcgaggaaatatcagcctgtgtaagtcgcgtgtttcctgatttgatcgctcgtccctatgcttcacgcaagtgcgtatacaccatgaccccggacgaagcgttcatcataggggaaagcaaggagctcccaagtgtattctatgtctcggcctgttccggccatggtttcaagtttgcgccggcattgggtagttgcctggcccgcgctttagcgggccagtcgttggccttacaggttcctgccttcagccgggagcggttttcccac

SEQ ID NO: 32042 - DNA, 846 bp, Pseudomonas putida
atgagcattgaaaagatcgccgtgatcggcgcgggcaccatgggcaacggcattgcccaggtgtgcgccattgccggctaccaggtgctgctggtggatgtttccgacgcagcgctcgagcgcggtgtggccaccttgagcaagaacctcgagcgccaggtcagcaagggcactctcgacgccgacaaggccgcagccgccaaagcccgcatccgtaccagcaccgactacacccagctcagcgctgcacagctggtgatcgaggcggctaccgagaacctgcagctcaagcagcgcatcctgcagcaggtggcagccaacgtcgccgccgactgcctgattgccaccaatacttcgtcgctgtcggtgacccaactggccgccagcatcgagcaccccgagcgcttcattggtgtgcacttcttcaacccggtaccgatgatggcgctggtagaaatcattcgtggcctgcagaccagcgacaccacctacgcccaggcgctgatggtgaccgaaaaagtcggcaagaccccgatcaccgccggcaaccgcccgggcttcgtggtcaaccgcatcctggtgccaatgatcaacgaggcgatcttcgtgcgccaggaaggcctggccagtgccgaggacatcgacaccggcatgcgcctgggctgcaaccagccgatcggcccgctggccttggccgacctgatcggcctggacaccctgctggcaatcatggaggccttccacgaaggcttcaacgacagcaaataccgccctgctccactgctcaaggaaatggtcgcggccggctggctggggcgcaagagcggtcgcggtttcttcacctac

SEQ ID NO: 32043 - DNA, 1317 bp, Pseudomonas putida
atgacactgaacaacctcgaaatcgacaccctcgtcgtcggcgccggccaggccggcgtggccatgagcgaacacctgagcaagcttggcgtgccgcacctggtactggagcgcaaccgcatcgcgcaggcctggcgtaccggccgctgggactcgctggtcgccaacggcccggcctggcacgaccgcttcccggggctggaattcaacctcgacgccgatgcattcgccggcaaggaccaggtggccgactacttcgagcagtacgtacgcaagtacaacctgcccgtgcgcaccggcattgaagtgaagcgcgtggtgcgtaacagcgaccgccctggcttcaccatcgacaccagtgaaggcgtgattcgcgccaatcgcgtagtcgccgccaccggcccgttccagaaaccggtgatcccggccatcgcgccgaaagacagcaacctgcaccagattcattccgccgcttacttcaacccagagcagttgcctgaaggcgcggtactggtggtcggtgccggctcttccggcgtgcagattgccgaagagctgatgcgcgccggacgccaggtgtacctgtcggtcggcgcccacgaccgcccgccgcgtgcctaccgcaaccgcgacttctgctggtggctgggcgtgctgggcgagtgggacgcggaaattgccaagcccggtcgcgagcatgtgaccatcgcggtcagtggcgcccgtggtggccacaccgtggacttccgtgccctcgcccaccagggcatgaccctggtcggcctgacccagtcgttcgaaaacggcgtcgcgcgcttccaggacaacctggtcgagaacatcaatcgcggcgacgacaactacctggccctgctggatgcggccgatgcctacatcgaacgcaacggcctggacctgccggaagagcccgaagcgcgccagcgactggccgacccggagtgcatgcgcaacccgctgcagcagctggacctggccaaggccggcgtcagcagcatcatatgggccaccggttacggcgtggacttcagctggctgcaggtagacaccttcgatgccaacggcaagccccagcaccagcgtggtgtggcccgtgaacctggcgtgtacttcctcggcctgccgtggttgtcgcgccgtggttcatcgttcatctggggggtgtggcacgacgccaagcacgtcgccggccacatcgccacacaacgcacctacaccgcctaccgcgaccgcgagcaacgcgcagcggatgagcagcaaaccgccaagatcagcaatgtcagcaccctcggagcccac

SEQ ID NO: 32044 - DNA, 1485 bp, Pseudomonas putida
atgaccgtcagcttcaacagcatccccagcgacctgcgtgtgccgctgttctacgccgaggtcgacaacagccaggccaacagcgccacgggcagcctgctgcgcttgatcgtcggccaagtcaatgacgatgccgatgcgccggaaatcggcaagctcaccctcgtgccgagcctcagcctggccaagacaatcggcggcgtcggttcgatgctggccgacatgtacgagacctggcgtggcatcgacctggtgggcgaggtctggtgcctgccgctcaaggcgaccggtaccaaggcggccggcaaggtgaccatcaccggcaccgccacggagggtggccaggtcaacctgtacatcggcggccagcgcgtgcgcgctacggtagccagtggcgcctcggcggcagcggtggccactgcgctggcggcggcggtaaacgccgccggccttggcgtatcggcgactgcagccacgggtgaagtggccctgacctgccgctggtccggcctcagcggcaacgacatccagctggaactgaaccgtcagggtcgcagcaacggcgagttgactcctgctggcctcaccgtgacggtaaccgccatgactggtggcgtcggcaccccggacgtggccgaggccctggccgtgcttggcgatgagccgttcgagttcatctgcgcaccttgggccgatgccacctcgctggatgcctggaagggcttcatggacgacaccagcggccgctggagctgggcgcgtcagctgtatggccacgtctattcggcttgtcgcggtacgctgggcgaactggtcgccttgggcgatacccgcaacgaccaacacgtcacggtgtatggcttcgaaccggaatgcccggaccctgtgtggcgtcaagcggctggctatgcctcccgcactgcggtgttcatctcggctgacccggcgcggccgacgcaaaccggtgagctcaacggcatcaccccggcgccgtcgggtgatcgcttcatgctgaccgagcggcagtcgctgctgacccatggcattgccacgggctacagcagcggcggcgtgcagcgcatcgagcgcggcatcaccacataccggcagaacgctctgggtcagcccgacaattcattcctggacagcgagacgctgcatcagtcggcctacatcatcaatttccttaaggggcgaatcaccagcaagtacgggcggcacaagctggccgacgacggcacgcgcttcggcgctggtcaggcgatcgtcaccccaaacgtcatccgcgccgagctgatcgccggttactacgtgcttgagacgctgggcattgctgagaacgcagatctcttcgccaagtacctgatcgttgagcgttcgactaccgaccccgcccgggtcaacgtgctgtatccgccggatctggtgaaccagctacgggtgcttgccctgcaataccagccccgcctgcagtacgcggcatcg

SEQ ID NO: 32045 - DNA, 1635 bp, Pseudomonas putida
atgacgctcagtcctttggcaggcaagccggctccggccagcgtgctggtcgatattccccggctgcttaccgcctattacacgggccgcccagacgctaccgtggcggcccagcgcgtggccttcggcacctcggggcaccggggcagttcgcttgaattgagtttcaacgagtatcacgtcctggccattagccaggcgatctgcctgtaccgccaggaaaaaggcatcgatggcccgctgttcattggcgccgatacccacgccctgtcagcgccggcgaccgccagcgccctggaagtgctggccgccaacggcgtgcaggtgatgctgtccaaggatgacgaatacacgcctacgccggcggtttctcacgccatcctctgccacaaccgcggccgcacgcagggcctggctgacggtatcgtcatcaccccgtcgcacaacccgccgcaaagcggtggcttcaagtacaacccacccaacggcggcccggccgacagcgacgtgaccaagtggatcgagggcaaggccaacgagctgctggcggctaatctggcgggcgtcaagcgcatggaccatgcccaggcgctgcaggcgccgaccacccaccgccacgactacgtcagcaactatgtggccgacctggaaaacgtcatcgatttcgatgtcatccgtggcgctgggctgcgcctgggcgtcgacccgctgggcggggcaggggtacgctactggtcggcaattgccaagcactaccagctggacctggaagtggtgaacaccgaggtcgacccgaccttccgcttcatgaccgtcgactgggatggtcagatccgcatggacccttcctcgccgtatgccatgcagggcctgataggtctgcgcgagcgctttgacgtggccttcgcctgcgacccggaccacgaccgccacggcatcgtcacccctgacggcctgctgcaacccaacaactacctcgccgtggccatcgactacctgttccgccaccgcccgcagtggcgcagtgacgccgccgtgggcaagaccgtggtctccagcggcctgatcgaccgcgttacccaacggctgggccgcgatctgtatgaggtgccggtgggcttcaagttcttcgcccagggcctgttcgacggttcgctcggttttggtggcgaagaaagtgcaggggcttcgttcctgcgtcgcgatggctcggtgtgggccaccgacaaggacgggttgatcccggccttgctggccgccgaaatgaccgcccgtaccgggcgtaacccgagccaggcttatgccgacctgaccgaggcgctgggcaagccgttcgccacccgtgtcgaggccaaggccgatgcgcggcagaaggcgttgctgagcaagctggcgccggagcaggtgaagtcgacagagctggccggtgagccgatcgtgcagatcctcagccacgccccaggcaatggccaggcgattggcgggcttaaggtgatgacggccaatggctggttcgccgcgcgcccgtcgggtactgaagacatctacaagatctacgccgaaagcttcatcgacgaggcgcatttgcagcgtctggtggaggaagcacaagtgctggtcgatgaagccattgcc

SEQ ID NO: 32046 - DNA, 1188 bp, Pseudomonas putida
atgctgggcctgttcggcacagccatcggcgccgggacactgttcctgccgatcaacgccggccttggcggcttctggccgctgctgatcctggccgtgctggcctttccgatgacctatttcgcccatcgcgggctgacccgtttcgtcctttccgggcgcgatggcagcgacatcaccgaagtggtcaaggagcatttcggcatcaccgccggtgcctcgatcaccgtgctgtacttcttcgccatcttcccgatcctgcttatctacagcgtggcgctgaccaacaccgtgtccagcttcatggagcaccagctgcacatgcagccgccgccacgggcaatcctgtcattcgtgctgatcctcggtctgctggccatcgtgcgctgcggggagcaggccacggtcaaggtcatgagcctgctggtctacccgttcatcgtcgctctggcgttgctgggcctgtacctggtgccgcactggaccggtggcattctcgacagcgccacagaggtgccgccggcctcggccttcctgcacaccctgtggctggccattccggtgatggtgttctcgttcaaccattcgccgatcatctcggcctttgccgtcgaccagaagcgccgttacggcgcgcacgccgacgagcgcagcggccagatcctgcgtcgtgcccacctgttgatggtggtgatggtgctgttcttcgtgttcagctgcgtgctcaccctgagcagcgcccagctggccgaagccaaggcgcagaacctgtcgatcctgtcgtacctggccaaccacttcagcaacccgaccatcgcgttcgctgcgccgttgatcgccttcgtggccatcgccaagtcgttcctcggccactacatcggcgccagcgaaggcctgaagggcatcatcgccaagaccggtgcgcgcccaggcgccaaggccctggaccgcgtggttgccgcactgatgctggtggtgtgctggatcgtcgccacgctcaacccgagcattctcggcatgatcgagtcgctcggcggcccgattctcgcggtgctgttgttcctgatgccgatgtacgccattcgccgtgtgccatcgatgcgcaagtacagcggtgcggcctccaacgtgttcgtcgttgtggtcggcctggttgcgctgacttccgtggtgtacggccttgtaagc

SEQ ID NO: 32047 - DNA, 1023 bp, Pseudomonas putida
atgtccgcaccttccaccagcaccgttgtgcgcgtgccttttaccgagctgcaaagcctgttgcaggccattttccagcgccatgggtgcagcgaggccgtggcccgggtgctggcccacaactgcgccagcgcccagcgcgatggcgcccatagccatggggtgttccgcatgcccggttatgtctcgaccttggccagcggctgggtcgatggccaggccacgccacaggtcagcgacgtggccgccggctatgtgcgcgtcgatgctgcgggcggttttgcccagccggcactggcggcggcccgtgagctgttggtggcgaaggcgcgcagcgcaggcattgccgtgctggcgatccacaactcgcaccatttcgctgcgttgtggccggatgtcgagccgttcgccgaagagggcctggtagccctcagcgtggtcaacagcatgacctgcgtggtgccgcatggtgcacgcaagccgctgttcggtaccaaccccatcgctttcgctgcgccttgcgccgagcatgacccgatcgttttcgacatggccaccagtgccatggcccatggcgatgtgcagattgccgcacgtgctggccagcaattgccggagggcatgggggtagatgccgatggccagccgactaccgacccgaaggcgatcctggaaggcggggccttgctgccatttggcgggcacaagggctcggcgttgtcgatgatggtcgagctgctggcggcggcgctgaccggcggtcatttctcctgggagttcgattggtccgggcatccgggggcgaaaacgccatggaccgggcagttgatcatcgtcatcgacccgggcaaggccgaaggccagcggtttgcccagcgcagccgcgagctggtggagcacatgcaggcggtggggctgacgcgcatgccgggcgagcggcgctaccgtgagcgcgaggtggccgaggaggagggggtggcggtgaccgagcaggagttgaaaggcctgaaagagctgcttggc

SEQ ID NO: 32048 - DNA, 1122 bp, Pseudomonas putida
atgaccagcccagcacttaaagaccccgccaagacccgcgtcatcgtcggcatgtccggcggcgtggactcttccgtctcagcccttctgctcatcgagcagggctaccaggtggaagggctgttcatgaagaactgggaagaggacgacggcaccgaatactgcaccgcccgtgaagacctggccgacgcccaggccgtgtgcgaccgtatcggcatcaagctgcacaccgccaacttcgccgccgaatactgggacaacgtgttcgagcacttccttgaggagtacaaggccggccgcacacccaaccccgacatcctctgcaaccgcgaaatcaagttcaaggcgttcctcgactacgccctgtcgctgggtgccgacctgatcgccaccggccactatgtgcgccgccgcgatactggcgcgctcaccgaactgctcaagggcctggacccgaacaaggaccagagctacttcctgcacgccgtcggcggccaggaaatcgcccgcacactgttcccggtcggcgaactggaaaagcccgaagtacgcgccatcgccgaaaaacacggcctggccaccgccaagaagaaagattccaccggcatctgcttcattggcgagcgccgcttcagcgacttcctcaagcagtacctgccggcccagccgggcgacatcgaaaccaccgaaggtgaagtgatcggccgccaccatggcctgatgtaccacaccatcggccagcgccagggcctgggcattggcggcctgaaggatgccagtgacgagccgtggtacgtgctgcacaaggacctggcccgcaacgtgctggtggtcggccagggcaacgagcacccatggctgttctcccgcgccctgctggcctcggaaattttctgggtcaacccggtcgacctcggcagcccacggcagttgactgccaaggtgcgctaccgccagagcgaccagcgatgcaccctggaacgcaccgccagcggctaccgcgccgtgttcgacgagcctcagcgcgccgtgacgccgggccagtcggtggtgttctacgacggcgaagtgtgcctgggcggcggcgtgatcgaggctgccgagccgtggagcccgcgcgca

SEQ ID NO: 32049 - DNA, 1703 bp, Pseudomonas putida
acgaacgttacaagcgctggaacctggccgacctgccgatcattccagacaagtggaagatgctggtaaagcccaagactgccagccagttcaaggcggtcaagcgcctgctcggtgaagcgcgggagctggtgattgccaccgacgccgaccgcgaaggcgaaatgattgcccgcgagctggtcgagcattgccgctaccggggcccggtgcagcgcctgtggctgtcggcactggacgacgcctccatccgcaaggccctggcacgcctgctgccaggccacgagacgttcaacctgtaccactcggcactgggccgatcgcgcgccgactggctgatcggcatgaacatgagccggctgttcaccctgctgggccgccaatccggctaccagggtgtgctgccggtaggccgcgtacaaacgcctaccttgcgcctggtggtcgaccgcgaccgcagcatcgccaacttcgtgccggtgccgttctgggccatcgacgtacagctggaacacgccggccaacgcttcaatgcccaatggcgcgcccccgaagacgcctgcgacgaccaaggccgctgcctgaagcaaagcctggctcagcaggccgcggccgacatcggccatgccggcactgcccgagcggtaaaggtggcgaccgagcgtgtgcgcgaagcagcaccgctacccttcgaccttggcaccctgcaggagctgtgctcgaaaaagttcggcctcggcgcccaggaaaccctcgacattgcccaggcactgtacgaaacacacaagctaatcacctacccgcgcagcgattgcggctatttgccacaaagccagcacgccgaggcacccgccatccttgccgccctgcaacgggccgatgccagccttgcgccgctgcagccctacctggagccgcaacgccgctcgcgggcgtggaacgacgccaaggtcagcgctcaccatggcatcatccccaccgccgccgccagcgacccctcgcgcctgccggccaagcacaaggccgtgtacaccctgatccgcgcccgctatctggcgcagttcctgcccaaccatgagtacgaccgcacccaggcggacttcgactgcgccggtcatgcgctgcgtgctgtgggcaaacagatcgtcgagccgggctggcgccgcgccttgcccgaagcgctgaccccggccaaaggccgcgaggcaccaccggcccaggtgttgccagcgctgcgcgaaggccaggactgcaacgtacacggcctgcaactgaaagacctgtggacccagccgcccaagccgtttaccgaaggcgacctgatcaaggcgatgaaaaacgtggccaagctggtggatgaccctcggctgaagcagaagctcaaggaaaccaccggcattggcaccgaagccacccgcgccagcatcatccagggcctgctcgaccgcggttacctggtgaagaacggcaaggcgttgtcggccacacctgcggccttcagcctgatcgacgccgttccccgcgcgattgccgaccccggtaccacggcgatctgggagcaggcgctggacatggtgcaaagcggcgagatgcccctggaagagttcgtcgcccggcagtcagcgtggatgggcaagctggtcgagcgttgcagcggcatgcgcatgaccatcagcgggccagcggccggggcggccccgccc

SEQ ID NO: 32050 - DNA, 2253 bp, Pseudomonas putida
atgtcgaacgaatcgaaatgcccgttccatcaaaccgcaggtggcggcaccaccaaccgtgactggtggcctgaccagctcaacctgagaattcttcaccagcattcctccaagtccagccccgacccggacttcgactatgccaaggcgttcaagagcctcgactttcaggccctgaagaaagacctgaccgccctgatgaccgactcgcaggattggtggccggccgacttcggccactacggcccgctgttcatccgcatggcctggcatagcgccggcacctaccgcattggtgatggccgcggtggtgcgggctctggccagcaacgcttcgccccgctcaacagctggccggacaacgtcagcctggacaaggcccggcgcctgctgtggccgatcaagcagaagtacggcaacaagatttcctgggccgacctgatcgtactcacgggtaatgttgccctcgaatccatgggcttcaagaccttcggcttctccggcgggcgtgccgatgtgtgggagccggacgaagacgtgtactgggggtcggaaaaggtctggctagggggtgatacccgttacggcaaggatcaggtcaaggcgcagccgccggggcagggtgacctggtggccgagcctgccaagcatggtgaagagcagaatcgcgacctgtcggccgagcgtaacctggaaaacccgctggccgccgtgcagatgggcctgatctatgtgaacccggaaggcccggaaggtaaccccgaccccgtggcctcgggcaaggacatccgtgaaacctttggccgcatggccatgaacgatgaagaaaccgtggccttgatcgccggtggccacgcgttcggcaagacccatggtgccggccccgccgacaacgtcggccccgagccggaagcggcaggcctggagatgcagggcctgggctggcacaacacgtttggctccggcaaaggcggggataccatcaccagtggcctggaagtgacctggacctccaccccgacccggtggagcaacgagtacctgaataacctgttcgactttgagtgggagttgaccaaaagcccggccggcgcgcaccagtggcggccgaaagacggcaaaggcgcaggcacggtgcccgatgcacatgatcccggtaaaaggcatgcaccgtcgatgttgacctccgacctggcattgcgtttcgaccccatttacgagccaatcgctcgccacttcaaagaaaaccctgaccagctggcggatgcttttgcccgtgcatggtacaagctgatccaccgcgacatgggcccgctggcgcgctatctgggcccggaaatgcccaatgaagagttgctgtggcaagacccgttgcccaaagctgacccatccacgatcagcgagcaagacatcgcgaccctcaagtccaggatcctggcctcgggtttgagcgtgggcgaactggtctccaccgcctgggcatccgcgtcgaccttccgcggctccgacaagcgcggtggtgccaacggcgcacgtttgcgcttggcgccacagaaggactgggctgcaaaccagggcgtggacaaggtgctggcggcattggagaagatccagggcgagttcaacagcagcggcaagaaggtttccctggctgacctgatcgtgctggccggtaccgcggcagtcgaaaaagctgccaaggatgcgggctacagcggcagcgtagggttccgcccgggccgagtcgatgcgtcgcaggagcagaccgacgtcgagtcgttcgccgtgctggaaccgctggccgatggcttccgcaacttcaccaaggcacgctacagcgtcaaggccgagaaactgttgctggacaaggcgcagttgctgaccctgaccgcgccggagctgaccgtgctgatcggtggcctgcgggtgctcggtgccaaccatggtggcagcaaactcggcgtgttcaccgacaagccggggacgctgagcaacgacttcttccgcaacttgctggatatgagcgtggagtggaaaccgacctcggcggacaacgaaacctttgaaggccgcgaccgcaagaccgggcaggtgaagtggagcggtagccgggtagatctggtgttcggttcgcatgcccagttgcgggcgttgagcgaggtgtatgccagcagtgatggcggtgacaagtttgtccgagactttgtggccgcctggcagaaggtcatggagctggaccgctttgatctgaaa

SEQ ID NO: 32051 - DNA, 288 bp, Pseudomonas putida
atgaaactgcactatctgctactcgccgccctgccttgcctgcccctgagcgtcagcgccgccccctcgagcgaagaaagcatcacagcccccgaaacccacaaccgtgaactgaacgtcggcgacaaggccccggaccagtacaaacgcgatgaccaggccatccaggactggaaagccaaaggcctgcccgaaccggaaaaggaaagccattgggtgcgcatgggcaagcattatgtgctggtgcagatcaccaatggcgtggtgctggcgattcaaccagcatcc

SEQ ID NO: 32052 - DNA, 390 bp, Pseudomonas putida
atgcgtctgactctgccttcccttgccctcggcctgctgctatgccagggcgctttcgccggtgacggtactgccgccattggcggtggcctggggggtgtcctgggcaacgttgttggtcaacagctcggcggcaagaccggcgcagccatcggtgccggcgttggcggcgcagccggcagcgctgtcggtgcgcgcaaaggcaaccgtaccgaagccgccatcggcggtggcctgggctcggccggcggctcgctgctgggcggcgcagtaggcggcaagaccggttcgaccgtgggtgccggcctgggcggcgcggccggtggtgccctcggcaaccatctgggcgacaacaaccgcggcagcaagaagcaccaccgccaccgtcac

SEQ ID NO: 32053 - DNA, 1119 bp, Pseudomonas putida
atggctttcaacaccatcgaggaacttctcgaggactaccggcaaggcaagatggtcctgctggtggatgacgaggaccgggaaaacgagggcgatctgctgatcgccgccgagcgctgcgacgcccaggccatcaacttcatggctcgcgaggcgcgcgggctgatctgcctgaccttgaccgacgatcactgccagcgcctgggcctggagcagatggttccggccaacggtagcgtgttcagcaccgcgttcaccgtgtcgatcgaggcggccaccggggtcaccaccggcatttccgccgctgaccgggcacgcaccgtggcagcggccatggcccccaacgcccgccccgaagacctggtgcaacctggccacatcttccccctgcgcgcccgcgaaggcggcgtgctgacccgtgccggccacaccgaagcaggctgcgacctggcacgcctggccggcttcagcccggcctcggtcatcgttgaagtgctgaacgacgacggcaccatggctcgccgccccgacctggaagtgttcgccgcccggcatggcatcaagattggcaccatcgccgacctgatccactaccgcctgagcaccgagcagaccgtcaagcgcatcggcgagcgcgagctgccgacggtgcatggcaccttccgcctggtcacctatgaagaccgcatcgaaggtggcgtgcacatggccatggtcatgggcgacattcgccgcgaacagccgaccctggtgcgggtgcatgtgattgacccgctgcgcgacctggtgggcgccgagtacgccggccccgccaactggacgctgtgggcggcgctgcagaaggtggctgaggaaggtactggcgtggtggtgatcctggccaaccacgaatcctcccaggccttgcttgagcgtgtgccacaactgacccaccctgtgcggccctatcaacgtggccagtccaaggtgtattccgaagtgggtaccggggcgcagattctgcaggaccttggcgtgggcaagctgcgtcacctggggccgccgctgaaatacgcggggctggcgggctatgagctggaggtggtgcagagcatcccgttcgacccggggatggatggc

SEQ ID NO: 32054 - DNA, 1349 bp, Pseudomonas putida
ttcgattttgatctgttcgtgattggcgccgggtccggtggtgtgcgcgcagcgcgttttgctgccggttttggtgcaaaagtggcagtggcggaaagccgctacctgggggggacctgcgtcaacgtcggttgtgtgccgaaaaaactgctggtatacggcgcgcacgttgccgatgagctggagcaagccgcaggtttcggctggacgttggaagaggggcatttcgactggggcaccctgattgccaacaagaatcgggaaatcgagcgcctcaacggcatctaccgtaacctgctggtcaacagcggggtgaccctgttgcagggccacgcgcggctgacgggtgccaacgaagtggaagtggacggtcagcgctacaccgccgagcatatcctcatcgctaccggtggctggccgcaggtaccggacattcccggcaaggaactggccatcacctccaacgaagccttctacctcaaggatttgccgcgccgcgtgctggtggtgggtgggggttatatcgccgtcgaattcgccggcatcttccagggcctgggggccgacaccacactgctgtaccgtggcgacctgttcctgcgcggcttcgacggctcggtgcgcacccacctgaagcaagagctggagaaacgcggcctcgacctgcagttcaacgccgacatccagcgcatcgacaagcttgaagatggtcgcctgaaagccacgctcaaggacggccgcgagctggtagccgactgtgtgttctatgccaccggccggcgcccgatgctggacaatctgggcctggagaacaccggcgtcgagctggatgagcgcggttacatccgggtcgatgagcagtaccagaccaccgcgccctcgattctcgccattggcgatgtgatcggccgcgtgcagttgaccccagtggccttggctgaaggcatggccgtggcgcggcgcctgttcaaacccgagcagtaccgcccggtggattaccagaacatccccaccgcggtgttcagccagccacccatcggtaccgtaggcttgaccgaagagcaggcgctggaggccgggcacaaggtgcaggtattcgaaagccgcttccgggccatgaagtgaccctgaccgacattcaggaaaagaccttgatgaagttggtggtcgatgccgagaccgacaaggtgctgggttgccacatggtcggtcctgacgctggcgaaatcattcagggcctgggcattgcgcttaaagccggtgccaccaagcagcagttcgacgaaaccatcggcgtgcacccgacggcggccgaagagttcgtgaccatgcgcaccgtcacccgctga

SEQ ID NO: 32055 - DNA, 837 bp, Pseudomonas putida
atgatcaaaaaatgcttgttcccggcagccggctacggcacgcgcttcttgcctgctaccaaagccatgcccaaggaaatgctgccggtggtcaacaagccactgatccagtatggcgttgaagaagcattggatgcgggtctgaacgagatctccatcgttaccgggcgcggcaagcgcgccctggaagaccacttcgacatcagctacgagctggaaaaccagatcaagggcaccgacaaggaaaaatacctggtcggtattcgtcgtctgctcaacgagtgctcgttctcgtacacgcgccagaccgaaatgaagggcctcggccacgccattctcactggccgcccactgatcggtgacgagccgttcgcggtggtgctggcggacgacctgtgcgtcaacccggaaggtgacggcgtgctgactcagatggtcaagctgtacaaacagtaccgctgctcgatcgtcgccatccaggaagtcgacccgcaggaaaccaacaagtatggtgtgatcgccggtgagatgatccgcgacgacatcttccgtgtgaccaacatggtcgaaaaaccggccccggaagacgcgccttcgaacctggcgatcatcggccgttacatcctgaccccggatatcttcgacatcatcgccaacaccaagccaggcaaaggcggtgaaatacagatcaccgacgccctgctgcagcaggcgaaggatggctgcgtgattgcctataagttcaagggcaagcgtttcgactgcggtggcgccgaaggctacatcgacgcgaccaacttctgcttcgagaactactacaagactggcaaggcttac

SEQ ID NO: 32056 - DNA, 1854 bp, Pseudomonas putida
atgctaactgacgttctttccatgctcgcgccgcaaaacaggcgattgttcaagctgaatatcctgacacaaacagccaacgatgagtttttgctggagcacttttccggcactgaagagctttccaaactctatgaattcgatctggccttgctcagccaacagagcgatgtaaagctcaagtcactgattggcagccaggccacggtagaaatagagttatccaacggctctttccgccacattaacggctatgttcagcggtttagcacccaaggcagcgacggcggctatgtgcgttatgcagccgtgctagggccgtggctgtggatgctgacttgccgtttcgatacacgcatttttcaagaaaaatcggtccaggctgttgtcagtgaagtgttcgccggatttggcacgctggccaagtacgaatttcgtgtaagcaagccgctcaaatcgcacagctacattacccagtaccgcgagagcgatttcaactttgtgcagcgcttgcttgagagcgaagggcttttctactacttcgagcacacggccgactcccacctgatggtcatcaccgatgactccagcaccttgttgccgctgcccgaacagccgcagattcgctaccactccgcgtcggttaccgaaaccgctgattccattactcagtggcagtcaacgcggcagctgcaatccggtcaaattgccgttcgcacgttcgactatcgccaaccgcgcaacttcctacctgtgaccatgcaaagcttgaatcaacagggcgatgtggacaggttcgagatttatgatttcccgggccagtacacccatggcagctacgaagatggcgaagccatcgtacgcaaccgtatcgaagcgctcgagttgatgggcaagaccttctacggcgagagcaattgccgggccatgaagccgggttacacttttgagttgacccagcattatctgcacgacaccggtgccgccgagaaccgtaagtttttgttgctgagcgtggagcatcgcggcagcaacaactacatgacgggcgaccaggccggttacgtcaaccgattcgtgtgcgtgcgtaaaaaaatcgcataccgcccgcagttgaacacccgcaagcctttgatcaacggcccgcagaccgccatcgttgtcggccccccaggcgaggaaatcttcaccgacgaactgggccgggtaaagcttcagtttcactgggatcgccaggggcagttcaacgatcaaagctcctgctgggtacgtgtcgcccagtccggtgccagcggtggcttcggcagcatccagattccgcgcgtaggcgacgaagtggtggtggtgttcctggacggcaacccggaccggccgctgatcatgggcagcctgtacaacagcaccaacaccccgccatggtcgctgccggcgaacaagacccagagtgggttcctgacgcggtcgatgaagggcgacggcggtaccgccaacttcttccgcttcgaggacaaggccggcgccgagcagatcatcatgcatgccgagcgcaacatggataccgagatcgagctggatgagacccacgatgtggggaataaccgctcgattactgttggtggtacgcataccgaaacggtcaagaaagacaccgtggtgcaggtgaccgagggttcctacaccctgcaggtcgacaaccagttcatccaggtggccgccaagcagcacatcatcctgcaggtgggcgacagcagcatcacgctgaccccggaaggcatcgagatcaaaggcaaggtcatcgtgaccaccagtaccgacaccacccagatcactggcgccgcagtgcggatcaacgac

SEQ ID NO: 32057 - DNA, 519 bp, Pseudomonas putida
atggcttcgcgcagggctgaccccgattttttcgctatcaggaattttcatcgcatggattacgaattacaggaaggcggcattgcgctgccggcaggtttcgaggaccgcacggtcaacatgttcgtcttgggtgccagtgtccccgcacccttgagcatcaccatctcgcgtgacaccttgctgccggacgaagcgctgcaggcctatgtcgatcgccaggtcaagctgctcacctccaagctgcgcggctacacccgcatgggcaacaaggccgtcacgctctcggttaccgcacccattgccggcatccagatcgacgcctattacatgaaccagggccgcccgctgtaccagcgccaggccgccttcatcatcagccccgggcgtgccctgatcttctccaccactgcacaggccgacttcagtgcccagcagaaccaggactgggacaacctgttggccagcttcaccccgcgtgccccgtccgaaaccagcgccgagtccggcgaacaggag

SEQ ID NO: 32058 - DNA, 4155 bp, Pseudomonas putida
atgttcgaagcggccaggttcggcgacgagatatcgcacaccagcgcgctggggggcttcctgatcggggccgccctggggattgcgctggtggccacggtggccattgccacgttcacctgcgggttcggcgtggccttgctggccggcctcgcagccggcatcgggggcagcttgctgaccgccgccggagaggcgataggcagtatgttctcgtccccctcagggacgataaccactgcctcacccaacgtgttcatcaacagccgcaaggccgcccgcgtcgaaaaaagcatcggtgcctgcgacaagcacccagggccggtgcagattgccgaaggctcgaccaacgtcttcatcaacagcgtcgccgccgcgcgcaagggcgacaagctgacctgcggcgccaccatttccggtggttcggacaacgtcatcatcggcggcggcacctaccgttacctgcccgtggacgatgaagtcccggagtggctgcgcaccaccgtggatgtgctgatggccatcgccggtgccgcaggcggtatcgcccagctgatcaaggcgggtacccaggccggcatgaaagccgtcatgccttgcgccctgaagttcacggccggcttcgtcgccggtgaggtggccagccgttatgtggtcgaacccgtggcccgcaaggctatcggcggcctggtcggcaaccccgtcgacctcacgacgggccgcaagctgatccccgatgaaatcgacttcagcctgccgggcctgatgccgatcgagtggtcgcgcttctacgccagcgacctgacggtcgacagcgtactcggccgcggctgggtgctgccctgggagcagagcctgcgccgccagggggcattcatctacctcaccgacaaccagggccgcgaagtcccgttcgtgaccctgcaaccggggcagcgcatctacaacccgcacgagcaggtgtacctggtgtgcaccgagggcggtcactacatcctgcagaccctcgacaacctgttcttctactttggcgaagtgccagacaccaacaccgaagtgccgctgcagcgtatcgagaacgtcctcggccacttcctgcacttcacccgcacgcccgacggcacactgaccgacatcagcgccaccggcggcacccgcgtgcacctgcactacgacaacccgctgggtcgcctgaccgacatcaagcgcgtggtgaacaacgaagcggtggaaacgcttacccagtaccgctacgacgaacacggccagctgagcgcggtgatcaaccgcaacggcgacaccgtgcgcagcttcagctacgccgacggcctgatggtgacccacagcaacgcgctggggctgggctgccactaccgttggcaaaccctgggcgacaagccacgcgtggtcgaacactggaccagcgacggcgagcactaccacttccgctacgacctcgatagccgcaccagctgggccaccgacgtgctcggccgcgagctggaagtgcagtacaacgccgaccaccgcgtggtcgccagccgcgattatggcggggagcgttacgccatcgagctggacgaacacggcaatatggttggcctgaccttgccggacggtaaccgcctgcaattcaagtacgacgaattctcccgcctgctcgaagagaccgacccgctgggccgcaagacccagtacgaatatcaccacctgaccacactggtgacccaggtcagctacccggatggcagcacttggcgagcgcgtttcgacgacaagggcaacctgctcgccgaattcgatgccctcggccagatgaccgagtacctgaacagcgatgacggcctgccgcacaccatcatcgatgcgacctacaagtccaagtacctgtggtggaacaccctggcccaggtcgagcgctaccaggactgctcgggcaagagtacgtactaccgctatgacgaacgccagcacctggtcgcagtaaccgacgcgctgaaccagaccaccacgctggcgcgcaagcccgacggcgaagtgctgcgcatcagccacccggacggcaccacggaaagcttcacctacaacgtctacggtcaggtgctcagccacaccgacggcaagggccagaccacccgcctgatgcgcacggcccgcggcctgccgagcagccgccaggatgccaagggccagcgggttcgctacgagtacgacaaggccatgcgcctgaccgcgctggtcaacgaaaacaacgccacgtacagctttgcctacgacgcttcggaccgactgagcgaagaagtgcgggtggataacctgacccggcgtttcagctacgacgtcggtggccatctcacacgactggatgagattggctatggcgaaaatgccgagcggcccgagcgccatacgctgttcgagcgtgatgccattggtcgcctgatcgccaaactgaatagcgacgcacaacagcgattcacctatgacgacggtgaccggttgctgagcatcgagcgccaaccgaccgggatcggcaagcagcttgggatcacggaagaaaagcttgagtacgcctacgatctgctcggtcggctgaccaaagaaatcagccctgacggcacgctcggctacgagtacgacccgctcagcaacctgaccacgctgaccctgccggatggccgcaaggtcaatcacctgtactacggcagcggccacctgcaccagctgaacctggatggtcaggtgatcagcgacatggagcgcgatgacctgcaccgcgaggtgtaccggacccagggcaagctcaccagttgcttcggttatgacgccatggggcgcaaggcctggcagtttgcctcgaccttgccggccgacaagctttcgcaggtgcacaacaccggcatcaatacctcgttgctggtcgagcacgcctacaacccgatccaccgccgttaccagtacgacccggccggtgaactggtgcgtaccctcgacaagctacgcggcgagatcaagtacgagtacgaagccaacggccagttgcgcagtcgcgataccggctcgttgatcggcagtgaggagttccgctacgacccggcagccaaccgcctggacttcaatgcgcggcaattcgacaaggtcaaggacaaccggatcaagcagtggcgggaccaggagtaccgctacgatccgtggggcaacctgatcgagaagcgctctgggcacagcaagctgcagcacttcagctacgactgcgagaaccggctggtgcgggcggagacgttggtcaatggcaagctggaaagccaaggcgagtatcgttacgacagcttggggaggcgaatagccaagcaggctgaaatcaatggcgaggtcgagcagaagcgcttcctctggcaagggctaaggatgctgcgggaggaaacgccagggcagagcatcttgtacctgtacgagccgggtagctatgcgccattggcgcgggttgatcaggttgaaggagaagggcagaaggtctattacttccataccgatcagattgggacgccgcttgagctgacggatagcgagggtgagattgtttggcaggcgacgtatcgctcttggggcacgatagaaactttgtcgatcaaagaggtcgatcagaatctgcgcttccaaggtcagtactttgatgctgaaacagggctgcactataataccttccgatattattattctgaagtgggacgttatgtcactcaggaccctattggtttagatggcgggctaaatctttatcgctatggtcagaatccggcagggtggatcgacccgtggggatgggagtgttggagtactgctcgaaaaaactattggaaagctgaggccaaagcacctactcgtgcctactcacccacaaaccttgtgcgtatggctgaggggaaagcgcccaaaatgacagttgaggtgatttcgcgcaagaccgataaaatatcaattagagagtatgcattagaacttcatcataatgatattcctcagcgagtgggtggggcgggtgtacatgattcgtcaaatttgctcgcgcttactccgtgggagcatgaggctgtcgaccagtttaggcatgtagggtctgacttgattagagtaattaaaggagttgatgtatgg

SEQ ID NO: 32059 - DNA, 945 bp, Pseudomonas putida
atgagggtcttcagcaaggcgcagatcgtcgcccatttcaacccggagttggcggtcagccaactggaggaaggcttcatcgcctattccgaaggcaaggtgcaggtgccgcccgtgcagggcttcgcattcaagggcgcgaacggtgactgttgcgtgaagtcggcctacatcgaaggcagcccgaccttcaccgtcaagctttcgacaggcttctacgacaacccgtccaagggcctgccgagcaatgatggcttgatgcttgtgttgtctgcacacaccggtcagccgctggcactgctgcaggaccaaggctggctgactgccatgcgcaccgcgttggccgggcgtatcgccgcccggctgctggcgccatcccaggtcaaggccattggcatcctcggcaccggcatgcaggcgcagatgcagcttgagcagcttcgcgcggtgaccgattgtcgccaggtgattgtctggggccggcatgaacgcgggcttgcggcctataccgcatttgcccgcgaactgggcttcgcagtgcacagcacgcaggatgcggccgaggttgcgggcgcggcaaacctgatcgtctgcaccacgccttctcgccaggcgctgttgcacagcgattgggtccagccgggtacgcatatcaccgccgtcggtgccgatgcacccggcaagcaggaactggacccggcactggtggcaagggcggaccgcatcatcgtcgacgccatcgcccagtgcagccagtacggcgaagtggcccatgccctcggctgtggccgcatcgacgctaaccagctgatcgagctgggtacgctgctggctggccgtgccaaggggcgtgagcacgacagccagattaccttggcggacctgaccggtgttgcagtgcaggatgcacaagtcgcaagccacgccttggccgccctgtgcacc

SEQ ID NO: 32060 - DNA, 745 bp, Pseudomonas putida
taccgctgggaaaccctcagcggcaaaccgcgcgtggtcgagcactggaccagcgacggcgagcactaccacttccgctgatagccgcaccagctgggccaccgacgtacttggccgcgagctggaagtgcagtacaacgccgaccaccgcgtggtcgccagccgcgattatggcggcgagcgttacgccatcgagctggacgaacacggcaatatggttggcctgaccttgccggacggtaaccgcctgcaattcaagtacgacgaattctcccgcttgctcgaagagaccgatccgctgggccgcaagaccacctacgaatatcatcacctgaccacgctggtgaaccaggtcagctacccggatggcagcacctggcgagcgcgctacgacgacaagggcaacctgctcgccgaattcgatgccctcggccagatgaccgagtacctgaacagcgatgacggcctgccgcacaccatcatcgatgcgacctacaagtccaagtacctgtggtggaacaccctggcccaggtcgaacgctatcaggactgctcgggcaagagcacgtactaccgctatgacgagcgccagcacctggtcgcggtaacagacgcgctgaaccagaccaccacgctggagcgcaagcccgacggcgaagtgctgcgcatcagccacccggacggcactacggaaacctttacctgcagcgtctacagagtcgctacgagtacgacagggccattc

SEQ ID NO: 32061 - DNA, 381 bp, Pseudomonas putida
atgtacatcggcaaagccgcccagctgtcgggcaccaccgtcaaaagcatccgccattacgaagaaatcggcctgctacccccaccgcaacgcgaaggcaagtaccgcatctacagccagcaaagcgtagagctgctgaccttcatcaaatgcgctcagcaactcggtttcaagctcaaggaaatgcaggccattctgcaggatcatcgcggccaggagctgccctgggatctggccatgcaggccatcgataacaaaaagcaggaattgatggggcagatccaggccttgcagcaagtgcatgacggcttggttgagtttgagctgagcctcaaggatgctcagatgcaatgccagttcgaacacctggaaaaagcccgc

SEQ ID NO: 32062 - DNA, 1008 bp, Pseudomonas putida
atgactgacgatcaccgcctggccgagttcatccgcgagcaggcctcggcaacgcgggtggtcatccaggcgcgcaagcgcctgagcggcggcgctatccaggaaaactggctgctggacctgctgatcgaaggcggcccgtgggccggtgtccggcgttgggtactgcgcagcgatgcgctttcagcgctacccgccagccttgaccgtgaacaggagttcgccgtgctgcaggtggtttaccaggccggcgtgaaagtgccacgcccgctctggctgtgccgcgatgtgcgcgtgcatgggcgggtgttcttcctgatggagtatgtgccgggtagcgctgccggccgcgcgctcagcaccggcgccggtcctcagggccgggcgcaactggcgacgcagcttggcgccaacctggcgcgtctgcatcaggtccgcccgccgtgcgccacgctgtgcttcctgtccgttccggacagctcgccggccctggcgaccatcgacgcctaccgccgctacctcgacaccctcgccgatgcctatccggtgctggaatggggcctgcgctggtgcgagctgcatgcgccgcgcagcagcaccctgtgcctgttgcaccgtgactaccgcaccggcaactacctggccagcgaagaagggctggaggccgtgctcgactgggagttcaccggctggggagatccttgcgaggacctcggctggttcaccgcccgttgctggcgttttacccgtccagacctcgaagccggcggcattggccagctggaggattttctgcgtggttatcacgaggtgtcttcgctgtgcatcgagcgcagtcggctccactactggcaagtcatggccaccctgcgctgggcggtgattgccttgcagcaagggcagcgccatctgtccggtgaagaaccgtcgctcgagctagcactgacagcccggctgttgccggagctcgaactcgacatcctgcacatgaccggagccgaagcgcca

SEQ ID NO: 32063 - DNA, 3126 bp, Pseudomonas putida
atgtccaggttcttcatccatcgcccgaacttcgcctgggtcgtggcgttgttcatttcactggccggtttgctggtgattccatccttgcccgtggcccagtaccccaacgtggcgccaccgcagatctccatcaccgcctcctaccccggcgcttcggccaaggtcatggtggagtcggtgaccagcatcatcgaacagtcgctcaacggcgccaagggcctgctgtactacgagtccaccaacaactccaacggcgtggccgaagtgatggtgaccttcgagccaggcaccgacccggacatggcgcaggtcgacgtgcagaaccgtttgaaacaggccgaggcacgcatgccacaggcggtgctgacccaagggctgaaagtcgagcaggccagctccggcttcctgctgatctacgccctgaccagcacggccggcaaccgtggcgataccacggccctagccgactatgccgcgcgcaacatcaacaacgaactgctgcgcgtgcccggcgtgggcaagctgcagttcttcgcctcggaagcggccatgcgggtctgggtggatccgcagaagctggtgggctatggcctgtccatcgacgacatcaactcggccattcgcggccagaacgtccaggtaccggccggcagcttcggcagcacgcccggtgccagcgagcaggagctgaccgcgaccctggccgtgcagggcactctcgacaccccggaagcgttcgccggcatcgtcctgcgcgccaaccccgatggctccagcgtccgcctgggtgatgtggcgcgcatggccatcggtagcgagaactacaacctgtcggcgcgcctgaacggccacccggcggtggccggtgcggtgcagttggcgccgggcgccaatgccatccagaccgcgacgctggtcaaggagcgcttggccgagctgtcgcagttcttccccgaaggtgtcgaatactcggtgccgtacgacacctcgcgcttcgtcgacgtggccatcgagaaggtgatccacaccctgatcgaagccatggtgctggtgttcctggtgatgttcctgttcctgcagaacgtgcgctataccctggtcccgtcgatcgtggtgccggtgtgcctgctcgggacgctgatgatcatgaagctgctcggcttctcggtgaacatgatgaccatgttcggcatggtgctggccatcggcatcctggtggacgacgccatcgtggtggtggagaacgtcgagcggttgatggccgaggaaggtctgtcgccggtggaggcgaccatcaaggcgatggggcaggtgtccggggcgatcatcggcatcaccctggtgctggcggcggtgttcctgccgttggcgttcatgtccggttcagtgggggtgatctaccagcagttctccgtgtcgctggcagtgtcgatcctgttctccggcttcctggccctgaccttcaccccggcgctgtgcgccacgctgctcaagccggtgccccatggccaccatgaaaaggccggtttcttcggcgccttcaaccgtggcttcgcccgtgtcaccgaacgctattcgctgctcaacagcgaactggtggcacgtgccggccgctggatgctggcgtatgtgggcatcctggtggtgctgggctattcctacctgcgcttgccggaggccttcgtgccggccgaggaccttggctatagcgtcgtggatgtgcagttgccaccaggcgccagccgggtacgcaccgaccacaccgctgaggcgctggaaaagttcctgatgtcccgtgacgcggtggccaactcgttcatcgtcagcggcttcagtttctcgggccagggtgacaatgccgcattggcgttcccgaccttcaaggactggtcgcagcgcgacaaggcgcaatcggcggaggcggaaacggcagcgatcaatgcacagttcgccgccaacggcgacggtgccatcaccgccgtcatgccgccgccgatcgacggcctgggcaactccggtggtttcgccctgcgcctgatggaccgtggtggcctcgggcgcgaagcactgctcgcggcccgtgaccagttgctggcgcgtgccaacggcaacccggtgatcctctacgcgatgatggaaggcctggccgaagcaccgcagctgcgcctgcacatcgaccgggaaaaggcccgagccctgggcgtgagcttcgaggccatcaacagcaccttggccaccgccttcggatcggctgtgatcaacgacttcaccaatgccgggcgccaacagcgcgtggtggtgcaggcagagcaaggcgaacgcatgacccccgaaagcgtgctgcgcctctatgctcccaatgccaacggcgagcaggtgccgttcagcgccttcgtcaccacccagtgggaggagggcccggtgcaactggtgcgctacaacggttacccgtcgatccgcatcgccggcgacgcctcgccggggcacagtaccgggcaggcaatggccgagatggagcgcctggtcagcgagctgccgccaggtatcggctacgcctggacgggcctttcctaccaggagaaggtctccagcggccaggctgccagcctgttcgccctggccatcctggtggtgttcctgctgctggtggcgctgtacgaaagctgggcgatcccgctgacggtgatgctgatcgtaccgatcggtgccctgggcgcggtgtgggcggtgacgctcaccggcatgcccaacgacgtgtacttcaaggtcggcctgatcaccatcattggcctggcggcgaagaacgccatcctgatcgtcgagttcgccaaggaactgtgggagaagggctacagcctgtgcgacgccgccatcgaggccgcgcgcctgcgtttccgtccgatcgtgatgacctccatggcgttcatcctcggcgtggtgccgctggccatcgcctccggcgcgggtgcggcaagccagcgcgccatcggtaccggcgtgatcggcggcatgctcagcgccaccttgctgggcgtggtgttcgtgccggtctgttttgtctgggtgttgacgttgctcaagcgcaagccttccccggtgcaacaggctgtcgaggaggcagag

SEQ ID NO: 32064 - DNA, 3672 bp, Pseudomonas putida
gtgaaacgcgtaatcaaatttacttcactgggcctgctggggggtgttgcgagcgtgggcctggtgctcggcttgctgctgggtacccaggccggcagccgctgggtactgggcaaggtgcctgggcttgaagtggccgacttccaggggcgcctggcgggcagttggcaggccagccggctaacctgggccgacggcggcagcacggtagagatgcaggcgccgttgctggcctggtcgcctgcctgcttgctgcgcgcgaccttgtgcattgaccagttgcaggcagaccgcattgacatggcctttgcgccaagcaccgaacccaccgagagcgccccgctgcaattgccgactctgcgcttgccgctggccatcgaactgggcgaggtcaaggtcgggcagctgcgcctggatggcagcgatctgcttggcgatttgcatctggctgcgcactggaccaacagcgggatacgcatcgacagcctgcggctgctgcgcgacgacctgcaattgagcctacagggcgacctgcaacccgaaggcgactggccggtaaaactacaggcgcaattgcagttgcctgcggtagacgaaaaaccctggcaactggcactgacggccaatggccaattgcagaagacgttggaactcgccggcaccagcagtggttacctcgatgccacattgagcgggcagttgcaggcactggccgagcacctgccggcgaccttgcacatccgctccgaggcgttcaagccggctggtgcgttgcctgacaccctgcaattgaacgcgctcgagctcgatgccaagggcgatctgctccatggctataaactgtccggcaaggccagactgccggccgagcagtcaccgatcgccttgctcctgtccggtctggtcgacagcaaaggcgccaggctcgatgccctggacctgaccgccagcgacagccaacgggtcaagctgcaagccacggctgactggcagcaaggcctgagcgccgatgcgcagctggactggcaggacttcccgtggttgcgcctgtacccgatggagaccccgcccgaagtcaccctcaaacgcttcaatacccaggtgcattatcgcgatggcaattaccaggggactttcacgggggacctggacggcccggcgggagcgttcagcatcgccagcccgttcgaaggtgacctcacccaggtgaaactgccgcagttggcgctgaccgccggccaaggcaaggcagccggcagtgtcgccgtacgttttgccgacaccctggcctgggatgtcgacctgcagctctccgcgctcgacccggcctattggctggccgaattgccgggtaccctggcggggccactgcgcagcaaaggcgaactcaaaggcgatgtgcttaccttggatgcccagcttgacctcaagggccgcctgcgtggccagccagccatgctcaaggccgagacccagggggcagggcaaaactggaccctgggcacactggccatccagctgggtgacaaccgcatcaacggcagtggcagcttgcaacagcgcctggctgggcgaatcgaccttgacttgccgcgcctcggccagctgtggccgaggctacaaggccgggtcaagggccggctggatgtcgccggcaccttgcaggccccgcaaggtacgctcaccctgcagggccagcgcttggcccaggccgaaaaccgcctgcagcagttggacctggatgcccgcctggacaacgcccaacgcggtgtagtcgagctcaaggcaaccggtatccacctgggtgacacagccttgggcacgttgcaggccaacggcaagggcgacattcgccaacaggccttgaccctggcgctggacggcccgcagctcaagctcgaccttggcctggatggccagttgaacaaaggtgactggcgcggccgactggccactggccgaatccaggccggtggccaggagtggcagttgcaggcgcctgcacgcctgcagcggctggccagcggccagctcgacttcggggcccactgctggcgctccggccaggcaagcctgtgtggcgacgaccagcgactggcccccgaaccgcgcctgcgctaccacctcaagcagttcccgctgggcagcctggcccagtggctgccgaaggactttgcctggcaaggcctgctcaatgccgacatcaacctggacatcccggccagcggccccaagggcactgtcgtggtcgatgccagtggcggcaccctgcgcgtgcgcgacaaaggccgctggatcgatttcccttatcaggccctgcgcctggacagcacgttggcaccgcggcgtatcgatacgcgcctggcgtttcgcggtgagcgcctgggtgagctgaacgtcaacgcccggctcgatccgctgggcaagaacaaaccgttgtcgggtgatttccgcctggccgggctggacctgtcggtggcccgcccattcgtgcccatggtcgaacgcctggccgggcagctcaatggcagtggtcggctttcaggcaccttgctggcgcctcaggtcaacggcaacctgatgctcagcggaggcgaagtcagtggcgccgagctgccggccagccttcaggacctgtcattgcaggcgctgattgccggcgagcaggtgcagctcaacggtaactggcgcagtggcgaggcgggacgtggccagttgagcggcaacctcacctgggggcaggcactgggcatggacgtgcgtctgcaaggccagcaactgccggtcgcggtcgagccctacgccacactggaagttgccccggacctgaccttgcgcctgatcgatgacaagctggcggtgaccggcaaggtgcaggtacccaagggcaagatcactgtacgtgagctgccgccgtccacggtcaaggtgtcggatgacacggtaatcgtcggtcatcagaccgaggaaggcaaaccccccatggccatggccatggacatcgatgtcgaagtcggccgcgacaagctgtcgttcagcggtttcgggctgactgccaacctgctgggtcatgtgcacatcggcgataacctcgatacccgtggcgaactgagcctggcagacggccgctaccgtgcctacggccagcgcctcaccatccgccgggcgcgtctgctgttcgccggcccgatcgaccagccgtatctggacatcgaagcgatccgcaaggttgacgatgtgatagccggcatccgcctgagcggcagcgccgagcagccgacgaccaaagtgttctcggagccggccatgagccaggagcaggcgctttcgtacctggtcttgggccgaccattgggcaataccggcgaagataacaacatgctcgccgaggcagcgctgggcctgggccttgccgggagcgccggcattaccggcagcctggcgtcgagcctggggatcgacgactttcaactggataccgaaggttctggcaacagcaccagcgtggtcgccagcggtaacatcaccgagaagctcagccttcgttacggggtgggcgtgttcgaaccggccaacacgatcgcgttgcgttacaagctgagcaagaaggtctacctcgaggccgccagtgggctggcaagctcactggacatcttctacaagcgcgacttc

SEQ ID NO: 32065 - DNA, 498 bp, Pseudomonas putida
atgtcgagcgcattcacgatcatgccatcgcccgtcggcatgctgacccttgtggcccgtggcaattgcctggcagccgtattgtgggaagaggagcgggaaaaccgcgtacgcctgggcgcactgcaccgggacgaccagtgcccggtattgcgggaaaccgctcgccagctgggtgagtactttgacggcaagcgccagcgtttcgagctggcgctggactttgccggtactgagttccagcgccaggtgtgggccgcattgctggcgataccgttcggcgaaacccgcagctacagcgacattgcacggcagctcggcaaccccagggcggtacgcgcggttggcgctgccaatggccgcaacccgatttcgatcgttgctccctgtcaccgggtaatcggcgcgtcgggcagcctgaccggctttgccggtggcctggcggccaagcagtatctgttggcgctggaagggcggcaaagcctggcgctggacctg

SEQ ID NO: 32066 - DNA, 1380 bp, Pseudomonas putida
gtgcttaccatctacaacaccctgagcaaaaccaaggaagtcttcaagccgctggatggcaacaaggtgcgcatgtacgtgtgcggcatgaccgtgtacgactactgccacctgggccatggccgcagcatggtggcgttcgacctggtcacccgctggctgcgcaagagcggctacgagttgacctatgtgcgcaacatcaccgacatcgatgacaagatcatcaaccgggcgaacgagaacggcgaaaccttcgacgccctgaccgcccgcatgatcgacgcgatgcacgaagacgagcgccgcctgaacattctgccgccagaccaggagccgcgtgccaccgaccatatcgccggcatgcacgcgatgatccagacgttgatcgacaaagggtacgcctacgcgccaggcaatggcgacgtgtactaccgggttggcaagttcgtcggctacggcaagctgtcgcgcaagaggatcgaagacctgcgtatcggtgcacgcatcgaggtcgacgaagccaagcaggacccgctcgacttcgtcctgtggaagggcgtcaagccgggcgagccaagctgggaatcgccatggggcccgggtcgcccgggctggcacatcgagtgctcggtcatgtccacctgctgcctgggcgagagcttcgacattcacggtggcggcagcgacctggagttcccgcaccacgagaacgagattgcccagagcgaggcggccaccggcaagcagtacgccaacgcctggatgcattgcggcatgatccgtatcaacggcgagaagatgtccaagtcgttgaacaacttcttcaccatccgcgacgtgctcgagaagtaccacccggaggtggtgcgctacctgctggtggccagccactaccgcagcgcgatcaactactcggaagacagcctgcgtgacgccaagggcgcgctggagcgcttctaccacgccctgcgcggcctgccacgggtggcggccaagggtggcgaagcgtttgtcgagcgcttcagcgtggcgatgaacgacgacttcggcacccccgaagcctgtgcggtcctgttcgatctggtgcgcgagatcaaccgcctgcgcgacagcgacgtggaggccgctgctggcctggccggtcgactgcgcgagctgggtgatgtactgggtgtgctgcaactggaggccgatgacttcctgcgtgctggtgccgaaggcaaggtcgatgcggctgaagtcgagggcttgatccaggcgcgcctgaaggcgcgtgcggacaagaactgggctgagtctgaccgcattcgcgatcagctgaccgccatgggtgtagtgctggaggacagcaagggcacgactacctggcgtctggctgac

SEQ ID NO: 32067 - DNA, 631 bp, Pseudomonas putida
atggagcttaccccgagagagaaagacaaactgctgctgttcactgccgcgctgctggcggagcggcggctggcccgtggcctgaagctcaactacccggaggccgtggcgctgatcagtgccgcggtgctcgaaggcgcccgcgatggccgcacagtcgccgaactgatgagcctggggcgtgaagtgctgacccgtgagcaggtgatgcccggtatcgctgaaatgcttcacgacgtgcaggtcgaagcgaccttcccggatggcaccaagttggtgaccgtgcatgaccccatcgtctgaaaccgccaaggagcgtcgcatgatcccaggtgaaatccaggtcgccgcgggcgacatcgagttgaacagtggccgggaaacggtcagcgtcagtgtggccaaccatggcgaccggccggtgcaggtcggctcgcactaccacttctatgaagtcaacgacgcgctggtgttcgaccgggcgcccaccctgggctttcgcctggacatcccggccggcactgccgtgcgcttcgagccgggtcaggcgcgtaccgtgcaactggtggcttacgccggcaagcgtgaggtctatggttttcagggcaaggtgatgggcgcgctggagggc

SEQ ID NO: 32068 - DNA, 1701 bp, Pseudomonas putida
atgagccatatttcccgtcaggcctatgccgacatgttcgggcccactgttggcgaccgcgtgcgcctggccgacactgcgctatgggtggaggtcgagaaagacttcacgatctacggcgaggaggtgaagttcggcggcggcaaggtcattcgcgatggcatggggcagggccagatgctggcggccgaggccatggacctggtgttgaccaatgcgctgatcatcgaccactggggcatcgtcaaggccgacatcggcatcaagcatggacgcatcgcggtgatcggcaaggccggcaaccccgatgtgcagccgggcgtgaacgtgccggtcgggccagggaccgaggtgatcgcggccgagggcaagatcgtcaccgccggtggtgtcgattcgcatatccacttcatttgcccacagcaggtggacgaggcattgaacagcggtgtcaccacgttcatcggcggtggaaccgggccggccactggcaccaatgccaccacctgcacgcccggcccctggtaccttgcgcgcatgttgcaggctgccgacagcttgccgatcaacatcgggctgctgggcaagggcaatgcctcgcggccagacgcgctgcgcgagcagattgccgcaggcgctgtcgggctcaagctgcatgaagactggggctctacgccagcagccatcgactgttgcctgggcgtggccgaggaaatggatatccaggtggcgattcacaccgacaccctcaacgagtcgggctgtatcgaagacacgttggcggccatcggcgaccgcaccatccacaccttccataccgaaggtgccggtggcggccatgccccggacatcatccgtgcggcggggcaggccaacgtgctgccatcctcgaccaacccgaccctgccttacacgatcaacaccgtggacgagcacctggacatgctcatggtctgtcaccacctggacccgagcatcgccgaggacgtggccttcgccgagtcacgcattcgccgcgaaaccatcgctgccgaggacatcctccacgacatgggcgcctttgccatgacctcgtccgactcccaggccatgggccgggttggcgaggtggtgctgcgcacctggcaggtggcgcaccagatgaagctgcgtcgcgggccgctggcaccggacaccccgtacagcgacaacttccgggtcaagcgctacatcgccaagtacaccatcaacccggcactcacccatggcatcggtcacgaagtgggctcggtggaggtcggcaagctggccgacctggtgctgtggtcgccagcgttctttgcggtcaagccggccctggtgctcaagggcgggatgatcgtcaccgcgcccatgggcgacatcaacggctccatacccaccccccagccggtgcactatcggccgatgttcggcgcgctgggggcggctcggcatgccacacgcatgacattcctgccccaggcggcaatggaccgcgggctggccgaggagctgaacctgcgcagcctgattggcgtggtcaacggttgccggcgggtacgcaagccggacatggtccacaacaccctgcagccgctgatcgaagtcgatgcgcagacctatcaggtgcgtgccgatggcgaactgctggtctgcgaaccggccagcgaactgccgctggcccagcgctatttcctgttc

SEQ ID NO: 32069 - DNA, 972 bp, Pseudomonas putida
atgtccaaccaattcccctccgttcgtccccgccgtctgcggcagaacgagtccctgcgcacgatcttccaggaaaccgagttccgccttgaagacctgatcctgccgatcttcgtcgaagagggcatcgatgatttcgtgccgatcaccagtatgcccggtgtcaaccgtatccccgagaagctgctggcccaggaaatcgagcgctatgcccgcgccggtatcaagtcggtgatgacctttggcgtatcgcaccacctggatgccgatggcagcgacacctggaacgaaaacggcctggttgcgcgcatgtcgcgtatctgcaaggacaccgtgccggaaatggtggtgatgtccgacacctgcttctgcgaatacaccagccacggccactgcggcgtgctgcatgaccatggcgtggacaacgacgccaccctggccaacctgggcaagcaggcagtcattgccgctgctgccggtgccgacttcattgccccctcggcggcgatggacggccaggtgcaggctatccgcagtgccttggacggtgccggcttccacgacaccgcgatcatggcctactcgaccaagttcgcctcgtcgttgtatggcccgttccgtgaggccggcggcaccgcactgaagggcgaccgcaaaagctaccagatgaacccgatgaaccgccgcgaagcggtgcgtgagtcgctgctcgacgagcaggaaggggcggacgtgctgatggtcaagccggccggtgcgtaccttgatgtgatcgccgacatccgcgccgcttcgcgcctgccactggcggcgtaccaggtgagtggcgagtatgcgatgatcaagttcggtggcctggccggtgccatcgacgaaggccgggtggtgcgcgaaagcattggcgcaatcaagcgtgctggtgcagacctgatcctgacctacttcgccatggacctggcgcgcgaaggtatc

SEQ ID NO: 32070 - DNA, 672 bp, Pseudomonas putida
atgaacagcgacctggcgctgctgcgcctgctgcagttggccagccccggcttgccggtgggtggttttacctattcgcaaggcctggagtgggcggtcgaggccggctgggttcggggcgtggacagttttgccggctggcagcgtgagcaggttcacgacacattggcctgcctcgactggccggtgctggcgcgtctgtaccacgcctgccaggctaaagacgccgaagcgttcggccactggagtcggttcttgctggccaaccgcgaaaccgccgagctgcgcctggaagaacagcagcgcggcgcagcgctggcgcggttgctcgacggctggcaactgggccaggcaccggcctggcgcgccagccttgagctgactcagttgggcggtatggcctggctggctgcacactgggccatcccgctgcgccagctggcattgggccatggctttgcctggctggagggcgcggtcatggccggggtcaagctggtgccgttcggccagcaggctgcccagaccttgctgcgcgaccttggcgccgacttgcccgctgcactggaccaggcgctagccctgggcgatgaccagctcggcggcggcctgccgctgctggccatcgcttcatcgcgtcacgaaacccaatacacccgtttgttccgttcc

SEQ ID NO: 32071 - DNA, 621 bp, Pseudomonas putida
atgcaaagctatcaacaacccctgcgcgtcggtgtcggcggcccggtcggctctggcaagaccgcactgctggaagcgctgtgcaaggccatgcgcgatcactaccagatcgccgtggttaccaacgacatctacaccaaggaagaccagcgcatcctcactgaggccggcgcccttgagccggagcgcatcgttggcgttgaaaccggcggctgcccgcacacggccatccgtgaagacgcctcgatgaacctggcggcggtcgaagcgctggcgcgcaagttcggtaatcttgaagtcattttcgtggaaagcggcggtgacaacctcagcgccacgttcagcccggagctggctgacttgaccatttacgtgatcgacgtggccgagggcgaaaagatcccgcgcaagggcggcccaggcattaccaagtctgatttcctggtgatcaacaagaccgacctggcgccttatgtaggggcgtcactggaggtgatggagcgcgacacccagcgcatgcggccgcagcggccctggaccttcagcaacctgaagaagggcgaggggttgcaggccgtgatcgattttatcgtcgagcgcgggatgctgggggtgcgaggc

SEQ ID NO: 32072 - DNA, 1326 bp, Pseudomonas putida
atgaaggtcacggttttcggaaccggctatgtcggcctgacccaggcagtgtgcctggcccaggtaggccattcggtgttgtgcatggatgtcgatgccgatcgggtggccagcctgagtgaaggccattgcccgatcttcgagcccggccttgcgccgctgctggagaagaacctcgcctgcggtcggctgcgcttcaccacggatgccgcagcggctgccaactatgcccggttgcagttcattgccgtcggtactccgccgcaagccgatggtagcgccgacctgaagcacgttttcgccgtggtcgacagcatcctcgaacacgctgacgggcccaaagtaatcgtcaacaagtccaccgtgccggtgggtacggtacaccgcatcaaggcacgcatcgcccaggccgtggccgataccagccgcttccaggtgatcagcaacccggagtttctcaaggaagggtctgcggtggatgactgcatgcgcccccagcgcatcatcatcggcggcgcagaagcggccgaagtggagttgctacgcgagctttacctgccgttcaaccgcaaccgcgaaaagttcatggtcatggacgcgcgcagtgccgagctgaccaagtacgcagccaactgcatgctggccaccaagatttccttcatcaacgaaatcgccaacctggccgagcacctgggggccgacatcgaaatggtgcgccgtggcatcggctcggacccgcgcatcggttacgacttcatctacgccggctgcggttttggcggctcgtgcttccccaaagacctgcaagccctgcgccacagtgccgaggcggaaggcttcgagacacagttgctgcgggcagtagagtcggtcaacgagcagcagaagggccggctgttcagcaagatccagcgccattaccccggcggcctgcggggcaaggtgtttgccctgtgggggttgtcgttcaagcccaataccaatgatatccgcgaagcttccagccgggtcctgctggaagcactgtgggccgcgggcgcgcgggtgcaggctcacgaccctcaggccatggaagaaatccggcgccactacggcccgcgtgccgacctgcaactggtgccctgcaaggacgatgcgttgcggggcgccgatgccctggtgatcgtcaccgaatggcaggactaccgtgtgctcaacctggacgaggtgccgcagcagctggccgaccgggtggtgttcgatggccgcaacctgtacgaacccgagcacatggcctcggcagggctggcttactacggcatcggacgtggcaagattgcgccagct

SEQ ID NO: 32073 - DNA, 522 bp, Pseudomonas putida
atgttcgataatattcgcgccgacctgcgggcccatggcggggactggggcgcccagggtttctgggtcttgctggtgtaccgctttggccgctggcgttatacgctgcgcccggcactgctgcgcaaactgtgctcgctcatctacaaggtgctgttcaaattcgtccagatcatcaccggtatcgaactgccgtgcgaggtggtgatcgggcgcaacttcgtcatcgatcattttggcggcatcgttgtcagcggctatgcccgcttcggcgatgactgccgtatccgcaacggcgtggtggtgggcctgaagaatgtcgacgagccgattgccccggtgttcggcaacaacgtcgacattggcaccggggccaaggtgctgggcagtattcgcatcggcaacaacgtgatcatcggcgccaatgccgtcgtgctggtagatgtgcctgacaattcactggcagtgggggtgccggccatcatcaaggcccggcatccggccgccgtggcatcggtcgag

SEQ ID NO: 32074 - DNA, 750 bp, Pseudomonas putida
atggctcagtggcagaatcgctggaagcgtgtgatcgaccagctggcagtgatcgctgatgacgccgccgtgcagcacctgctcgatcgcctggccacaccggatacggccaccgtgctgggcttcgtcaacgcccatgcgatgaacctggtggtgcgcgatggtggctacagccaggcgctgtcggccgcagatgtactgctgcgcgatggtgccggcatggcgatcctgtatcgctgcctgggcctggaacccgggctcaacatgaacggcacagacttcattcccaggctcatggctgcttaccgagggcgcaaggtcgccttctggggcacccggcaaccctacctggaccaggctgtgcagcgctgtaaagccgaattcggcattgtgccagtgtcggttcacgatggcttcgccagcctgcaaacctatctgcagttggcccgcgtccagcaacccgagctgatcgtgctgggcatgggcatgcccaagcaggaagcggtggcagcggcgttggcagccactggcgggccatgcctgatcgtgtgcggtggggcgatcctggactttctcggcggcaaggtcagccgtgcccccgaatggctgcggcgtttggggggcgagtggctgtaccgcctgctgcgcgagcccaagcgcctgttcatgcgttatgtggtgggcaatccgctattcctgttgcgtaccctgttgtaccggcgggcggcggtttcggccaggcgggcccta

SEQ ID NO: 32075 - DNA, 1584 bp, Pseudomonas putida
ttgatttctaccgctaacatcaccatgcagttcggctccaagccgctgttcgaaaacgtttccgtcaaattcaacaacggcaaccgctacggcctgatcggcgccaacggttgcggcaagtcgaccttcatgaaaatcctcggcggtgacctggagccgtccgcaggccaggtcatgctcgagccgaatacccgcctgggcaagctgcgccaggaccagttcgcctacgaggaattcaccgtgatcgacacggtgatcatgggccacggccagctgtggaaagtcaaagccgagcgtgaccgtatctactcgctgccggaaatgaccgaagaagacggcatggccgtcgccgagctggaaaccgaattcgccgaaatggacggctacaccgccgagtcccgcgccggtgaactgctgctgggcctgggtattccgctggagcagcacttcggcccgatgagcgaagtggcaccgggctggaagctgcgtgtcctgctggcccaggcgctgttctcggacccggacgtgctgctgctcgacgaaccgaccaaccacctggacatcaacaccatccgctggctggaaacgatcctcacggcgcgtaacagcaccatgatcatcatttcccacgaccggcacttcctcaacagcgtctgcacccacatggctgacctggattacggtgagctgcgcctgttcccgggcaactatgacgagtacatgaccgcggccacccagtcgcgtgagcagttgctgtcggacaacgccaagaagaaagcccagatcgccgagctgcagaccttcgtcagccgcttctcggccaacgcctccaaagccaagcaggccacttctcgtgccaagcagatcgacaagatccagctggccgaggtcaagccgtccagccgcgtcagcccgttcattcgtttcgaacaggcgaagaaactgcaccgccaggcggtggtggtcgagaaaatggccaaagccttcgacgacaaggtgctgttcaagaacttcgacatcaccgtcgaagcgggcgagcgcgttgcgatcatcggccccaacggtattggcaagaccaccctgctgcgcaccctggtcggcgagatgaccccggatgcgggctcggtgaagtggaccgacagcgccgaagtgggctactacgcccaggaccacgcccacgacttcgaagacgacatgaccctgttcgactggatgggccagtggacctctggtgagcaggttatccgcggcaccctggggcgcatgctgttctccaacgacgaaatcctcaagtcggtgaaggtgatttccggtggtgaacaaggtcgcatgctgttcggcaagctgattttgcagaagccgaacgtgctggtgatggacgagccgaccaaccacctggacatggaatcgatcgaagcgctgaacctggcgctggaaaactacccgggcaccctgctgttcgtcagccacgaccgcgagttcgtgtcgtcgctggccacgcgcatcatcgagctgtcggccgatggtgtggtggacttcagcggtacctacgatgactacctgcgtagccagggtgtgctggtc

SEQ ID NO: 32076 - DNA, 954 bp, Pseudomonas putida
atgacctttaaacccctgcgccagctgggcctggcgctgctcgccagcgccttgctgccaagccttgccagcgccgagcagaccctgcgcatcggctaccagaaatcctcgaccctgctgaccctgctgaaggccaggggcactctcgaacagcgcctgcaggccgagggcattcgcgtgacctggcacgagttccccagcggcctgccgctgctggaggccctgaaccttggcaatgtcgacctctcggcggacgttgccgacaccgtgccggtgttcactcaggcggcaggcgccaagttgacctatttcgcccgggaagcaccttcgccgaccgcccaggcgatcctggtgccggcggactcaccgctcaagaccctggccgacctcaaaggcaagcgtgtggcggtgaccaaagccgctggcagccactatctgttgatccaggccctggccaaggctgggctgaccttcaaggacatcacgccggcttacctgatccccgccgacggccgcgctgccttcgagaaccacaaggtcgatgcctgggtgacctgggacccttacgtggccagcgcccagcgtcagcagaacgcacggatcctggtcgacggcagcgaactggccagttaccagcgctattacctcgccggcagcgattatgccaaggcgcatcctgaggtattgcagcaggtgtacctggcattgcgtgaagccggtgcctggaccaaggccaaccccgaggccgctgcccgcatccttggcccgctgtggggtaatctggacagcgccacggtgcagcaggccaacgcccggcgcagttacgatgtgcagccggtgaagctggacaacctggccgagcagcaacggattgccgacgcgttctatcgcgaggggttgctacccaaggcggtggataccagcgcggtggacgtgtatcagccgcctagcaac

SEQ ID NO: 32077 - DNA, 462 bp, Pseudomonas putida
atgaccgcgattctggccctgagcctggccgccgccgcacctgcgatggccgccagcctgaaggacatcgcgccctaccccgaggcggaaaaaggcttcacccggcaggttatccacctgccggcccaggccgacgagtcggcctataaactggaaatcctcgctggcaagacgctgcaggtcgactgcaatcgtcagcgcctgggcggcaacctggaagcacacaccctggaaggctggggctacaattactaccgcctggacaacgtcagcggcccggccagcacgctgatggcctgcccggacggcaagaagaccgaggccttcgtgccggtggtcggcgatggcttcctgctgcgctacaacagcaagctgccggtggtggtgtatgtgcccaaggatgtcgaagtgcgctaccgcgtgtggtcggcatcgcaggatgtgcagaaggctaaagtagag

SEQ ID NO: 32078 - DNA, 1131 bp, Pseudomonas putida
atgtcgagcttcgctgaactgctgcaacagggagcctcgcaggcctggttgtacttccccagtgccatcctgctgggagccttgcatggcctagagccagggcattcgaaaaccatgatggcggcgtttatcgtggccattcgcggcacggtgaagcaggctgttctgctgggactggcctcaacgctttcccacaccgcagtggtttggctggtggccatggccggcatgtacctggggcagaacctgaatgccgaaaccaccgagccgtatttccagcttgcgtccgccgccataattatcaccatcgccctgtggatgctttggcgcacctggcgtggcgagcagatgtggcgcttcgaggaaggcgatgatcttcagcatgactatcaccaccacgatgaaatgcagcgcatcgacaccgggcatgggcgcatcgaactgtcgatcttcgaagagggcgtccctccgcgctggcgactgaatatcttgactggccatgcctggtcggcagctgaaatgagcctgctgacgacccgccccgatggcctggcccagcagtttcgcttcgtcgaccgaggtgactacctggagtcagtggacgagattcccgaaccccacgaattcacagcgcgcctgagcctcggccatgccggtcattctcacgactatgatctggagttccacgagcacggccacggtcatggccatgatcatgcagaactggagggcctggagctgtcgttggagggctaccaggatgcccatgagcgggcgcatgccaacgatatccgcaagcgctttagcaatcgcaacgtcaccacgggccagatcatcctgttcggtttgacgggcgggctgattccttgcccggcagcgatcaccgtgctgctgctctgcctacaagtgaaggaagtcgcgctgggagccgtgctggtgttgtgcttcagcattggcctggccatcaccctggttaccgttggtgctgccgccgctatcggagcacgccaggcgtccaatcgctggccctggcttggtgctgtggcgcgtcgcgctccgtacctgtccagcctattgatcatcggtgtggggatttacgtgggtgtccatggctggatcggcctgaacgcc

SEQ ID NO: 32079 - DNA, 1095 bp, Pseudomonas putida
atgttcgaactcgaccatgacctggcgcaggatatcgttgaccgggcaatggccatcttgccttgcaacgtcaatgtcatggacagccaggggttgatcctgggcagcggtgagccggagcgtatcaacacccgtcacgagggcgcgcagctggtcttggccaatggccggatcgtcgaactggataccgacgcggccaagtgcctgaagggcgtgcagcccggcgtgaacctgccattgatgctcgatgggcggctgatgggcgtgttgggcctgactggcgacccgcagcaggtgcgcacctatggcgagctggtgcgcatgaccgccgaaatgctgctggcccaacgcaatttacaggctgaccagcaatggcgaaggcagcgctgtgacgacctgctggcgctactgctcggcggcagcggtaactcgccgcgcttgctggacgaagcccgtcagttgggcctgaaacctcagctaccgcggataccgtgcctgttcgagattacttccgggccacctgccgaggcgctggccgcatggttgatgagccgttatccggatagctggtgcgtcagcccggctcgccagtcgttgctgtggtgccgcccggcaggcgtggcactggatgaactgcgcctgctggaacgcctgcaacgccacggctgggacattgagcgactggcccttggtagtgcagcgcagagcctggagcagttacgccgtggttaccgccgggtgcgtgacttgctggcctacggccgtgaggtattgcccagcgaacgattgctcagcctgcagcgataccggctgccggcgctgctgtggcgccaccgtaacgacgacgcgctggacgagctgctggagccgttgcagcgcatccgcgccaaggacagcagtggccagttactcgctaccctgcgcgcctggtgtgcccatgacggccagagccagtcctgtgccgatgccctgggcatccaccgcaacagcctgcgctatcgactggagcgcatagccgagctgggtgaggtcgacccgctgcgcctggaagggatgctcagcttgtatctggggttgcagctgttgccaactgac

SEQ ID NO: 32080 - DNA, 1218 bp, Pseudomonas putida
gtggtcattggccatggtgccgagctggttcgcgagcggctggctgctgacgacctgaatttcgtcatgcaggataaacagctgggtaccggtcatgctgttgcccaggcactgccagcgctgaccgctgacaccgtgctggtgttgtacggcgacgtgcctttgatcgaagtggagaccctgcagcgtctgttggccaaagccaacgatcagcagctggggcttctgacagtcaccctcgacgatccgaccggctatggccggatcgtgcgtgacgagcagggcaaggtaactgccatcgttgagcacaaggacgccaacgacgcgcaaaaagcgatcaaggaaggcaacaccggcattctggccttgccggccgcgcgcctcgccgactggatgggccgcctgtcgaacaacaacgcccagggcgagtactacctgactgacgtaatcgccatggcagtggccgatggcttggtggtggccactgaacagccacacgacgctatggaagtgcagggcgccaacgaccgccgccaactctccgagctggagcgtcactaccagttgcgtgaaggccgccgtctgatggctcagggggttaccctgcgtgatccggcacgcttcgatgttcgtggtgaagtaagcgttggtcgtgacgtgctgatcgacatcaacgtgattctcgaaggcaaggtggtcatcgaagacgatgtgcagatcggccctaactgcgtgatcaagaacacgaccctgcgcaaaggcgcggtggtcaaggccaacagccacctcgaaggcgccgtgatgggcgaaggcagcgatgctggcccgtttgctcgcctgcgcccgggcagcgtactggacgccaaggcccatgtgggtaacttcgttgaactgaaaaacgcccacctgggtgaaggggccaaggctggtcacctgacctacctgggggatgccgaaatcggtgcgcgcaccaatatcggcgccggcaccatcacctgcaactacgatggcgccaacaagttcaagaccgtgatgggtgaagacgtgttcatcggttcgaacaactcgctggtggcgcctgtggaaatcaaggccggcgcgaccaccgcagccggctcgaccatcacccaggctgtagaagcgggtgacctggctgtagcccgtgcgcgccagcgcaacatttcgggctggaagcgcccggagaagatcaagaagagc

SEQ ID NO: 32081 - DNA, 1092 bp, Pseudomonas putida
atgaaaaacatcaacaagacccttttccaggcgctgctcgccactctggcatggccggctgcaaacgccatggccatgccggtagaccagacccgctgcgagttcgaacagctgaccagcgcaaacctcaaggtccatgtccgcgacctgaacaccctttatgtgccacgcgatgcgcggatcggcacaacgatcggcaccccagagctgttcgaagccactctcgaccagaacaaccttgccctcctgtgccggacctacggcgagcggataaatttcaacttccaggccgcccgcggggtacatcctcccctgcctgcggttgatgggcgcttcctcgacgcacccgtcctcaggaccaacattccaggcatcggagcgatcgtagagttgctgcaccccttcctcggtggcaccgaccagttcattcccgacagcaggccacccagagtgccgttcacggcctattacgagcagacccttttgggcccggccacgctagccacgttcaggcacaggatcacgctggtcaagaccggcgatctgccgcccggcgagcatcagctggatggcgtactggtgaccggccatctggactggggaggctttggcaaagttctggaatacaccctcagggcaatggtcatccagacccagtgcgatgcttcagcagacgtcagtgccaacccggtggacctcggcgaatggagcgtcaacgacttcaccggcccaggcttcaccacgcctcctgcagcattccaggtccgcttgagcaactgccaggtggaccctgacccgggtaacgaaacgctcgctaccatcgaactcgatggcatcaatggttctcgaccgattggccctgcagatgaaaatgtgttcagcctgaccgacgactccgcagcccgtggcataggtattcagatgctgtacaacggggtatcgatgcccctgaacaaagagatcgacctggtacccctgacgagcgataacgtgcctttgaattttcaggcccgcttcttccagacagaacccaacagcagcctgcgcacgggcttggccaagggtgccttgaacttcaccattcgctaccgc

SEQ ID NO: 32082 - DNA, 458 bp, Pseudomonas putida; identical to SEQ ID NO: 31314

SEQ ID NO: 32083 - DNA, 696 bp, Pseudomonas putida
gtgatcagctcatcaaccgtcgtcaactcagtggtggaaaaactccgccaggccctggcccgcggccaatggcgcaccggcgacatgctgccaggccagcgcgaactggccgaacaactgggcatcagccgccccagcctgcgcgaagcggtaaccgtgctggaaacactgggcctggtgcgctcgttacccggcaagggcgtgttggtgctcgatgccgatgcccagccgtcgggcgtggaaaccagtgctgcggccagcctggccgacgtgctggaactgcgctacacactcgaaccgttcatcgtcggcctggtggcgcagtcggccaacagccaggacatcggccagttgcgcctgaccctgatggacatgcgcgaagcgctggaggccgatgacagcgaggccggggtcaaagcctacattgccttccatgaggcgctgttcgccctgaccaccaacccgattttccagagcgtggtgcagcagaccggcaatgccctgaagcaaagcgccgacatgctgcgcaactcgcccgagcacctggccgcgcggctgaaggaaaacgaagcggtggtgcgcgccattcgcgaacgcagcagcgcccaggccagtgcccagatgcgtcagcacatcgtggccgaagggctgcgcatgggtatcgcgctgaatatcccggacgaacatccgcatcca

SEQ ID NO: 32084 - DNA, 1224 bp, Pseudomonas putida
atgaagtttgttgacgaagtatccattcgggtcaaggccggtgacggtggcaacggttgcatgagcttccgtcgcgagaagttcatcgagaacggcggccctaacggcggtgacggtggtgacggcggctcggtgtacatgattgccgacgaaaacctgaacaccctggtcgactaccgctacacccgtcaccatgaagcccagcgtggctccaacggcggtagcaccgactgcaccggcaagaagggtgaagacctgttcctgcgcgtgccggtcggcaccaccgtgatcgatgcttccacgcaggaagtgatcggtgacctggtcacccccggccagaagctgatggtcgcgcaaggtggctggcacgggcttggcaacacccgtttcaagtcgagcaccaaccgtgcgccgcgccagaccaccccaggcaaaccgggtgagcagcgtgacctgaagatggaaatgaaggtgttggccgacgtcggcctgctgggcttgccgaacgctggcaagagtaccttcatccgttcggtctcggccgccaagccgaaagttgccgactacccgttcactaccctggtgccaaacctgggcgtggtcagcgtcgaccgctggaagagcttcgtcatcgccgacatcccaggcctgatcgaaggcgcttccgaaggtgccggcctgggtatccgcttcctcaagcacctggcgcgtactcgcgtgctgctgcacctggtggacattgcaccgctggacgaaagcagcccggccgatgccgccgaagtcatcgtcaacgagctgacccgcttcagcccgtcgctggccgagcgtgagcgctggctggtgctgaacaaggccgatatggtcatggacgacgagcgcgacgagcgtgtgcaggaagtgatcgaccgtctggagtgggaaggcccggtctacgtgatctcggctatttccaagcagggcaccgacaagctcagccacgacctgatgcgctacctcgaagaccgcgccgaccgcctggccaacgacccggcctacgccgaagagctggccgaccttgaccagcgcatcgaagacgaagcccgtgcccagctgcaggccctggacgacgcccgtaccctgcgtcgtaccggcgtcaagagcgtgcatgacatcggcgacgacgatggttgggacgatgatttcgaggacgacgaagacggtccggaaatcatttacgtgcgcgac

SEQ ID NO: 32085 - DNA, 273 bp, Pseudomonas putida
gtgccacgttctctgaaaaaaggtccttttatcgatcttcacctgttgaagaaggtcgaagtggcggtggagaagaacgatcgcaagccagttaaaacctggtcgcgccgttcgatgatcctgccacaaatggtcggtctgaccatcgcggttcacaacggtcgccagcatgttccagttctcgtgaacgaagacatggtcggccacaaactgggcgagttcgccggtacccgcacctatcgcgggcacgtggctgacaagaaagccaagcgt

SEQ ID NO: 32086 - DNA, 633 bp, Pseudomonas putida
atgttgaccatcgcgctttccaaaggccgtattctcgacgataccttgccgttgctcgccgaggccggcatcgtgccgaccgaaaacccggacaagagccgcaaactgatcatccccaccacgcaggacgatgtacgcctgctgatcgtgcgtgccaccgacgtgccgacctatgtcgagcatggcgctgccgacctgggtgtggccggcaaggacgtgctgatggagtacggcggccagggcctgtatgagcccctggacctgcagattgcccaatgcaagctgatgaccgcgggcgtagtcggcgcagccgagcccaaggggcgcctgcgtgtggccaccaagttcgtcaacgtagccaagcgttactatgccgaacaaggtcgccaggtcgacatcatcaagctgtatggctcgatggagctggcgccgctgatcaaccttgccgacaagatcatcgacgtggtcgacaccggcaacaccctgcgtgccaacggcctggaaccccaggaactgatcgccacgatcagctctcgcctggtggtcaacaaagcctccatgaaaatgcagcacgcccgtatccagagcctgatcgacacgctgcgtgcagcggtcgaatcgcgacaccgcggt

SEQ ID NO: 32087 - DNA, 1212 bp, Pseudomonas putida
gtgcgcgaaatcgtcctgatcaacatcaccggtgaggaccgtcccggtctcactgcggctatcaccggcgtcctgctgcagggcggtgtgagtatcctcgacatcggcctggcggtcatgcacggcaccttgtcgtttggcatcctggtcgacatcccggacaacgaagtggctaccgcgctgttgcaaagcgtgcaggccaaagcccacgaactgaacctgcaggcccgttacacgccgatttccgaggcggactaccagcattgggccgatgggcatggcgaagcgcgacacatcgttaccctgctcagccgcaagatcacacccgagcagctgcagcgggtgagtgcggtgatcagccagtacggcctgaccatcgagcgtatcgagcgcctgtcggcccgggtggcactggatgccgaaatcgacaagggcaaggcagccgtcgagatctccgtgcgtggcgtgccgagcgatgcccaggccctgcgtgccgacttctttgccctggctgaagagctgagcgtcgacatcgccttccagaaggacgatctgttccgccgcaaccgccgcctggcggtgttcgacatggactccacgctgatcgaggccgaagtcatcgacgaactggccaaggcggcgggtgtgggggagcaggtggcggcgatcaccgagcgcgccatgcgcggtgaactggacttccgcgccagcttcaaagagcgcatggcactgctcaagggcctggatgtgggggtgctggacgagatcggggcatcgctgcgcctgaccgagggtgccgagaacctgtttgccgagctcaagcgcctgggatacaagaccgcgattctgtccggtggctttacctatttcgctcgtcaggtgcaggcgcgcctgggtatcgactatgtgttcgccaacgaacttgaagtggtcgatggcaaggtgacgggcgtggctgttgagccgattgtcgatgcccagcgcaaggccgatttgttgaagaagctggccagcgacgaaggcttgcaactggagcagaccatcgccgtgggcgatggcgccaatgacctgccgatgctgtcgctggctgggttgggcgtggcgtttcgtgccaagccgctggtgcgccagtcggccaagcaggcgatttccaccttggggctggacggggtgctgtacctgctgggcctgcgtgatcgcgacgcccgcggc

SEQ ID NO: 32088 - DNA, 978 bp, Pseudomonas putida
atgagccagatgagcttttccgacttcgagtacgccggcaagcgcaagcaaacccgccgcgaacgcttccttgccgagatggatcaggtcgtaccctgggcaggtctgctcggcctgatcgagccgttctaccccaaggccggtggcggtcgaaaaccttaccccctggaaaccatgctgcgcattcacctgctgcagaactggttctccctcagcgatccggccatggaagaagcgctctacgaaatcacgcccatgcgtcagttcgcgcatctgacactgagcgcgccgatccctgaagacaccacgatcatgaacttccggcacttgctggagaagcatcaattggcacctgccatcctcgcggtcatcaacggttatttgcaggaaaaaggcctgtcgttgcgtcagggcacgatcgtcgacgcaaccattattcatgtcccaagctcgaccaagaacaaagatggcgagcgcgatcccgagatgcatcagaccaagaagggtaaccagtatttcttcggtatgaaggcccacatcagcgctgacgttgagtcgggactggttcatcacgtccatggcaccgctgccaatgtggccgatgtcacccaagtcgctgaactgctccacggggaagaaaacgcagtctatgcggacgcaggttacaccggtgtcgagaagcgtgaagagcacgaaaatcgtgacgtgatctggcaaatcgcggctcggcgcagcacgtattccaagctgaacaaacgcagcctgctgtacaaagccaagcgcaagatcgagtactgcaaagcgcagacacgtgccaaggttgagcacccgtttcgggtcatcaagcgccagtttggttatgtgaaagtacgctttcgtgggctgatgaaaaacacggcccaactgaccacgctgttcgccctgtcgaacctgtggatggctcgaaaacgactgatgggtttgggtgagttgcgcatt

SEQ ID NO: 32089 - DNA, 252 bp, Pseudomonas putida
atgagccctgtgactatctataccaccccgcactgcccatactgcctgagcgccaagcgactgctgtcgagcaagggcatcacccctgacgaaatcaacgttgaaacgtcacccctgcacctggcggaaatgatgcagcgatcccagcgccgaactgtcccacagatatttgttggcaaggtgcatgtcggcggcttcgatgacttggcgcgtcttgaccgcaagggccagctcgaggcattgcttcacgct

SEQ ID NO: 32090 - DNA, 1638 bp, Pseudomonas putida
atggctgctaaagacgtaaaatttggtgattccgctcgtaagaaaatgctggttggtgtcaacgttctggctgacgcggtaaaagcgaccctgggcccgaaaggccgtaacgtggtactggccaagagcttcggcgcgccgaccatcaccaaggacggcgtttccgtcgccaaagaaatcgagctgaaagacgctttcgaaaacatgggcgcccagctggtcaaggaagttgcttccaaggccaacgacgctgccggtgacggcaccaccaccgctaccgttctggctcaggccatcgtcaacgaaggcctgaaagccgtcgctgccggcatgaacccgatggacctgaagcgcggtatcgacaaggccactgctgccgtcgttgccgaactgaagaacctgtccaagccatgcgccgactccaaggccatcgcccaggtaggtaccatctctgccaactccgacaactccatcggtgaaatcatcgccgaagccatggaaaaagtcggtaaagaaggcgtgatcaccgttgaagaaggctcgggcctggaaaacgaactgtccgtcgtagaaggcatgcagttcgaccgcggctacctgtcgccgtacttcgtcaacaagccggacaccatggttgccgagctggaaggcccgctgctgctgctggtcgacaagaaaatctccaacatccgtgagctgctgccagttctggaagccgttgccaaggccggccgcccactgctgatcgttgccgaagacgttgaaggtgaagcgctggctaccctggtagtcaacaacatgcgcggcatcgtcaaggttgctgcagtcaaggctccgggcttcggcgatcgccgcaaggccatgctgcaggacatcgctgtcctgactggcggccaggtcatctccgaagaaatcggcctgtccctggaaaccgctaccctggagcacctgggtaacgccaagcgcgtcatcctgtccaaggaaaacaccaccatcatcgacggtgctggcgctgacaccgagatcgaagcacgcgtcaagcagatccgtgcccagatcgaagaaacttcctcggactacgaccgtgagaagctgcaagagcgtctggccaagctggctggcggtgttgccgtgatcaaggtcggtgccggcaccgaagttgaaatgaaagagaagaaagcccgcgttgaagacgccctgcacgctacccgtgcagccgttgaagaaggcgtggtgcctggcggtggtgttgccctggttcgcgccctggcagccatcatcgacctgaaaggcgacaacgaagaccagaacgtcggtatcgcgctgctgcgtcgcgctgttgaatccccgctgcgccagatcactgccaacgccggtgatgagccaagcgtggttgctgacaaggtcaagcaaggttcgggcaacttcggctacaacgccgctaccggtgaatacggcgacatgatcgagatgggtatcctggacccagccaaggtcactcgctcggcgctgcaagctgctgcttcgatcggcggtctgatgatcaccaccgaagccatggttgccgacctgccggaagacaagccagctgctggcatgcctgatatgggtggcatgggtggcatgggcggcatgatg

SEQ ID NO: 32091 - DNA, 1230 bp, Pseudomonas putida
atgaacgagtacgcccccctgcgtttgcatgtgcccgagcccaccggccggccaggctgccagaccgatttttcctacctgcgcctcaacgatgcaggtcaagcccgtaaacccgcgatcgatgtcgatgctgccgacactgccgacctgtcctacagcctggtccgcgtgctcgacgagcaaggcgatgcgcaaggcccctgggccgaagacatcgacccgcagatcctccgtcaaggcatgcgcgccatgctcaagacgcggatcttcgacagccgcatggtggttgcccagcgccagaagaagatgtccttctacatgcaaagcctgggcgaagaagccatcggcagcggccaggcgctggcgctgaaccgcaccgacatgtgcttcccgacctaccgccagcaaagcatcctgatggcccgcgacgtgtcgctggtcgagatgatctgccaactgctgtccaacgagcgcgaccccctcaagggccgccagttgccgatcatgtattcggtgcgcgaagccggcttcttcaccatcagcggcaacctggcgacccagttcgtgcaggcggtcggctgggccatggcatcggcgatcaagggcgataccaagatcgcctcggcatggatcggtgacggcgctactgccgagtcggacttccacaccgcccttacctttgcccacgtataccgcgccccggtcatcctcaacgtggtcaacaaccaatgggccatttccaccttccaggccatcgccggtggcgagtcgaccacctttgccggccgtggcgtgggttgcggtattgcttcgctgcgggttgacggcaacgacttcgtcgccgtgtacgctgcctcgcgctgggcggccgagcgcgcccgccgcggcctgggcccaagcctgatcgagtgggtcacctaccgtgccggcccgcactcgacgtcggacgacccctccaagtaccgccctgccgacgactggagccacttcccgctgggtgacccgatcgcccgcctgaagcagcacctgatcaagatcggccactggtccgaggaagaacaccaggccgtcacggccgagctcgaagctgcggtgattgccgcacagaaagaagccgagcagtacggcaccctggccaacgggcacatcccgagcgccgcctcgatgttcgaggatgtgtacaaggaaatgcccgaccacctgcgccgtcaacgccaggaactgggggtt

SEQ ID NO: 32092 - DNA, 498 bp, Pseudomonas putida
gtgattagcgacgaaagcgatcgtttcaacccgcgcgatccaaaacctgcggatgccggcaagccctccaagagcgccaagcgccgcgaagcccgcaagctcgcgacccaggccctctaccagtggcacatggcccagcattcgctgaacgagatcgaagcgcaattccgggtggataacgatttcaccgatgtcgacggtgcctatttccgcgagatcctgcatggggtcccggcaatcaagggcgaaatcgacaaagcgctggtgccttgcatgaccatcgcactggaagagctcgacccagtcgagctggctgtgctgcgcctgtccacctgggagctgatcaaacgcgtcgacgtgccttaccgcgtcgtgatcaacgaaggtgtggaactggccaaggtcttcggcgccactgacggccacaagttcgtcaacggcgtactggacaagcttgcacctgcgctgcgtgaagcagaagtcaaggcgaacaagcgc

SEQ ID NO: 32093 - DNA, 1596 bp, Pseudomonas putida
gtggaacacatcctggttcgtcacgagcaggcggccacccatatggcggacggctacgctcgcgccaccggcaaggccggtgtggtgctggtaacctccggtcctggcgcgaccaatgccattaccggtattgccaccgcctacatggactcgattccgatggtcatcctgtccggccaggtgcctagcaccatggtgggcaccgatgccttccaggaaaccgacatgattggtatctcgcggccgatcgtgaagcacagcttcatgatcaagaatccgaccgagatccctgaagttctgaaaaaagctttctacctggcgcaatccggtcgtccaggtccagtcgtggtcgacattccaaaagatatgaccaacccggctgagaagttcgaatacgtctacccgaaaaaggtcaagctgcgctcctacagcccggcggtccgcggtcactccggccagatccgcaaggctgccgagatgcttctggcggccaagcgcccggtcgtctactccggtggcggtgtgatcctcggcggtggctccgaagccctgactgaaatcgccaagtcgctgaacctgccggtcaccaataccctgatggggttgggtggcttcccgggtaccgaccgccagttcctcggcatgctcggcatgcatggcagctacaccgccaacatggccatgcatcatgccgatgtcatctttgccgtcggtgcgcgtttcgacgaccgcgttgtaaacggcccggccaagttctgcccgaacgccaagatcattcacatcgacatcgacccggcgtcgatctcgaagatgatcaaggccgacgtgccaatcgtcggcccggtcgacagcgtgctcagcgaaatgctcggcatcctcaaggaaatcggcgagcagcctgacaaggcggcgctggatgcctggtggaagcagattgacgaatggcgtggcaatggcgagttgttcccttacgacaagggcgatggcaacgtcatcaaaccgcagaaagtcatcgagacactgtgcgaagtgaccaatggcgatgccttcgtcacttccgacgtgggccagcaccagatgtttgccgcgcagtactaccgcttcaacaagccaaaccgctggatcaactccggtggcctgggcaccatgggcttcggcttcccggcggcgatgggcgtcaagctcaacttcccggatcaggacgtggcctgtgtgaccggcgaaggcagcatccagatgaacatccaggagctgtccacctgcatgcaatacggcctgccggtgaagatcgtcaacctgaacaacggcgtgttgggcatggtccgccagtggcaggacatggcctacaacggtcgtcactcgcactcgtacgtcgagtcgctgcctgactttatcaagctggctgaggcctatggccatgtgggtatccgcatcaccagcctgaaggacctcaagccgaagctggaagaagcgtttgcgatgaaggaccgtctggtgttcatcgacatcgcggttgaccgcagtgagcacgtctatccgatgcagatcaaggatggctcgatgcgtgacatgtggctgagcaagacggagcgtacc

SEQ ID NO: 32094 - DNA, 396 bp, Pseudomonas putida
atgaagaaaaccccgctgttgaatgttgccctgtcgcgggtcattgccggcatggggcatggcgatatcctggtgattggcgatgccgggctgccggtgccgccgggtgtggaactgatcgacctggccattacgcctggcctgccggacttcgccagcgtgctgcgggtggtgctgagcgaattgcaggttgagcggcatgtgctggctgaagaaatgcaaaaagtggtgccacccgcgctggtcgaaatcgagcgactgaagggcaagctgggcaagcgcgaatggctgacccacgaggatttcaaagtgctgtcgcgcagtgcccgtgcggtggtgcgtacaggcgagtgccagccctacagcaacattgccctcatctccggcgtcaccttc

SEQ ID NO: 32095 - DNA, 993 bp, Pseudomonas putida
atgaaaaccaccccgctcaacaaccaggacgccgcccccgtgcgccgcagcggtacgtactttggcctgggcacctacctgggcctggctggcgccttgctggcgatgatcgtgctgttctcgttcctcagcagccacttctggtcgtatggcaccttcagcacgctggccaaccagatcccggacctgatggtgctggcggtgggcatgaccttcgtgctgatcatcggcggcatcgacctgtcggtgggctcggtgctggcgctggccgcctcgacggtgagcgtggcgatactcggctggggctggggcgtgctgccctcggcgctgctgggcatggccgtggccgccctggccggcagcattaccggtggcgtcaccgtggcctggcgcatcccgtcgttcatcgtctcgcttggtgtgttggagatggcccgtggcctggcctatcagttcaccgactcgcgcaccgcctatatcggcgacgcctatgcctggttctccaacccggtcgcctttggtgtttcgccagcgttcatcatcgccttgctggtgatcgtgctcgcccagttggtactgacgcgcacggtgttcggccgttacctgatcggtatcggcaccaacgaagaggccgtgcgcctggccggtatcgatccgcgcccttacaaagtgctggtgttcgccctgatgggcctgctcgccggcctggccgcactgttccagatctcgcggctggaagccgccgaccccaatgccggctctggcctggagctgcaggtcattgccgccgtcgtgatcggcggcaccagcctgatgggtgggcgtggctcggtcatcagcaccttctttggcgtactgatcatttccgtattggccgccgggctggcgcagatcggtgccagcgagccgaccaaacgcatcatcaccggggcggtgatcgtcatcgccgtggtgctcgacacttaccgtagccggcgcgcaggccggcggaac

SEQ ID NO: 32096 - DNA, 1008 bp, Pseudomonas putida
ttgtggctggtgttcatggccatcgtcatcggtttgctggtgctcgacctgggcgtgctgcaccgccacgaccgggaaattgaaatgcgcgagagcctgctgctgtattcaggctatttcagtgtcggtgtactgttcggcgcgggggtctggtaccagttgggcgcgcagtcggcactggagttctacaccggttttttggtcgagcaatcgctgtccatggacaacgtgttcgtcatggcgatgatcttcagctacttcgccatcccccgccgctaccagcaccgcgttctgttctggggcatcctgggcgtggtgttcctgcgggccatcatgatcggcgtgggcgcggcgctggtacagaactttgcctgggtgctttacatcttcggtgccttcctgctgtttaccggggtgaaaatggcgctgtcgaaggaagacagtcgcccagacctggccaacaacccgatcctcaagttcgtgcggcggcacatgcgggttaccgaccagatccatggctcgcacttcttcgtacgccataccccggccgggcacagcaaggcgctgcgttatgccaccccgctgtttctggcactggtactgatcgaactggccgacctggtgtttgccgtcgacagcgtgccggcgatcttcgccatcacccaggacccgttcatcgtctacacctccaacatcttcgccatcctcggcttacgctcgctgtatttcgcgctggcggcgctgatgcacaggttcgtctacctcaagtacgccctggcgctggtgttgatcttcattggctgcaagattttctaccacggcatggtgggcaaggtgccggcgctgctgtcgttgggcgtgacattcgggttgttgctgggtggggtggtgatttcgttgatcaagacgcgggggcagacgttgaataaagacgacaagacgatagaaaaagcagctaacgataagaaaacaacgggacaaaagaagaatgacccacagttgcgggtc

SEQ ID NO: 32097 - DNA, 354 bp, Pseudomonas putida
gtggaaattttcaaggaattcacattcgaatcggcccaccgcctgccccacgtccctgaagggcacaaatgcggccgtttgcatggccactcgttcaaggtcggcctgcacctgaccggcccgctcgacccgcacacgggctggatccgcgacttcgccgaggtcaaggcgatcttcaagccgatctatgatcagctggaccacaactacctgaacgacatccccgggctggaaaaccccaccagcgaagtgatcgccaagtggatctgggaccaggtcaagccgctgatgccggagctgtccaaggttcgcatccacgaaacctgcaccagcggttgcgaatacaccggcgac

SEQ ID NO: 32098 - DNA, 2619 bp, Pseudomonas putida
cctggttgggcggcccacaaagccgcggcagcgcatgggtgcattgaatgctggataagcgtcccggaccccctttagggaccactgatgagggaaataactgtgcttgaagcctaccgcaaacacatcgaagagcgtgccgccctgggtatcgttccccagccgctgaacgccgaacaaactgcaggcctggtcgagctgctgaaaaacccgccggccggcgaagaagccttcctcgtagacctgatcaccaaccgcgtaccgccaggggtcgacgaagctgcctacgtcaaggccgctttcctctccgccgtcgccaagggcgaagccaagtcgccactgatcgaccgcaagcacgccaccgaactgctgggcaccatgcagggcggctacaacatcgaaacgctggtcgcactgctggatgacgccgaactgggcgccatcgcggccgaacagctcaagcacaccctactgatgttcgatgccttccacgacgtggccgaaaaagccaaggccggcaacacgcacgccaaggccgtcctggaatcctgggctgccggcgagtggttcacctcgcgcccggccatcgccgacaagtacaccctgaccgtgttcaaggtgcctggcgaaaccaacaccgacgacctgtcgcctgccccggacgcctggtcgcgccctgacattccgctgcacgccctggccatgctgaaaatggcccgcgacggcatcgagccgcagcagcctggttcggtcggcccgctggcccagatcgaagccgtcaaggccaagggcttcccggttgcctatgtcggcgacgtggtcggtaccggttcctcgcgtaaatccgctaccaactcggtactgtggttcttcggcgacgacatcccttacgtgccgaacaagcgcgccggtggcttctgcttcggcaccaagatcgccccgatcttctacaacaccatggaagacgccggcgccctgccgatcgaattcgactgcaccaacctgggcatgggcgacgtcatcgacgtttacccatacaaaggtgaagtacgccgtcacgacagcgacgaactggtcaccaccttcgagctgaaaaccgaagtgctgctggatgaagtccgcgctggcggccgtatcccgctgatcgtcggccgcggcctgaccgaaaaagcccgtgccgagctgggcctgggtgcttccgacctgttcaagaaaccagagcagcctgccgattccggcaagggcttcaccctggcgcagaaaatggtcggccgtgcctgtggcctgccagaaggccagggcgtgcgcccaggcgcctactgcgagccaaaaatgaccaccgtcggctcccaggacaccactggcccgatgacgcgcgacgaactgaaagacctggcatgcctgggcttctctgctgacctggtcatgcagtcgttctgccacaccgcggcctatccgaagccgatcgacgtcaccacccaccacaccctgccagacttcatccgcacccgtggcggcgtgtcgctgcgcccgggcgacggcatcatccacagctggctgaaccgcatgctgatgcctgacaccgtaggtaccggtggcgactcgcacacccgcttcccgatcggcatctcgttcccggccggttccggcctggtggccttcgctgccgccaccggcgtcatgccactggacatgccagaatcgatcctggtgcgcttcaagggcaaactgcagccaggcatcaccctgcgtgacctggtgcatgccatcccttactacgccatccagaagggcctgctgaccgtcgagaagaaaggcaagaaaaacgccttctccggccgcatcctggaaatcgaaggcctggacgacctgaccgtcgagcaagccttcgagctgtccgatgcctcggccgagcgttccgctgccggttgcaccatcaagctgccggaaaaggccatcgccgagtacctgcagtccaacatcaccctgctgcgctggatgatcggcgaaggctacggcgatgcccgcaccctggagcgccgcgcccaggccatggaagcctggctggccaagcctgagctgctgtcggccgacgccgatgccgaatacgccgaaatcatcgaaatcgacctggccgacgtcaaggagcctgtgctctgcgcgccgaacgacccggacgatgcccgcctgctgtcctcggtacaaggcgagaagatcgacgaagtgttcatcggttcgtgcatgaccaacatcggtcacttccgcgctgccggcaagctgctggagaaggtcaagggtggcattccgacccgtctgtggctggctccgccaaccaagatggacgctcaccagctgaccgaagaaggctactacggcatctacggcaaggccggtgcacgtatggaaatgccaggctgctcgctgtgcatgggcaaccaggcacgcgtgcagaccggttcgaccgtggtctccacctcgacccgtaacttcccgaaccgtctgggcgacgcgaccaacgtgtacctggcatcggccgagctggccgctgtcgcttcgatcatcggcaaactgccgaccgtcgaagagtacatgcagtacgcgaaagacatcgacagcatg

SEQ ID NO: 32099 - DNA, 897 bp, Pseudomonas putida
atgaaaattgcactcgtacttatcttcgtcttctcgatcgcctatgttcacctgcgcggtcgggttcgccacaagctgactcggcagctgggcgaccactccagcttcctggccccgatcaacagcttcctgtacctgttctccaaacacccggccaagccctacctgccggtcgaggcctttccagaactgaaaccgctgcaggaccactggcaggagatccgtgaggaaggccgccagttgctgcacgtaggcgaaatcaagaaatccgacaattacgatgacgtcggtttcaactcgttcttcaagaccggctggaaacgtttttacctgaagtggtatggcgaaagccacccgtcggcaatggccctttgcccacgcacgaccgagctgctgcaaggcatcggcacggtcaaggccgccatgttcgctaccctgcctccgggagccaagctggtgcgccaccgtgacccgtatgccggctcgtaccgctaccatctgggcctggataccccgaatgacgacggctgctacatcgacgtggacggcgagaaatacgcctggcgcgatggcgagggggtgatcttcgacgaaacctacatccactatgcagccaacaccaccgagcacaaccgcatcatcctgttctgcgacgtcgagcccccgctcaagtaccgctgggcaaccgcgttcaaccgctggttcagccgcaacgtgatggccgctgccgctgcgcccaacgacgccagcgacaagaccggtggcatcaaccgcctgttcacccgcatctacaagatccgcgagcgtggcaaggcgctgaagaagcgcaaccgcatgcgctactacctggaaaaatgggcagtggtcgcggcgttggtgctggtgttcatctacatc

SEQ ID NO: 32100 - DNA, 675 bp, Pseudomonas putida
atgaagatcctcctcgttctgacttcccacgagcaacttggcaacactggtgaaaagaccggtttctggctcgaagagctggccgcgccctactacgcctttatcgacgcaggcgcgcaactgaccctggcatcgcccaatggcggccagccaccgctcgacccaaagagcaatgagcctgacttccagaccgacgccacccgccgcttcgagattgattcagtcgccacgcacgcgctggccaacacgctaaaactcagcgacttaaacggcgccgaatttgatgctgtgttctaccccggcggccatggcccgctgtgggacttggccgaagatgccgcgtccatcgccttgattgagcgctccatcgccgccggcaagcctgttgcggcggtttgccatgcgcccgcggtgctgcgtcacgtcaagggcagcgacggccagccattggtcgccggcaaggcggtcaccggcttcagcaacagcgaagaggaggctgtaggcctgacccaggtggtgccgttcctggtcgaggacatgctcaaggctcagggcggccactacagcaagaccgccgactggcaggtacatgtcatcaccgacgggctgctgatcacgggccagaacccggcctcctccgaagccaccgcccacgcgctgctcaacgtgctgagc

SEQ ID NO: 32101 - DNA, 1125 bp, Pseudomonas putida
atggccgaagcaaaagtactcagtggcgcaggcctgcgtggccaggtggccggccagactgcactgtcgaccgtgggccaggccggtgccgggctgacctaccgtggttatgatgtgcgtgacctggccgccggtgccgagttcgaagaagtcgcctacctgctgctgtacggcgagctgccaacccaggctgaactggccgactacaagcgcaagctcaagggcctgcgtgacctgccgcaagccttgaaggaagtgcttgagcgcatcccgcgcgatgcccacccgatggacgtcatgcgcaccggttgctcggtactgggcaccctcgaaccagaactgaccttcgaagcccagcgcgacaagaccgaccgcctgctggcgctgttcccggccgtgatgtgctactggtaccgcttcacccaccatggcgtacgcatcgactgcaccactgatgaagacaccttgggtggccacttcctgcacctgctgcacggcaagaagccgagcgagctgcacgtcaaggtcatgaacgtgtcgctgattctctacgctgaacacgaattcaacgcctcgaccttcactgcccgcgtctgcgcctcgaccctgtctgacttgtactcctgcgttaccgcagccatcggctcgctgcgtggcccgctgcacggcggtgccaacgaggctgcgatggaactgatcgaacgcttccagagcccgcaggaagccaccgccgaactgctgcgcatgctcgagcgcaaagacaagatcatgggctttggccatgccatctacaaagagtccgacccgcgcaacgaggtgatcaagggctggtcgaagcagctggctgacgaagtgggtgacaaggtgctgtacccggtgtccgaagccatcgacaagaccatgtgggagcagaagcgcctgttccccaacgccgacttctaccatgcctcggcgtaccacttcatgggcattccgaccaagctgttcaccccgatcttcgtctgctcgcggctgaccggctgggcggcgcacgtcttcgagcagcgcgccaacaaccgcatcatccgcccgagcgccgagtatgtcggcgtcgaacagcgccagttcgtgccgatcgagcagcgc

SEQ ID NO: 32102 - DNA, 1626 bp, Pseudomonas putida
ttgctggtgtttgccctgctgctggtcctgacgctgttttcggttcgcctgaacgtgctgttttcgttttggtacaacggcttctacagcgccttgcagggccttgaccaggcggcgttctggtacctgctcggcgtcttcgcggtactggccaccatccatgtgctgcgctcgctgttcaccttctatgtcagccaggcattcagtatcaagtggcgggtctggctgaccgagcgcctgacccacgactggatgcagggcgatgcctattaccgtggccagttccttgccgagccagtggacaaccctgaccagcgtatcgaactggacgttaacgctttcgtcaccaactcagtcagccttgccctgggcgcagtcagtgcgctggtttcactggtggcgttcaccggcatcctctgggggctgtcagcaccgttgacggtggccggcgtggagatccctcgggcgatggtatttgccgtttacctgtatgtcatcatcgccacctgggtcgccttccgcctcgggcgcccactgatccggcttaacttcctcaacgagaaactcaccgccaacttccgttacgcgttgatgcgcctgcgtgagaacgctgagaacatcgccttctaccaaggtgcgcaagtcgagcggggcacgttgctcggccgttttgctgccttgatcgtgaatgtctgggcattggtgtaccggaacctgaagttcagtggcttcaacttgggtgtcagtcaggttgctgttgtgtttccgttcattcttcaggcgccgcgcttcttcagtggggcgatcaagctgggcgacgtcatgcaaacttcccaggcctttgggcaggtgcaggattctctgtcgttcttccgtgagtcgtacgatgcgttcgcgcagtaccgcgcgacccttgaccgtctcaccggctttctcgatgccaaccagcaggcaagtgcgttgccgcgcgtcaccaccgaagaccaggcgcatgcgctgcagatcacgggattgcaggtgctgcgcccggacggacatgcccttatcgccgacctggacctgagcctgcatgccggccaggcgttgttgatcaaagggccatcgggcagtggtaaaaccacgctgctgcgtgccctggcgggcctttggccgtatgccgaaggcaaggtcaggcggccaacgggccatcaggcactgttcctgtcgcaacgcccgtacctgccgctaggtgacttgcgtaccgtcattgcctacccggcagccagcaaccccaaggatgaactgctcatgcagcaggcgttgcgccaggtcaacctggcccatctcgccgagcgtctggacgtcagctgtgactggtcacacatcctctcggtgggcgagcagcagcgcctggcgttcgcccgggtgctgttcaaccggccacaggtggtgttcctcgacgagtccacctcggcaatggatgaagggctcgagcatgccctgtatgcgttgttgcgttcggagatgccgagtgcattgctggtcagtgtcggccaccgcagcacactggcagcgttccacacccaccggcttgaggtggatgggcatggcggttggtcgttactggagcaggaggctgtgctggcc

SEQ ID NO: 32103 - DNA, 885 bp, Pseudomonas putida
atgaacacccaaccccgcagcctggccgccaccctcttcccgatcggcctactgcttatcgccatggcatcgattcagtccggcgcctccctggccaaaagcatgttcccgatcgtcggcgcacaaggcactaccaccctgcgcctgatcttcgccagcatcatcatgctgcttatattgcgcccgtggcgggtacgcatgaccgccaacacgttgcgcaatgtggtcatctacggcatggcactgggcggcatgaacttcctcttctatatggccctgcaaacggtaccaatcggtatcgccgtcgccctggaattcaccggcccgttggccgtggcgatcttctcctcgcgccgagcgatcgatttcctgtggattgccctggccatcgcaggcctgctgctgttgctgccggcaggtcacagcggccaggcactcgacccagtgggcgccgcctatgcgctgggggcgggtgtgtgctgggcgctgtacatcctgttcgggcaacgtgcaggggccgagcacggcatccagagcgcggccctgggggtggtggtagcggccctgttcgtcgcccccatcggtatcgcccacgccggtagcgctctgctcacacctgccgtgatccccatggcgtttgccgttgcaatactgtccaccgccctgccatacagcctggaaatggttgccctcacgcggattccggcgcgcacgttcggcaccctgatgagcatcgaaccggcatttggcgcattgtccggcctgcttttcctcggcgaggtgctgacgctcactcaatggctggcgattctggcaatcattaccgcctcggtcggcaccaccctgtccatgcgcaaggcgcccagcccggccatcgcagcagac

SEQ ID NO: 32104 - DNA, 1338 bp, Pseudomonas putida
atgccgacctgcacgctacaccccctgccctaccagcccgaccctgccgcctatttcgcccacctgcgccaggcccccggtgcgatcctgctcgacagcgctcgccccggcgccgaacgcgggcgtttcgacctgctcagcgcctggccgctgcaacaactgcaggcgcagcccgatgaagatggccgcgtcttcctccagcgcctgcgcgctggcctggcacaactgggccacgccgacttgcccaacggtgtagagctgcccttcgccgggggcctgatcggctacctgagctacgacttcggccgccgcctggaacacctgccaagcctggccgtggacgacctgggcctgccagacgcacaactgggcctgtatgcctgggcactggtcagcgatcacttgctcggcaccagccagctggtgttccaccctagcctggccggcgacgagcgcgaacgcctgatcagcctgttccaggacaccagcgccaccaccggcgacttccggctgctcgcgccgatggccggtgacctggagccggagcaatacaaaaccgctttcgaccaggtacaacgctacatccaggccggtgactgctaccagatcaacctcacccaacgctttcgcgcaccctgccaaggcgatccatggcgggcctaccaggccctgcgccaggcctgcccgacccccttctccggctaccagcaactggccgacggcagtaccctgctgagcttttcgcccgagcgcttcatccgcgtcagccagggccaggtggaaacccggccgatcaagggcacccgcccacgcgccagtgacccggcgcaagaccagcgtaatgcccaggagctgctgcacagcccgaaggaccgctcggaaaacctgatgatcgtcgacctgctgcgcaacgacctggggcgcacgtgcgagattggctcagtgaaggtaccggaactgttcagcctggagagttaccccaacgtgcaccatctggtcagcagcatcaccggccagctggccagcgacaaggatgcgctggacctgatcggcgacagcttccctggcggctcgatcaccggcgcaccgaagatccgcgccatgcagatcatcgacgaactggagcccgcgcgccgcgcgctgtactgcggctcgctgctgtatgtggatgtgcgcggcgaaatggacagttcgatcgccattcgcagcttgctgatcaaagatggccaggtcagttgctggggcggcggcgcggtggtagccgactcgcagtggcaggccgagtatgaagagtcgatcgccaaagtgcgggtgctgatgcagaccctgcagggcttg

SEQ ID NO: 32105 - DNA, 2913 bp, Pseudomonas putida
atgtccttgatagtgctattgcttctgccgttcgtgggcagttgcctggcagctgtgctgccgcacaacgcacgtaacgccgagtccattcttgccgggctcgtagccctggtcggcaccgtccaggtagcacttctgtaccctcaggttgcccatggtggcgtcattcgcgaagagttcctgtggctgcccagcctgggaatgaacctggtgttgcgcatggacggctttgcctggctgttctcgttgctggtactgggcattggcgcactggtatcgctgtatgcccgctactacatgtcaccgcaagatccggtaccacgcttcttcgcgttcttcctggccttcatgggcgccatgctcggcctggtcatctccggcaacctgatccaactggtgttcttctgggaactgaccagcctgttctccttcctgctgatcggctactggcaccaccgcgccgacgcccgtcgcggcgcctatatggcgctgatggtaaccggtgcaggcggcttgtgcctgttggtaggggccctgctgctcggccatgtggtcggcagctatgacctggacaaggtcctggctgccgggcatatcatccgccagcatgcgctttacccggtgctgctgcccctgatactcatcggcgccctgaccaagagcgcacagtttcccttccagttctggctgccccacgccatggcagcgcccacaccggtgtcggcctatttgcactctgcaaccatggtcaaggccggggtgttcctgctggcacgcctgtggccggtactttccggtagcgaggagtggttctggatcgtcggcggtgccggcgccctcaccctgctgctcggcgctttcgccgccatgttccagaatgacctcaagggcctgctggcctattcgaccatcagccacctgggcctgattaccctgctgctgggccttaacagcccgctggctgccgtcgccgcggtattccacattctcaaccatgccaccttcaaggcctcgctgttcatggccgccggcatcatcgaccacgagagcggcacccgtgacattcgccgcctcagcggcctgatccgcctggtgccctacaccgcgaccctggccatggtcgccagcgcgtcgatggccggcgtgccgctgatgaacggcttcctgtcgaaggaaatgttcttcgccgaaacggttttcatcagttccaccgcctgggtcgaggccacgctgccggtaatcgccaccctggccggcaccttcagcgtggcgtatgccctgcgttttaccgtcgatgtgttcttcgggccgacagcccaggacctgccccataccccgcacgagccgccacgctggatgcgtgctccggtggagctgctggtgctcacgtgcctggtagtgggcatcttccccacccagtcggtcggccccctgttggccgctgcggccctgccggtggttggcggtaccctgccggaatacagcctggccatctggcatggctggaacgcgccgatgatcatgagcctggtcgccatgagcggcggcatcgtcctgtacctgttgctgcgcaagcaactgcgcctgggccgcttcccctacccgcccgtgatcgagcgcttcaatggcaagcgactgttcgaacacggccaggttcacctgatgctgctggcgcgtcgcatcgagcgcgtgctcaccacccgccgactgcagtcgcagctgttcatgctggtattcgccgcgttcctcgcgggcctcacgcctatgctgtatagcggcctgagctggggtgatcgcccgaagattcccggttcgggcgtgttcgtcgccctgtggctgatcgccattgcctgcgccatcggcgccgcctatcaggccaagtaccaccgcctggcggcactgatcatggtcagcgtctgcggcctgatgacctgcatcactttcgtctggttctctgcgcccgacctggcactgacccagttggtggtggaagtggtcaccaccgtactgatcctgctcggcctgcgctggctgccacggcgtatcgaaggcgtgtcgccgctgccgggtagcctggaacgcgcgcgcctgcgccgcctgcgcgacttgctgctggccgtgctggtgggtggcggcatggcggtgctgtcgtacgccatgctgacccgaccgacgcccaacgacatttcctcgttctatttgagccgcgcattgcctcagggcggcggcaccaatgtggtcaatgtcatgctggtcgacttccgcggcttcgataccctcggtgaaatcaccgtattggtggctgtggcattgaccgtgttcgccctgctacggcgcttccgccctccgaaagagagcatgcagttgccggcgcaacaacgccagttggcgccagacgtggtcaccgacctgatcaacccgcggcatgccactgataccgcgctgggcttcatgatggtgcctgcagcgttggtgcgcctgctgctgccgatcgccttgctggtgtcgatgtacctgttcatgcgcgggcacaaccagcccggtggcgggtttgtcgctggcttggtcatgtcggtggcgttcatcctccagtacatggtggccggcacccagtgggtcgaggcacagatgagcctgcggccgctgcgctggatgggtaccgggctgctgtgcgcgaccctgaccggggtcggtgccatgctgctgggttacccgttcctcaccacccataccgcccacttgcacctgccgttgctgggtgatgtgcacgtggccagcgcgctgttcttcgacatcggcgtatacaccgtcgtggtcggctcgacgttgctgatcctcacagccctggcgcaccagtcggtgcgcgcctatcgcccgggcaacccggcaaaaaccagccaagcaggagccgcc

SEQ ID NO: 32106 - DNA, 651 bp, Pseudomonas putida
ttgctaaggttctgcgcaacgagaatgctggggctcatggagaatccgatgcgagtgtggtggttgagtgccggtctggccctgtattgcctggcccagagcgcagcggcaggaacactgctggttgttggcgatagtatcagcgccggttttggcctggatagccgtcagggctgggtgtctctcttgcaggcccgcctcagggacgaaggttttgacgaaaaagtggtcaatgcttcgatcagtggcgataccagcgcaggtggacaggcgcggctgccggcgctgcttgcagcacataaaccaagcctggtggtgctggagctgggcggcaacgatggcctgcgcgggcagtcgcccgcacaattgcaacaaaatcttgcctcgatgatcgagcgttcgcgtcaggcaggggccaaggtgctgttattgggcatgcgcctgccgcccaattatggtgtgcgttacaccaccgcctttgccaaggtgtatgaacagctggcagcggacaaacaggttcctttggtgccgtttttcctcgaaggggtagggggagtgcctgaactgatgcaggctgatggcatccatccggcccagggggctcagcagcgcctgctggaaaatgcctggccagcgataaaacccttgctg

SEQ ID NO: 32107 - DNA, 846 bp, Pseudomonas putida
atgagccagcaagccatcctcgccggcctgatcggccgcggcatccaactgtcacgtaccccggccctgcacgaacacgaaggcgacgcccaggccctgcgctacctgtaccggctgatcgacgccgaccagttgcaactggacgacagcgccctgcccggcctgctcgaagccgcgcaacataccggtttcaccgggctgaacattacctacccgttcaagcaggcgatcctgccgttgctcgacgagctgtccgacgaggcccgtggtatcggcgcggtaaacaccgtggtgctcaaggacggcaagcgcgtcggccacaacaccgattgcctgggctttgccgaaggcttgcgccgtggcctgcccgacgttgcacggcgccaggtggtgcagatgggtgccggtggcgctggctcggccgtggcccatgccctgctgggtgaaggggtagaacggctggtgctgttcgaagtggatgcgacccgtgcgcaggcgttggtggacaacctgaacacccatttcggcgcggagcgcgccgtgcttggcaccgacctggccacagccttggccgaagcggacgggctggtcaacaccacgccggtgggcatggccaagctaccgggcacgccactgccggtggagttgttgcatccccgcctgtgggtggcagagatcatctacttcccgctggagaccgaactgctgcgcgcggcccgggcactgggctgccgcacgctggatggcagcaacatggcggtgttccaggcggtgaaggcattcgagctgttcagcgggcggcaggcggatgcggcgcggatgcaggcgcactttgccagtttcacc

SEQ ID NO: 32108 - DNA, 354 bp, Pseudomonas putida
atggctcgtgttaagcgcggcgttatcgctcgtaagcgtcacaaaaaaattctgaaactggctaaaggttactacggtgcacgttcgcgcgtattccgtgtagccaagcaagcggtcatcaaggcaggccaatacgcctaccgcgaccgtcgccagaagaagcgtcagttccgcgcactgtggatcgctcgtatcaacgccggtgcccgcaccaacggtctgtcctacagccgtctgattgctggcctgaaaaaggcttcgatcgaaatcgaccgtaaggttctggctgatctggcagtgaacgaaaaagcggcgtttgctgcgattgtcgagaaagctaaagccgttctggct

SEQ ID NO: 32109 - DNA, 549 bp, Pseudomonas putida
atgactattaagcgtgaaatgagaaacgataagcgtgctgtaccgaaggccccgatcaacgagaatatctcggcccgcgaggttcggttaattggcgcagacggcgagcaggttggcatcgtctcgattgatgaagcgctgcgtatcgctgatgaagcgaagctggacctggtagaaatctctgcagacgcggtaccacccgtctgcaaggtcatggactacggtaagcacctcttcgagaagaagaagcaggctaacgaagccaagaaaaaccagaaacagatccagatcaaagaaatcaagtttcgtccagggacggaggatggggattaccaggtaaaactacgcaacctggtacgtttccttaccgatggggacaaggccaagatctctctgagattccgtggtcgtgagatggcccaccaggagctgggcatggagctgttgaagcgggtcgaagccgacctcgccgaatacggcaccgttgagcagcatccgaagatggaaggacgccagcttatgatggtcatcgcccccaagaaaaagaag

SEQ ID NO: 32110 - DNA, 210 bp, Pseudomonas putida
atgtccaatcgccaacaaggcaccgtcaaatggttcaatgatgagaaaggctacggcttcatcaccccagcaggcggcggcgacgacctgttcgtacacttcaaagccatcgaatctgacggcttcaagagcctgaaagaaggccagactgtttccttcgtcgccgagcgcggccagaagggcatgcaggctgcacaggttcgtccggag

SEQ ID NO: 32111 - DNA, 636 bp, Pseudomonas putida
gtgctgttgtccgacgacctggccaaggttgccgacgagttcgatgtactgatcgacttcactcatccctcggtgaccctgaaaaacctcgcgttctgccgcaagcacggcaaggcgatgatcatcggcacgaccggttttacagtcgaagagaagcagttgttggctgaggctggcaaggacattccaatcgtgttcgccgccaacttcagcgtgggggtcaaccttagcctcaagctgctggatatggctgcgcgggtgctgggcgatgatgtcgatatcgaaatcatcgaggcgcaccaccggcacaaggtcgatgcgccgtcgggtactgcactgcgcatgggtgaagtggttgccaatgcgctgggccgtgatctgcaggaagtggccgtgtatggccgtgaagggcaaaccggcgcgcgtgatcgcaaaaccatcggtttcgctaccgtgcgtgccggcgatgtggtgggcgatcacaccgtgttgttcgctgccgaaggcgagcgcctggaaatcacccacaaggcctccagccgcatgactttcgccaagggtgccgtgcgtgcggcgctgtggctggacgggcgcgagccggggctgtacgacatgcaggatgtgcttgagctgcgt

SEQ ID NO: 32112 - DNA, 693 bp, Pseudomonas putida
atgaatgagaccctgcgtgcgcagcagtatgccttggcccgtcacctgcgcgacccacagcgccatgccccgccgcccggcgtcgaggcccggcgcctgaaggtttaccgtgagttgttctatggcgccatcgaaggcttgctggctggcagcttcccggtgatgcgccaggcgttgggcgagcagcgctggcatgcccgagtacgtgatttctacgccagttaccgttgccagacgccgttgtttaccgaaattgccgagacgttcgtcgactacttgcaacatgtggcgctggacaccccttggcagctggagctggcgcactatgagtgggtcgaggcgcaactgtacctgagcgatgccgaggacccggcgcatgacccgagtggtgacctgctggctggagagccattgttgtcttgtgtggcgcgggtcctggcctatcgttggccggtggaacgcattggcgtggactaccagccaacggctgccccagcatcgccgagcttgctgctggtttatcgcgatgcccggttgcaggtgcgctttgcccggttggcacctatggcgtatcggttgctggtggagcaggggaccggaagagagcggctgcaggcattgggcggggatgtgcagcaagggttggcattgctggaagcatttcgcgagcagggtgtcattgtcggaacagtg

SEQ ID NO: 32113 - DNA, 1350 bp, Pseudomonas putida; identical to SEQ ID NO: 31321

SEQ ID NO: 32114 - DNA, 270 bp, Pseudomonas putida
gtgaacaagtcggaactgattgacgctatcgccgcatctgcagacatcccgaaagctgtagccggccgtgcgctggacgcagtcatcgaatccgtcaccggcgccctgaagcaaggtgacgatgtggtactggttggctttggtaccttctcggtcaaggagcgcgccgagcgtactggccgcaacccgcaaaccggcaaggcaatcaagatcgaagccgccaaggttccaggtttcaaggccggcaaaggcctgaaagacgccgtcaac

SEQ ID NO: 32115 - DNA, 1104 bp, Pseudomonas putida
atgagcaacgccccgattctgctgaccccaggtcccctgaccacatcaatccgcacccgccaagccatgctggtggactggggctcctgggaccgtgacttcaaccaattgactgccagcgtctgcgaacaactgctggccatcatcgacggcgccagcagccaccactgcgtgcccctgcaaggcagcggcaccttcgccgtggaagcggccatcggcaccttggtgccacgcgatggcaaggttctggtactgatcaacggcgcgtacggccagcgcctggcgaagatctgcaaagtgctgggtcgcacctacagcaccttcgaaacggccgaagaccagccgaccaccgccgccgacgtcgaccggctgctggccgaagacccggccatcacccatgtggcgctgatccactgcgaaaccagcaccggcatcctcaacccactgcccgagatcgcccaggtgatcaaacgccatggcaagcgcctgatcatcgatgccatgagctcgttcggagcattgccgatcgatgcccgcgaaatccccttcgaagcactgatcgcggcctccggaaagtgcctggaaggcgtacccggcatgggcttcgtcttcgccgaaaaaagcgccctggcggccgccgaaggcaatgcccactcgctggccatggacctgcacgaccagcacgcctacatggccaagaccgggcaatggcgcttcaccccgcctacccacgtggtcgcggccctgcacgaagcactgcagcaatacaacgaggaaggtggccttccggcccgccaccagcgctacgcagacaactgcaagacgctgctcgacggcatggcagccatcggcctgcgcagtttcctgcctgccgagatccaggcgccgatcatcgtcaccttccacgcccccaccgatgcccgctaccagttcaaggacttctacgagcgggtcaaggccaagggtttcattctctacccgggcaagttgacccaggtcgaaaccttccgcgtcggctgcatcggcgtggtcggggcggacggcatgcaggccgccgtgaatgccgtggccgaggtgctgcgggaaatggaagtgctggatatc

SEQ ID NO: 32116 - DNA, 1332 bp, Pseudomonas putida
atgaaccctactgccaagcccgaactgctggcccccgccggcaccctcaagaccatgcgctacgcgtttgcctacggcgccgatgcggtctacgccggccagccgcgttacagcttgcgggtgcgcaacaacgagttcgatcacgccaacctggcattggggatcgaggaggcgcacgccttgggcaagcgcttctacgtggtggtcaacatcgccccgcacaatgccaagctcaagaccttcctcaaggacctggcacccgtgatcgagatggcgccggacgcgctgatcatgtccgaccccggcctgatcatgctggtgcgccagcacttcccacagatgccggtgcacctgtcggtgcaggccaacaccgtcaactgggccagcgtgcagttctggcagcaacttggcctgagccgggtgatcctgtcgcgggagctgtcgctggacgaaatcgaggaaatccgccagcaggtgccgggcatggaactggaagtgttcgtgcacggcgccctgtgcatggcctattccggccgttgcctgctgtcgggctacctcaacaagcgtgacgccaaccagggcacctgcaccaatgcctgccgctggaagtacgacgccacgccggccaccgaaaacgccaccggtgacatcgtgcgccaagtgcaacccaccctgggcctgggcgcacccaccgaccaagtgttcctgctgcaggaaagcaaccgccccggcactgaaatgccggcgttcgaggatgaacacggcacctacatcatgaacgccaaggacctgcgcgccatccagcacgtcgagcgcctggccttgatgggcgtgcattcgctgaagatcgagggccgcaccaaatcgcacttctactgtgcccgcgcggtacagtcgtatcgccaggcgatcgacgacgcggtggccgggcgaccattcgaccgcgccctgatgggcaacctcgaatccctggcgcaacgcggttacaccgaaggtttcctgcgccgccacgttcacgacgagtaccagaactaccagcgcggcaactcggtgtccgagcgccagcaattcgtaggcgaactgactggcgtgcgcgtcgacggcctggccgaggtcaaggtgaagaaccgcttcgccgtgggcgaccatttggaactgatgaccccgcgcggcaactaccacttcgacctgcaccgcctgtgcaaccgccagcagcacgccatcgaggtcgcaccgggcgatggccatgtggtgtatctgccgatcccggaacaggttgccctcgactacggcctgctgatgcgcgacctgcgcatcgacgaagcagcaagc

SEQ ID NO: 32117 - DNA, 894 bp, Pseudomonas putida
atgtccaaacgcctgatgccttcgaccaccgcccttcagtgcttcgaagcggccgctcgccacctcagcttcacccgcgcggcccaggaactgcacctgacccagagcgccgtcagcaagcaggtcgcgcagcttgaggacatgctctcgcactcgctgttccagcgcattcgccggcgcctgcacctgaccccggccggcgcgctgtacctcaccgaagtgaacaagatcctcacccagatcgacatatccagccgctacatcctcagctacggcgacgaaaccgaagtgctgcgcatcgccacccagccgaccttcggcgcccgctggctggtgccccggctcaagggttttggtgaccgctacccacgcattcacctggatgtgcgcaacgagctggagccattcgacctggtacaggccaaggcggacgtcgcctttttcttcggccagggcacctggcccggggcgacctgcatcgagttgttcagcgaagaagtggtgccggtgtgcagcccgcagctgctggccagccaccgtttcgacagcgcccaggcgctgactgagcaccgcctgttgcaatgcgtgtcgcggccggaggcctggcatgaatggttcctggggcttgggttgcatagccagaacagctaccacgggccgcgcttcgacacgttctacctgtgtatccgcgcggccatctccggctgcggcatagccctgattccccgctatctggtggccgaagagctgagcgaaggcaagctggtggtggcctgggaccaccctgtggcaagcaacgggaggcacttcatcgcgcatgccgagcatgcggccgaagtgcccaagatcagggccttcgtgcagtggatccgggagcgggtggctgaaggcgat

SEQ ID NO: 32118 - DNA, 3705 bp, Pseudomonas putida
atgtccgaccgcagcgctcgtctccaagcactccagaacgcactcaaagagcgcatcctgatcctcgacggcggcatgggtactatgatccaaagctaccgcctggaggaacacgactatcgtggcacgcgttttgccgattggccaagcgatgtgaagggtaacaacgaccttttgctgctcagccgcccggacgtgatcgccgccatcgagaaggcctacctggatgccggtgccgatattctcgaaaccaacaccttcaacgccacgcagatttcccaggccgactacggcatggagtcgctggtttacgagttgaacgtcgaaggcgcgcgcatcgctcgccaggttgccgatgccaagaccctggagacgccggacaagccgcgcttcgttgccggcgtgctcggccctaccagccgaacctgctcgatttccccggacgtcaacgacccagggtttcgcaacgtcaccttcgacgagttggtagaaaactacatcgaggccacccgcggcctgatcgaaggcggcgccgacctgatcctgatcgaaaccatcttcgacaccctcaacgccaaggcggcgatcttcgccgtgcagcaagtgttcgaggacgacaacgtcgaactgccgatcatgatctccggcaccatcaccgacgcctccggtcgtaccctgtcgggccagaccaccgaagcgttctggaactcggtgcgtcacgccaagccgatttccgtgggcctgaactgcgccctcggcgccaaggacctgcgcccgtatttggaagagctggccaccaaggccgatacccacgtgtccgcccaccccaacgccggcctgccgaacgccttcggcgagtacgacgaaaccccggccgagatggccgcggtggtcgaagaattcgcggccagcggcttcctcaacatcattggcggctgctgcggcaccacgccggggcacatccaggccattgccgaagccgtggccaagtacaagccgcgcgagatcccggaaatcgccaaggcctgccgcctgtcgggcctggagccgttcaccatcgaccgccagtcgctgttcgtcaacgtcggtgagcgcaccaacatcaccggttccgccaagttcgccaggctgatccgcgaagagaactataccgaagccctggaagtcgccctgcagcaggtcgaggccggcgcccaggtaatcgacatcaacatggacgaagggatgctcgactcccaggcggccatggtccggttcctcaacctgatcgcgggtgagccggacatttcgcgcgtaccgatcatgatcgactcgtccaagtgggaagtgatcgaagccggcctcaagtgcatccagggcaagggcatcgtcaactccatttccatgaaggaaggcgtcgagcagttcaagcaccacgcccgcctgtgcaagcgctatggcgctgccgtggtggtcatggccttcgacgaagtcggccaggccgacacagccgcgcgcaagaaggaaatctgccagcgcagctatgacatcctggtcaacgaagtgggcttcccgccagaagacatcatcttcgacccgaacatctttgccgtcgccaccggtatcgaagagcacaacaactacgccgtcgacttcatcgaggcctgtgcctatatccgcgaccacctgccccacgccctgagctcaggtggtgtgtccaacgtgtcgttctcgttccgtggcaacaacccggtgcgtgaagcgatccactcggtgttcctgtatcacgcgatccagaacggcctgaccatgggtatcgtcaacgccggccagctggagatctacgacgagatcccggcccagctgcgtgaaaaggtcgaggacgtggtactcaaccgcaccccgcatggcaccgatgcactgctggccatcgccgacgactacaagggtggcggcgcaaccaaggaagtggaaaacgaagagtggcgctcgctgccggtggaaaaacgcctggagcacgcgctggtcaagggcatcaccgcgttcatcgtcgaagacaccgaagcatgccgccagcagtgcgcgcgccccatcgaagtgatcgaaggcccgctgatgaacggcatgaacgtggtcggcgacctgttcggcgcgggtaaaatgttcctgccgcaggtggtcaagtcggcccgcgtcatgaaacaggccgttgctcacctgatcccgttcatcgaagccgaaaaaggcgacaagccggaagccaagggcaagatcctgatggccacggtgaaaggcgacgtgcacgacatcggcaagaacattgtcggcgtggtgctgggctgtaacggatacgacatcgtcgaccttggcgtgatggtaccggcggagaagatcctgcaaacggcccgcgagcagaagtgcgacatcatcggcctgtccggcctgattaccccgtcgctggacgaaatggtccacgttgcccgcgaaatgcagcgccagggcttcgaactgccgctgatgatcggtggcgccaccacctccaaggcgcacactgcagtcaagatcgagcccaagtacagcaacgacgcggtcatctacgtcaccgacgcttcgcgcgcggtcggcgtggccacccagttgctgtccaaagaactcaagccaggcttcgtcgagaagacccgcctggaatacgtggacgtgcgtgagcgtaccgccaaccgcagcgcccgcaccgaacgcctcagctacgcccaggcgatcgccgccaagccgcagtacgactgggccggctaccagccgacggcgccctccttcaccggcgtcaaggtgctggaggacatcgatttgcgcaccctggccgagtacatcgactggacgccgttcttcatctcctgggacctggccggcaagttcccgcgcatcctcaccgacgaggtggttggcgaggccgccacggcgctgtacaaggatgcccgcgagatgctcgacaagctgatcgatgagaagctgatcagcgctcgcgcggtattcggcttctggccggccaaccaggtggacgatgacgacatcgaagtctacggcgaagacggccaggcactggccaccctgcatcacctgcgccagcagaccatcaagccggacggcaagcccaactggtcgctggccgacttcgtcgcaccgaaagacagtggcgttaccgactacgtaggtggtttcatcaccaccgccggcatcggtgccgaggaagtggccaaggcttaccaggacaagggcgacgactacagctcgatcatggtcaaggcactggccgaccgcctggccgaagcctgtgccgaatggctgcacgagcaggtgcgtaaagagcactggggctatgcccgcgacgagcacctggacaacgaggcgctgatcaaggaacagtacagcggcatccgccctgcgccgggttatccggcctgccccgaccacactgaaaaggaaactctgttccgcctgctcgatggcaccgccatcggtgaaaccgggccgagcggggtgtacctcaccgagcacttcgcgatgttcccggcggcggcggtcagcggctggtacttcgcccacccgcaggcgaagtattttgccgtaggcaaggtcgacaaggaccagatcgagcgttacagcgcacgcaaaggccaggatatcagcgtgagcgagcgctggctggcgcctaacctggggtatgacagc

SEQ ID NO: 32119 - DNA, 633 bp, Pseudomonas putida
atgactattggtgtaatcggtcgcaagtgcggtatgacccgcattttcaccgaagaaggtgtctccattccggtcacggtcattgagatcgagccgaatcgcgtcacccagttcaaaactgaagaaaccgatggctaccgtgcagtgcaagtcactgtcggcgagcgtcgtgcttcgcgtgtgactgccgctcaggcaggccacttcgccaaggccaacgttgccgctggtcgcggtgtttgggagttccgtcttgaagaaggcgatttccaggctggcgatctgatcaaagctgaactcttcactgcaggccagctggtagacgttactggtcagtccaaaggtaaaggcttcgccggtaccatcaagcgctggaacttccgtggtcaggacaacacccacggtaactccgtgtcgcaccgtgttcctggttccatcggccagtgccagactcctggtcgtgtgttcaagggcaagaaaatgtccggtcacatgggcgccgagcgcgtgactgttcagtccctggaagtagttcgcgtagacgctgaacgcaacctgctgctgatcaagggtgccgtacctggcgctactggcggcgacgtggttgtacgtccagctgtcaaggctcgcggt

SEQ ID NO: 32120 - DNA, 801 bp, Pseudomonas putida
atgagcgttccttccttcggcctcggcaccttccgcctcaccggccaaaccgtcatcgactcggtcaagtctgccctggcagtcggctaccgtgtcatcgataccgcacagatctacaagaacgaagccgaagtcggccaggccatcgccgaaagcggcgtgccgcgcagcgagctgttcatcaccaccaagatctgggtcgacaactacgccgccgacaagctgatccccagcctgcgtgacagcttgcagaaactgcgcaccgactacgtcgacctgctgctgatccactggccagcgccgggcaacggcgtagaactgcccgagtacatgaaggccctggccgacgccaagcagcaaggcctggctcgccagatcggcgtttccaacttcaacatcgagctgaccaggcaagccattgccgtggtcggcaaaggggaaatcgccaccaaccagatcgagctcagcccctatctgcagaacagcaagctgaccgcgttcctcaaggaacaagggatcaccgtgacctcgtacatgaccctggcctacggcaaagtgctaaaagacccggtactggcccagatcgccgccaagcacaaggctaccgtcgcccaggttgccctggcctgggccctgcaactgggctatgccgtgatcccgtcgtcgaccaagcgtgaaaacctggccagcaacctgcttgcccgtggcctgacgctggacaccgacgacatggcacgcatcgccaagctggagcgcaacggccgcgaggtcagccctgacggcctggcgccaacctgggac

SEQ ID NO: 32121 - DNA, 1155 bp, Pseudomonas putida
gtgctcttcgcgttggccattggtgcctttggcatcggcactaccgagttcaccccgatggggctgctgccggtcatcgcccagggcgtggaggtgagcatccccagcgccggcatgctgatcaccgcctatgccattggcgtgatggtcggcgcgccgatcatgaccctgctgttcagccgctttgggaagcgcgctgcgctgatggcgctgatggccatcttcacccttggcaacctgctgtcgtcactgtcgccggactactacaccctgctcgcctcgcgactggtcaccagcctcaaccatggtgcgttcttcggtctgggagccgtggtggcagccagcgtggtgcccaaggagaaacaggccagcgccgtggccaccatgttcatgggcctgacgatcgccaacatcggcggcgtgccggccgccacctggatcggccagcagattggctggcgcatggcatttgccggtaccgccgtactcggcctgctggccatggccgcactgtggtacgccctgcccaagggtgaacgcggcagcgtgccgcatgtgcgcaaggaactggcggtcattgcccgccccagcgtgctgctggcaatggccaccaccgtgctcggtgccggtgccatgttcaccttgtacacctacgtggcgccggtgctggccgaactgaccggtgcctcggacggcttcgtaaccttgggactggtactgatcggggttggcttcacccttggcaacagcctgggtggccgcctggccgactggtcgctggatggcgcggcgaagatcttcctcgccgtgctggcgctgatcatgctggcgatgcccctggtactgggtagccacatcggcgctgccatcgccctgctggtctggggcatgttcaccttcgccgtggtaccgccgctgcaaatgcgcgtcatgactgccgccatcgaggcgccaggcctggcgtcgtcgatcaacgtgggtgcgttcaacctgggtaacgccgtgggcgcggcgctgggtggtgcggttatcagcctgaacctgggctacgccgccgtgccgatggccggaggtgtgctggcagctgcggggctgttgctggtatggctgggcgggcgccacaaggtcgccggcaagaccgcagccgatatggcc

SEQ ID NO: 32122 - DNA, 1146 bp, Pseudomonas putida
atgaccgtgacgctgtcccccctgcagatcgactgcgatttcgactccggcaacatacaggtactggatgccagcaacccggcccaggtacacctggccattcgcccggacacccacagcggccactaccagtggttccacttcaaggtcagcgggctcacaccggggcaggtccatcgcttcagcctggacaacgcttctggctcctcgtacaagaatgcgtggagcggctacaacgctgtggccagctacgaccagcagcgctggttccgtgtgccaagccagttcgacggtacggcgctatcgttcgaggtgaaggctgaacaggaccagatctggttcgcctacttcgagccctacccgcgtgcccgccacaaccagctgatcgaacgtgcctgccaactcccgggggtcgagttgctggccagcggccgcagtgtccagggccgtgatatccccctgctgcgggcaggcgacggtgccgaaggcaagcgcaagctgtggctgattgcccagcagcatccgggcgagcacatggccgaatggttcatggaaggcgtgatcgaccgcctgcaggccaacgatacggtggtcgagcaattgctggccaaggccgacctttacctgatccccaacatgaaccccgacggcgccttcctcggccacctgcgcaccaacttcaagggcaaggacctcaaccgcgcctggcaggacgccagcgtcgaattcagcccggaagtgttctttgcacaggcgcagatgaagcagtacggtgtggatgccttcatcgacgtgcacggtgacgaagagatcccccacgtgttcacggccgcatgcgagggcaacccgggttacacccctcggctggccaaactcgaagagcagttccgtagcaccttgtgcagcctgactcgcgacttccagacggtgcatggctatacccgtgacgagcccggacaggcgaacacgacgctggcctgcaatgcggtgggcatggcccatgactgcctgtcactgacgctggaaatgccgttcaaggaccatgacgacgcgcccgatgccgtcaccgggtggtcgggggcgcgctccaaggcactggccggggcggtgctggagaccttggccagcatggttggggatttgcgc

SEQ ID NO: 32123 - DNA, 840 bp, Pseudomonas putida
ttgcccgcgaagaggccagacaggcaaccgctagaaaggtgcatccccaaggatggtcgcccggtgcatcacccgccggttcggtcggtaatcatccaccgcaaaatgctgggtcacgcggttgtcccagaacgccacgtcattctcctgccaacgccagcgaatgctgaactccggtcgcgtcgcatgggcgaacagcagcctcagcagcgcatcgctttccagttcgctcagttcattgatgcgtgtagtgaatccttcattgacgaacaacgccttgcgcccgctcaccggatgcgtgcgcaccaccgggtgcgacagcggcgggttgttgcgccgggtagcctcccagcgcgccaggtcttgcggcgtggtgccaaagcgctccagcgggaacgacttggtgaagtcgtgggtagcggtcagcccgtccagcatttcacgcagcggcgccgacaaggcctcgaaggccgcaatgccgctggcccaaagggtatcgccaccgtaagcaggcaattgcttggcgctgagtaccgcgcccagtgccggggtcggcaaaaaggtcacgtcggtgtgccacacggcgttgtcgcgcacatcggtaaccgccgtgtcgagcacaagcacctgtggggtgtctggcacgttggggtaaatcgggtggatgtgcaggtcgccgaagcgtgcggcaaagcgcgcctgctgttccgggttgatcggctggtcgcggaggaacagcacctggtgctggagcagtgcctgttcgatggcatcgcgctcttctgcgctgatatcgcggctgatgtccacgccgctgatctgggcgccgagtgctgggct

SEQ ID NO: 32124 - DNA, 972 bp, Pseudomonas putida
gtgcaaggctcccaccactggatatacatgatgagctcagcattacccgacgtttccgtcaccgacctggcccccagcctcagcccgctgcaatgggtcggcatgcagggtatcgacctgccggtaaggatccaagaaccgacctaccagcgtgagctgcacgcccgggcggatgtccaggtcgacctgccggcaccgcatgtcaaaggcattcacatgtccaggctgtatcgcctgctggacgcctgggggcaggctgcggcggtgtcgccggcaagcctctttgcgctgttgcaggagatgatcgacagccatcaggattgcgaaagccgcagtgccagggtgcgcctggatttcgacttgctggttcgccgccctgcactggtgaccgagggcctctctggctggaagtcgtacccggttcacgtgctcgccacgaaggtcggcggggcgctgaacctgagtatcgaggtcaggatcggctactcctcgacctgcccgtgctcggccgctctctcccggcagttgattgaggacggcttcctgcgaaccttcaaggaccagccactgctcgaagtcagcgccgtcgcgcagtggctgcgcagcaacgcgtcgctggcgacgccacatagccaacgcagcgaagctcgagtgcgcgtcacggtacctgccgatgccccggatctcgggttgctggccctgatcgaccacgtcgaaggcgccttgcgcacgccggttcagaccgccgtaaaacgggctgacgaacaggctttcgcagcactcaatgggcagaacctgatgttcgtcgaagacgctgcgcggcgtattcaggcaagcctgcacggttaccgcgatagccaagtgcacgttcgccacctggaaagcctgcacccgcacgatgcttcggcctggtccgccccgcaggccgctgcgcctgaccaacaagaatcatttgcaaccggtaatgaacgc

SEQ ID NO: 32125 - DNA, 2769 bp, Pseudomonas putida
atggccagcaaacaatgccaggtctgtggccaacccgccacgacacgggtggaggccaaggtcaatggccgccacagcatcatgctgttgtgtgatgatcactaccgccaattggtgcgccagcaaaaacgcaccctttccccactggaagcccttttcggctcgcgcagcggtttgttcgaagagttcatgggcagcgatttgctgcgcatcggagaagactcggcatccgttgccacggatgccgatgaagtggctgaagcgtcgtctggggaacctggccgcgcagcgtccggcacgccacgccgccgcagcagcgggctggccagccgcatcagcgaacactccgaggccctgttgcaggaagccgccaagcgtgccacggagttcggtcggtccgaagtcgacaccgaacacctgctattggcgctggccgacagcgacgtggtgaagaccatcctgagccagttcaagatcaaggttgatgagctcaagcgccagatcgaagccgaagccaagcgcggcgacaagccatttgaaggcgaagtcggcgtgtcgcctcgggtcaaggatgcgctcagtcgcgccttcgtcgcctccaatgagttggggcacgcatacgtaggccccgagcacttcttgatcgggctggccgaagagggcgaagggctggccgccaacttgctgcgccgctatggccttatgccgcaggccctgcgccagtgcgtcagcaaggtggttggcaagggtgcagaggatggtcgcgccgaggcaccgaccgaaacgccggagctcgacaagtactcgcgcgatctcaccaggatggcgcgcgatggcaagctggacccggtcatcgggcgggcacaggaaatcgaaaccaccattgaggtactggcgcggcgcaagaagaacaacccggtgttgatcggcgagcctggcgtgggcaagacggccatcgtcgaggggctggcgcagcgcatggtggccggcgaggtgcccgagacgctgcgcgacaagcgcctggtcgaactgaacatcaattcgttggtggctggcgcgaagtaccgaggcgagttcgaggagcgcgtgcagaaggtgctgaaggaaatcgccgagcatcagggcgagctgattctcttcatcgacgaagtgcacaccatcgtcggggcaggccagggcggtggagaaggcggcttggacgtggccaacgtcttcaagccgatgatggcgcgtggtgagctgaacctgattggcgcgacgacgctcaacgagtaccagaagtacatcgagcaggacgctgcgctggagcggcgtttccaaccggtcgtggtgcccgagccaacggtggcgcagaccatcatgatcctgcgcggcctgcgcgacaccttcgaagcgcaccacaaggtcagcatcaccgaggaggcgatcatcgctgccgccgaactgtccgaccgctacgtcagcgcgcgctttctgccggacaaggccatcgatctgctcgatcaggctgccgcccgcgtcaagttatcggcgacggcgcgtccggttgcggtgcaggaaatggagtcggagttgcaccagttgcgccgcgagcaggactacgcggcttcgcgcaagcaatatgacaatgcggcgcagatcagcaagcgcgtcgaagccacggaggccgaactcaagcagcgggtcgaggagtgggagcgcgagcgcggctcgggcagcaccgaggtcaaggcggaacatgtggcgcaaatcgtctcgcggctaaccggcattccggtcaatgaactgacggtggaggagcgcgagaagctgttgcacctggagcagcggctgcatgagcgcctggtggggcaggacgaggcggtgcgtgcggtggcggacgcggttcggctgtcgcgcgctgggctgcgcgaaggcagcaagcccgttgccacgttcctgttcctgggctccaccggtgtcggcaagaccgagctggccaaggcgctggccgaaaccatctacggcgacgagagcgccctgttgcgtatcgacatgtcagagtatggcgagcgccattccgtggctcggctggtgggcgcgcctccgggttacgttggttatgacgaaggcggccagcttaccgaaaaggtccggcgcaagccctatagcgtgctgctgctcgacgaaatcgagaaggcccacgccgacgtctacaacatcctgctgcaggtgttcgacgacgggcgactgaccgatggcaaggggcgcgtggtggacttcaccaacaccattatcatcgccacgtccaacctgggctccgacattattcagcggcggctgaaggcgcctggagcggctggtgaggagtacgagaagaccaaggtcgaggtgatggaagtgctgcgcgggcactttcgccccgagttcctcaaccgaatcgatgagatcatcgtcttccatgcgctgggcaagcaggagatccgccacattgttggcctgcaacttgagcgcgtagcccgcaatgccgcgagccagggcgtgacgctgacgttcgacgagacactggtcgatcacttggcgcaagtcggctacaagcccgaattcggtgcccgcgagctcaagcgactgatccgcagcgagctggagacggcactggcacgtgaaatgctcggcggcggcattggcaagggtgatcacgcccatgtgcgctgggacgacaaggcggagcgggtcgggttcgaccgccggcaagccgcgccggccaaagagctcgacagtgaaaatgcg

SEQ ID NO: 32126 - DNA, 789 bp, Pseudomonas putida
atgactttccagcacatcctgttttccatcgaggacggcgttgccttcctttcattgaaccgccccgagcagctgaacagcttcaatacggccatgcacctggaggtgcgcgaagcgctcagacaagtgcgccagagcagtgacgcgcgggtgctgctgctgacggctgaaggccgcggcttctgcgccggccaggacctgtccgaccgcaacgttgccccaggcgccgagatgccagacctgggccagtcgatcgacaagttctacaacccgctggtgcgcaccctgcgcgacctgcctttgccggtgatatgtgcggtcaacggcgtggcggccggtgccggtgccaacattcccttggcctgcgacctggtgctggccgcccgctcggccagtttcatccaggccttctgcaagatcggcctggtgccggactccggcggtacttggctgctgccgcgcttggtcggcatggcccgggccaaggcgctggccatgctgggcgagcgccttggcgccgaacaggccgagcaatgggggctgatctaccgcgtggtggatgatgcagcgctgcgtgatgaagccctcaccctcgcccgccacctcgccgcccagcccacctacggcctgacactgatcaagcgcagcctcaatgccagtttcgacaatggttttgaggcgcagctggagctggagcgcgacctgcagcgcctggcagggcgcagcgaggactaccgcgaaggcgtgaacgccttcatgaacaaacgcacgccagccttcaaggggcgc

SEQ ID NO: 32127 - DNA, 1515 bp, Pseudomonas putida
atggccgcactcgcaagcaatgtgcaggtggcggtgatcggtgccggcgccatgggcgccggtatcgcccaggtcgcggcccaggccggccaccccgtcaagctctacgataaccgcccgggtgctgccgcccaggcggtgacgggtatcgatcgccaactggcccggctggtggacaaaggaaagttactggccgctgaacgcgaaacgatcaatgcccgcctgtgcccggtcgatacactcgaagccttggcagatgccggcctggtgattgaagccatcgtcgaaaacctgcaggtgaagcaggcgctgttcagtcagctcgaaaccctgtgcgcggccgactgtatccttgccagcaatacttcgtcactgtccatcaccagcctcgccgctggccttgaacgcccgcagcacgtggtcggtatgcacttcttcaacccggcaccgctgatggcgcttgtcgaggtggtgtcgggcctggcaaccgaccctgcagtcgccgcatgcatctacgccactgcccaggcctggggcaagcagccggtccatgcgcgctctacaccgggcttcatcgtcaaccgggtagcgcggccgttctatgccgaaagcctacgcctgctgcaggaaggtgccgccgattgcgccagcctggatgcgctgatgcgtgactcgggtggcttccgcatgggggcgttcgagctgaccgacctgattggccatgacgtcaattacgctgtcacctgttccgtattcgatgctttctatggcgatttccgcttccagccttcgctggtgcagaaggaactggtagacgccggtcacctggggcgcaagaccggccaaggcttctatcgctatgccgaaggcgtcgagcgcccgcagccggccgaactgcacagctccgcctgcgcagaggcctgcgttgtcgagggcaacctgggggtgatgcagccgctggtcgagcgccttcgccaaagcggcattgccgtgacccagcgcgccggtagtggcctgatccaggtgggcgacgccaccctggccctgtccgacggccgcctggccagccaacgtgcccgtgaggacgggctgcgcaacctggtgctgctcgaccttgcgctggactacagcagcgccacgcgcattgccatcagctggtcagcggataccagcgacagcgcccgtgaccaggccgtagccctgctgcagcgtgccggcctgaaagtgaccggtgtcgccgacctgcccggcctggtggtactgcgcaccgtggcaatgcttgccaacgaggccgccgatgcggtgcttcagggcgtcggcagcgccgccgacatcgacctggccatgcgcgccggcgtcaattacccctgcggcccgctggcctgggcggcgaacatcggtattgcccataccctgcgcgtgctcgacaacctgcagtgcagctatggcgagagccgctaccgcccttccctgttgttacgccgctgtgaagccaaaggaggcaccctacatgac

SEQ ID NO: 32128 - DNA, 1311 bp, Pseudomonas putida
atgtaccatgatgccgatcgtgccctgctggacccgatggaaaccgccagcgtcgatgccctgcgccagcaccagctggagcgtctgcgctggagcctgaagcacgcctacgacaatgtgccgttgtaccgccagcgctttgccgagtacggcatccaccctgatgacctcaagtgcctggaagacctggcgaagttccccttcaccggcaagaacgacctgcgcgacaactacccctacggcatgtttgccgtgccccaggaagaagtggtgcgcctgcatgcctccagtggcaccaccggaaagccgacggtggtcggctacacccagaacgatatcgacacctgggccaatgtggttgcccgttcgattcgtgcggccggcgggcgcaaaggtgacaaggtgcatgtgtcctacggctacgggctgttcaccggcgggctcggcgcgcactacggtgccgaacgcctgggctgcaccgtgatccccatgtccggtggccagaccgaaaagcaggtgcagctgattcgcgacttccaccccgacatcatcatggtcaccccgtcctacatgctcaacctggctgatgaaatcgagcgccagggcatcgacccgcacgacctcaagctgcgcctgggcatttttggtgccgagccgtggaccgatgagctgcgccgctcgattgagcagcgtatgggcatcaatgccctcgatatctacggcctttcggaaatcatggggcccggggtggcaatggagtgcatagagaccaaggacggcccgaccatctgggaagaccacttctatcccgaaatcatcgaccctgccaccggcgaagtgctgccggatggccaactgggcgagctggtattcacctcgctgagcaaggaggcattgccgatggtgcgctaccgcacccgcgacctcacccggctgctgccgggcaccgctcggccgatgcggcggatcggcaagatcaccggccgcagtgacgacatgctgatcattcgcggggtcaatgtgttcccgactcagatcgaggaacaggtgctaaaaataaaacagctttctgagctttatgagattcatctgtatcgcaatggaaatctggacagtgtccaggtgcacgtggagctgcgtgcagagtgccagcaccttgacgagggccagcgcaagctggttgtcggggagttgagcaagcagatcaagacttacatcggtatcagcacccaggtgcacctgcagccctgcggcacgctcaagcgctccgagggcaaggcgtgccacgtgttcgacagacggttggccagc

SEQ ID NO: 32129 - DNA, 837 bp, Pseudomonas putida
atgcgtacgctcatcgccttctgcctgctggccctgtgcctaccggccaccgctgaccagcgcctgttctaccaacccctcaaccgcgatgccagcgtcacacccgcccagtggcagcaactgtggcaagccaccgcggcccaaggtggcaaaaccctgatcgtgcaatggagtgcctatggcgacagcgatttcggcggtgcccagggctggctggccaacagcctgcgcaccgcgcgtgccgagggcttgcagctggtgctggggctgtacatggacccggcctactaccagcgcctcgacgagctggatggcgagggcctgaacagctactggaaagcgcagctggggcgctcgctcagccagtaccagcaactgcgccaggcctggcagttgccagtggacggctggtacctgcccatggagctggacgaccagcatctgcgcgagaccgaacggcgcgatgcgctgtacagccagttgcaggccttcaaccgccagttggacaagccgttgcatatcagcgccttcagcacaggcaagctgacgccgcgggtcaatgccgtctggctggatcaactggccggcttgggcttgactgtgtggtggcaggatggcgccggcaccgggcgtttgccggcgttggtgcgtcagggttacgagcaggcgttgccgtgccgggtgggtgtggtgcgcgaggcgttccgccaggtgagcgcgccggagcaggcgtttcgggcggagcccgccgagcccagggtgggtagcgggtgccatgccgaggcagtgtttgccttgcgctaccggccctgggcccggggtatcttgccacagcaa

SEQ ID NO: 32130 - DNA, 1641 bp, Pseudomonas putida
atggccaaggccgccgatgtcgttgtgcaatgcctggaaaacgaaggtgtcgagtatgtattcggcattcccggtgaggaaaacctcgacctgctcgaatccctgcgcaagtcgaagatcaagctggtactgacccgtcacgagcagtccgcaggtttcatggctgccacctacggtcgcctgaccggcaagaccggcgtcagcctgtcgaccctcggccctggtgccaccaacctggtgaccgccagcgcctacgcctacctgggcggcatgccgatgatgatgatcaccgggcagaagccgatcaagaagtccaagcagggtcgcttccagatcattgacgtgtgcggcatgatggaccccatcaccaagtacacccaccagttcgcctcggccgacaacatcccggcccgcatgcgcgaagccttccgcctggccgaagaagaaaagccgggtgcggtgcacctggagctaccggaagacatcgccgccgagcagaccgacgcgctgccgatcccgcgcagcctgcaccgccgcccgctggccgagcacgtggccattgaagctgccgtcgaaaaactgcagaacgcgcgtaacccgatcctggtgatcggtgccggtgccaaccgcaagatgaccgccaaggtcctcaagcagctgatcgacaagaccggcatcccgttcatcaccacccagatgggtaaaggcgtggtcgacgagcgccacccgcgcttcctcggcaacgctgcgctgtcgtcgggcgacttcgttcaccgcgccgtcgaagccgccgacctgatcatcaacatcggccacgatgtgatcgagaagccgccgttcttcatggtccgtggcggcaccgaagtcatccacatcaacttccgctctgccgaagtcgatgccgtgtacttcccgcaagtagaagtgatcggcgacatcgccaacgccgtgtggcagatcagtgaagcactgaacgacacgtcgcactgggacttcacccgcctgatggccatccgtgaagccaacgaagcacagatcgccgaaggcgccgacgacgaccgcttcccggtctacccacagcgcatggtggctgacatccgtcgtgtactgccgtccgaaggcatcgtcgccctggacaacggcatctacaagatctggttcgcccgcaactacaaagcgcacaagccaaacaccgtgctgctggacaacgccctggcgaccatgggcgccggcctgccatcggcaatggctgcgcacctggtgcacccggaccgcccggtaatctcggtgtgtggcgacggcggcttcatgatgaacagccaggaactggaaactgcagtacgtctgggcatgcacatcaccgtggtgatcctgcgtgacgacggctacggcatgatccgctggaagcaggccaacatgggcttcaccgatttcggcctggactacggcaacccggacttcgtcaagtatgccgaagcctacggcgccaacggccaccgcgtggaaagcgccgaaggcctgctgccgctgctggagcactgcatcaagaccccaggtgtgcacgtgatcgactgcccggtcgattacagcgagaacgaccgcatcctcaacagcgagctgcgtgagcgcgccctggcggtg

SEQ ID NO: 32131 - DNA, 1365 bp, Pseudomonas putida
atgcttaagccgctgtcactcagccagctgaccacagcactgaagggtcaacacatcggtggcgacgccacgttcaccggcgtcagcatcgatagccgcagtgtcagcgccgggcaacttttcgtcgccctggccggcccgcgtttcgatggccatgactacctggcagatgtgaaagccaaaggcgcggtagccgccctggtcgagcgtgaagtagccgatgtcgacctgccgcagttgcaggtggccgattgccgcctggccctcggccagctcggtgcattgaaccgcgccgctttcgacaagccagtggtggccattaccggttccagcggcaagaccacggtcaaggaaatgctcgccagcatcctgcgcacccgtggcctggtgcacgccacccgtggcaacttgaacaatgacctcggtgcacccctgacactgctggagatcgccccggaacacagcgcggcagtgatcgagctgggcgcctcgcgcattggcgaaatccgctacaccgtaggcctgacgcaaccgcaggtggtcattatcaacaacgccggtactgcccatgttggcgaattcggcggcccggacaagatcgtcgaagccaagggcgagattctcgaaggcctgggccagggcggtattgccatcctcaacctggacgacaaagcctttgacatctggaaggcgcgtgccggtgcgcacaaggtcgtcagtttcgcacgcagcaacccgaaggccgatttccacgcgtcagacattggtcgcgatgcccgtggctgcccgtccttcaccctgcatggcgccggtgaaacagtagccgtgcaactcaatgtgctgggtgaacacaacgtcagcaacgccctggccgccgccgccgctgcacatgccgttggtctgagcctgagcggcatcgccgccggcctggctgcggtgcaaccggtcaaggggcgtaccgtggcgcagatcgcgccgaacggggtacgggtaatcgacgacagttacaacgcaaatcccacctctatgtgcgcagccattgatatactcgccggcttttccggacgcaccgttctggtgcttggggatatcggcgaattggggcaatgggcggaagaaggccaccgtcaggtgggtgactacgcgcgtggcaaggtcgacgccctgtacgcagtgggttccaacatgacacatgcggtcaaggcgttcggcgccaatggccgccatttcgctactcaagctgagctgatcgatgcggttagcgccgagaatgccagtgacaccactatcttgatcaagggctcgcgcagcgctgcgatggaaaacgtcgtggcggcattgtgcggtgccagcggggagaaacat

SEQ ID NO: 32132 - DNA, 1746 bp, Pseudomonas putida
atgatgaagctcgaaggcgcactctacccgtggcgcttccgcgtagtgatcggcttgctggcgatcatggtcggcgccatttgctggcgcatcatcgacctccaggtggttgaccgtgacttcctcaagggccagggcgatgcacgcagcctgcgtcacatccccatcccggcgcaccgcggcttgatcaccgaccgcaacggtgagccgttggccgtgagtaccccggtcaccacgttgtgggccaaccccaaagagatgcaggcctccaaggagcgctggccgcaattggccgctgcgctggggcagaacccgcagcagttgatcgagcgcctgacccagcaggccaacaaagagttcatctacctggtccgggggctgacccccgagcagggccagcacgtgctcgacctcaaagtgcctggtgtgtacggactggaagaattccgccgcttctatccggccggtgatgtgactgcgcacatggtcggctttaccgacctcgacgaccacggtcgtgaaggggtggagctggcctatgaagagtggctggccggcgtgcccggcaagcgccaggtgatcaaggaccggcgcggtcggctgatcaaggacattcaggtaaccaagaacgccaaggccgggaagaccttggcgttgtcgatagacctgcgcctgcagtacctggctacccgcgagttgcgcaacgccattgccgaacaggacgccaaggccggcagcctggtgatcatggatgtcaagaccggtgaggtcctggccatggtcaaccaaccgacctacaaccccaacaaccgacgtagcatgttcccggcggccatgcgtaaccgggcgatcatcgacgtgttcgagccgggctccacggtcaagccgatctccatgagtgcggcgctgcagagtggccgctggaagccgaccgacaaggtcgaggtgtaccctggcagcctgcagatcggccgctacaccatcaaggacgtgtcgcgcagcgagggcccgattcttgatttgaccggcatcctgatcaactccagtaacgttggcatgagcaagatcgccttcgacatcggcggcgaggccatctaccgggtcatgtcccaggtcggcctgggccagtacaccggccttggcttcccgggcgaacgtgtcggcaacctgcccaaccatcgtgagtggcgcaaggccgagaccgccaccctgtcctatggctacggcgtatcggtgaccgccctgcagctggtgcatgcctacgcggcgctggccaacgacggcaagatggtgccgctgtcgatcatcaaggtcgacaagacgccggaagccgtgcaggccattccgaaggaagttgccgaaaccgttcagggcatgctgcagcaggtgatcgaagcgccgcgtggcgtcttccgagcccaggtgccgttctatcacgtggccggcaagtccggcaccgcgcgtaaggccaccgtgggtgccaagggatacaccgaaaacgcctaccgctcgctgttcgccggcttcgggcctatgagcgacccgcgctacgccatcgtcgtggtcatcgacgagccaagaaagggtggttacttcggtggcctggtttcggcgcccgtattcagcaacgtcatgtccggcaccctgcgcctgatgaacgtgccgccagacaacctgccgccacctgcaccagcaccagccgtgccatcacaagtcaatgcagcagccgccaagggagggcgtgga

SEQ ID NO: 32133 - DNA, 882 bp, Pseudomonas putida
gtgtgcgcagtgactgatgtggcaggggcttcgaaatccacggtggggacgctgtatgtggtggcaacccccatcggcaacctcgacgacatgagcgcccgggcgctgaaggtgctggcggacgtggcgctgatcgccgccgaagacacccgtcattcgatccgcctgctgcaacactttggcatcgatacgccgttggccgcttgtcatgagcacaacgagcgtgacgagggcgggcgttttctctccaaactgctggcgggtgaaaatgtggcgctggtctccgatgccggcacgcctctgatttccgacccgggctatcacctggtgcgtcaggcgcgtgctgcgggggtgagcgtggtgccggtgccgggcgcctgtgccttgatcgccgcgctttcggcggcaggcctgccgtcggatcgcttcatcttcgaaggcttcctgccggccaagcaggcggggcgccgggcgcgcctggagcaggtgagggaagagccgcgcacgttgatcttctacgaagccccgcatcgcatcctggagtgccttgaagacatggaggcggtatttggtggcgatcgtccggcgttgctggcgcgtgaactgaccaagaccttcgagaccctgaagggcttgccgctggccgagttgcgcgccttcgtagccggcgacagcaatcagcagcgtggtgaatgcgtggtgctggtcggcggctggagtgcgccggagggcgagcaggccatcagtgccgaagcgcagcgcgtgctcgatctgctattggctgagttgccactgaagcgggcggcggcgcttgcagcggaaattaccggggtgcgcaagaacctgttgtatcaactggcccttgaaaagcagaaagccgaa

SEQ ID NO: 32134 - DNA, 621 bp, Pseudomonas putida
atgggcgcaaccaacaggttagcctgctattccgatcccgctgatcactattctcatcgggttcgcctggttctggccgagaagggcgtcagcgtgcagttgatcgatgtcgatcccgcccacctgccgcggaagctggccgaggtcaacccttatggcagcgtgccgaccttggtcgaccgtgacctggcgttgtatgaatcgaccgtggtgatggaatacctcgaggagcgttacccgcacccgccgctgatgccggtatacccggtagcgcgtggcaacagccgtctgctgatgcaccgcatccagcgcgactggtgtgccttggccgataccgtgcttgacccgcgtagcagtgaagctgcccgaaccgaagcccgcaaggccttgcgcgaaagcctgaccggggtctcgccgttgttcagcgagttcgcctgcttcatgagtgatgagcaaagcctggtcgattgctgtctattgcccatactctggcgtttgccggtgttgggtatcgaattgccgcggcaagccaagccgctgctggattacatggagcgccagttcgcccgcgagcctttccaggcgagcctgtcctccgtagaacgtgaaatgcgcaagctt

SEQ ID NO: 32135 - DNA, 909 bp, Pseudomonas putida
atgattaaacaacgcaccctgaagaataccatccgtgccacaggtgtcggtctgcactccggggagaaggtttacctgaccctcaagcctgcacctgttgacaccggcatcgtcttccgccgcgccgacctcgaccctgtggtcgagatccctgcgcgtgcggccaacgtcggcgagacaaccatgtcgacgacgctggtcaacggtgacgtcaaggtcgatacggtcgagcacctgctctccgccatggcgggtctgggcatcgataacgcctacgtcgagctctccgcctcggaagtgccgatcatggatggcagcgccggtccttttgtattcctgattcagtctgccggcctggaagaacaggacgcagccaagaagttcatccgcatcctgcgtgaggtaaccgtggaagagggcgacaagcgcgccacgttcctgcctttcgaaggtttcaaggtgagcttcgagatcgatttcgatcacccggtgcttcgcaaccggacccagagcgccagcgtcgacttttccagcacgtcgttcgtgaaggaagtcagccgcgcgcgtacttttggcttcatgcgtgacatcgagtacctgcgcaagcacaaccttgcgttgggtggcagtgtcgagaacgccatcgtggtcgatgaggacggcgtgctcaacgaagacggccttcgttacgaagacgaattcgtcaagcacaagatcctcgacgccatcggcgatctgtacctgctaggcaacagcctgatcggcgagttcaagggcttcaagtccggccacgcgctgaacaaccagctgttgcgcaagctgattgctgaaaccgatgcctgggaagtggtcactttcgaagatgccagcacggcaccgatctcgtacatgcgccctgttgcggccgtg

SEQ ID NO: 32136 - DNA, 1236 bp, Pseudomonas putida
atgatcgtcgggctggacattggcacctccaaggtggtggcgctggtgggcgaagtgggcgaagacggcaccctggaaatcgtcgggatcggtacccatccgtcccgtggcctgaaaaaaggcgtggtggtgaacatcgagtccaccgtgcagtcgatccagcgcgccgtggaagaggcgcagctgatggccggctgccgtatccactcggcgttcgtcggtgtggccggtaaccacatccgcagcctgaactctcacggcatcgtcgccatccgtgaccgcgaagtcagcctggccgacctggagcgcgtactcgacgccgcccaggccgtggcgattccggccgaccagcgcgtgctgcacaccttgccgcaggactacgtgatcgacaaccaggaaggcgtgcgcgagccgctgggcatgtctggcgtgcgcctggaagccaaggttcacgtggtcacttgcgcagtcaacgccgcccagaacatcgagaagtgtgtgcgccgctgcggcctggaaatcgacgacatcatcctcgagcagctggcttcggcctactcggtactgaccgatgatgaaaaagagctgggcgtgtgcctggtggacatcggtggcggcaccaccgacatcgccatcttcaccgagggtgccatccgccacacggcggtcatcccgattgctggcgaccaggtgaccaacgacatcgccatggccctgcgtaccccgacccagtacgccgaagaaatcaagatccgctacgcctgtgccctggccaaacttgctggcgctggcgagaccatcaaggtgccgagcgtgggcgatcgcccaccgcgcgagctgtcgcgccaggccctggccgaggtggtggagccacgttacgacgagctcttcacccttatccaggccgaactgcgccgcagtggctacgaagacctggtgcccgccggcatcgtcctcaccggcggcaccgcgaagatggaaggcgccgtcgaactggccgaggaaatcttccacatgccggtacgcctgggcgtgccgcacagcgttcgggggctgagcgacgtggtgcgcaacccgatctattccactggtgtgggcttgctcacctacggcctgctgaagcagtccgaggacttggccctgaccggtaacagcaacagcagcagcaacagctatggcgatgaaccgaaggccccagtgcttgaacgcttcaagaagtgggtccagggcaacttc

SEQ ID NO: 32137 - DNA, 1446 bp, Pseudomonas putida
atggttgagagccagaaagccatgccccagccgaagatgggccgtattcgccgcattcacttcgtcggcatcggcggcgtgggcatgtgcggtattgccgaagtgttgctgaacctgggctatgaagtgtccggttcggaccttaaagcctcgccggtcaccgaacgcctggagtccttcggcgctgagatcttcgtcggccaccgcgccgagaacgccgccaccgccgatgtgctggtggtgtccagcgccatcaacccggccaacccggaagttgccaccgccctcgagcggcgcattccggtggtgccgcgtgccgagatgctcgccgagctgatgcgttaccgccatggcgtggccgttgccggtactcacggcaagaccaccacgaccagcctgctggcttcagtgttcgccgccggtggcctggacccgaccttcgtcatcggtggccgccttaccgctgccggtaccaatgcgcagctgggcaccagccgctacctgatcgctgaagcagacgaaagcgatgccagcttcctgcacctgcagccgatggtcgcggttgtcaccaacatcgacgccgaccacatggcgacctacgaaggtgacttcaacaagctgaagaaaaccttcgtcgagttcctgcacaacctgccgttctatgggctggcggtgatgtgcctggacgacccggtggttcgcgagatcctgccgcaggtcaagcgcccgaccgtgacctacggcttcagcgaagaggccgacatccgcgccatcaatgtgcgtcagcagggcatgcagacccacttcaccgtgctgcgccgtgatcgcgagccgttggaggtttcggtgaacatgcccggcaaccacaacgtgctcaacgccctggcgaccatcgccatcgccactgacgaaggcattactgacgaggccatcgtccagggcctgtccggcttccagggtgtcggtcgtcgcttccaggtatacggcgagctgccggtcgaaggcggcagtgtgatgctggtcgacgactacggtcatcaccccaccgaagtggcggcggtgatcaaggctgtgcgcggtggctggccaagccgccgcctggtgatcgtctaccagccgcaccgctacagccgcacccgcgacttgtacgacgatttcgtccaggtgctgggcgatgccaacgtgctgctgctgatggaagtctacccggccggcgaagagccgatccccggtgccgacagccgtcagctgtgccacagcatccgccagcgcggcaagctggacccgatctacatcgagcgcggcgccgaactggcaccgctggtcaagccactgctgcgcgctggcgacatcctgctctgccagggtgccggtgatgtcggcggcctggcccctcagttgatgaaaagcccgctgttcgcaggcgccaagcaggagaagtcgaaa

SEQ ID NO: 32138 - DNA, 1125 bp, Pseudomonas putida
gtgaggagcacgaattcagcgaaagcgattttgccgaggagaccagtcatggccgctgaaggcaaaaatgtattgatcatggccggcggcaccggggggcacgtattcccggcgctggcctgcgcccgtgagttccaggcgcgcggttacagcgtgcactggctgggcactccgcgtggtatcgagaacgagctggtgccgcaggcgggtttgccattgcatctgattcaggtcagcggcttgcgtggcaagggcaagctgtcgttgctcaaggcgcctttcaccttggtcaaggccgtactgcaggcacggcgcatcattcgccagctcaagcccgtatgtgtcctgggctttggcggctatgtgaccggccccggcggcgtggccgcgcggctgtgcggcgtgccactggtgatccatgagcagaacgccagggccggtaccgccaatcggttgctggtgccactctcggcgcgggtctgcgaagctttcccgaacaccttcgaggccagcgacaagcgtcgcaccaccggcaacccggtgcgtccggagctcttcatggacgcgcaacgcacgcctttgggcgagcgccgcgcacgcctgttggtgctggggggcagcctgggtgcggaaccattgaacaaattgttgcctaaggccctgtccgaggtgcccgcggcgctgcggccagaggtgttccaccaggccggcaagcagcacgcaccgatcaccgccgagcgttatcacgaggcgggcgtcgcggctcaggtagagcctttcatcaaagacatggcccaggcttatggctgggccgacctggtggtgtgccgggccggtgccttgactgtcagcgaactggcagcagcaggcctgccttcgatgctggtgcctttgccccacgcgatcgacgatcaccagactcacaacgcccaatatctggcccgcgaaggcgctgccttcctgatgccacaagcgacaactggcgcagcgcaactcgctgaacgcctgaacgaggtgctgatgcaacccgagaaactcaacgtcatggcaggcaccgctcggcgcctggccaaacctgctgcaaccagcaccgtggtcgatatctgcctggaggtggcccatggt

SEQ ID NO: 32139 - DNA, 1347 bp, Pseudomonas putida
atgaccacgcgcattcttaccggtatcaccaccactggcactccgcacctgggcaactacgccggcgccatccgcccggcgatccgtgccagccagcagcccggtgtcgattcgttctacttcctggccgactaccacgccctgatcaagtgcgacgacccgctgcgcatccagcgctcgcgcctggaaatcgccgccacctggctggccggtggcctggacccggacaaggtgaccttctatcgccagtccgacatcccggaaatccccgagctgacctggctgctgacctgcgttgccgccaaaggcctgctgaaccgcgcgcatgcctacaaggcctcggtggacaagaacgtcgagaacggcgaagacccggacgccggcgtgacgatgggcctgttcagctacccggtgctgatggccgccgatatcctgatgttcaacgccaacaaggtgccggtcggtcgtgaccagatccagcacgtggaaatggcccgcgatatcggtcagcgcttcaaccatctgttcggtcaaggcaaggacttcttcgccttgccggaggctgtgatcgaagaaagcgtggcgaccctgccgggcctggacgggcgcaagatgtccaagagctatgacaacaccatcccgttgttcaccagcgccaaggacatgaaagacgccatctcgcgcatcgtcaccgattcgcgcgcgcccggtgaggcgaaagacccggacaacgcgcacctgttcaccctgtaccaggccttctcgacgcctgagcagtgcgccggtttccgcgaagagctgctgcagggcctgggctggggcgatgccaagcagcgcctgttccagctgctggacggccagctggccgagaagcgcgagtactatcatcagttgatcgcccggccggcggacctggaagacatcctgctggctggcgccgccaaggcccgcaagatcgccacgccgttcctcgagcagctgcgcgaggccgttggcctgcgttcattccgcagcagcgtgcaggccaccgccgaagtgaagaaaaaagccaccaagagcgcgcgttttgtcagcttccgtgatgaagacggcagcttccgcttccgcctgctggccgctgatggcgagcaactgctgttgtcgcgcagcttcgccgacggcaagagtgctggcgccgtgagcaagcagctgcagcaaggtggcgaggccgatgtccgcatcgaaggcctgagcttcggcctgtggctcaatggcgagcaggttgccgacgggccgcagttcgacaacgctgaagcccgtgatgcggccattcagagcctgaacgaagccttggcaccacagcaggac

SEQ ID NO: 32140 - DNA, 435 bp, Pseudomonas putida
gtggaactctcgctccttgtttggttgttgccaaccctggccctggtcatcggtgtggcagtcggtttcattgttgcccgcctgctgcccaatgcggccccgagcaacacccagcgtcaactggatgacatccagaagcgcttcgacagctaccagaacgaagtggtcacccatttcaacagcaccgccatgctggtcaagaaactgacccagagctatcaggacgtacaggatcacctggctgaaggcgccaacagcctggccctcgatgacgtcacccgccaacgcctgctggctgcgctgcactccgatgcaccgcaaggcccgcgtgaccgcctgaccccacctaaagacaccgccgaagtgccgcgcgactatgcaccgaaagcgcctaactcgccgggcatgctcgacgaaagctacgggctcaagcgt

SEQ ID NO: 32141 - DNA, 945 bp, Pseudomonas putida
atggacaccctgcaaaacatgcgtgctttcagttgcgtagcccaactcggcagcttcactgccgctgcggcgcaactggatacgaccaccgcgaacgtgtcgcgggcggtctccaacctggaagcccatctgcaaacaaggctgctcaaccgtaccacccgccgcattgcgctgaccgaagccggcaagcgttacctgatgcgttgcgaacagattcttacctacgtcgaagaagccgaggccgaagccagcgacgcccatgcgcgcccggccgggcagttgaaggtgcattcgatgactggggtcggccagcacttcgtggtcgatgccatcgcccgctaccgcgaaacgcacccggacgtgaccttcgatttgaccatggccaaccgcgtgcccgatctgctcgacgagggttatgacgtctccatcgtgctggccaccgaactgcccgactcggggttcgtttcgcagcgcctgggcatcacctacagcattgtctgtgcctcgcccgcctacatcgcccagcatggcgtggcgcacaagcctgccgacctgctcaagcacgcctgcctgcgcatggtcagcccggtgataccgctggagaagtggctgttcgatggcccggaaggccaagagatggtcaacatcaccagttcgccgttcatggtgaacaccgccgatgccatgaagactgcgatccgcagtggcatgggcgtaggcgtgctgccgatctattcggctatcgagggcctgcgggacggtagcctggtacgggtactgccggagtatcgcctgcaggagttgaacctgtatgccatctatccatcgcggcagtatctggatgccaagatcaagacctgggtcgagtacctgcgcaactcgctgccagagattcttgccgcgcatgaggcagacctgaaaacccatcaggtgctgatcgccaac

SEQ ID NO: 32142 - DNA, 654 bp, Pseudomonas putida
atgaccaacccgctgattctcgaaccacagaaaaccgctgacgcctgtgtgatctggttgcacggtctgggggccgaccgttacgacttcctacctgtggccgaattcatgcaggagcgcttgctcagcacacgcttcatcatgccccaggcaccgacccgccccgtgaccatcaacggcggctatgccatgcccagctggtatgacatcaaggccatgaccccggcccgtgccatcgacgaagcgcagctggaagaatctgccgagcaggtggttgccctgatcaaggccgaacaggccaaaggcatcgacctgacgcggatcttcctggccggcttctcccagggcggcgcggtggtgctgcacactgcctatataaagtggcaggaagcactgggcggggtgatcgccctgtccacctatgcccccaccttcaatgaccagcaccagttgagtgcctgccagcaacgcaccccggccctgtgcctgcatggcgtgcatgactcggtggtcatcccgtccatgggccgtaccgccttcgagtacctgaacacctggggcgtcgctgcccgctggtacgaatacccgatggaacacgaagtggtggtcgaagaactgaacgatatccacgactggctgagcaagcagctgcaa

SEQ ID NO: 32143 - DNA, 2760 bp, Pseudomonas putida
gtgaaacgtctgtgtgtcgtgccgccgcagcggcaggagcacagcaacatgactgtcaaataccgtaacacctcatcggccaaggccgaacgcgagacccgcctgtccacccgcgccgcccgtgaagcgcgcaatggcctggcggtcaccctcgccaacctcgatgccagcgaacagggcttgaccgagcacgaagccgccaagcgcctggtgcgcgatggggccaaccaggttgcccacgacccgcaaccccacgccctggtgcaactgctcaaggccctgaacaacccgttcatctatgtactgctgaccctggccgggatcagcttcgtcaccgactactggctgccggtcagcgcaggcgaagcagacgacgccgacctgaccaaggtcatcatcatcatgaccatggtcagcctcagcagcctgctgcgattctggcaggagtaccgctcgaacaaggctgccgacgcgctcaaagcaatggtgcgcactacggccacggtgttgcgccgcgagcagatcgggcaagccccgcgcctgcgcgaagtgcccatggacgaactggtggccggcgacatcgtgcagctttctgcaggtgacatgattcccgccgatatccgtctgctcgaagcgcgcgacctgtttatcagccaggccgtgctcaccggcgaagcgttgccggtcgaaaagtacgacaccttgggtaatgtcgcgcagaagtccgccgccgagcatggcgcacatcaggacaacctgctcgagttgccgaacatctgcttcatggggaccaatgtggtcagtggccgcgcccgcgccgtggtggtcgccaccggccgacgcacctattttggctcgctggccaaggccattgccggttcgcgcagccagaccgcttttgaccgcggcgtgaacagcgtcagcagcctgctgatccgcttcatgctggtgatggtgccggtggtgttcatgatcaacggtgtggtgaaaggcgactgggctgatgccttcctcttcgcgcttgccgtggcagtgggcctgaccccggaaatgctgccgatgatcgtcagcgccaacctggccaagggcgccgtggccatggctcggcgcaaggtggtggtcaaacgcctgaatgccatccagaacctgggctccatggacgtgctgtgcaccgacaagaccggtacgctcacccaggatcggatcatcctcgagcaccatgtgggcttcgacggtcaaaccgacaagcacatcctcgagctggcctggctcaacagccatcaccaaagcggcatccgcaacctgatggaccaggccgtgctgcatttcgccggccaggaccaccagttccaggcgccttacgcctacgcaaaggtcgacgaactgccgttcgacttcatccgccgccgcctgtcagtggtggtgaagaatgccttgggcgatcacctgctggtaagcaaaggggcggtcgaggagatgctcgccatcgccacccatgtgcaggaaggcgacaaggtcgttgcccttgatccgtgccgtcgccagcagctgatggccagggtcgatgccttcaaccaggacggcttccgcgtgctggtggttgccacccggcagatcccggcggacgaaggcaaggcgcagtatcacaccgaagatgagcgcgatctggtcatccagggcttgctgaccttcctcgacccgcccaaggaaacggccggcccggccattgccgccttgcgcgacatgggcgtgcaggtcaaggtactgaccggcgacaacccggtggtcacgtccaaggtctgccgtgaagtgggcctggcgccgggccagcccttgctcggccaggacatcgagggcatggacgacaccaccctgaagcttcaggtggaggagcgcaccgtcttcgccaagctcaccccgttgcagaaatcacgggtgctcaaggccctgcaggccaatggtcacactgtgggcttccttggcgacggcatcaacgacgccgcagccctgcgcgatgctgacgtcggtatctcggtggacagcggcaccgacatcgccaaggaatcggccgacatcattttgctggaaaagagcctgatggtgctcgaggagggcgtgctcaaaggccgcgaaactttcggcaacatcatgaagtacctgtgcatgactgccagttccaacttcggcaacgtgttctcggtcctggtggccagtgcgttcattccgttcctgccgatgctggcgatccacttgttgctgcagaacctgatgtatgacttttcccagctgtcgctgccgtgggaccgcatggacaaggagttcctcagcaaaccacgcaaatgggatgcccgtaacatcggtcgcttcatgctgtggataggccctacgtcgtcgatcttcgacatcaccaccttcgccctgatgtggtacgtgttcgccgccaacagcgtagaaatgcaggcgctgttccagtctggctggttcatcgagggcttgctgtcacagacgctggtagtgcacatgctgcgcactcgcaaggtaccgttcttccagagcaccgctgcattgccggtggtattggcaacggggctggtcatggcattgggtatctacatcccgttctccccggtgggcgcgatggttggcctggtgccgctgccgtgggagtacttcccttggctggtcgccaccctgctgggctactgcgtggtcgcccaggccatgaagaccctctatatccgccgtttcggccagtggttc

SEQ ID NO: 32144 - DNA, 1008 bp, Pseudomonas putida
atgggccggcagcattaccagcacttgcgcaatgtgccgcaagcccaactgtgtgcggtagccgaccccggcccgcaggccgaggccttcgctgccgagtgcggtgtgccatgctttgccgaccaccggcaaatgctggagcaggtgcgccccgaggcagtgatcgtcgccaaccccaacaccctgcatgtcgccaccgccctggattgtgtcgaggccggggtgccagtgctggtggaaaaaccggtgggcgtgaacctggatgaagtgcgtgcactggtggaagcctcacgccgccgaggtgtaccggtgcttgtagggcaccatcgccgacacaatccgctgatcgccaaggcgcaccaggtgatcaacgaaggcaaactgggccgtctgatcaatgtcaccgcgctgtggcaactgcaaaagcccgacagctatttcgaaacgccctggcgccgcgagccaggggccggtttcttgctgaccaacctgatccacgaccttgacctgttgcgttacctgtgcggcgaagtggtgcaggtgcaggccttcacccgcaacgatgtccgcggttttgccaacgaagacagcgccgcggtgctgctgcagttcgccaacggtgccctgggcagcctgaccgggtctgacgcggtggctgcaccgtggagctgggagctggacgctggcgaaagccccgtgtacccgcgccaggatggccagccgtgctatctgctggccggtacccaaggtgcactgagcattccccagctcaagcgctggcattacgccgaggcaggctcgggctggcatacgcccctgttgcaaagttcggaaagcatccctgccggcgaggcattgaccctgcaattgcagcattttgtgcgtgttgcccggggtgaacaggcgccgctgatcgacgctgccgacggggggcgcacactggcgctgatcgaagcgatacgacaggcagcccaaagcggtcgggcttgcgcgcccgcgcacattggc

SEQ ID NO: 32145 - DNA, 1218 bp, Pseudomonas putida
ttgtttgttaccacgctgggcgtagagcatgatcatggagccgaggacgttcaccagcagggtgatgaacatcagtaccagtgccgcgtacatcagcacttcgacctcgttcgggccggcttccgggaagttcagcgccagcagcgccgccagggtgttggccggtgcgaacaaggacagggaaatggtgttggcgttgccgaccagcatggccagcgccatggtttcaccgagtgcacggcccaggcccagcaccagcgaaccgaagatgccggtagccgccgagggcaccatcaccttgaggatggcttcccagtgggtagtacccatgccgtaggcagcctgcttggttttcataggtacgctggtcagcgcatcctgggaaaccgccgcgatggtcggcaggatcatgatcgccagcaccagcgccgcaggcagcaggcctgggccactcagggaggtgccgaaaaacgggatccagcccagctcgctgttcagccaggcggtcagcggacgaatcgccgggatgaccacatagatgccccacaggccgtacaccacgctggggatggcggcgagcaactcgacgatggtgcgaaacaccgcggcaagcttggccggaaggaaatcctgggtcaggaaaatggccatgctgacgccgaagaaaccggcgatcaacagggcgatcaaggcgctgtaaagcgtaccccagatcgctggcagaataccgtacttgccttggttaacgtcccagacgctgccgaacaacacgtcaaaaccgtgcttttcaatcccaggcagtgccttgcggccgacttcgtagaccagcgcgaagaccagcgccagcaccagcaccacgccaatgcgcgcaagcgcacggaaggtgcgatcgaccagaaagtctttcgcagacggtggctggcacgcggagtcggggttatccggtatggcaaaaggagtgttcattggcgagttccgggacaagggacaaacacccccggcatggcttcatgccaataccgggagcgcctgggtattactggatgttggcggacgctttacgcacctggtcgactaccgacggcggcagcgggatgtaacccatcgagtcggcgatggtctggcctttggtcaggctgtactcgaccatttcacgcatggccttggctttttccgggttgccgttgtccttgcggaaaatcatccaggtataggaag

SEQ ID NO: 32146 - DNA, 1586 bp, Pseudomonas putida
ccctcccggtactggcccgctggcctggactgggagggtggaacctctatttttttgcaaagtttctgctggtcgcgctgggcatgctcgacttccaggcgctgccgaacctgttgttcgctgcgtttctgcttgtccctttgccgggcaagtggctgcgtattgcccggcaactgctggcggtgccaatcggtatcgcgcttttctaccaggacacctggctgccacccttcagccgcctgctggcgcagccgggggtgctggacttctcgtgggactatctgctcgagctgctgggccgcttcatcaactggaacctgctgggggcgctggcaatgttgctggtgggttacctgtacctacgccattggctgcgcctgagcaccctgagcctgctggggttggcatggctgtcggtcggcggcttgccgtcgctggttgcaggccaggcgcccggcgtggcggcgcgtaccgcagccgaacccgcgcctgccactgcagcagccgacaatgccacgctcgacagctggcttgagcgcttcttcgccagtgagcgcgagcgggtgacggcgttccctgccgtgagtgccgatgagcaaccgttcgacctgctggtaatcaacatctgctcgctggcctgggatgacctgtccgccgtggggctgcgggacaacccactgttgtcgcgcatggacgtgatcttcgaccagttcaactcggcgacctcctacagcggcccggccgcaatccgtgtgctgcgtgccagctgtgggcagtcgtcgcacgctggcctgtaccaaccggccccggagcagtgcctgttgttccagaacctggcccggctgggtttccagagcaacaccttgctcaaccacagcggccggttcgacaacttcatcggcgacattacccagcagcgcatgccgcaaccgggcatgcgcaataccgacttcccacgggcactggtgggcttcgacggctcgccgattgccagtgacctggatgtcttgcgccgttggtgggggcaacgcaaaggcaccccggacgaacatgtgtcactgttctacaacagcatcagcctgcatgacggcaaccgtatcgtcaccgccgacggcggtacccgcgtggccgactatgccacccgcgccaatcgcctgtttggcgaacttggcaccttccttgacgaactggagggcagtggccgccgcgtagtggtggccattgtccctgagcatggggccgcgttgcatggtgatcgcatgcagttgtcgggcatgcgcgaaattcccacgccgtcgattacccatgtgccggtcggcctgaagttcatcggcatgggccagcctgcccgcaacgagccgctgcgggtcactgctgccaccagctacctggcgctgtccgagctgatctcgcgtgtgtatgcgggcctcggccagcagcaggtgctggatgtgcccggcctgctgaccgacctgccaaccaccgagcaggttgccgaaacctctggcgcacaggtgctgaattaccaggggcgcgcctacatgcgcctgcaaggccagcctgactggcagccgatccccaaggag

SEQ ID NO: 32147 - DNA, 700 bp, Pseudomonas putida
tgccggaagcgcgccagttggccaaacacttcaaccgcatggctgcaaccctggagcaggctcaggccgacaatgcccagctgacccaggccctgctggcagtgcaggagcaggagcgtacacagctggcgcagaccctgcacgatgatcttgggcaatacctggcaggcatgcgtgcccagctatgcctgctgcgtatggtggccgaacagccggaaatggtgacgcagacggtgcaggcccttgaactcaactgcgagcgcctgcagcaaggttttcgcgcgctggtgcacaacttgtatccggtggcgctgcactacatgccgctggccgaggccttcgggctgttggtgagccagtggcaggccagccagggcatcgaatgccggctgcgggttggcgagcacttgccggcgctgcctgggccgagcagaacgcatttgtaccgcttgctgcaggaggcgttgaccaacgtcgcccggcatgccggtgccagccaggtgcgggtgcgcctgcagcgcagtcccaagggcttgcgcctgttcattcgcgacaatggctgcggcgcccaccagccccagcgcccaggggtaggcctgcactcgatggccgagcgcgcccgcagccttgggggggagttacgcattttcagccgccctggaggcggctgggcgctggcccttaacattccccaggaggt

SEQ ID NO: 32148 - DNA, 1116 bp, Pseudomonas putida
gtgatgatgcgccagatgctggtagggctggtcgccttaggcctgcccgttttcgccaatgccgggtcggtttgcccatggcctgcctgggagcggttcaaggccgagctggtgagtgtggatgggcgggtcatcgacccgagtgacgagcgcctgatcaccacctcggaagggcagagttacgcgctgttcttcgccctggtaggtaacgaccggcaaaccttcgcgcagttgctgcgttggaccagcaacaacctcgccgagggtgacctggcccggcatctgcctgcctggctgtggggccgtgacgggcagcagcagtggcaggtgctggacgccaacaacgccagcgatgccgatctgtggatcgcctacagcctgctggaagcagggcggttgtgggaccagccggcctacacgcaactgggccagcacctgctgtggcgtatcgccgcgcagaccgtgcgcaagcttccaggccttggtgtgatgttgctgccaggtgactacggcttcgaagacgcccagggtacccgcctgaaccccagctacctgccgctgcagctgctcgaccgcttcagcgatgtggaccccttgtggggtgagctggcggccaacacgcggcgtttgtggttggcatcgtcgccaaagggttttgccccggactggttgctgtggacgccggccggaaagccagcggcagacacgaaacatggcaatgccggtgattatgacgccattcgtgtgtacctgtgggtcggcatgttggccgagggggcggcgcaacgccgcgaactggtggcccattatgcgccgatggcggcattgacccagcgccaggggctacctcctgagcacctggatgcacgcagcggtgaagcccgcggccatggcccggcgggtttctctgcggccttgctgccattgcttgctgcctcgccagagcacgtggccggcttggcggcccagcgccagcgcttgcgcgaacagccggtcgaggccaaggcgtattacagccaggtgctggcgctgttcggccagggcttcgacgaggcccgttaccgttttgacccgcacggccggctgttgccggcctggagcgcgccatgcagcgaa

SEQ ID NO: 32149 - DNA, 3442 bp, Pseudomonas putida
cgtgttgatgctggcggcaataacctgccaggcagatgcgcaacccaaggatatcgatgaacagcgccaatggctgctggaccaggtacgccgcggcgaagcgctgcaccgtgacgacctggtgcgcgatgcgctgggccgtttgcagttgcttgagccgcgcaacccggacgtgttgctggcggccttgagcctggcattgcgcgagaagaacagcagtgaagccgagcagttgagtgcgcggatcagtgccgtggcgcctggcagcctgcaagcacgtcaggccgcacgcctgcttgagcttcaacaaccggcgcctgcacggcgcttgcagcaggcgcgtctgctggcagttaccggccgtaatgaagaggcgctggcggtatacgaacagttgtttgccggcgaaccacccagccttgaattggccctggactactggcgcgtgcgcggcaatctgccaggccaacgccctgaggcgatccgccagttgcagcggttggatcagcagtacccgggcagcgccgggctgcgccagaccctggctggttggttgttcgccgaaaagcgtgaccgcgaggccttggccctgctcgatcagctggcgcgagaccctggtgcacgggatgccgctgcccagcgcgagttcgactacctgtccgggcaagccgtgagtgccaccagcgcggcagcctggcaagcctttcttcagcgttacccggcttcgccgttgctggcacaggccagcgagaccttgcaacagcagcgcaagctgctggccgacccggcatggcaggccggtcaacggggtaaggcattgctcgacaagggccttaatgccgaagcggaaacgcagctgcgccgcgcactgcgccagtacccgggcgatgccagcctgcatggggccctgggttatgcgttgatgcgccagggccgccatgaagacgcccatgcggcgttccgcgcggcgagcgccaaggagcaggacacctactggatcagccaatggaaggacctggagtcgtccagccagtattgggccctgctgaagaaagccgagcgggccctggaggtgaaagacgtgcgcggtgcgcgcgcactttaccagcaggctcgccagcaacggccaaaggatgaatacgcgttgctgggcctggcagatgtctcgctggccgagggcgatgtggcggctgccgagcggcagtacctgcaggtacggcgtatggcgccggataacgaaagtgccgtgcgtggcttgatgcgcgtttaccaggcgcagtcgccaggcaaggcgcaggcatacctggacagcctgccaccacggcagcaggcgcagttcgccagcctgcgacgcagcctggaacttgcgcggctgcgccagcaaggggacgaagccctgcagcgcgaggactggtcgacggccagccacgtgctgggccaggcttcggccctggcccccgatgagccttggctggtgtatcagctggccaacagtctgcgtcaccaagggcgcactggcgaggccgacgcggcatttgccaggctggtgcagcaccagccacgtgatccggcaacgcgctatgccaacggcctgttcctggagtccagcgaccgtgatgccttggctctggaaagtctgagggcggtacctcaggcgacctggagcgcggacatgcacgcgctggaacagcgtgttcagcggcgtatgaccctggcctctgcgcagcagttgcaggcacaaggccgcagtgccgaggcgacagccttgcttgaagccggcctggcgcgtggtgaaggtagcccggacgacttgatgctgttggctgactgggcagcagcgcgtggtgaacatggcaaggcgcgcagctattaccagcgtgtactggtcgtgcagcctgggcgccctgatgcacgccttggggtgatggaaagcgccgtggccgaaggcaacctgcagcaggcccggcacatgctgggcgtgaaggtgccacaatttgccgctgatgacggcaacgcccagcggcgcctggcggcggtgtggaccgcgctgggtgaacacgatcaggcggccaggctgcttgaccggattgccgcgcagcagacgcgacccgatccgttgttgcggcgcgacgcagcccgcctggtagcgcaggatgatcctcaacgagcactggacctttacgcggcagcgatggccgatgcgcagttgctggaccgtgctgccgtagcgccacgggatgaccgtgcattgaccctggccagccgcgagcaggatggcgacgactggctggcccgcagcctgcgcagtgatgtggatgccctgtatcgccagcgcaatacccatgtgacgctgatgcatgactacggctggcgcgaggatgacggtacgcccggtacttcggaactgagtacccagtcgaccttgttgcatgtcgacaccccttggcaggagggcaccgcgtttgcgcgagtagagcgcattggcatggatgcggggtcgttcgagccgaacgatcagggaagctacacccccgacttcggcagctgccagtttgttggccagaccgctgacggcaaaacactgcccgcgtgcacggggggatcgcagactgcaaacggcagcctgttggcgttgggttggcagggcagccgctgggcgttcgacctgggcaccacccagggctatgcaatcaacaactggctgggcggcgcaacggtcaacggtgacctcgggcaggttggctggtcgctgaccgcctcgcgccggccgatgagcaattcattgctgtcgttcgccggcgcacgcgaccgcccgacgggcgtgcgctggggcggggtcactgccaatggcgccacgctcggcctgagctgggaccaaggtggcgacaacggggtgtgggccagcctggggcaccattggctgtacggcgaaaacgtggccgacaaccagcggacccgggccatggccggcttttaccaccgcgtggtggaaaaggccgacgagcgtgtacgtgttggcgtgacgctgatgcactggcgccatgacaaggacctgggcggctacagcctggggcagggcggttactacagcccgcagcgctacagttcggtgggcgtgccggtcagttatgcctggcgcaactacgactggtcgctgctgctggaaggttccgtcagctggtctcaggctcatagtggcagtagccgcttgtacccggacgcgcacatcaaccgcaaggtactggcgaattatggcgtcgactccaacatcgatgcgatgaccgaagccagcgacagcagcgggttgggctaccgcctgcgcggtctgttcgaacggcgcctaagtgaccagtgggtactgggcggcggcttcgactggcagcatagcgatgactatgcgcctagccatggcatgctctacctgcgctacctgttcgaaccg

SEQ ID NO: 32150 - DNA, 1350 bp, Pseudomonas putida
atgtgggctgatgtactagcgcgattcgagaaaaaagcacccgccagcgtaatggccaaacttgccttggagcaggccattgcgccggagtgggtcgatcaggttttcgaggagcaccgccaacggcagtattctcgcgagctgctgttctcgaccattatcaagttgatgtcgcttgtttcattgggcttgaagccatcgctgcatgctgcggcaagacaactggacgaccttcccgtcagcctggcagctctgtacgacaagatcagtcgaaccgaacctgccctgttgcgtgctctggtgacaggctgcgcgcagcgcttggcgccgacaatccatgagttgggctgctcagccatgcttcctgattggcaagttcgggtggtcgatggcagccacttggcctctaccgaaaagcgtcttggcgcgttgcgccaagagcgcggagcggctcgccccgggttttcggtggtggtttacgaccccgacctggatcaggtaattgacctccagccgtgcgaggacgcctacgcaagcgaacgagtttgtgttttgccgttgctggctgaagcaaagaccaatcaggtttggatcgctgaccgtctctactgcacgctgcctgtaatggaggcgtgcgaacaggtgaagacatcatttgtcattcgccagcaggccaagcatccacgcttgatccaggaaggtgagtggcaagcaccgatgcccgtcgccacaggcactgtgcgcgagcaatccatcgaagtaaaaggcgggcaccgctggcgacgtgtcgagttaacgcttcattcaccaaacgactcaggtgataacagcttgatgttctggagcaacctgcccgagagcatcagtgcgcaacagatcgcagacttctatcggcgccgctggagcattgaagggatgttccagcggttggaagcaattctggaaagtgaaattgaaaccctcggcagtccgcgagccgccttgcttggattcaccactgccgtgctggcatacaacgttctggccttgctcaagcgaagtgttgaacaggctcaccgcgatgccttgcccgagaattgggaagcctcgatctatcacttggcggtgcagatcagagggggttacgaaggcatgcagattgccctgccatccgagtacatgcccgttgttccgatggaaaacctggctcagcgcctgctggagctggccagaaacatccagcccagacaggttgcgaaaagcccacgaggccccaaggtgctcaaagcgaaggcctgggtgcaagggacggctgtacatgctcatgtttcgacggatcgggtcatcaaagccgccaaaaccaaaagacct

SEQ ID NO: 32151 - DNA, 498 bp, Pseudomonas putida
atgagcccttgggttggcttagcggctgccgtggtcctggtggccagccactggggcgcctacgagcacggccggagtgtagaacaggcgcaggctggccaagtgtcggccaagcgcgatagcggcgaccgtcttgccgaggttatcggtgagcgcggcgcccgtcagcaggaacatcaacgcgcccaggcgcaggaggaggcgagggtccatggtcatgaagaaagatcgattgcgagtgctggcgctgatggtgccgatgctgctggccagcggctgcgcgacgaaggcgccaagctcgccgccgccgtcagttgccccggcgcggataccgccgctgtcgcccgaggccaggcagccacccgcgccgccatggtgctctccgacctgctcacacggtctgtcgaaacgaatcgagagctggcgaaggcttatgaccaatcccgaatagcaggggagcagtgccggcgagagtacgatgcgcttctgccatccggc

SEQ ID NO: 32152 - DNA, 369 bp, Pseudomonas putida
atggcaactatcaaccagctggtacgtcagccgcgtaagcgttcggtcgagaagtccgacgttcctgcgctgcagaactgcccgcagcgtcgtggcgtgtgcacccgtgtgtacaccaccacgccgaaaaaacctaactcggcactgcgtaaagtatgccgtgtgcgtctgaccaacggtttcgaggtttcctcgtacatcggtggtgaaggccacaacctgcaagagcacagcgtcgtcctgattcgtggcggccgtgtaaaagacttgccaggtgttcgttaccacaccgttcgcggctctctggatacttcgggcgttaaaggccgtaaccagggtcgttcgaagtacggtaccaagcgtccgaag

SEQ ID NO: 32153 - DNA, 366 bp, Pseudomonas putida; identical to SEQ ID NO: 31315

SEQ ID NO: 32154 - DNA, 411 bp, Pseudomonas putida
atggttgctcacctgattcaattcgcgacagatcactacatcctggttgcgatcttcctcattctgctggtcctgctgctcatcaatgaaatccgtcgtggtggccaaagcctgaccaacggccaactgacagccctggtcaatgccgagaaggccctggtgatcgacattcgcccggccaaggaatactccgccggtcatatcgtcggcgcggtgaacatcccgcaggacaagctggccaaccgcatgaccgagctgggcaagcataaagaaaagaccttgatcgtcgtcgacgcgatgggccagcagtccggcaccatttgccgcgagctgctcaaagctggttacaacgccgccaaactgagcggtggcgtttccagctggaaagccgataacctgcccctggtgaag

SEQ ID NO: 32155 - DNA, 1332 bp, Pseudomonas putida
gtgaccatgctgtccatcgctggcgtcatcggtgccggcctgttcgtaggctccggccacgccatcgcagcggccggccctgccgtgctgctggcttacgctgccgccggtacgctggtcgtgctggtgatgcgtatgttgggtgaaatggcagtcgcctcgcctgacaccggttcgttctctacgtatgccgaccgcgccatcgggcgctgggccggtttcaccattggctggctgtactggtggttctgggtgctggtgattccgctggaggccaacgccgccgcagccattctgcatgcctggttcccggcggttgacctgtgggcgttctccctcatcattaccctggcactgacactcaccaacctgtgcagcgtgaagaactacggtgagttcgagttctggtttgccctgctcaaagtgctggcgatcatcggcttcatcgccgtgggctgtgctgccttgttcggctttgtaccgagcagccaggtgagcggtaccagccacctgttcgatacccagggcttcatgcccaacggcctgggcgcggtgctggcagccatgctgaccaccatgttctcgttcatgggtaccgaaatcgtcaccatcgccgctgccgagtcgaaggacccgggcaagcagatcagccgtgccaccaactcggtaatctggcgtatctgcctgttctacctggtatcgatcttcctggtcgtggccctggtgccgtggaacgacccggccctggccgagacgggctcctaccagaccgtgctgagccgtatcggtgtgccgaatgccaagctgatcgtcgacattgtcgtgctgattgccgtgaccagctgcctgaactcggcgttgtacacttcttcgcgcatgttgttctcgctgagcaagcgtggcgacgccccggccatcgcccagcgcaccaccaaggcggcgaccccgcacgtggcggtactgctgtccaccgcagcggcattcctttgcgtgttcgccaacttcgtggcaccggcccaggtgttcgagttcctgctggccagctctggcgccatcgcgctgctggtgtacctggtgattgccgtttcgcagctgcgcatgcgcgcccagcgtgaagcccgcggcgagaagatcaccttcaagatgtggctgttcccgggcctgacctgggcgaccattgccttcatcgttgccattctggtggtcatggcgctgcgtgaggatcaccgtgcggagatcattgcgactgcgctgctgagtattggtgtggtggcggctggcttgctggtgcaccgcaagcgcgaggctgccgggcgggcggcgctggacagc

SEQ ID NO: 32156 - DNA, 576 bp, Pseudomonas putida
atggataagccaatgaccgatacacgcgaaaaaatcctggcgactgccgagaagcttatttacgaaaacgggattcacgccacgggcatggacctcttggtaaagacctcgggtgtcgcccgtaaaagtatttatcgctattttgcgaataaagacgacgtagcagcggcggcactcaatgcacgcgatatacgctggatgacgtggttcagaagtgaatgcgaaaaagcgcaaacgccagaagcacgcatccttggcatttttgatgccctcaaaagttggttcgagtcagacggttttcgcggatgtgcttttatcaacaccgccggagaggtgggtaacgcagacgatcctgttcgacagatcgcaaaactgcataaacaaaagctgctggactacacgctagaactgaccagcgaattaggtgttaacgatccgactggcttggccaagcaactccttttgattatagagggcaccataaccgtggcccacgtcatgggtgatcacaccgcgctcgacagtgcgcgggaaatcgcaaaggtcttgctcaaggacgtgcagcgcgcaagcgct

SEQ ID NO: 32157 - DNA, 852 bp, Pseudomonas putida
atgagcctggataacatctcctgccagaagagcttcggcggctggcacaagcgttaccggcatcattccaaggtgctgggttgcgatatggtgttcgctgtgtacctgccgccgcaggccgagcagggcgaaaagctgccggtgctgtactggctcagcggcctcacctgcaccgacgagaacttcatgcagaaggccggcgcccagcgtctggccgccgagctggggctgatcatcgtcgcccccgataccagcccgcgtggcgagcaggtgccgggcgatccggacggcgcctgggacttcggcctgggcgctggcttctacctcaacgccacccagcaaccctgggcccagcactaccgcatgcatgactatgtggtggaggagttgccagccctgatcgaggcacacttcccggcgtcgggcgagcgcagcatcagcggccactccatgggtgggcatggcgcgctggtgtgcgccttgcgcaatccggggcgctaccgctcggtgtcggcattctcgccgatcagcaatccgatggattgtccgtggggcgagaaggccttcagccgctacctgggtgaagaccgtgggcgctggcgtgagtgggatgccagcgtgctgctggccgaaaccccggcaggccaatgcccgccgttgctggtggatcagggcgaccgtgacgacttcctcgagaagcaactcaagcctgaagcgctggaacaggcggcacgcaaaggtggccatgcaatgaccctgcgtatgcagccaggctatgaccatagctactacttcattgccagcttcatcgaggagcacctgcgccatcatgcggtggcactggggcgggtt

SEQ ID NO: 32158 - DNA, 1752 bp, Pseudomonas putida
atgcctgttagatactgcatggcggctgcgctgagcctggccttgtccatggcctatgcccaagagccggtgttcgatgacaacggtacgccgatgtacgaagtgaatttcgtcgataccgaactcggcgagttcatcgacagcgtgtcgcgcatcaccggcaccaccttcatcgtcgacccccgggtcaagggcaaggtcaccgtgcgcaccgtcgacctgcacgacgccgacgccatctacgacatcttcctggcccaactgcgcgcccagggctatgccaccgtcgacctgcccaacggcagcgtgaaaatcgtgcccgaccaggccgcgcgcctggagccggtgccagtggaggcgggcgggcagcagggcgagggcagcgacagcgtggccacccgcgtattcagcgtgcgcaacgccgccagcgaacaggtactgggcatcctcaaaccgctgatcgacccgcgagttggggttattacaccgtacccggcggcgcaccagttggtggtgactgactggcgcagcaacctcgaacgcatcgccagcctgctgcgccagctcgaccgccctcaagaggtaccgggcagcggcagcacccaggtgatctacttgcgccatgccaatgccggcgaagtggtcaaggtgctgcgagggctcagccaggaaggggcggtgccggttgaaggcgcgggtgaggcagagggcaaggaccggccggtggtgccagccgccggtggctcgggcatccgcctggaatacgaagaaggtaccaatgccgtggtcatggtcggccccgacagcgagctggcggcgtaccgggccattgtcgagcaactggatattcgccgtgcccaggtggtggtcgaagcgatcatcgccgaggtgtccgacagcagcgcccaggagctgggcgtgcagtggctgttcgccgacgagaagttcggcgccggtatcgtcaacttcggcagtaacggggtgaatatcgccagcatcgccggcgccgccgccagtggcgacaacgaggccctgggcgatctgttgtccaccaccaccggtgccacggcgggcatcggccatttcggcggtggcttcaacttcgccatgctggtcaacgcgctgaagggcaagagcggcttcaacctgctgtccacgcccaccttgctgaccctggacaacgccgaagcgtcgattttggtcggccaggaggtgcccttcgtcaccggctccgtgacgcagaacaacgccaacccgtaccagaccatcgagcgcaaggaagtcggggtgaagctgcgcatcaagccgcagatcaatatcgacaacagcgtgcgcctggacatcgtccaggaggtgtcgtcgattgccgacaccagctcggccagcgacgtgatcaccaacaagcgcgagatcaagaccaaggtcatggtcgaggacaacggcctggtgatacttggcgggctgatcagcgacgagttgagtaccagcgaccagcgtgtgccactgctcggcgacattccttatcttggccggttgttccgctccgatgccacccgcaataccaagcagaacctgatggtgttcatccgcccgcgtatcctgcgcgacgggccgagcctggcgggcctcagtgaagacaagtaccgcaccttgcagcagaccacaccgctgcagttgccggaccttgcagagggcacgcggctgctgcaggtattccccgccagccgcgcacgcctggaaggcggtgactgg

SEQ ID NO: 32159 - DNA, 1575 bp, Pseudomonas putida
atggccctcgacattcacgctcaccgcatcctgatcctcgatttcggttcccagtacacccagctgatcgcccgccgcgtgcgcgaaatcggcgtgtactgcgaactgcacccgttcgacatggacgatgaagcgatccgcgaattcaacccgcgcggcatcatcctcgccggcggccccgagtcggtccacgaagccaacagcccgcgcgctccgcaggccgtgtttgacctgaatgtgcctgtgctgggtatctgctacggcatgcagaccatggccgagcagatgggcggcaaggtagaaggttccgacctgcgtgagttcggctatgcccgtgtggacgttgtcggcaagagccgcctgctcgacggcatcgaagaccacgttgatgacgacggcgtgctgggcctggacgtgtggatgagccacggtgacaaggtcacccagatgcctggcaacttcaacattctggccagcaccccaagctgcccgatcgccggcatgtacgacgacgtccgcggctactacggcgtgcagttccaccccgaagtgacccacaccaagcaaggtggtcgtatcctgtcccgcttcgtgcaggacatctgcggctgtgaagccctgtggacggcgtccaacatcgtcgaagacgccatcgcccaggtgcgtgcgcaagtcggttcggccaacgttctgctgggcctgtccggcggcgttgacagctcggtggttgccgcgctgctgcaccgcgccatcggcgaccagctgacctgcgtattcgtcgacaacggcctgctgcgcctgcacgaaggcgaccaggtgatggccatgttcaaagagaacatgggcgtcaaggtgatccgcgccgacgctgaaaagcagttcctcgacaacctggaaggcgaagcggaccctgagaagaagcgcaagatcatcggccgcaccttcatcgacgtgttcgatgccgaagccagcaagctggagaacatccagttcctcgcccagggcaccatctacccggacgtgatcgagtcggctggcgccaagagcggcaaggcccacgtgatcaagtcgcaccacaacgtaggcggcctgccggaggagatgaacctcaagctggtcgagccgctgcgtgaactgttcaaggacgaagtgcgcaagatcggcctggagctgggcctgccatacgacatggtctaccgccacccgttcccgggcccgggcctgggcgtgcgtatcctcggtgaagtgaagaaggaatacgccgacatcctgcgtcgcgccgaccacatcttcatcgaagagctgcgcaaggccgactggtaccacaagaccagccaggcgttcgtggtgttccagccggtcaagtcggtcggcgtcgtcggcgacggccgtcgctacgcctgggtcgtggccctgcgtgccgtcgagaccgtggacttcatgaccgcgcgttgggcacacctgccgtacgagctgctggaaactgtcagcggtcgtatcatcaacgaaatcgacggtatctcgcgcgttacctacgacgtgtcgagcaagccgcctgccactatcgagtgggag

SEQ ID NO: 32160 - DNA, 402 bp, Pseudomonas putida; identical to SEQ ID NO: 31313

SEQ ID NO: 32161 - DNA, 201 bp, Pseudomonas putida
atgagcactatctacaaagaactcgtcgcctatttcgggacgcaggaggttaccgctgagcgactcaatgttgaccagagcacagtctccggctgggtgcgcggtaagcacgggatgtctcctgtggtggctaaacgagctgaacgcctgactgagggcaaattcaagaaggaggctctttgccccggtttcccgtgggat

SEQ ID NO: 32162 - DNA, 1206 bp, Pseudomonas putida
gtgattggccgtgccagcaccgcgcagaagaaccgcgccctgcaagccgccgccgacgcgctggatgctgcccgtgccgagctcaccgctgccaacgagctggacctggccgccggccgcgccagtggcctggagcccgcactgctcgatcgtctggcgctgaccccggcgcgtatcgacggcatgatcaccggcttgcgccaggtggccagcctgccggacccagtcggtgccatccgcgacatgagctaccgtccatcgggcattcaggtaggcaagatgcgtaccccgctgggggtgatcgggatcatctatgaatcgcgtccgaacgtgaccattgatgccgccagcctgtgcctcaagtcgggcaatgcaaccatcctgcgtggcggttccgaagccatccactccaaccgcgccattgccacctgcattcagcgtggcctggccgaagccggcctgccggcggcggtggtgcaggtggtcgaaaccaccgaccgcgaagccgtgggcgcgctgatcagcatgccggaattcgtcgatgtcatcgtgccgcgcggaggccgtggcctgatcgagcgcatcagccgcgatgcccgcgtgccggtgatcaagcacctggacggcatctgccacatctatgtcagccagcatgccgacctggacaaggcctggaatgtggctttcaacgccaagacctaccgctacggcatctgcggtgccatggaaacgctgctggtcgaccaacaagtggctgagcgcttcctgccagaaatggcccgccgcttcgtggagaagggcgtggagctgcgcggttgcgagcgtacccaggctatcatcagcgccaaaccggccaccgaagccgactggcacacggaatacctcgatgcgatcctgtcgattcgcgtggtcgacggcctgaaccaggccatcgagcacatcaaccactatggctcgcaccacaccgactcgatcatcagcgaacaccagggtgaagcccgtcagttcatggctgaggtcgattcggcgtcggtcatgctcaacaccccgacctgctttgccgatggcttcgagtacggcctgggtgcggaaatcggtatttccaccgacaagctgcatgcccgcggccctgtcggcctggaaggcctgacctgcgagaagtatgtggtgatcggcgatggccagttgcgcggccaggggtcctgc

SEQ ID NO: 32163 - DNA, 2436 bp, Pseudomonas putida
atgccaacacaacgtcttcgcccccacgctctggcgctggtcattcgccgctcgttgcgccttgcagcgccaatggccgtcggcctggcgggcctgccggcgatcgcccaggcccaacaggtccagttcaacgtgccggcccagccgctggccagcgccttgttggccttcggctcgcaatcgaacctgcaggtgctctatagcccacaggacgtggaaggcaagcgcagcagcgcactgaccggtgcaatggagcccgccgcggccctgtcgcggctgctgcagggtaccggtgtgagctaccagatccaaggcaaccaagtcaccatccacacccgggaggggggcgctgcggtggaacttggggcaaccaacatcgatggtaagggtttggggcaaaccaccgagaacaccggttcctataccaccggcagcatgcagaccgcgaccaaactgccactgaccctgcgcgaaaccccgcaggccgtcaccgtgatcacccgccagcgcatggacgaccagtcgatgcgtagcctcgacgacgtggtccaggccactcctggtctgcgcatgtcggccgcgcgcccggccaacagcgagtacttttcccgcggctttcccatcaacaacctgatgttcgatggcctgcccaccacctacaacgccgactgggtcgccgcggccgacatggcgccctacgaccgcgtcgagatcgtgcggggcgccaccggcatgatgcaaggtgccggcaacccgtcggcagccatcaacatggtgcgcaaacgccctaccaaggatttccagggcagcgtcaccggctcggccggcagctgggacaattaccgcggcgaactcgatctcagcggcccactgaatgacaacggcagcgtccgtggccgcttcgtcggcgcctacaacgacaaggacagctaccaggattacgccggtcgcgaacgcggcctgttctacggcatcaccgagttcgacctgaccgacgacaccacactgaccgttggcgcgtcgaaccagaacgacaacaacaacatcaactggggtggcctgccggtcaaccgcgatggcagccatgtgggctactcgcgttcgcgcaatatgggctacgactggagctaccaggacatcgataacactacggtgttcgccgaggtcgatcaccgcttcgacaacgactggcgcctgcacctggcggcgtccaagaactggtcggacttcgccatgcaaggcgccgtgttcgagcgcaccggttcggcaaccaacgaagggttccgccagcgcgtgttcaaccagcgccgcgactacgaccagtcgacctacgacgtctatgccaatggcccgttccagctgttcgaccgccagcatgaactggtggtgggcgcgagcaagcgcgaagtcaagaccagcgcccacggcggcaccgtgttcatcccggtcgacagcctcttcagcgtcaaccccagtggcatcgacaagccgaatgtcgatgatatctacaacctgagcgagcacgtcgagcaggaaggggcgtacgtcaccacccgcctgaacatcgccgacccgctgaaggtcatcctgggtgcacgcctggactggtacgacaacaagtcggtgtacagcgaaatcaacgacggctactacaccaacagcgattacaaggtcacccgcaacgtcacccgctacgccggagtgatctacgacctggacgaccaccactcggtctacgccagctacaccgatatcttcatgccgcaatcggaactggcgcgtgaccgctccatcatccgcccaatcgaaggcaagaactacgagatcggcatcaagggcgagtacttcgacggcgcactcaacgccagcgcggcgatcttccagatcgaccaggaaaaccgcgccgcagaagcttctaaccaggaaggttgcgtcgacatcacctgctacgaagcctcgggcaaggtacgcacccacggtatcgacctggagttgatgggcgcactgacccccaactggcaagtcggcgcaggctacacctactcgcaaaccaagtaccgcaaggatgccgacaagaacaaggaaggcaccaagttcgacaccgacctgccagaacacctgttcaagctgagcaccacctacaccttgccgggcgagctgaaccagtggcgcgtgggcggtaacgtgtatggccagagcagcatcttcaacaaaggcagcaacagcttcggcaactaccacatcgatcaaggtgcatacgcggtagtgggcctgatggtcggctacaaggtcaacaagaacctcgacactcgcctgaacctcaacaacgtattcgacaagaagtactaccagggcattgccagcaacaactcctggagcccgtacgacgtgtatggtgacccacgcaacttcaccatcaccgccaagtacagcttc

SEQ ID NO: 32164 - DNA, 1773 bp, Pseudomonas putida
atgatgcgcagccattattgcggccaactgaacgagagcctggacggccaggaagtcaccctttgcggctgggtccatcgtcgccgcgaccacggcggggtgatcttcctcgacatccgtgaccgcgaaggcatggcccaggtcgtgttcgacccggatcgcgccgaaaccttcgctgccgccgaccgcgtgcgcagcgaatacgtcgtgcagatcaccggcaaggtccgcaagcgtcctgaaggtgcagtgaatgccaacatggcttccggtgccatcgagatcctcggctaccagctgaacgtgctcaacgaagcggaaaccccgccgttccccctgaacgaatactccgacgtcggcgaggaaacccgcctgcgttaccgcttcatcgatctgcgtcgcccggaaatggccgacaagctgcgcctgcgctcgcgcatcaccagcagcatccgtcgcttcctcgacgaaaacggcttcctcgacgtcgaaaccccgattctcacccgtgccaccccggaaggcgcccgcgactacctggtgccaagccgtacccacgccggtagcttcttcgccctgccgcaatcgccacagctgttcaagcagctgctgatggtcgctggcttcgatcgttactaccagatcgccaagtgcttccgtgacgaagacctgcgtgccgaccgtcagccggaattcacccagatcgacatcgagaccagtttcctcgatgaaagcgagatcatgggcctgaccgaaagcatgatccgcaagctgttcaaggaagtgctcgatctggaattcggcgaattcccgcacatgaccttcgaagaggccatgcgccgctacggctccgacaagccagacctgcgtattccgctggaactggtcgacgttgccgaccagctgaaggatgtcgacttcaaggtgttcgccggcccggccaacgatccgaagtgccgcgttaccgccctgcgtctgccaggtggtgccagcatgccgcgcagcaaaatcgacgagtacaccaagttcgttggcatctacggtgccaagggcctggcctacatcaaggtcaatgagcgcgccaagggtgtcgaaggcctgcagtcgccgatcgtcaagaacatccctgaggccaacctcaacaacatcctcgaccgcgtgggtgccgtggacggcgacatcgtgttcttcggtgccgacaagttcaaggtagtcagcgaagccctgggtgcgctgcgtattcgtctgggtcacgacttcgagctgctgacctgcgagtgggcgccgatgtgggtcgtcgacttcccgatgttcgaagagaacgaagacggcagcttcactgcattgcaccacccgttcaccgcgccgaagtgcaccccggaagagctcgaggccaacccggccactgccctgtcccgtgcctacgacatggtgctgaacggtaccgagctgggtggcggttcgatccgtatccaccgtaaagagatgcaacaggcggtattccgtctgctgggtatcgaggcagaagaacaggaagagaagttcggcttcctgctcgacgctctgaagttcggggcaccgcctcacggtggcctggcattcggtctggaccgtctggtcatgctgatgaccggcgcccagtcgatccgtgaagtgatcgcgttcccgaaaacccagagcgctgcatgcgtcatgacccaggcccctggcatggtcgacgccaaggccctgcgcgaactgcacatccgactgcgcgaacagaccaaggtcgag

SEQ ID NO: 32165 - DNA, 468 bp, Pseudomonas putida
atgccaagacgtcgtgtagcagcaaaacgtgagatccttgacgatccgaagtacggatcccagattctcgcgaagttcatgaaccacgtgatggaaagcggcaagaaggccgtagccgagcgcatcgtttacggtgccctggataccgtcaaagcacgcaagaacagcgaccccctggaaatcttcgagaaagctctcgacgccatcgctccgctggtcgaagtaaagtcccgtcgtgtcggcggtgccacttaccaggtcccggttgaagttcgtccatcccgtcgtaacgctctggcaatgcgctggctcgtagactacgcccgcaagcgcggcgagaagtcgatggctctgcgtctggccggcgaactgctggatgctgccgaaggcaagggtgctgcagtcaagaagcgtgaagacgttcaccgtatggctgaagccaacaaagcgttctcgcactaccgcttc

SEQ ID NO: 32166 - DNA, 402 bp, Pseudomonas putida; identical to SEQ ID NO: 31313

SEQ ID NO: 32167 - DNA, 591 bp, Pseudomonas putida
gtgaaacaattcatcgatttcatcccgctgctgctgttcttcatcgtctacaagctcgacccgcgccccatggaagtcgccggccatcacttcgaatttggcggcatctacagcgccacggccatgctgatcatcagctcgctggtcgtgtacggcgcactgttcctgcgccagcgcaagctggagaagggccagtggctgacgctgatcgcctgcctggtgttcggtggcctgaccctgacctttcacagcgaaaccttcctcaaatggaaagcccccgtcgtgaactggctgttcgccctgggttttgccggcagccacttcatcggcgatcgggtgctgatcaagcgcatcatgggccacgccctgaccctgcctgatgccatctggacgcgcctgaatctggcctggatcgctttcttcctgttctgcggcgcggccaacctgttcgtcgccttcaccttccaggacttctgggtggacttcaaggtgttcggcagcctgggcatgaccgtgatcttcctggtggcgcaaggcgtgtacctgtcgcgccacctgcacgatgacccttctacctccaaacccaaggat

SEQ ID NO: 32168 - DNA, 402 bp, Pseudomonas putida; identical to SEQ ID NO: 31313

SEQ ID NO: 32169 - DNA, 837 bp, Pseudomonas putida
atgagcgaagatcgatcgagcaacgggcagaagtcctggctgggtaaactgacccaggcttttgcccatgagccgaaaaaccgccaggagctgcttgagctgctgcgcgaagcccatcagaacaaattgctggacagcgaagcgctgaccatcgtcgaaggcgccattcaggtcgccgacctgcaagttcgcgacatcatggtgccgcgttcgcagatgaacagcatcaaggccggccagtcgcctcgcgagttcctgccggcggtgatcgacgccgcgcactcgcgctacccggtaatcggcgaaagccatgacgatgtgctcgggatcctgctcgccaaagacttgctgccgttgatcctcaaggagaacggcgacagcttcaacatcaaggacctgctgcgcccggccaccttcgtgcccgagtccaagcgcctgaacgtgttgctgcgtgaattccgcgccaaccacaaccacatggccatcgtcatcgacgaatatggcggcgtggcgggcctggtcaccattgaggacgtgctggagcagatcgtcggcgatatcgaagacgagcacgacgtcgaggaagacagctacatcaaaccactgcccagcggtgatttcctggtcaaagcgcttaccccgatcgagaacttcaacgagttcttcgacagcgagttctccgatgacgagttcgacacggtcggcggcctggtgatgagcgcctttggccacctgcccaagcgcaacgaaaccactgagatcgggtcttacaagttccgtattctcaacgccgacagccggcggatacacttgctgcgcctgaccccgatcacccgt

SEQ ID NO: 32170 - DNA, 468 bp, Pseudomonas putida
gtgaacattaatgcaaccctgattggccaatccgttgctttcctgatttttgtactcttctgcatgaagtatgtatggcctccggtcatcactgctctgcaagagcgccaaaagaagattgccgacggcttggacgctgccaaccgcgcagctcgcgacctggagctggcccaagagaaagcgggtcagcaactgcgtgaagctaaagcacaagcagccgaaatcatcgagcaaagcaagaaacgcgctgctcagcttgtcgacgaagcccgtgaacaggctcgcgtcgaagctgaccgtgtgaaggctcaggctctggccgagatcgaacaggaactgaacagcgctaaagacgccctgcgtgcccaagtgggtgctctggccgttggtggtgctgaaaagatccttggcgccacaatcgatcaaaacgcgcatgcggagctggttaacaaactggccgctgaaatt

SEQ ID NO: 32171 - DNA, 1461 bp, Pseudomonas putida
atggttcccgtaattgccctggtgggccgcccgaacgtcggcaaatccaccatgttcaaccgcctgaccaagacccgcgatgccatcgtcggtgacctgtcgggcctgacccgtgaccgccagtatggtgatgccagctggcagggtcgttccttcatcctgatcgacaccggtggtatcaccggtgacgaagtgggcatggacgaaaaaatggccgagcagtcgctcatggccattgaagaagccgactatgtgctgttcctggttgatgcccgtgcgggtatgactgcggcagaccagatgatcgccgagcacctgcgcaagcggaacaaggcggcgatcctggttgccaacaagatcgacaacatcgaccccgacgttgcccgcgccgaattctcgccaatgggcatgggtaacgccattccggtggctggctcccagggccgtggtatcaacgccttgatggaggccgtgctcggtcacctgccgcgtgatgccgaagaagaagccctcgagcaggacgtcgctgaaggtgaggaagccgtgcgcattcctggcccaagcgagaaggatggcatcaagatcgccatcatcggccgcccgaacgttggcaagtcgacgctggtcaaccgcatgctcggcgaagagcgtgtggtggtctacgatgagccgggcaccacccgtgacagtatctacatcccgttcgagcgcgatggcgagaagtacaccttcatcgacaccgccggtgtgcgcaagcgtggcaagatccacgaggaagtcgagaagttctcggtggtgaagacgctgcaggcgatcaaggatgccaacgtcgtcattttcgtcatggatgcacgcgaaggtgtggtcgaccatgacctgaacctgctgggcttcgcccttgaagccggtcgcgccatcgtcattgccctgaacaagtgggatggcatggagccgggtgagcgcgcctacgtgaagaccgagctggagcgccggctgttcttcgtcgactttgccgacatccacttcatttccgcgctgcatggtacgggcgtgggcaacttgtacaagtcggtacaggcagcgttccagtccgcggtcacccgctggccgaccagccgcctgacgcagatcctcgaggatgccgtgagcgagcaccagccgccgatggtcaacggtcgccgcatcaagctgcgctatgcccacctcggtggtgccaacccgccactgatcgtgatccacggcaaccagaccgacagcattcccaagtcgtactcgcgttacctggaaaacacctatcgccgggtgctcaaactggtcggtacgccgattcgtatcgagtacaagggcggcgagaacccgtacgagggtaagaagaacacccttaccgatcgccaggtcaacaagaaacgccgcctgatgtcgcaccacaagaaggccgagaagaagcgtcgcgacaaacgc

SEQ ID NO: 32172 - DNA, 1329 bp, Pseudomonas putida
atggctaagcaaggtgctctctcttcgctcggtaagggcgggatgtcggaactctgggctcgtctgcgctttctgttcatggcgatcatcgtctatcggataggtgcgcatatcccggttcccggcatcaatccggaccgtctggcggatctgtttcggcagaatgaggggaccattcttagcttgttcaacatgttttccggtggcgcgctcgagcgcatgagcatctttgcactggggatcatgccgtacatttcggcatcgatcatcatgcagttgatgacggcggtcagcccgcaactggagcagttgaagaaggaaggtgaagctggccgtcgcaagatcagccagtacacccgctacggcaccgttatcctggcactggtccaagccattggcatgtccattggcctggccaaccagggcgtggcgttttctgtaggcctgggcttccatatcgtcgctgtttccactttcgtggcaggcgcgatgttcatgatgtggctgggcgagcagatcaccgagcgcggtgtgggcaacggtatctcgatgttgattttcgcgggtatcgttgccggtcttccgagagcaatcgggcagtctttcgagtctgcacgcacaggcgatatcaacattttcgccctggtcgccatcggtctgctggcagtagcgattatcggttttgtggtgttcattgagcgtggtcagcgtcgtatcgccgttcattacgccaagcgtcagcagggccgtaaggtcttcgctgcgcagactagccacttgccgctgaaagtgaacatggcgggggttatcccggctattttcgcgagcagcattctgctgttcccggcttcgctgggtgcctggtttggtcagtccgaaggtatgggctggctgcaggacatctcgcagtcgatcgctcctggtcagccgttgaacattctgctgtttagtgcagggatcattttcttctgcttcttctacacagcgttgatgttcaacccgaaagacgtagcggaaaacctgaagaagtccggtgcctttattccgggtatccgtcctggtgagcagtcggcacgctacattgatggcgttctgacccgtttgaccatgttcggtgctctttacatgatggccgtctgccttctgccccagttcctggtggtggcagcaaatgtgccgttctaccttggcgggacctcgttgctgattgtggtagtggttgtgatggacttcatgtcccaagtacaatcgcacctcgtttcgcaccagtacgaatccctgatgaagaaagccaacctgaaaggctacggtggcagcggtttgctgcgc

SEQ ID NO: 32173 - DNA, 1290 bp, Pseudomonas putida
atgggtaagaatgtcgtcgtcctgggcacccagtggggtgatgagggcaaaggcaagatcgtcgatctgctgaccgaacatgctgccgccgtagtgcgctaccagggtggccacaatgcgggtcacaccctggtgatcaacggtgaaaagaccgttctgcacctgattccgtccggcatcctgcgtgaaggcgtgcagtgcctgatcggtaacggcgtggtcgttgccccggatgcactgatgcgtgaaatcaccaagctggaagagaaaggcgtaccggtgcgcgagcgcctgcgcatttccccggctgcgccgctgatcctgtcgtaccatgtggccctggatcaggcccgcgaaaaagcccgtggcgaagccaagatcggcaccaccggccgtggtatcggcccagcttacgaagacaaggtggcacgtcgcggcctgcgcgtgggtgatctgttccaccgcgagcgtttcgctgccaagctgggtgagctgctggattaccacaacttccagctggtgaactactacaaagagccagccatcgacttccagcagacgctggacgagtgcatggcttacgccgaacagctcaagccgatgatgctcgacgtcaccgccgagctgcacaacctgcgtcgcgccggcaaggacatcatgttcgaaggcgcccagggctcgctgctggacatcgaccacggcacctacccgtacgtcaccagctccaacaccactgccggtggtatttccaccggttccggcgtcggcccgatgtacctcgactacatcctcggtatcaccaaggcctacaccactcgcgtgggttccggtccgttcccgaccgaactgttcgacgagaccggtgctaccttggccaagcgtggccacgagttcggttccaccaccggccgtgcccgtcgttgcggctggttcgatgccgtgatcctgcgtcgcgccatcgacgtcaacagcatctcgggcatctgcctgaccaagctggacgtactggacggcctggaaaccatcaacatctgcgttggctacaagaacgagaacggtgccgtcatcgacgcgccttccgatgccgacagctacattggccttgagccggtgtacgaagagatgccaggctggagcgagtcgactctgggtgtgaaaaccctggaagagctgccgcaagctgcgcgtgactacatcaagcgcatcgaagagctggttggcgcgccgatcgacatcatttcgaccggcccggaccgcaacgagaccatcgtgctgcgtcacccgttcgcc

SEQ ID NO: 32174 - DNA, 303 bp, Pseudomonas putida
atgactattgacgtcaacgaagccctgaaagcattggcgaacccgatgcgccttgccatcctcaattggctcaaggatcccaggacagtctttcctgagcaggaggtcgacccagaaacggtaggtgtgtgcgtcagtatcatccaagagcgcacgggcctctcgcagtcaacgacatcgctttatctcgcagctctacagcgcgcgcaattggtgacatcgcagcggatcggcccctggacctactacaaacgccacgatgggaatatcgatgccttcttcaaggcgctgcaagaaagaatc

SEQ ID NO: 32175 - DNA, 1188 bp, Pseudomonas putida
atggcggccctgggcttcctggtcactgccgtgggcctgccggtcatcacggtggtcgccctggccaaggtcggtggcggcatggatgcactgagcagcccgatcggcaagttcttcggcggcctgctggcagccgtgtgctacctgtcggtcggcccattgttcgccaccccgcgtacggccaccgtgtcgttcgaagtgggcgttgcaccgctgaccggtgaaagcccgctggcgctgttcatctacagcctggtgtacttcatcgtcgtgctggccgtgtccatgtaccctggcaagttgctcgacaccgtgggccgcttcctggcaccgttgaagatcattgccctggccgtactgggcatcgctgccttcgcgctgcccgccggtagcattggtgacgcacagcctgcctatgctgccgctgcgttctccaagggcttctctgatggctacctgaccatggataccctgggtgcccttgtgttcggtatcgtcattgtcaatgccattcgctcgcgcggtgtcgagtcgccgaggctgattacccgctacgccatcatcgccggcctgatcgccggtgtcgggctggccctggtctacatcagcctgttccgcctgggtgccaccagccacgacatcgcggctgacgccaccaacggtgcggcggtgctgcatgcctacgtacagcataccttcggctccctgggcagcggcttcctggccgtgctgatcgcgctggcctgcctggtgaccgcggttggcctgacctgtgcctgcgccgagtacttcagccagatcctgccgctgtcgtaccgcgcgctggtggtgatcctcgccggcttctcgctgctgatttccaaccttggcctgaccaagctgatcatgttctcgatcccggtgctcaccgccatttatccgccgtgcatcgtggtggttggcctgagcttcgtgaaagacctgtggaactcgccaacgcgcatcctggcacccgtgatgctggtatcgctgttgttcggcatggtcgatgcgatcaagggcagcagccttgcccacgtgttgccagacttcatggcgcacctgccattgagtgatgccggcatggcctggctggtaccttcggtggtgaccctggtgggtgccgtggcctgcgaccgcatgctcggcaagccgcgcgaggcgctggcc

SEQ ID NO: 32176 - DNA, 458 bp, Pseudomonas putida; identical to SEQ ID NO: 31314

SEQ ID NO: 32177 - DNA, 1199 bp, Pseudomonas putida
aagccgctatccgccgcgactttgtgccgccggctgaccgtaccctgccgatcaagaacgtggtggtgatcctgatggaaagcttcgccggccattcggttggcgcgcttggcagccccaacaacatcaccccgtactttgacaagctggccaaagaaggcctgctgttcgaccgcttcttctccaacggcacccatacccaccagggcatgttcgccaccatggcctgcttccccaacctgccaggtttcgaatacctgatgcagaccccggaaggcggccataagctgtcgggcctgccggccctgctcagcgcccgtgactacgacgatgtgtacgtctacaacggcgactttgcctgggacaaccagtccgggttcttcggcaaccaggggatgaccaccttcatcggccgtaatgacttcgtcaacccggtgttctccgacccgacctggggtgtgtccgaccaggacatgttcgaccgcggcaacgaagagctggccaagcatgatggcaagaagccgatctacgcgctgctgcagacgctgtccaaccacacgccgtatgccctgccgaaggacctgccggtagagaaggttaccggccagggccgtctggacgagcacctgaccgccatgcgttattcggactgggcgctgggccagttcttcgagaaggcgcgtaaggagccttacttcaaggacaccctgttcgtcatcgtcggtgaccatggctttggcaaccaccagcaggttaccgagctggacctgggccgcttcaacgtgccgctgctgctgattgccccgggcattcaggagaagttcggtgcggtgaatcacaccgtgggtacccaggtcgacatcgtgccgaccatcatgggccgcctgggtggcaaggctcgccaccagtgctgggggcgcgacctgctcaacctgcccgagggtgaccagggcgtaggcatgatcaagccgtcgggcagcgagcagattgtcgggctggtgcagggtgaccgtatcctgatcgagtccaaggacatgagcccgcggatgtaccgctaccagttgggcagcgagttcaaggccgaactgatcgaaagcccggaccagccggaaatgctcaagaagctggaagcgtatatccagaccgcgaccaagagcctgctggataacaccgccggcgtggtgcacggcacaccgaag

SEQ ID NO: 32178 - DNA, 1350 bp, Pseudomonas putida; identical to SEQ ID NO: 32150

SEQ ID NO: 32179 - DNA, 1116 bp, Pseudomonas putida
ttgctgtcgagcttgcaggcgcgtgccgctgccgagccggacgcgccggtgcgcatcggctacctgccgatcaccgatgccacgccgctgctggtggcacataacaacggcctgttcgaggccgaaggcatcaaggccgagcgcccggtgctgctgcgcagctgggcgcaggtgatcgaggcattcatctccggccaggtcaatgtcatccacctgctttcgccgatgacggtatgggcgcgctatggcagcaaggtgccagccaaggtggtggcctggaaccacgtgggcggttcgggcctgactgttgcgccggatatatccgccgtgaaacagctcggtggcaagacagtggccattccgttctggtactcgatccacaatgtggtactgcaacagttgctcaacgacaacggcctgacgcccgtgtcgaagccggccaatgcgcaactggccgccaacgaagtcaacctgctggtgctgccaccgtccgacatgccacccgctctggccagcaagcgcattgccggctacatcgttgccgagccgttcaacgcactggccgagaacctcaaggtaggccgcgtgcagcgctttaccggcgatgtatggcgcaaccatgcgtgctgcgtggtgttcatgcacgagcatgacctgaataaccgcccggagtggtcgcagaaagtggtcaacgccatcgtcaaggcccagcaatggacccgtgaccatcgcaccgaagccgccgcactgctgtccagggcgggccccaacaagtacaccccgcacgagcctgcggtgctgaccaaggtcctggcgcccgccgccgaagaccgtgctggctacattgccagtggcgccattcgccatcagcagtgggacgaaaaacgcatcgacttccagccatacccgttcccgagttacaccgaagagctggtcaagcgcctgaaaaccaccctgatcgaaggcgacaatacgtttctttccgggctggatccggcgtatgccgcccgcgacctggtcgacgatcgcttcgtgcgtaatgccatcgcgacagtaggtggtccgtcggtgttcggcattgccgacaacttcgagcgtagcgaggagtttgcggtc

SEQ ID NO: 32180 - DNA, 1536 bp, Pseudomonas putida
atgaacctgctcaaatccctggctgcagtaagctcgatcaccatgatttcgcgggtgctgggctttgttcgcgacaccatcctggcccgcatctttggtgctggtgtcgctaccgatgccttcttcatcgcgttcaaactgcccaacctgttgcggcgcatcttcgccgaaggcgcattctcccaggccttcgtgccgattctggccgagtacaagacccagcagggcgaggaggcgacgcgcaccttcattgcctatgtcagcggccttctgaccctggtgctggccctggtgaccgccatcggcatcctcgctgcaccgtgggtggtgtgggccacggccccgggttttgtcgacagcaccgaaaaatacgcgctgaccaccgacctgttgcgggtgacgtttccttatatattcctgatctcgctgtcttccctggccggagcgatcctcaatacctggaaccgcttttcggtgccggccttcacgcctaccttgctgaacgtggcgatgatcgccttcgccgtgttgctgacgccgtacttcaacccgccaatcatggcgttggcctggggcgtgctggcgggtggcctggcgcagttgctgtaccagctgccagcgctgaagaagatcggcatgctcgtgttgccgcgcctgaacctcaaggacgcgggagtgtggcgggtactgaaacagatgctgccggcgatcctgggggtgtcggtgagccagatctcgctgatcatcaacaccatcttcgcttccttcctggtggccggctcggtgtcgtggatgtactacgccgaccgcctcatggagctgccttccggtgtgctgggcgttgccctgggcactatcctgctgccgacactggccaagacctacgccaacaaggaccgcgaggagtactcgcgaattctcgactggggcctgcgcctgtgcttcctgctggtactgccctgcaccctggcgttggccattcttgccgaaccgctgaccgttgctttgtttcaatatggcaagttcagcgcgtttgatgcggcgatgacccagcgggcgttgatcgcctattccgtgggcttgctggcgatcattctgatcaaggtactggcacctggcttctatgcgcagcagaatattcgcacgccggtgaagatcgcagtcttcaccctggtctgcacccagctgttcaaccttgccctggtcggcccgcttgcacatgccggcctggcattggcgatcagcctcggtgcctgcctgaatgccggtttgctgttctggaagctgcgcagtcagcagctgttcgagcctcagcctggctgggcagtgttcctgctcaagcttgtgttggcggtgacgctgatgtcggcggtactgctggcgggcatgcactatatgccggcctgggagcagggcatcatgcttgagcgcttcctgcggcttggggcgctgatcctggcgggcgtcgtgacgtattttggctgcctgtacctgtgtggcttccggccccggcatttcgctcgcaaggccttgcac

SEQ ID NO: 32181 - DNA, 1089 bp, Pseudomonas putida
atgaccgcatcgattgtggcgcacctgaaactggcacgcgacgactttaccctggacgtcaacctgcacctgcccgggcgcggcatcagcgcgctgttcggccactctggctccggcaagaccagctgcctgcgctgcctggccgggctggaacgggccgccagcgcctatatcgaagtcaacggcgaagtctgggaagacagcacccgaggctacttccaggcaccgcacctgcgcccggtgggctacgtgttccaggaagccagcctgttcccgcacctgtcggtgcgcggcaacctgacgttcggctggcgccgggtagcgcccgctgaacgcaaggtcagcctcgaccaggcgtgccaactgctgggtatcggccacttgctggaccgccgcccggcaaccctgtcgggtggcgaggcgcagcgggtgggtattgcccgcgccctgctcagcagcccgcggctgttgttgatggacgagccgctggcagccctcgacagcccgcgcaagcgcgagatactgcccttcctggagcgcctgcacgacgaactggatatccctctgatatatgtcagccacgcccaggatgaagtcgcgcggctggccgaccacctggtgttgctggaacaaggccgggcgatcgccagcggcccgatcggcgaaaccctggctcgccttgacctgtcgctggcccagggcgacgacgccggcgtcgtgttcgaaggtagggtggttgggcacgacccgcattacggcctgctggacctgcgcctgcccggcagcagcgggccgctgctgcgcatcacccacgcggcgcaggtgatgggcagcaccctgcgcgtcaaggtgcaggcccgggatgtcagcctggcactggcggcggatagcgcatcgagcatcctcaaccgcctgccggtgcgtgtgcgcgagagctgcccggcggccaacccggcgcatgtgctggtcagcctggatgctggcggcaatgccctgcttgcacgcatcacccgcttctcggcagaccagctcggcttgcacacagggcagatactgttcgcccagatcaagtcggtggcccttttgggt

SEQ ID NO: 32182 - DNA, 1212 bp, Pseudomonas putida
atgatcttcggcatcttcaaaccctacccgtcgccgctgatcagcggccgtggcatcgacctggacttcccgatgctcgccggttgcctggccttgctgggcctgggcctggtgatgatcacttcggcctcctcggaagtggctgcggtacagtccggcaacccgctgtatcacatgtttcgccacctggtgtacgtgttccttggcctggtggcctgtggtgcaaccatgctggtgccgatcgccacctggcagcgcatgggcttcatgatgctgcttggcgctttcggcttgctggtactggtgctggtgccgggtatcggccgtgaggtcaacggctccatgcgctggatcggtttcagcttcttcaacgtgcagccttcggaaatcgccaaggtgttcgtggttatctacctggccggctacctggtacgccgacagaccgaggtacgcgaaacctggatgggcttcttcaagccgttcatcgtactgctgccgatggccgccttgctgctgatggaaccggacttcggcgccacggtggtgatgatgggcgcggcggcggccatgttgtttttgggcggggtggggctgttccgcttcagcctgatggtggtgctggcggtgctggcggtatttgtcctggttcaggcgcagccctaccggatggcgcgccttattacgttcaccgacccctgggccgatcagttcggctccggctaccagctgacccaggcactgatcgccttcggccgtggcgagtggctgggcgttggcctgggcaacagcgtgcagaagcagttctacctgcctgaagcgcacaccgacttcgtgttctcggtcctggcggaagaactgggcgtggtcggctcgctgctgaccgtcgcgctgttcgtgttcgtcaccgtgcgcgccctttacatcggcctgtgggccgaaaaagccaaacagttctttgccgcctacatggcgttcggcctggctttcctgtggattggccagttcctgatcaacatcggtgtgaacgtcggcctgctgccgaccaagggcctgaccctgccgtttctcagttacggggggagctcgctggtgatctgctgcgcctgcgtgggccttttgctgcgcatcgagtgggaaagccgcacgcacctgggcagtgaggagcacgaattcagcgaaagcgattttgccgaggagaccagtcatggccgc

SEQ ID NO: 32183 - DNA, 861 bp, Proteus mirabilis
atgtcaacgaaatatcctatcgttttagttcatggtttagctggttttaatgaaattgttggttttccctacttttatggtattgcagatgccttaaggcaagatgggcatcaagtttttaccgcttctctttctgcctttaattcaaatgaagtgcgtggcaagcagttgtggcaatttgtccagactctcttacaagagacacaagcgaaaaaagtgaattttataggtcatagccaagggccattagcttgtcgttacgttgcggctaattatcctgatagtgttgcttcggtaacttcaattaatggtgtaaatcatggttcagaaatagccgacttatatcgacgcattatgcgtaaagacagtatcccagaatatattgtcgaaaaagtattaaatgcatttggtactattatctcaacattttctggtcatagaggcgatcctcaagatgctattgccgcattagagtctttaacaacagagcaagtcacagaatttaataacaaatacccacaggcattacctaaaatccctggtggtgaaggtgatgaaatcgtcaatggggttcattactactgttttggtagctatattcagggattaattgctggggaaaaggggaatctactggatcctactcatgcggcaatgcgtgtgttaaatacattctttactgaaaaacaaaatgacggcttagttggtcgctcgagtatgcgattaggcaaattgataaaagatgattatgcgcaagatcatattgatatggttaaccaagttgcagggttagtgggttataatgaagatatcgttgctatttatactcagcacgctaaatacttagcgagtaagcaactt

SEQ ID NO: 32184 - DNA, 327 bp, Proteus mirabilis
cctgatcataaacataccctaatcgctttaacatcgatttacggcattggtaaaactcgttcacaggctatctgtgaagcaacgggtattgctgaaaatgttaagatcagtgagctgtctgaagagcaaatcgacaagctgcgtgacgaagttgccaaatacgttgtagaaggtgatctacgtcgtgaagttaccctgagcatcaaacgtctgatggatcttggtacttaccgtggtttacgtcatcgtcgtggtctaccagttcgcggtcagcgtactaagactaacgcacgtacccgtaagggtccgcgtaagccgatcaagaaa

SEQ ID NO: 32185 - DNA, 1596 bp, Proteus mirabilis
ttgttaataagtaataatatcactatgcagtttggttcgaagccactgtttgaaaacatttctgttaagtttggtggcggtaatcgctatggtttaatcggtgctaacggcagcggtaaatccacctttatgaaaattctcggtggtgatctcgcgcctactagcggtaacgtattccttgatcctaatgagcgtttgggtaagctaaaacaagatcagtttgcttatgaagagtttaccgtgcttgatacggtaattatggggcacgctgagttatgggaaattaaacaagagcgtgaacgtatttatagcttaccggaaatgagcgaagaagagggtttacgtgttgccgatcttgaagtgaaattcggtgaaatggacggttacaccgttgaatcacgtgccggtgaattattattaaacgttggtattccacttgagcaacataatggcccaatgagtgaagtggcgccaggatggaaactacgtgtgctccttgcacaagccctattcgctgatcctgacatcttattacttgatgaaccgacgaataacttagatattgatacgatccgctggctagaacaaacattaaatgaacgtaatagcactatgatcatcatttcccatgaccgccattttttaaatatggtgtgtactcatatggccgatcttgactatggtggattaacagttcacccaggtaattatgatgagtatatgttagcggcaacacaagcgcgtgaacgtttactcgctgataatgcaaagaaaaaagcacaaattagtgaattacaatcctttgttagccgctttagtgctaatgcatcaaagtctcgtcaagccacttcgcgtgcaaaacaaattgaaaaaattcaattaaccgaagttaaagcttccagccgacaaaatccctttattcgttttgagcaagagaagaaattatttcgtaatgcgttagaagtagagaatattgctaaaggttatgaagcaaatacgcctttatttaaagacgtaaatatgatgctggaagtgggcgaaaaagtggcgattttaggcaccaatggtgtgggtaaatcaaccatgatcaaaacattagtgggtgaattaacgcctgataatggacgcgttaaatggtctgaaaatgccactataggttattatgcacaagatcatgccactgattttgaagttgatatgaccgttttcgattggatgagtttatggatgaagccagaagacgatgaacagtcggtgcgtagtgtattgggtcgccttcttttctcacaagatgatattaaaaaatcagtcaaagtattatctggtggtgaaaaaggcagaatactgtttggtaaattaatgatgcaaaaaccaaacgttctgattatggatgaacctaccaaccacttagatatggaatctattgagtcactgaatatggcgttagaactctatcaagggacgttaatttttgtttctcacgatcgtgagtttgtcagctcattggctaaccgcattattgaaattacgcctgaaaaagtgactaatttccaaggcacttatgatgagttcttggctaagaaagggattgatggt

SEQ ID NO: 32186 - DNA, 930 bp, Proteus mirabilis
atgactgattttgcaatggttttccctggacagggatcacaagcgattggaatgcttgcagaacttgccgagcattatccaatagtgacagaaacatttgctcaagcatctgatgtattgggttattctctttgggatttagtgcaaaatggtcctgaagaagagttaaacaaaacatggaaaacacagccggcattattagcagcatccgttgctatttggcgagtatggcaagaaaaacaaggcaaaatgccacaaatgatggcaggtcacagtcttggtgagtattctgctttagtctgtgctggcgtaattgattttgctgcggcgattaaactagtagaattgcgcggtcaattaatgcaagaggctgtacctgcaggtactggcgccatgtatgcaattatcggattagataatgatgctattgcaaaagcttgtgaagatgcggctcaaggacaagttgtctcacctgtgaactttaactcacccggtcaagtggtgattgcgggtaataaagaagccgtagagcgtgcaggggcattatgtaaagaagctggagcgaaacgtgcgttacctttagcggtaagtgtgccttctcactgtgctttaatgaagcctgctgcagataagttagctgttgcattgcaagaaattgaatttaaacaacctgaaattcaagttgttaataatgttgatgtgaaagcacaaaccgatgctaatgctattcgagatgcattagttcgtcagctttataacccagtccgctggactgaaacggttgaatttattgctggtaagggcatcacacaattattagaaataggacccggtaaagtattaactggtttaacgaaacgtatttctaaagagatgaacgctgcagcagttaatgatattgcatcattagacgctgcattaggaaatgac

SEQ ID NO: 32187 - DNA, 978 bp, Proteus mirabilis
atgccttgtggtgaattctccctcattaaacaatatttcacttctcagccagttaaacgcaaagatgtgagtacgggaattggggatgactgtgcaatattgactgtacctgaaaagcaacaagtggcaattagtactgataccttagtcagtggaatacacttcctaccaaccatttcccctgaagatttagcgtataaagcattagcggtcaatattagtgatttagccgcggtgggggcagatcctgcttgggcctcattagctttaacattgccaaaagtcgataatgattggcttgaggcctttagtcgctctctatttgcattagcagagtattattctattcaattgattggtggggatacaaccaaagggccattgagcttaaccatcacaatacaaggtttagttcctcaaggtatggcactattacgctctggggcgaaaattggtgactggatctatgttacaggctttttaggtgatagcgcggcaggactcgcggttttacaaaatagattacaacctagtcaaccagaaagccgagactattttattactaggcatttgcgtccgcagcctcgtcttttacaagggcaagcattaagatctttagcaagtgctgctattgatatttctgatggtcttatttcagatctaaaccatattttaacggcaagtggttgtggtgctcgtattaacttagatgcgttgcattattctgcggcaatgaaatcacaggtgagtaaagagcaagctgaagtttgggcattaagtggtggcgaagactatgaactatgctttaccgtgcctgaaataaatcgtggggctttagatattgctttagcccatacgggcgctgactttcattgcatagggcaaattatgccaattgcagaaggtatacgttatttacgtgaaggtaaagaagtgcaccctaatctgaaagggtttgatcactttgatgataataaa

SEQ ID NO: 32188 - DNA, 834 bp, Proteus mirabilis
gtgctgaggcgctttaaaaaggcgcagggaaattcgtttatgcgacatagctacttattagaacgaagccgtgatgaaatattacaaggccaagtcactattcacactgaaggtgaaatggtaggccaaataaacggtctttctgtcttagattatcccggttatcccgatctaattggcgagccaactcgtattacctgtgtggctcatattggtgatggcgaattggtcgatattgaacgtaaagcagaattaggtggcaatatccatgcaaaaggcatgatgattatgcaagcctacttaaattctgaattacgattagatcagccacaaccttttagtgcttccgtcgtttttgaacaatcttacggtgaagtagatggtgatagtgcctcactagcagaattatgtgcgttaattagtacattgtcacaacacccaattgatcaacaaatcgccgtaaccggtgccgtagatcaatttggtcaggtacaacctattggtggtgttaatcaaaaaattgaaggcttttttgatatctgtcagcaaagaggattaacaggctcacaaggggttattataccgctggcgaacgtgcgacatcttgttttaaacgatagcgtgatacaagctgtcaaagaaaataagttccatatttggccggttgtccatgttgcagaagcaattactttgctaacacatcagccttattacgaagaacaatgtgaaaatccacaatcaaatgaacacttgttagctgttattcatgatcgaataacacaagctaataatcaggataggcctaagttaccttggttcctgcgcttattcaga

SEQ ID NO: 32189 - DNA, 363 bp, Proteus mirabilis
atgtctatctctaaagacgatatcttaaatgcagttgctgaaatgtctgtaatggacgttgttgaactgatcactatgatggaagaaaaattcggtgtatctgctgctgcagctgttgctgttgctgcgggtccagcagaagctgctgaagaaaaaactgaattcgacgttatcctgaaaggtatcggcggtaacaaagtagcagtaatcaaagcagtacgtggcgctaccggtcttggtctgaaagaagctaaagacttagtagaatctgctccagcagctctgaaagaaggcgtaagcaaagatgatgctgaagctctgaagaaagctctggaagaagcaggtgctgaggttgaagttaag

SEQ ID NO: 32190 - DNA, 1335 bp, Proteus mirabilis
atgctaaaaaagcagccattaatcactgtgtatttcaataaagtggattattgcttttatcgcaaaagtctattgtttattgtctactttattgcctgtctagcgctaattaaactttttgccaatttaacattacctttatacgctattttactaggaacaataatgaaagcattttttcctttatttgccctcgctacaggagcatttgccataggagccaccgaatttacacctatgggattgctacctaatattgctaatggactgagtatttccatagcaaccgcaggtggattaattactggttatgctgttggggtgatgattggtgcacctattatgacattaagtcttggcaaattaaccaaacgtcatgcattgggattattgttattattatttattgcaggaaatctattagccgcacaagcagatagttattggagcttaatgatagctcggttgatcactagcctaaatcatggtgctttttttggtatcggctctgtcgttgctgccagtttagttgaaaaacataaacaagcctctgccgtcgctgctatgtttatgggattgactatcgctaatttagtcggtgtacccttagtcacttggattggacagcaatatggctggagattagcctttatattaatttcaggtctgggttttattaccctaatcggattattaatgtttttacctgttatgcctaaaggaaataaacctaatattaaatatgaactgggtgttcttactcgtttacccgttgtattagcactattaacaaccgtatttggtgcctctgcactttttgccttgtatacctacattgctccttttttaaccaacaccgttcatatatctgaaagtcatgtcgctgtggtattagttattattggtctaggatttaccatcgggaattacttaggaggaaaactatcttcctacggtatcgaaaaaacattaatccttttcttcatcctacttatcggctctatgtcagttttaccgttagtttcccataatgtgtatctggcagtggcgactatttttatttggagtatcgcaagctttgcacttgttcccgcgttacaaattaaaacaatgcaaatcgcccatgatgcacccgccttagtttcatcagtaaatataggtgcgtttaatttaggtaatgctatcggagccatcatcggcggtatcgcattaaaatacagttataacattgtgcctttaaccgcggcactggtaggcgttattggcctgcttctcgtctattcacaaatcaaaataaaaaaatcgttctcctcagaatgttgcgttaattcttta

SEQ ID NO: 32191 - DNA, 1398 bp, Proteus mirabilis
atgtcatttactagatcagtacttgcactcgctgttatggcggtttcttttactagtcacgcagccaaacaggctgatttaatgattgtcgatggcacagtgttaacaatggacgcacaaaatcaggttatcgaacaaggaacggttgttgtaaaagaaaataaaattatcgccgttggggggcctgagttaacacaagaataccaagccaacaaagtgttagatgtggatggtgatatcgtgatgccaggattaattaatacccacacacatgcatcaatgacggtttttcgctctttagctgatgacgtgccagaccgattacatcgctatattttccctttagaaaataaaatggtgtctcgcgatatggttcgcgtgggagcaaacctcgccaatgttgaaatggtaaaagggggagtaactacctatgttgatatgtattattttgaagatgaagtcgctaaaacggttgataagatgggaaatagagccatcttaggtgaatcagtgattaattttccggtggctgatgcacaaactcctgaagaaggcattcaatatgctgtcaattttattaatgaatataaagatcacccgcgcattattcctgcctttgcacctcatgcaccttataccaataccacagagaacctgcaaaaaattgctaaactctcggtagagcttgatgcccctgtgatgatccatttagcagaaaccgatagagagaaagaagaaattgcaaaacgaaccgatggtaaaagcccagttcaatatatggcagatattggcgctttaaataataaagtcattgccgctcatgcgattatggttgatgagcaagatattgatttattaaaaaaatatgatgtaggtgtgactcataatattagtgctaataccaaatcagccaaaggtgtttcgcccgttgttgccatgctagaaaaaggtgttcgtgttggtttagggactgacgggccaatgtcgagcaatacactcacaacgatgaatgagttaaatttagtaggcaaaattcataaattagagaataaagatcgcgccgcaatgccaccattaaccgtcgttgaaatggcaacaataggctcggccaaggcattacatatggaagataaattaggctctttagaatcgggaaaacttgctgatattattgttgttgatactaaagcacctaatatggtgcctatgtatagcccatatgcagcattagtttatggtgcgaatggaagtaatgttcgtcataccattgtagatggtaaaattttgatggaagatcgccaactgttaaccgtagatgaacaagcgattatcagtgaagctcaaaattttgcgaataaagtacgccaaaccgttgttgatagtggtgaagttgttaaa

SEQ ID NO: 32192 - DNA, 192 bp, Proteus mirabilis
atgagcactatcgacgaacgcgttaagaaaatcattgttgaacaactgggtgttaaagaggaagaagttgtgaattcagcttcgtttgttgatgacttaggcgctgattctcttgacacagttgagctggtaatggctctggaagaagaattcgatatcgaaatcccagacgaagaagcagaaaaaattact

SEQ ID NO: 32193 - DNA, 736 bp, Proteus mirabilis
atgggatttgacggaaaaatagcgctagttactggtgcaagccgtggtattggccgtgcgattgcagaaaagctaatagcatgtggtgctaccgtaattggtacagcaacgagtgaaacacggtgctaaagcgatcagcgaatatttaggcaataaaggtaaaggttttgtgttaaacgtcacagaaactgactctattgaaaaatttttagctgatgtgcgcgcggaatttggcgaaattgatattttggtcaataatgcaggtattactcgtgataacctgttgatgcgcatgaaagatgatgagtggcaagatatcattgacactaatctttcatcagtcttccgtctgtctaaagcagttatgcgtgctatgatgaaaaaacgttatggtcgcataattactattggttcagtagttggaaccatgggtaatgctggacaggcaaactatgcggcagcaaatgcgggtgtgattggttttagtaaatcattagcacgcgaagttgcttcccgtggcattacggtaaatgttgttgctcctggctttatcgaaactgatatgaccagagcgttaacagaagaccaaagagccggtattttatctcaagtgccagctaaccgtttaggtgatgccaaagagattgccagtgctgtagctttcttagcttctgatgaagcaggctatatcacgggtgaaacattgcatgtcaatggcggcatgtacatggtctaa

SEQ ID NO: 32194 - DNA, 776 bp, Proteus mirabilis
atgtcaaaacagcaaatcggcgtggttggtatggcagtgatgggacgtaaccttgcgctaaacattgaaagccgtggttacactgtatctatctacaaccgctcgagcgataaaaccaatgaagtgatcgctgaaaatccaggtaaaaaactggttccgaattactctattgaggaatttgttgattcattagaaaaaccgcgtcgtattttgttaatggttaaagcgggtgaagcaacagataaaaccatcgcagccctgacaccacatttagataagggcgatatccttattgatggcggaaatactttctttaaagatactattcgtcgtaatcgtgagctatcggctcaaggttttaactttattggtacgggtgtttctggtggtgaagaaggggcattaaaaggaccttctattatgcctggtggtcaaaaagaagcctatgagttagttgctcctattcttgagaaaattgccgcggtggcagatggcgagccttgtgtcacttatattggtgcagatggtgcaggtcactatgtgaaaatggtacacaatggtattgaatatggtgatatgcaactgatagcagaagcttattcagtattaaaacactcactaggtttaactaacgaagagttagctgacacttttaccgagtggaataaaggcgaattaatagctaccttattgaaattactgctgatattttccgtaagaaagatgaagaaggtaactaccttgttgatgttattcttgatgaagccggcaataaa

SEQ ID NO: 32195 - DNA, 408 bp, Proteus mirabilis
atgttacaacctaagcgtacaaaattccgtaaagtgcataaaggccgcaaccgtggcttagctataggtacggatgtaagcttcgggacttacggtcttaaagctgtgggccgtggtcgtctgactgcacgtcagatcgaagcggcacgtcgtgcaatgacccgtgcagttaagcgtcagggtaaaatctggatccgtgtgttcccagacaaaccaatcactgaaaagccgctcgaagtccgtatgggtaaaggtaaaggtaacgtagagtattgggttgccttgatccagccaggtaaagtcctatatgaaatggatggtgtgcctgaagaagtggcccgtgaagcatttcagctagcggcagcaaaactgcctatcaaaaccacctttgtaactaagacggtgatg

SEQ ID NO: 32196 - DNA, 642 bp, Proteus mirabilis
gtgttcgcggtaacttactttgttgtttttgtagaaagaggacaacgtcgtatcgttgttaactatgcaaaacgtcaacaagggcgtagaatatacgcggcacaaagtacacatctaccacttaaggtaaatatggcgggtgtaataccggcaatttttgcttcaagtattattctgtttcctggtacaataacctcttggtttggcgatggtacaggatggggttggctgacgacaatttctttaaatttacagcctggtcaacctatttatgtgttactatacgctgctgcaatcatcttcttctgtttcttctatacggcgttggttttcaacccaagagaaacggcagataacctgaagaagtccggtgcatttgtaccaggaattcgcccgggagagcagacggctaaatatatagataaagtgatgacacgtttaaccttaatcggtgctctgtacattacctttatctgtctcatcccggagttcatgcgtgacgcaatgaaagtacctttctattttggtggtacttccctcttaatcgtggttgtggtcatcatggattttatggctcaagtgcaaactctcctgatgtcaagtcagtatgagtctgcattgaaaaaagcaaaccttaaaggc

SEQ ID NO: 32197 - DNA, 336 bp, Proteus mirabilis
atggactacggcaaattcctctatgagaaaagtaagactctcaaagaacagaaaaagaaacaaaaggttattcaggtcaaggaagttaaattccgtcctggtacagatgaaggcgactatcaggtcaaactacgcaacctgattcgttttcttgaagatggcgataaagccaaagtcacactacgttttcgtggtcgtgaaatggcacaccaacaaatcggtatggaaatgcttaatcgcatccgtgaagatttggatgaactggcttctgttgaatctttccctaataagattgaaggtcgtcagatgatcatggtgctagcgccgaagaagaaa

SEQ ID NO: 32198 - DNA, 1753 bp, Proteus mirabilis
cgtactaattattgtgggcagttgaatagcgcccatgtgggccaaaaagtgactctttgtggttgggttaaccgccgccgtgacttaggtggacttatctttattgatatgcgagatcgtgaaggtatcgttcaggtcttttttgacccagagcagaaagaggcattttcacaggcttcagaactgcgtaatgaattttgtattcaagtcacaggaacagtacgtgctcgccctgatagccaagttaataaaaatatggcaacaggtgaaattgaactagcggcagaatcgctgtctatttttaaccgttctgaagcgctacctttagatagcaaccaaacgaatacagaagagcgtcgtttaacttatcgttatttagatttacgtcgccctgaaatgtcacaacgcctaaaaactcgtgcgaaaatcacaagttttgttcgtcgctttatggatggtgaagggttccttgatgtagaaacgccaatgctaactaaagcaacgccagaaggtgcgcgtgactatttagtaccaagtcgtgttcataaaggtaaattctacgcattacctcaatcaccacagcttttcaaacagctgttaatgatgtctggttttgatcgctattatcaaatcgtaaaatgtttccgtgatgaagatttacgtgctgatcgccaacctgaatttacccaaatcgatgttgaaacctctttcatgaccgcagaacaagtgcgtgaagtgatggagcgcatgatccacgcattgtggctagatatcctgaatgttgatttaggggcattccctgtcatgacctttgcagaggctatgcgtcgttacggctctgataaaccagacctacgtaacccaatggaactcatcgatatcgctgatttagtgaaaaatgttgagtttagcgtctttgcacaagctgctaatgatgaaaaatgtcgtgttatcgcgttacgtgtaccgggtggtgcatcgttaactcgtaaaaatatcgacgagtatactcaatttgtcagtatttatggtgccaaaggcctagcgtggatgaaagtcaacgaaaaggcaaaaggtatcgaaggggtacaaagccctattgctaaattcctgactaatgatgtggttaacagcatcttagcgacaacaaatgcaacagatggcgacttaattttctttggtgcgggtcgtcaaggtaccatgagtgatgctatgggagcgttgcgcctgaaagtcggtcgtgatctggaactaactgatcttaacgcatggaaaccaactgtgggttattgatttcccaatgtttgaagaagatgaagataccggcagcctaagtgcaatgcaccatccatttacttcaccaaaagatctcacgccggcagagctaaccgcacatcctgtaggcgcagtagctattgcctatgatatggttattaacggttatgaagttggtggtggctcagtgcgtatccatcgtaatgaaatgcaacaagcggtatttagcattttaggtattactccggatgagcaacgtgagaaattcggtttcttattagatgctctgaaatttggtacaccaccgcatgcagggttagcatttggtttagaccgcttagtgatgttattaacaggaacagataatatccgtgatgttatcgcgttcccgaaaaccacggcagcggcttgcttaatgaccaatgcaccaagttttgcaaatgaagacgcgttaaaagagctggctattcaagtgaca

SEQ ID NO: 32199 - DNA, 327 bp, Proteus mirabilis
atgttcggaaaaggtggtttgggcaatctgatgaaacaggcccaacagatgcaagaaaaaatgcagcaaatgcaagaagagatcgcaaacttagaagtcaccggtgaatctggtgctggcttagtgaagatcactatcaatggtgctcataattgccgtcgtgttgaaatagatcctagtctgctagaagatgacaaagagatgttagaagatctgattgctgccgcctttaatgatgctgcacgtcgcattgaagagacacaaaaagagaagatggcatcagtctctaatggtatgcaattgccaccaggctttaagatgccattc

SEQ ID NO: 32200 - DNA, 651 bp, Proteus mirabilis
atgtctgaaggaatgatttatttattaattagtgggatctgggaaaccttagtcatgacatttgtctcaggcttttttggttttgtcattggattaccattaggtgtcttactttatgtgactcgaccagagcaaattatggcgaactcacccgcttataaagtgatttctgctttagttaatatttttagggccatcccttttattatcttattagtttggatgatcccttttacacgtatggtagtaggaacatccattggtttacaggcggctatcgttccgttaactgtaggagctgcaccttttattgcacgtatggtagaaaataccttattagaaatacctcatggtttaattgaagcttctcgtgccatgggggcaacaccaatgcagataatcaagaaagttttattaccagaatctttaccaggtttaattaatgctgcgaccattacactcattacattagtcggttattccgcaatggggggcgctgtgggtgccggtggtttaggtcaaattggttatcagtatggttatgtgggctataatgccacagtaatgaataccgtcattgtactacttgttattcttgtttttatcattcagtttattggcgatcgtttagttaaactgacaacacataaa

SEQ ID NO: 32201 - DNA, 804 bp, Proteus mirabilis
atgagtattaagcttatcgttattgatttagatggaacgttactaaacgaacaacatgagatcacacctgaagtacatcaagcgatccaacatgctaaaaattctggagtgcatattgttcttgcatctgggcgatcttttaacggcatctctccctatttaaaagcactgaatcttgatacatctgataacttttgcattagcaataatggtagccaaattcaccaagcagaaaatggtgaaattatcaccgaagacttgctcaattttgaagattacctctattttgaagatctctcccgtgagataggtgttcactttcatgttttaagtgataataaaatttataccaccaatcgccatattagccattttacttgtcgtgaagcattcttaacgtggacacctctctattatcgccctttaagcgaaatgcaaagagatatgcgctttagtaaatttatgatcgttggtacacctacggtattagataacgcgatgcaatatttacctgctaatatctatcaacaatacagcatattacgtagcgctccttattttattgagatattaaataccgatgtcaataaaggaaatgcggtacaaaaaatagcagaacatttaaaaatcactccagagaaaataatgtgtattggcgatcaagataatgatttagcgatgttacagtatgcaggattgggtgttgcgatgggaaacgcccctgaagagatcaaaaaagtggcgaaatttattacattatctaataaagaacacggtgttgccgtcgctatcaataaatttatt

SEQ ID NO: 32202 - DNA, 831 bp, Proteus mirabilis
agaactagtggatcccctactggggtcatctaccgtcgtactgacttaaatccaccggtggattttccagcagacgcaaaatcagttcgtgacactatgttatgtacttgcttagtgaatgaagatgatgtgcgtatatcaaccgttgagcatttaaatgcagcactggctggtttaggcattgataatatcgtaattgaagtggatgcacctgaaattcctattatggatggcagtgcagcaccttttgttttcttattgcttgatgcaggtattgaagagcttcgcactgcgaaaaaattcatccgtatcaaggaaacagtacgtgttgaagatggcgataaatgggcggaaatgcgtccttataatggttttaaattagattttactatcgattttaaccatcctgctatcgatgcaagtactcagcgttataaattagatttctctgctgaatcctttatgagtcaaataagtcgtgctcgtacatttggatttatgcgtgatattgaatatttacaatcgaaaggattgtgtttaggcggtagctttgattgtgctatcgtggttgatgactatcgtgtcctcaacgatgatggtttacgttttgaagacgaatttgttcgtcataaaatgttagatgcaatcggtgatttatttatgtgtggctataacattatcggtgaatttaccgcgtttaaatcaggtcatgcactaaataataaattgcttcaagctgttttagcaaaagagtctgcttgggaattcgtcacctttgaagacgaagcgaaaatgccagtggcatttaaagcgccatcgacagtttttgct

SEQ ID NO: 32203 - DNA, 771 bp, Proteus mirabilis
atgaacaacagtaacttcagacctttattgatgagtctgttgttactggttggcgtagcggctcctgtagccgctattgcccaagcgccaatcagtaatatcggttcaggctctactgatgaacgactcgcccaacttgagcgtatctctaatgctcatagtcagcttttgacccaattacagcaacaactcgcagattctcaacgcgatattgatatgttgcgtggtcaaattcaggaaaatcaataccagttaaaccaagttgtagagcgtcaacgtaatatctatcaacaattagatagcctaaatggtggcaactcagcaccaacaacggatgaggcttcaacgggtggcaatgtaccttcaacatctgatacaagtacgagttcgtcgtcaacaggtgatgaaaaagccgattataacgcggcaattgatattgtattgaattcaaaagattacgataaggcaattgttgcattaaacaactttattaaaagttatccgaagtctagctatcaatcaaatgctcaattttggttggggcaaatgtattatctaaaaggtaataaagatcaggctgcgagtacttttgctattgttgtgaaaaattatccaaaatctcaaaaagcaagtgaggccttttataagatagggcttattatgcaagagaaagggcaaaaggataatgcgaaagctatttatcaacaagtggttaagcaatatccaaacagtgctggtgcaaaattagcacaaaagcagttagcagcacta

SEQ ID NO: 32204 - DNA, 309 bp, Proteus mirabilis
atgcagaaccaaagaatccgtatccgcctgaaagcttttgatcatcgtctgattgatcaatcaactgcggaaatcgtagagactgctaagcgcacaggtgcgcaagttcgtggtccaatcccactgccgactcgcaaagagcgtttcacagtgttgatttctccgcacgttaataaagatgcgcgtgatcagtatgaaattcgcactcacaaacgtctggttgacatcgttgagccaaccgagaaaaccgttgatgctctgatgcgtctggatctggctgccggcgtagacgtgcagatcagcctaggt

SEQ ID NO: 32205 - DNA, 735 bp, Proteus mirabilis
atggatacaaattcaattccgaagtattccatccgtgggcacaatatctggggatttaaagatatggcgcattttttggattatctttatcaaggtgcgcaaattaaaagtggctctttaattgcgattaatgcagaaaaaatcttaaccgcagaaacagataaaggcctaaatcagttattagatgaagcggattatttgtacgccgatggcattagtgttgttcgcggcattcgacgtaaatatcctgatgcacaagtgtctcgtattgcgggagccgatttatgggaagctttaatggagcgtgccgggaaagaaggcacaccggtctttttggttggtggcaaacctcaggtattggcgcagacggaaagtaaattaaaggcacaatggaatgtgaatattgtcggtagccaagatggttactttacgccacaagatagagatgcactttttgaacgtatcaaagcttctggggcaaagattgtgaccattgccatgggctcacctaagcaagagctatttattcgtgcttgtcggcaagtacacccagacgcgttatatatgggcgtaggtggcacttacgatgtttttacagggcatgttaagcgtgcgccaaaagcgtggcaaaatttaggcctagagtggttatatcgtttactgtcacaacctagccggatcaagcgtcaatttaagttattaaaatttgttggttattactattccaataaattg

SEQ ID NO: 32206 - DNA, 621 bp, Proteus mirabilis
atggagcttactttgctggaacaactcaatttagccgtattttcattgatgaatgcaaccccttcggcctcccctttagagattaatgtcgcgatctttattgctaaatacttagtttacttgttccctctgtctttagctttctattggctatggggaaatgaaaagcatattgatcagcaaaggactttagcttgtaaggctggggtcgctctgattattgccctctctatctcttggtttatcggtatgatagctccccatgatcgcccttttgcagccaatatcggttataacttccttgagcatgaggcaacgccttccttccctagtaatcatggtactttcgtgtttactatcgcactggcttatcttttttggcataacagtaaacgcattggcatgctgatgcttattttaggtcttgcgattgcttgggctcgtatttatcttggcgtccattggccaatagatatggttggtgcatttattgttgctctcctctcttgtgcattaagccaaatactttggtcacaaggcgggaaaaagttacaaaaagctatccaccagctctatcaactctgctttgcgtatcctattcgcaaaggttggacaaaagct

SEQ ID NO: 32207 - DNA, 813 bp, Proteus mirabilis
atgtcattgaaatttaaatcacttgctgtagtcagtgcgttagtcggtgctttagctttagcaggttgtggcgaaaaagaaaaagatcccaatcatatccgtgtgggggttatttctggttctgaacaacaagttgctgaagttgctaaacaagtcgctaaagataaatatggacttaatgttgaactcgtcactttcaatgactttgtcatgcctaatgaatcattaagccgtggtgatattgatattaatgcctttcaacataagccttatttagatcaacaaatcaaagatcgtaattacaaaattacggctgtaggtaatacctttatttaccctattgctggttattctaaaaaaataacggatttagcagatttacccgatggtgcacaagtggctatccctaatgatccaaccaacttaggtcgttcactgctacttttagaaaaagtaggattagtgaaattaaaggaaggggttggtttattaccgactaaactggatatcattgaaaatccgaaaaacatacaattagttgagttagaagcaccacaattaccgcgctctttagatgatcaaaaaatctacttagcggttattaatacaacctatgcgagtcaagttaacttaactccagcaaaagatggtatttttgttgaagataaagattcaccttatgtcaatattattgttgcccgtgaggacaataaagatgatgaaaatgtgaagaaatttattcaatcttatcaaacagatgaagttgatagcgctgcgaataagatttttaacggtggtgcagtaaaaggttgg

SEQ ID NO: 32208 - DNA, 465 bp, Proteus mirabilis
atgcaactaaatattccaacttggctaactttatttcgtgtcgctttaattccattctttgttttggtgttttatttaccatttaaagatgctccccttatttgtgccattatttttatggtagctgccgccactgactggtttgacggttttttagcccgccgttggaagcaaaccactcgctttggggctttccttgatccagttgcggataaggtaatggttgctacagcattagtattaattactgaacactatcatgtatggtggatcactttaccggcagcgaccatgatcgcacgtgaaattatcatctcatcactaagagagtggatggctgaattaggtaaacgtaatagtgtggcagtttcttggattggaaaagtgaagactaccgcacaaatgggtgcacttgttgtgctattatggcgtccgactattgaagctgagtggttcggatttgta

SEQ ID NO: 32209 - DNA, 1128 bp, Proteus mirabilis
atgaagcgcaatattcttgcagtggtaatcccagctttaatgtttgctggtgcagcaaacgcagctgaaatgtacaacaaagacggcaacaaagtagatatctacggtaaagttgacgttcgtcattacttcgctgacaaagattctggtgaagacggtgatgcatctcgtgcacgtatcggtttcaaaggcgaaactcaaataaataaagacctaattggttttggtcgttttgaatacgaagttaaaactaataatactgaaggaagcaaaggtaacgacaaaactcgtctagcttttgctggtctgaaatttgctgacttcggttctttagactacggccgtaactacggtgtaatttatgacaccaacgcatggactgacgttctgcctttatggggcggtgactccatggcgcaaactgacgtttatatgactggccgtactactggcgtattaacttaccgtaacactgatatgttcggttatgttgatggtttaagctttgctctgcaatatcaaggcaaaaataacgaaaacaccaacaatactcgtggtacatatgatccaaaagatccagcgtcaagtaaagcagatgctaaatcaaatggcgacggttttggtttctctaccgcttataacttaggctggggcgtaacactgggtggtggttactcaagttctgctcgtacagcaccacaacaacacgcaagcttagctggtggtgaacgtgctgaagcatggaacgttggtggtaaattcgaagctaacaatgtttacttagcagcaatgtacggtgaaacccgtaacatgacttatttcggtgaagataaagatattgctaacaaaactcaaaatatcgagttaactgcacagtatgattttgctgatttaggtatcaaaccatctttagcctatgttcaatctaaaggtaaagacttaggtgttgctcaaggtaacgaccaagatttagttaaatatatctctgtaggttctttctacaaatttaacaaaaacatgactgcagttgttgattataaaatcaacctgttagatgacaatgacttcactaaaacttacggcgttgcaactgacaacgtagttggtttaggtctgacttatcagttc

SEQ ID NO: 32210 - DNA, 570 bp, Proteus mirabilis
gtgcaacgtgaagcattattagaccacgtacttatccaattagagcaacatgggcttgccgctacgttgcctgagttattgcagggatttgatattactgaatctgaactccaacctttttggcctgataaagacgcgttaatttttgattgtctgcgccatcatggacagcaaattgatatttggcaacgccaagtgatgttagatgatacgctgaccacagagcaaaaattactagcacgttacgatcagctggctatgcgcttagaaaaaaatcgtttcccaggctgtttgtttgttgctgcttgtagtgcttatcctgatgagcattcacaaatccatcagttaagccagcgccaaaagcaaagctcatttgaatactctagaatgctactacgcaagcttgatcttgaagatagtgagttagttgctaaacaaatggaactcatcttagaaggctgtttaagtcgcttaatggtcaatcgtcgtgctgacgatatcacgacagcaaaactattagctcaagatattcttaaaatcgcccaatgtcgtaaaaatggtgcgctaagc

SEQ ID NO: 32211 - DNA, 1200 bp, Proteus mirabilis
atgtacaattctgtctcattttttatagggctccgttatatgcggggtcgcgcagtcgacaaatttggtcgattcgtctcatggctatccgctttagggattatgctgggtgttgcggcattgatcacagtgacttctgtgatgaatggctttgaacgctcattacaaaacagcattttggcctatattccacaagctgttatcacaacacccaatgggcagctacccaaacaagatagtactgcacaaatgttattaaaacgagaagatgttatcaatgtcgttcctttagttgaaggggatgtggtattacaaagtaaagataatatcggtgttggcgtgatgttagggattgataaagcacacgatgaacccctaacacagtttattcgctatggcgatttctcgttattaaaaccgggagaatatggtgtgatcctcggtagtggtttagctaaacagctaaaaaccaaagaaggggatagcattcgccttattgttcccggcgtaagccaactcaccccaatgggccgagtgcctagccaacgactgtttactgtcaaaggtattttccaaagtggtggtgatgctgatgcttctcaacttctggtcaatcaacaagatgcggcgcgtttgatgcgctatcaacccggcaatattaccggatggcgtctattcttctcaaccccccttaatattgaaaaatacagtgctgaacctttgccagcaggtttaagttggaaagattggcgtgaacgaaagggcgagtttttccaagcagtgaaaatggaaaaaaatatgatgggcttattattaagcctaattattgcggtcgccgcgtttaatattattacttcgctttcattactggtgatggaaaaacaaggtgaagtggcaatattacaaaccatgggcttaaagcgttcgcagataatgtctatctttatgctacaaggggcaggggccggtattttaggtgctattgctggaggtttgttaggggcgttactatcaagccaactaaatgtgattatgcctgcggtagggcttattcctcatggggtagaattacccgcgactttagagtggagccgagtctttatgattggttttgccgctattgtgatttcactattatcgactttatacccgtcttggcgggccgcaactattcagccagcagaggcgctacgttatgag

SEQ ID NO: 32212 - DNA, 951 bp, Proteus mirabilis
atgtatacaaaaatcttaggtactggtagttacttgcctgtacaagtgcgaactaatgccgatttagaaaaaatggttgatacatcagacgagtggattgtcaccagaacaggtattcatgaacgtcgtatcgcaacagaagaagaaactgttgccaaaatgggtgcgagtgccgctgagaatgcattagaaatggctgatattgatagacaagaaattggcttaattatcgttgccacaacatcaggctctcatgcgtttccgagtgcggcatgtcaaattcaacacgccctcggtattgctgattgtatcgcgtttgatgttgcagccgcgtgctcaggattcgtttacgcgttaagtatcgctgatcaatttattaaggctggcacggtgaaacaagctttagtgattggtgctgatcgcttatcacatgcgttagatcctaacgatcgcggtacaattattcttttcggtgatgctgctggtgccgtcgttgtcggtgcttctgaagagtcaggtattatttctacacatttacattctgatgggcgttttggtgagctgttagctctgccttatcaggatagagaaaatcaagacttacctgcttatgtcaccatggcagggaatgaagtctttaaagtcgcagttcgtgaacttgcccacattgtggatgaaacattagaagcgaatcatattgataaatcggaactcgactggcttgtgcctcatcaagcaaatttaagaattatttcagcaacagccaaaaagctggatatgacaatggataaagtcgtggtgacattagatcgccacggtaatacgtcagcagcatccgttcctacagcattagatgaagctgtaagagacaatcgcattcaacgtgggcagttaattctgttagaagcgtttggtggcggctttacttggggctctgcacttatccgtttt

SEQ ID NO: 32213 - DNA, 675 bp, Proteus mirabilis
atgtttacgccaccagcagcacctgaaaatgaatccgttttactcgcacgagcacaagcgctggctggttataccttcggtgaactcgctgcttttgcacagcttcctattcctgaaaatttaaagcgtgataaaggttgggtcggtatgctattggaatactatttaggtgccagtgccggcagtaaacctgaacaagatttttctcatatcggtgttgagctaaaaaccatccctatcgaccgttttggtatgccattagaaacgacctttgtttgtgtagccgcacttacaggaaacagtgggatcacatgggagaatagccatgtaaaacgtaagctgtcgaaagtattatgggtacctgtagagggagaacgggagatcccattagcacagcgtagagtcgcttccccgctactttggagccccaatcatcttgaagaagagctactgcgtcacgattgggaagagttaatggatatgattgtcttaggaaaagtagaaagcattactgcgcgtcacggacaagtattacaaattcgccctaaggctgctaacagtaaggcattaaccgaagccattggtgaaaatggacaacgcatcatgacacttccccgtggtttttatttaaaaaagaactttactgcgccactgattgctcgttatttccaactt

SEQ ID NO: 32214 - DNA, 795 bp, Proteus mirabilis
ttggtcatcaatatgaaactcaatgcattattaaactatcaaatacatcaaccagaaacagcaacgataaacaatttacctattgtgttgatccatgggctttttggtgatctcaataatctaggcgtactaggtcgcgatctacgtcaagaccacaccgtgatacaaattgatgtgcgcaaccatggacattctcctcatagtgaaagtatgcactatcacgatatggcacaagatgtattagccctgcttgatagcttaaatatcgcaaaagcaatcgttataggtcactcaatgggagggaaaattgcaatggcaatgaccgctctcgcacctcttcgccttgaacgtatcgtagttattgatatgtctcctgttgcttataatgttcgtcgtcatgataaaatttttgcagcccttgaagctgtcactaaagctcacgtcacacaacgtacagaagctattgctattatgcgcccttttattgaggaagacggcgttatccaatttctgcttaaatcatttaaaaaaggtgaatggttatttaatttacccgcaatcaaacaggcttaccccgatattattggttggcaagaggtgcctgcttggcatcatcctgttttgtttatacgtggtggactatccccatatattttagatgaatatcgcaataatattgctcgccaatttccacaagcaaccgcctttgttgtcgccaatacaggacattgggtgcattctgaaaaaccagaaacagtaattaaggccattcgtcgcttcttagccaaaacagta

SEQ ID NO: 32215 - DNA, 978 bp, Proteus mirabilis
ttattcagtgcactaggtttgttcagtgcttttgccgcaaatgcacaacaaaccaaacccacacttaccgtctatacctatgactcttttaccgcggattgggggcctggtccggcaattaaaaaagcatttgaacaacaatgtgattgtgagctaaaactggttgccctttcggatggggtttctctccttaatcgtttacgtatggaagggagtaaaagtaaggcagatattattttagggctagataacaatcttattcatgcggcaaaacagaccggactttttgcaccaagcaatattgatacatcaaaactgggaattacctgaaaaatggactgatgacacttttgtgccttatgactacggttatttcgcttttatttacgataaaaatcgtattactcatccccctaaaagcatggatgagctgttaaatagccaacagccgtggaaaatcctttatcaagatccacgtaccagtacccccggcttaggcttaatgttatggatgcaatcactgtatccaaacaataccgctgagcagtggcaaaaattggcgaataaaacactgacagtaaccaaaggctggagtgagtcctatggcttattcttgaaaggagaaggggattttgtgcttagttacacctcatctccgggctaccatattttggctgataaaaaagacaattatgcggctgctatttttgatgaaggacactatttacaggtagaagttgcagccaagctaaaatccagcaaacagccagaattagctcagcaatttatgcaatttatgctaacccccgctttccaagaaaccatcccaaccactaattggatgtatcctgttattgatatgccactacctgaggtctactccgttatgcctaaaccgcaaaagtcattacaatttgatgctgatgtggtagccaaagagcgccaaacatggacacgtaattggcaatctgcggttag

SEQ ID NO: 32216 - DNA, 468 bp, Proteus mirabilis
atgaacgtaatcaaaggtgttgtcgcggcgccaaacgcacgtgtagcgattgcaattgcccgttttaataattttattaatgatagcttgttagaaggtgccgttgatgcacttgagcgtatcggacaagtttcctcagaaaatattaccgtcgtttgggttcctggcgcttatgagttgccattaactgtaaaagcattagcagaaagcgacaaatatgatgcagttatcgcgttaggcactgttatccgtggtggaaccgcacattttgaatacgttgctggcgaatgcagctctggcctttctcatgttgcaatgcaaagtgagatccctgtgacttttggtgtattaactactgaaagcattgagcaggcaattgaacgagctggtactaaagcgggcaataaaggtgctgaagctgcaatgacagcacttgaaatgatcaatgtacttaaagccattaaaggc

SEQ ID NO: 32217 - DNA, 1169 bp, Proteus mirabilis
tcttggaaacgaaatctctacattgtctggtttggttgttttttaacgggtgccggctttagcttgattatgccttttctaccattgtatgtagaagagcttggcattaaagatcatgagtccttaaacctatggactggtgtcgcttttagtattacttttctcttttctgccatagcggcacctttttggggaaaattgtcagatagaaaaggacgcaaattaatgctattacgttctgccttaggtatggcgatcgtcatggtactcattggttttgctcaaaaaatttggcaactattaattttacgcgctttattaggggtattagggggttttgtgcctaatgctaatgctcttatcgccacacaagtgcccgttaaaaaaagtggttgggcattaggaactctttctacgggtgcagtaagtggcgcattaattgggccattaattggtggaatacttgccgatctctacggtttacgtccggttttctttattacagccgcggttttatttatctgttttatagtgaccctattttttgttagcgaaaattttacccctgtttctaaaaaagatgcattatccacccagcaaattttttcatcactcaaaaataaaagattagtcatttgcctgtttttcaccaccatgattatccaagtggcaacaggctctgttacgcctattttaacactttatatccgtgatctagccggctctatcagtaatcttgcctttattagtggtgtgattgcatctgttcccggtattgctgctttaattagtgcccctcgttttggcaaattaggtgatcgcataggccctgataaggtgcttattttcacattgggtttatctatttttatgcttattccgatggcgctcgtcagtaattattgggaactaggcgcattacgttttttattgggtgcggtaaacgctgccatgttactgcggtacaaacacttattttatacaatattacccctgcaattgctggtcgaattttcagctacaatcaagccttacgagatgtaggaaatgttactggaccgttaatgggcgcgtttgttgcggccaattatggatttagagctgttttttatttcaccgctgcggtggtattttttaatcttatttactcatggataagctttcgtacc

SEQ ID NO: 32218 - DNA, 1556 bp, Proteus mirabilis
aaaaaacagggaggaagtcgttttctacgcacagtggaatggcttggaaatgcactcccccatcccgttattttatttattattttaattgctattttacttgtatcttcagcggttggtgaatacttcggcgttaagtacaagatccacgaccagaaggcgctaaagggcgcgctgaagatggttatattcatattatcagtttacttgatgctgatggtatacgacgtattcttgctaatattgttaccaattttacagggtttgctcctttaggaaccgtactggtggctttactcggtgtcggaatagctgaacgagcgggattattatcagccgttatgcgtttagtggttatgaaagctccacgcaaaatgaccacattagccattgtatttgcaggtattatgtcaaatactgcagctgaattaggatatgttgtcttgatcccgctatcggcaattattttccattcgctaggtcgtcatccattagcggggattgctgctgcgtttgcgggagtatctggcggatattcagctaacttactgttagggactatcgatccattattatcaggtattacacaacaagcagcacgcattattgacccaagctatattgttggtgcggaagcaaactggtactttatgtttgtcagcacctttttaattacatttttaggctacatcatcacagaaaaaatcgttgagcctcagttagggccttataatggtaatgaattagatgatgaagaaactgatctaaaaaatgctgcgcaagttacccctcttgagaaaaaagcactatgggcagcaacaggaacatttattgtgatggccatcattctggcattcactgtcgtacctgaaaatggcatattaagaaaccaagaaacaggtttaattggtaactcaccattcttaaaatccattgttgtattcattttcttattttttgctatccccggtattgtttatggttggatagctaagactatgcgttcagataaagatattgtcgatgccatggcaaactctatgagcacattaggtctttatttagtaattattttctttgctgctcaatttgtggctttttttggctggacaaatatagggcaagtgatcgctgttaaaggtgcggctttacttaatagtattgatatgccaagtgggttgctatttttgggctttattttaatttgcgcctttatcaatttaatgattggttcagcttccgcgcaatgggcagtaacggcgcctatttttgttcctatgttaatgctggcaggttatgcgccagaaactattcaagcagcttatcgtataggtgattcggtgacgaatattattacgccaatgatgagttactttggtttaatcttagcggttgccacaaaatataagaaagatacgggtattggaactatgatctcgatgatgttgccatattctattatcttcttaattggttggtcactgttattctacctttgggtatttgttttccacttacctgtagggcctggatcgccaatttattattcaccgcat

SEQ ID NO: 32219 - DNA, 468 bp, Proteus mirabilis
atgccacgtcgtcgtgtaattggtcaacgtaaaattctgccagatcctaagttcggatcagaactactggccaaatttgttaacattctgatggtagacggtaaaaaatctactgcagaatctattgtttataatgcgctagagaccctggctcagcgttcaggcaaaactgaactggaagcgttcgaaatcgcattagataacgtacgtcctactgtggaagttaaatcccgccgtgttggtggttcaacttaccaagttccagttgaagtacgcccagttcgtcgtaatgcattagcaatgcgttggattgttgaagctgctcgtaaacgcggtgataaatccatggctcttcgcctggcaaatgaattatctgatgcggctgaaaacaaaggcgctgctgttaagaaacgtgaagacgttcaccgtatggcagatgcaaacaaggcgttcgcacactaccgctgg

SEQ ID NO: 32220 - DNA, 2237 bp, Proteus mirabilis
ccgtatggcagatgcaaacaaggcgttcgcacactaccgctggtaatccgcgaagtagtcgcaactcttttcaggacagctatgctgtcctttacctgaattgaacgcccacgagagaggaaaaaatggctcgtcaaacccccatagcacgctatcgtaatatcggtattagtgcgcacatcgacgccggtaaaaccactacaagtgaacgtattctgttttataccggtgtaaaccataaaattggtgaaactcacgaaggttcagcaacaatggactggatggagcaagagcaggaacgtggtatcactatcacatccgctgcaactactgcattctggtctggtatggctaaacagtttgagcctcaccgtgtaaacatcatcgacaccccgggacacgttgacttcactatcgaagtagaacgttctatgcgtgttcttgatggcgcggttatggtttactgtgcagttggtggtgttcagcctcagtcagaaacagtatggcgccaggctaacaaatatcatgtaccacgtatcgcgttcgttaacaaaatggaccgtatgggtgcaaacttcttacgtgtagttgaacaaatcaaaacacgtttagctgcaaacccagttccactgcaaatcccagtaggcgctgaagaagatttcactggtgttgttgacctgatcaaaatgaaagcgattcgctggaatgaagaagatcaaggcgtcaccttcgaatacgaagacattcctgctgatttacaagatctagcagaagagtggcacaacaacctgatcgaatctgcagctgaagcatcagaagatctgatggacaaatatctgggcggtgaagaactgtcagaagcagaaattaaatctgcgctgcgtaaacgcgttctagataacgaaattatcctggttacctgtggttctgcatttaagaacaaaggtgttcaggcgatgctggatgcagttattgaatatctgccagcaccaacagatgtacctgcaattaaaggtattttaccagatggtaaagatactccagcagaacgtcattcaagcgatgaagagccattctctgcactggcatttaaaatcgcaactgacccatttgttggtaacttaacgttcttccgtgtttattccggtgttgtaaactctggtgacacagttctgaacccagttaaagacaaaaaagaacgttttggccgtatcgttcagatgcatgctaacaaacgtgaagaaattaaagaagttcgtgcaggtgacatcgctgctgctatcggtctgaaagacgttactacaggtgatacactgtgtgcaattgatgcaccaatcatcttagaacgtatggaattcccagagccagtaatctctgttgctatcgaacctaagactaaagctgaccaagaaaaaatgggtatcgctctgaaccgtctggctcaagaagatccatctttccgtgtatctagtgatgaagagtctggacagactatcatcgcaggtatgggtgagctacacttagacgtgttagttgaccgtatgcgtcgtgagtttaaagttgaagcgaacgtaggtaaaccacaagttgcttaccgtgaaacaattcgcgaagaaattactgacgttgaaggtaaacacgctaaacaatctggtggtcgtggtcagtatggtcatgttgttattgaccttagcccattaccatcaggtggtgaagagaactatgtgtttgtcaacgatatcgttggtggtgtaattcctaaagaattcatcccagctgttgacaaaggtatccaagaacagctgaaatccggtcctttagccggttaccctgttgttgatatcaaagctcgtctgcacttcggttcttaccatgatgttgactcctcagagatcgcgtttaaaattgctgcatctatggcctttaaagaaggtttcatgaaagcaaaaccgattctgttagagccaatcatgaaagttgagattgaaacgccagaagattacatgggcgacgttatcggtgacttaaaccgtcgtcgtggtatggttgaaggtatggacgatctacctactggtaagatcattcgtgcacaagtaccactggctgaaatgttcggttatgcaactgacctgcgttcacaaactcagggtcgtgcttcatactcaatggagttcttgaagtacaacgaagcgcctagcaacgtcgctcaggctattatcgaagctcgtaaagcgaaa

SEQ ID NO: 32221 - DNA, 2691 bp, Proteus mirabilis
atgcgcacactgacccaattaaagccaaatacattaactcgcttatatgctctgtttcttctgtttatggccatatccctttttctatatgcttatagctattttgatacttggctagaaagtaaaaaaaatgccattaacaacacgactaataagtttgcatctcaagttgaagattaccgctatcacgctaaccaactattccagttatcaaacaaaattaatgatccaaccctctttctgcctttaaaaatcaatccggtcaaactacgctctgatgtttattggcttgaaggacgcgatcagaccgttgatgctattgtttttggtaaatcgaatgaacaaacctttcagttagccggttattttgcaaacgcgttagaaattatttggggggtacgtaataactatagctctctctattatcttaatggtaaaggcaatgatcttatccttattactacccactcaatactaaaaccagaattgcgctataaagaaagctatttaacactaaccgctgaaaacaaacgttctgagctattaatgcaatcaacggcattagatgaaaaagagagcctttctcccattaggaaaatgccgacagaaaatatttattactatacctatcgcaccatgtttaatgtgccagggcaactgaccagtgttattgcctttgatttacccataaataattttctacctgctgagctatcacctcaatatttaagattattacccacaggacagcagagtgtttatgataaaaacaatattgaggtatcaacggatgggacttcactcatcttctcacagcccatcgcaggaataccctactctttatcttatgagtatccactaaaatcgattttcaatgagattgtgtataaaaatatctggttacttatcagcctactcatttttatctcgatttcagtgtttggtcatatctatattcgtaataaatatgtattcccttatatttcgatgacgcgtaatcttcgcatcaaagaagagatgactaacgatatcatttctaatcttcctattggtctattggtgtataatttttcatcaaaccacaaaattattagtaatagccacgcagagaaactattacctcatatcgatttatctaagatccgtcagatggcgattgaacataatggtttaatccaaacggccattgataacgaaatttatgagatccgcaccagtagcaacagcaatatcgataatactgctctattcatttttctgaataaagacaacgaagcattaatcaataagaaattgcagctagcacaacaagaatatgaaaaaaacacgattgcacgccgcaagatcttatccaatatgtcgttagaactcatacgaccaattaaagatattaatgagatggtatatcaatttaaagatctacttcctaacgatactcatcaacaattactgagtctgctattagaaaaaacgaattatatttctgagtggatagaaaacattacgctaattaataagttagaaaatcaagaatggaaaatacatcaagatgaatttgaactttcaacgctagttgaatctattctaataaccgcatcaccatttatgataagaaagggattaacactttatttccataataatattaaacctagtttacttttatttaatgatggcccagcattaagtaagattattttatcattgattaattatgccattagtacgactaattatggaaaaataaccgtcaatctaaatttagaaaaaaataatgataaagaagaaatagtaattgatattattgatagtggcagtgggttaacagctcaagatctggctaatattaaatatccatttttaggtcaagctatgggtgataaatattattccaactcgggtattattttttatttatgtcatttgttgtgtaacaaaatacaaggcactttgaccattacaagccaagaaagtattggctctcatttccgtatcgtacttccataccagcatatagatacagaagagcgctcttttgacatattattagagggtataactgcaaaactcgccataaaaaaccctgaaatagaaaaaataatctgccaacagcttgataaatatggcgctacatactttgataaaaataaagagaatctttactcagaatacgatatcatacttagagacactccggataataatcctgaatcagcaacagtattattagttagctctattaccggatttgaaaaaatagcaagaaatttaataaagtgtaactataacttcggtgatccattaattgaggctattacttatttgattgaagaaaatgaacaactttctctcgaaacaactcaaacgagtattcgtaatgagaataataaccttgatcatcacgaagtaattcttaataattataggaagaagttgaatgatagtgattataaggaactatttatcaatactgttcccattgatgttgaaaaactacacttagaagcaactaataaagactttcattctctagctcagacagctcatcgtctgaaaggggtttttgctatgttagatttagaatatctcagagagaactgcgaatatttagaagatgacataaaaaatcataatgaattagagataaaagaacgtatcaatcaactggataaatggatccgacagttgctg

SEQ ID NO: 32222 - DNA, 654 bp, Proteus mirabilis
atgaataaccttaatattattattgccgatgatcatccaattgttttattcggcattcgtaaatctttagaacaaattgaatgggttaatgttgttggtgaatttgaagattccacttcacttatcaataacttatctaaattaaatgcagatgctctgatcaccgacctatctatgcctggtgataaatatggtgatggtattacgttgataaagtacatcaaaagacattatcctaatttgtctattattgtactcactatgaacaataacccagctatcttaagtgctgttcttgaccttgaaatcgaaggtattgtattaaaacaaggtgcacctgctgatctacctaaagcacttgcagcattgcaaaaaggcaagaaatttatgcctgaaagcgtggctaagctgttagaaaaagtgaatgccaatggttatggtgataaacgcctatctcccaaagaaagtgaagtgttgcgcttatttgccgaaggtttccttgtcactgagattgctaaaaaactcaatcgtagtatcaagactatcagtagtcagaaaaaatcagccatgatgaagctcggtgtcgacaatgatatcgctctgcttaactacctatcatcagtcactattgataaggaaattaacggagaaagc

SEQ ID NO: 32223 - DNA, 375 bp, Proteus mirabilis
atgtcaattcttgatgaatgggcggagcgccacattgaaaaggcgttgaaaaatggtgaactctcttctttgccaggagaaggtaaacccttggtattagatgataacagtcatgttcctgagtctttgcgggctagttatcatttgcttaagaatgccggctttttgcccccagaaatgcaagatagaaaagatgcattatctttagccgaaatattaagttcactttcagaaactggcatcaaagatgaacagttacaaaaaaaactcactttactcgaattaaaattacaacaggcaggaatggacacacagtttctacatacggactatgcaacccaattaacagaaaagttagcaacacataaacacaaa

SEQ ID NO: 32224 - DNA, 1362 bp, Proteus mirabilis
atggttagcgtttttgatatttttaaaatcggtattggaccttcaagctcacacacggtaggcccaatgaaagcaggtaaagaatttgtcgatttacttgctgagaaaaaccttctctcctctgtttcccgcgtagtcgttgatgtgtatggctctttatctctaacaggtaaaggtcacgcaacagatatcgcgattattatgggattagccggtaatttacctgatacggttgatattgacgctatcgcaccttttattaaacaagtcgaaaataccggacgtttgatgttagctaatggtgctcaagaggttgatttccccgcggttggaggcatgaattttcataaaagtaatttacctcttcatgaaaatggtatgactatcagcgcctataatggcgaacaacttctgttgaaaaaaacctattactccattggtggcggctttattgttgatgaagagcattttggtcagcccgaagagaataaagttgaagtaccttatccttatcaatatgctgctgatttgcgacgtcactgtaaggaaaccggcctctctctttctgcactggtgatgcaaaatgaacttgcattacgcagtaaagaagagatctcagcccattttgctgccgtttgggaggtaatgaaatcaggtatcgagcgcggtgttaataccgaaggcttattaccgggaccattacgtgttcctcgtcgcgcgtctgcattacgtcgtatgttagtgactgaagataaaaccaccaccgatcctatgacagtggttgattggatcaatatgtttgcattagccgtaaacgaagaaaatgccgccggtggacgtgttgtaacagcccccactaatggcgcatgcggtattattcctgccgtactctcctattacgataaatttattcgcccagtcaacgaaaactcctatacacgctttttcttagtagccggtgttattgggtcgctgtacaaaatgaatgcctctatttccggtgctgaagtgggttgtcaaggtgaagtcggtgtagcctgctcaatggctgctggcgctttaactgaactgctagggggtagtcctgagcaagtctgtattgcggctgaaatcgcgatggagcataacttaggtcttacttgtgatccggttgcaggacaagtacaggtgccttgtatcgagcgtaatgctattgctgccgtacaagcggtaaactcagcacggatggcgcttcgtcgtgtcagtgatccacgtatctgtttagataaagtcatcgagaccatgtatgaaacaggtaaagatattaattctaaatatcgtgaaacatcacaaggtggcttagccattaaagtctcttgcgat

SEQ ID NO: 32225 - DNA, 675 bp, Proteus mirabilis
atggcggttatcgtccctgtaattactgttgatgggcctagcggagcaggtaaaggaacattgtgtcaagcattagcaaaagcctttggttggcatttacttgattccggtgctatttaccgtgtattagcattagcagcattacatcatcatgtggacattacatcagaagatgcattagtgcctttagcggcgaatttggatgtgcgctttattcctaatgaaaatggattaagtgttattctggaaggtgaagatgtttcaaccgaaattcgtactgaaaccgttggcaacacagcgtcacaagcagcaacgtttcctcgcgtaagagaagcattattacgccgtcagcgtgcatttcgtactgcaccgggattaattgctgatggccgagatatgggcacaatcgtttttcctgatgcgcaagtaaaaatatttcttgatgccagtgcgcaagagcgtgcacgtcgtcgcatgttacagttgcaggagaaaggctttaatgttaactttgaacgccttttatccgagataaaagagcgtgattatcgtgatagaaatcgcgcagtagcgcctttggttgcggcaaaagatgcattaattctcgattcaacaagcttatctattgatgaagttattgaaaaatcgttagcttatgcgaaaaaaatctgcaat

SEQ ID NO: 32226 - DNA, 396 bp, Proteus mirabilis
atgagagatatgcaggaagttttatcacgttggggggcgtggtcagctaatgagggaaatagtatcgattactcatcaattgccgcaggttttaaaggattaattccaagttcaagacgaagccgagagcaatgttctgatgatgatggcttaaaaataaataaagcggtattacatttaaaggtaaataatagttacttgtttcagttggttattatgtactatgtgaagaattatcctttacgctcaatggcttcaaaacttggcatttctcataatgaagtggctaagcgattgcagacagcagaaggatttattgaggggtgtctatcggttgataacgtaaaattagatatggataaaataattagaaaacacagcatttatagtcttgtg

SEQ ID NO: 32227 - DNA, 1224 bp, Proteus mirabilis
atgagtcacaacaacactgaaacgcaaattggcaatatcgatcttgttaagcaacttaacagtgcgattgtatatcggctcattgatcaacacgggccgatttctcgtattcaaatcgccgagcagagccaactcgcccctgccagtgtcactaaaattactcgtcagcttcttgaacgtggcttgattaaagaagttgatcaacaggcttcaaccggaggtcgtcgcgcaatatccattgttgtggaacatcgccgttttaataccgtcagcgtccgattaggacgcaatgatgccactgttgctctttatgatctcagtggtaaagccttagtagagcaacactaccctttagaacaaagcacccaacaagaagttgaaaccttgcttattaatgctattgatgattttattaaacaaaatcaacgtcgtattaatgagcttatttcaatttcaattatcttgcccgggttagttgatcctaataaaggcattgtccactatatgcctcatatgaaggtaaataactgggcactcgttgataacttagaaaaacactttgatctgccttgctatgcgggccatgatattcggagtctcgccttagcagaaaactattttggtgccaccagagattgtgaagattctatcttggttcgtattcatcgtggcgcaggggctggtgttattatcaacaacaaaattttgctcaaccagcgtggtaatcttggtgaaattggtcatatccaaatagatccattaggagagcgttgccactgtggtaactttggttgtttagagaccattgcgtccaatagcgcaatagaagctaaagtccgctaccaacttgaacaaggctatcccagccagcatttatctgcaacacaatgccaaattcaagatatatgcgatgccgcggtaaaaaacgatcccctcgctgttgaaaccattaaacaagtgggtcttcatctaggtaaagccatcgccattgcaattaacctatttaacccacaaaaagtggttttggcaggagaagtgaccgaagcggctgaaatattactaccgtcgatccaaagttgcattaatacccaagtgttaaaagagtttagagaagcgcttcctgttgttatctccgaacttgatcatcgctcagccattggggcatttgcacttaccaagcgagcaatgcttaatggagagttactacaatatttattcgacaaa

SEQ ID NO: 32228 - DNA, 1182 bp, Proteus mirabilis
atgtctaaagaaaaatttgaacgttcaaaaccgcacgttaacgttggtactatcggccacgttgaccacggtaaaacaactctgactgctgcaatcactacagttttagctaaaacttacggtggtgctgctcgtgcatttgaccaaatcgataatgcaccagaagaaaaagcgcgtggtatcaccatctctacttcacacgtagaatacgatactccaactcgccactacgcacacgtagactgcccaggtcacgccgactatgttaaaaacatgatcactggtgctgcgcaaatggacggagctattctggtagtagcagcaactgatggtccaatgccacaaactcgtgagcacatcctgttaggtcgtcaggttggtgttccttacatcatcgtattcctgaacaaatgtgacatggtagatgatgaagagctgttagaattagttgaaatggaagttcgtgaacttctgtctcaatacgatttcccaggtgatgacactccagtaatccgtggttcagcgctgaaagcactggaaggcgaagcagagtgggaagcaaaaattgttgaattagcagaagcactggattcttatatcccagagccagagcgtgcaattgacaaaccattcctgttaccaatcgaagatgtattctcaatctcaggccgtggtacagtagttactggtcgtgtagagcgtggtatcatcaaagtaggtgatgaagttgagattgttggtatcaaagaaaccgcaaaaacaacttgtactggcgttgaaatgttccgtaaattacttgacgaaggtcgtgcaggtgagaacgtaggtgttctgctgcgtggtacaaaacgtgaagaaatcgaacgtggacaagtactggcgaaaccaggttcaatcaacccacacaacaaatttgaatcagaagtttatattctgagcaaagatgaaggtggtcgtcacactccattcttcaaaggctaccgtccacagttctacttccgtacaactgacgtaactggtactatcgaattaccagaaggcgtagaaatggtaatgccaggcgacaacgtgaacatgatcgttgaactgatccacccaatcgcaatggacgaaggtttacgcttcgcaatccgtgaaggtggccgtacagtaggtgcgggtgttgttgctaaagtattaggt

SEQ ID NO: 32229 - DNA, 276 bp, Proteus mirabilis
atgccacgttctctcaagaaaggtccatttattgacctgcacttgctgaagaaggtagagaaagcggtggaaagcggtgacaaaaagcctgttaagacttggtcccgtcgttcaacgatctttcctaacatgatcggtttgaccatcgctgtccataatggtcgtcagcatgttccagtttacgtttccgacgaaatggttggtcacaaactgggtgaattcgcgccgacccgtacttatcgcggtcatgcagccgataaaaaggctaagaagaaa

SEQ ID NO: 32230 - DNA, 822 bp, Proteus mirabilis
atggcaattgttaaatgtaaacctacgtctccgggccgtcgccacgtagttaaagtggtaaacccagagctgcataaagggaaaccttatgcgccattgctggaaaagaacagcaaatccggtggtcgtaacaacaatggtcgtatcactacccgtcatatcggtggtggtcacaaacaggcttaccgtattgttgactttaaacgcaacaaagatggtatccctgcgacagtagaacgtctggaatatgatccaaaccgttcagctaacatcgctttagtgctgtatgctgatggtgaacgccgctacatcctggctccaaaaggcctgaaagcgggtgataaagttcaatctggcgttgatgctgctatcaaaacgggtaacaccttaccaatgcgtaatatcccggttggttctaccgttcataacgtagaaatgaaaccaggtaaaggtggtcagttagctcgttcagctggtacttacgttcaaatcgttgcgcgtgatggtgcttatgtcactattcgtctgcgttctggtgaaatgcgtaagatcccttctgattgccgtgcaactatcggtgaagtaggtaactctgagcacatgttacgcgttctgggtaaagctggtgcaagtcgctggcgtggtattcgtcctaccgttcgcggtactgcgatgaacccagtagaccacccacacggtggtggtgaaggtcgtaactttggtaaacacccagtaacaccttggggcgttcaaaccaaaggtaagaagactcgtaaaaacaaacgcactgaacactttatcgttcatcgtcgtactaagaaa

SEQ ID NO: 32231 - DNA, 300 bp, Proteus mirabilis
atgatccgtgaagaacgtctgctgaaagtactgcgcgcgccgcatgtatctgaaaaagcttctatcgcgatggaaaaatcaaacaccatcgttctcaaagttgctaaagacgcgaccaaagcagagattaaagcagctgtacaaaaactgtttgaagtcgaagttgaaagtgttaacactctgctgatgaaaggcaaagtgaaacgtcacggtcagcgtattggtcgtcgtagcgactggaaaaaagcttacgtcaccctgaaggaaggccagaatctggacttcgtcggcggcgctgag

SEQ ID NO: 32232 - DNA, 837 bp, Proteus mirabilis
ttggaaagccagcttgaattgtcggtggatcaacaacacaccgttagaatattacaaatcacagatacccacctttttgctaatgtggatgataccttgttgggaattaatacctatcgtagctatcatgcggtattggacgcgattaaacagcaagggttatcgattgatttgattgttgctactggggatttagttcaagatcaatcctttgcagcttatcagcattttgctgatgggattgcaagattaccttcaccttgtgtgtggttacccggtaatcatgattatcaaccagcaatgattgatgctttaaatcaggcaggcattctgtcggcaaaacaagtgttaattggtgaacattggcaattgttattattagatagccaaattcaaggtgttccccatggcgagttatctgactgtcagttagattggctaacacgctgtctagaaagccacaaagaaagagatactgtgatcttattgcatcatcatccgatgccttctggctgtacttggttagatcaacatagtttaagaaactctcaccagttagctgagcgtgttaaagatcaccctcaaataaaaatgatgctatgtggtcatattcatcaagaaatggatgaaatgtggaatggtattcgcttattagcaacaccctctacctgtattcagtttcgcccgcattgtactaatttttctttagataccgtttcgccaggttggcgctatttggagttatcattatctgcacagggtaagaggaatattgatactcaagtacatcgtctagcgggtaaagatttttgtccagatcttgacgcggatggctat

SEQ ID NO: 32233 - DNA, 696 bp, Proteus mirabilis
atgcataaaatcttattagtggatgacgatcgcgaattaacctcgctattgaaagaactacttgaaatggaaggctttaatgttgtgctcgccactgacggcgaacaggctttaaaacttctggatgcgtctattgacttgttattactggatatcatgatgccacgtaagaacgggatcgagacacttaaagagttacgccaaaatttccaaacacctgtcattatgttaacggcaagaggcagcgatcttgatcgtgtacttggcctagagctgggagcagatgactatttacctaagccatttaacgatagagagctagttgcacgcattagggctattttacgtcgttccaactggagtgaacagaaacagaccgatggcaacacctcacccatattgcaagttgataagttacaacttaatccgggtagacaagaggccagctttgataatgaaccattagagctaacaggtactgagtttacgttactttatctacttgctcagcatttaggacaagtggtatcgcgcgagcatctcagccaagaagtgttaggtaaacgcttaacaccttttgatagagcgattgatatgcatatttccaacttacgtcgtaagttaccggaaagaacagacgggcagccttggtttaaaacattacgtggccgtggttatcttatggtttcaataact

SEQ ID NO: 32234 - DNA, 564 bp, Proteus mirabilis
atgcgtaaagtagcaatggttgcactagcatcaatgtttttagtagctccgacggtagtaatggctgaaacatcaaatacaaataatcagcctgctgggcaacaacagtataatgataattaccattgtggatacggttacggtatgcatgatggacgtgataaccgaggtcatcgtggacaacgtggccatatgatgggtaacaataatttcggtgagtcgcgtatgtttaatggtattacattaacagagcaacaacgcactcaaatgcgcgatttaatgcgccagcatcatcaagatcgttttaataacagtgattttcgtcagcgtcacgaaaatatgcataagctaattaccgcggataagtttgatgaagcagcggtaagagcgcaaatacaagatatggacaaacaagcaatagagcgccgagttgaaatggcgaaagttcataatcaaatgtatcagctattaaccccagagcaaaaagcgcagctagaaaagaattatcaacagcgagtctcttctgttagtcagcaaaaccagcaaactcaagagaaagctaat

SEQ ID NO: 32235 - DNA, 1405 bp, Proteus mirabilis
atggctggacgaattccacgttcatttatcaatgatttattagcacgaaccgatatcatcgatcttatcgacgctcgtgtgccgcttaaaaaacaaggcaaaaatcattcagcgtgttgtccgtttcataatgaaaaaacgccctcttttacagtaaatagcgacaaacagttttatcactgttttggttgcggtgcgcatggcaatgctattgattttttgatgaactacgacagacttgattttgtcgaaaccattgaagagttagcagcaatgcatgggttagaagttccttatgaatcaggaactggcagtagcccgattgagcgacatataagacaaaatctctatcaagtgatggagaaattgaatcagtattacaaaagcagcctcaatacccctgacgctcaggaagcaagaaattatcttgcgcatcgcgggctaagtgaagaggttattacccgcttttctatcggctttgtacctacgggttgggacaatatcctaaaacgttttgggcaaaatcccgataatcaagccctgttacttgaagcaggaatggtaataacaaacgataaaggtcgcacttatgaccgttttcgtcagcgcgttatgtttccgattagagacagacgaggtcgtgttattgcatttggtggacgtgtattaggtgatgatttacccaaatacttaaactccccagaaacagagattttccataaaggccgccaactttacgggctttatgaagcacaacagactcaccctaacccagctaagttattagtggttgaaggttatatggatgttgtggcattagcgcagtttggtattgattatgctgtcgcctcgttgggtacatcaacaaccgcagagcatatccagttgctgtttagaactacggataacgttatttgctgctatgatggtgatagagcaggacgagatgccgcatggcgagcattagaaactgcactgccttttttaaacgatggccgttctttacgttttatgtttttacctgaaggcgatgatcctgattcactggttcgccgcgaagggaaagaggcatttgaaaaacgaatggaacaagcacactctttatctgagtttttatttgattcgctggttccacaagtggatttgagcacccaagaaggcaatggcaaactctatagtttagcgcgcccattaattgatcagatcccaagtgagactttacgtctatatttattaagagagcttggaaatttaacgggaaatcccgatattgagcagatggatcgtttatttggtagaaacacgctacatcacgaaacatcgtatcaaacgacaaaactacgtactacaccaatgcgtattttaattggcttggttgatccaaaatcccgagttttgccaatta

SEQ ID NO: 32236 - DNA, 2745 bp, Proteus mirabilis
atggcaaacaatagtgtcgtgacagaagaagtaccgacaaccatgccactgacggaaaacaaacctattgagacaaacgaagcgtcaattgtctcgcaaaaaacagcggcggataatagcgaccatagtgcatcattatttacgccatctgctacatcaacagatagcaattcagcttcattaactcaaacagccgccggtgttgccagtgtggcaacagcagcaatagtcagtcacggtgcacaagttaaacaaggattagggcctgaattacctcgaccaaatccggtacgattaccaacgcgtcgagagctttatggtattcgtatcccatcacaacgtgaggcggaattacgccgccgtgaagaagcgcttcaacaagatcatgaagacgatttagcggatatacaagagcaggctaatttcgaacaatcgttacgtcagcaatttcttgagcaacaacgtgagcgctatggtgaggatacatcagcaacacaaaatgttgagccaaccatcacgatgtcatcagcgacatctagctcgcagtcaacctatgacgagtatgacgagtctgataatcaacctttcattgatacccataccttttctgcgcaagaaacagaagaggagagtgatgagtatgaacaacacctcgctgagcagtttaagcaacaactgcaagaacgctacggtgaggatgttttacaggatgaagatgacgaggtattgccatcagtcacgactggatcatccgagacgtcagcctcggcacaagggtatcatccccatattcagcactcttttgcggctcaatctacccctgttactcaacagactgataacagcactctttatcctaacagtgatgcattcttacaagtatcacctcgtgatgatgaagaagaggaatacacaccgactatcgagttacaagaaaatcttgatgcattaggctcgttatcaccggtggatgatttgttagatgaagagcctgcagagcctgtttttacgccgatggtaacccctgcagagccagtatcttctgtatcttctgtagggcaaacacctattgagcctcaagcacagatggctcaacattttgcacagcaacagcaacagcaacagcaacagcaacagcaacagcaacagcaacagcaacagcaacagcaacagcaacagcaacagcaacagcaacagcaacagcaacagtcattaattcatccgttattaatgcgcaatgataggccgttacaaaaaccaacaacaccaatgccatcacttgacttattaacctctcctcctatggatgatgaacctgttgatatgtttgagcttgagcgtattggtaagttaattgaagcgcgtttaaatgactaccgtgttaaagcaaaagtggttggtatttcaccgggcccggtgatcacccgttttgagctagagctagcgcctggtgtaaaagctgcacgtatttcaaatctatcccgcgacttagcacgttcactttccacgacggcagtgcgtattgttgaagttataccgggcaaaccttatgttgggcttgagttaccaaacaaaaaacgccaaaccgtctatatgcgtgaactattagatagtgatgcattccgtgacagtcgttcaccattaactgtggtattagggaaagatatcggtgggcaacctgtggttgctaacttggctaaaatgcctcacttactggttgcaggtactacaggttcgggtaaatctgttggggtgaatgcgatgatcatcagcattctctataaagcgaagccagaagatgtacgctttattatgattgacccgaaaatgttggaattatctgtttatgaaggtattccgcatctgttaaccgaagtggtgacagatatgaaagatgctgcgagtgctttgcgctggagtgtcgcagaaatggaacgccgttataaattaatgtccgcattaggggtacgtaaccttgcgggctataacgaaaaaattaaagaagcggaagccatggggcgtccaattccagatccactatggaaaccttctgacagcatggcacctgagttgcctatgttagaaaaagagccttatattgttgtcatcgtcgatgagtttgctgatctaatgatgaccgcgggtaaaaaagtggaagaattaattgctcgcttagcacagaaagcacgtgcggcgggaattcacttagtattagccactcagcgcccttcagtggatattattactggtttaattaaagcgaatattccaagtcgcatcgcatttaccgtatcgagtaaaatcgactcgcgcactattttagaccaaggtggtgccgaatccttgttaggtatgggtgatatgctttatgcccctaatggctatatgccagagcgtgtacatggtgcatttgtcagcgatgatgaagtacatgcggttgcaacagactggaaagcacgtggacgacctcaatatattgaagccattaccaaatgtggtgaagaaggcgaaggtggcaatggtggtggttatgatgatggtgaagagcttgatccgctatttgatcaggccgtagaatttgtggttgaaaaacagcgagtctccatttccggtgtacagcgtcaatttagaattggctataaccgtgcagccagaattgttgaacagatggagatgcagggtattgtcagtgcacctaatcacaataatacgcgtgatgtattatcaccaccgccagcagaaatg

SEQ ID NO: 32237 - DNA, 1251 bp, Proteus mirabilis
atggaaagcaaagtagttgttccggctaatggtgctaaaattacattagatgctaaaggtaagcttgttgttccaaataatccggttatcccttatatcgaaggggatggtatcggtatcgatgtcacgccagcaatgttaaaagttgttgatgcagcggttgaaaaagcttacggcaatgaacgtaagattgagtggatggaagtctacaccggtgaaaaatcaacacaaatttatggtaaagatgtttggctgccagaagaaaccttagatcttattcgtgaatatcgtgtttctattaaaggtcctcttactacaccagtaggtggtggtatccgttcattaaatgtggcactacgccaacaactcgacctttacgtttgcctgcgcccagtgcgttattacaaaggcacgccaagcccagtaaaacacccagaactgacggatatggttatcttccgtgaaaactcagaagatatctatgccggtattgagtggaaagccggctcagcagaagctgataaagtgattaagttcctgcaagatgaaatgggtgtaaccaaaattcgcttcccacaagattgtggtatcggtattaagccatgttcagaagaggggactaaacgtttagttcgcgcagcgattgaatatgcaattgataacgatcgcgactccgttacattggtgcataaaggtaatattatgaaatttaccgaaggtgcctttaaagattggggttacgaattagcccgtgaagaatttggtggtgagctgttagatggtggtccttgggttaaaattaagaaccctaaatcaggtaaagatattattgttaaagatgttatcgcagatgcattcttacaacaaatcctgttacgcccagccgagtatgatgttatcgcttgtatgaacctaaatggcgactatatttctgatgcattagcagcacaagttggtggtattgggattgctcctggcgctaatattggtgatgagtgtgcattatttgaagcgactcacggaacagcaccaaaatatgccggacaagataaagttaacccaggctctattattctctccgcggagatgatgttacgccacatgggttggacagaagccgctgatttaatcattaaaggtatggaaggcgcaatcgaagcgaagaccgttacttatgatttcgaacgtctaatggacggcgctaaactgctgaaatgtagcgaatttggtgacgcgattatcaaacatatg

SEQ ID NO: 32238 - DNA, 1707 bp, Proteus mirabilis
atgaacaagactaaaacaacccggttcagtttgttacattactggcatgggttgggcgcctggaatttttattttttgctaaagtttgttttgctttggtatggttatttaaaatttgatgcatttagcaatttactctttctagcatttttattatttccattaccgaaaacattttggcataaattacgtaattggatagcgatccctataggggttatgcttttctaccacgacacttggctacctagtttttcaacggtattagaacaaggagggcagttaaaaaacttttcattctcttacctcattgaattagctgttaattttattaacttaaagatgatcggggtggcatttattttactggtagggtatctctttattgaacagtgggtaagagtgtcggtgtttattatcgcgggtgtagtgtggcttaatattagtggttttacccatttttcaggcgctatggtttctgctgtttctgccaatagctttactcagcaaaccaacacatctatcgatcagccacaaccgcaaaatacagaaatattatcgacagcgcagactagagcgccaaataataacgtactgagttcaccttacccgccacaaaaacagccggctaataacaaagtgttagatgaatggcttgctcagttttatcgttacgaaaataaacgcagcacacccgctcccgttcagctctcttcttatgcacaaccctttgatattttaattattaatatttgttcactctctaccgctgatgcggcagccgtcggattacagcaacatcctatttggggtaactttgatgtgttatttaatcgctttaatagtgttgcttcttatagtggccccgcttcattacgtttattaagagccagttgtggccaaacacaacacgctgatttgtatgatcctgccgatatgcaatgcttattgatggataatctggctgctttaggttttgagaagaaattggtgctcgatcataatggcgagtttggtcattatcttcaagaaattagagagttaggtaatcttaatgtaccgttgcaagatcaaaacggactctctcatcaaattaccgcttttgatggctctaaaatctataacgataaagagaccttagagcgttggttaaaagcacgagaaaaatcagatgaaaaacggacggtgacctttgtcaatttagtgtcacttcatgatggtaataggttcgttggcgaaaatacaacggctgattatggcaaaagagcctcagcgctacttgataacttaaatgcttttattaatacccttgataaacgtggcagaaaagtgatggtggtgattgttcctgaacatggagccgcattacaaggtgatataactcagatgtctggtttgcgagatattccaagccaaagtattactacggttcctgtcggtattcgttttactggacttaaaaatcaacgtttacctcatacacctatgatgatcgataaaccaagcagttatttagcgttatccgattttattctccgtaatgtgaatggcgatatctttaatcaatccaccatagattggaatgcgttaacccgtgaattaccacaaaccgcgacggtatcagaaaatcaaaataccattgtggttgattatcaagggaaatcttatatcaaattaaatgaaggagagtggatagactaccctgat

SEQ ID NO: 32239 - DNA, 960 bp, Proteus mirabilis
atgagctggattgaaaaaattcttaataaaagcaatatcacgagttcacgtaaagccaatatcccagaaggggtttggacaaaatgtgatagctgtgggcaagtactttaccgcgcagagttagagcgtaatttagaagtgtgccccaaatgtgatcatcacatgcgtatttcagcacgccgtcgcttagaaacttttcttgatacaggaagcacgactgagctgggcagtgagttagagcctaaagatattctgaaattccgcgactctaaaaaatataaagacagaattgctgcggctcagaaacaaacccatgaaaaagatgccctagtggtgatgaaaggtacgttaaaagaaatgcctgttgtggccgcatcttttgaatttgcatttatgggcggctctatggcgtctgttgtgggtgcgcgttttgttcgtgcggttgaacaagcattagaagataattgtccactgatttgcttctctgcaagtggtggtgcacgtatgcaagaagcattgatgtcattaatgcaaatggcaaaaaccagtgccgcattagctaaaatgcaagagcgtggtttaccttatatctcagtgatgaccgatcctactatgggtggggtttctgcaagtttagcaatgttaggtgatattaatgttgctgagccgaaagccttgattggttttgctggtccacgtgttattgaacaaactgtacgtgagaaattacccgcgggtttccaacgtagtgaattcctgctagaaaaaggggcgatagatatgatagttcgccgtcctgaaatgcgtgatgagctagctgaattactggctaagctgactcagtatgatttagcgaaagacgaagatgaactgctaggcgaagaaatgatcgctgatgacatcgaatcttctgacaatgagccagaaattaacatcgaaacgaataaaaaagaagatgtc

SEQ ID NO: 32240 - DNA, 636 bp, Proteus mirabilis
gtggcaagtaaatttcaaaatcgcttagtcggagccgttgttcttgtggcggtaggggttatttttcttcctacattatttgacggcgataagaaatataacgaagaccaatttgcctctattcctttagtccccaaacccggtgatgagcaagatattgaatcaatagcgccgattgagcaaaccacaacaccgtcaacgccatcagagggtgcttctgaggcgatgatctctgaagcggtgacgggggttgaacagcctcaagtttctactcctgaagtatcggagcctcaagtagcgccatcaacaccggttgttgagccacctaaagtggttaatccgcctgtagagccaccaactactccgccaccggcggtatcagaaacaaccgcgccgaaaggtgaggcttgggttgtgcagttaggtgccttgaaaaatgcggcgaaggttgaagaaattattgcaaaaatgcacctctccggttatccagtatataccgtgcctgctcgccctgtttcaggaaaagtgacacgtatctatattgggcctaatgcctcaaaagcagagttacaggcgatgttacctcgccttaaagagctaacaggcctgcaaggtgaagtaagagcctataaacca

SEQ ID NO: 32241 - DNA, 210 bp, Proteus mirabilis
atgtctaatacaatgactggtacagtaaaatggtttaacgatgataaaggttttggtttcatcactcctaaagatggaagtaaagatgtatttgtacattactctgcaattcagagtgatgacttcaaatctctgatggaaggccaagaagtttcatttaccatggaaaatggtatgaaaggcccagcagcaggcaacgtggtggctctc

SEQ ID NO: 32242 - DNA, 1524 bp, Proteus mirabilis
gtgaggaaaaacatgtcgcaacagcaacaaggtgcggagcaggcacctgatttaaataacgaactgcaaactcgccgcgaaaaattatcagctttacgtgataatggtaacgcattcccaaatgatttccgcagagatgccatgtctgacgaattacatcaaaaatatgatgcaatgagtgcagaagagttagacgctgctaatgtggaagttgctattgcaggtcgtatgatgactcgccgtattatggggaaagcatctttcgctacattgcaagacatgggcggccgtatccagctttatgtctctcgtgatgatctgcctgaaggcgtttataacgagcagtttaaaaaatgggatctcggtgatattttaggtggccgtggccgtgtatttaaaaccaaaacaggcgaactgagtattcattgtactgagttacgtttactgactaaagcactacgtccgttacctgataaattccacggtctagctgaccaagagacacgttatcgtcagcgttatttagacctgatctctaatgaaaattcacgtaatacttttaagatccgctcgaaaatcatgtctgctattcgccaatttatggtgaataaaggctttatggaagtagaaacaccgatgatgcaaactatcccaggtggagcaagtgcacgtccgtttatcactcaccataacgcgctagatattgatatgtatctacgtattgcacctgaattatatttaaaacgtttagttgttggtgggtttgatcgcgtttttgaaatcaaccgtaacttccgtaatgaaggtgtatcaccacgtcataaccctgagttcacaatgatggaactctatatggcttatgctgattatcgtgatcttatcgaattgacagaagagttattccgtacattaactcaagatgtattaggttcgactatcgtcaaatatggtgatgaagagtttgatttcggtaaaccgtttgaaaaactgaccatgaaagaagctatttgcaaatatcgtccagaaaccaatatggctgatctagatgatatggataaagccgttgctattgctcaatctattggtattaagattgaaaagagttgggggttaggccgtgttcaatgtgaaatttttgaagaagtagctgaaagccatttgatccagccaacttttatcattgaatatccagcagaagtttcaccactggctcgtcgtaatgatgataatccatttattaccgatcgctttgagttctttattggtggtcgtgaaatcggtaatggtttctctgagcttaatgatgcgcaagatcaagcggagcgttttgaagagcaagtgcgtcaaaaagaagcgggtgacgatgaagccatgttctttgatcatgactatatcactgcattagagcatgggttaccacctacagcaggtttaggtattggtattgaccgtatggtaatgctatttaccaatagtcatactattcgtgatgttattttattcccagcgatgcgtccgggaaaa

SEQ ID NO: 32243 - DNA, 960 bp, Proteus mirabilis
gtgtggaatgagcctgaaaaggcgcaggcgttaggaaaagaacgctcatctcttgaagctattgtagaaacaatcgaccaactcgaacaaggactagaagatgtttctggtttacttgaccttgctgttgaagccgatgatgaagaaacatttaacgaagcagttgctgagttagaaggattaaacaaaaagcttgagcaattagagttccgtcgtatgttctctggtgaatatgacagtgctgattgctatcttgatttacaagcaggctctggcggtacagaagcacaagattgggcaagtatgctaatgcgtatgtacttacgttgggctgaatctagaggctttaaaacagaaattattgaagagtctgacggtgatgttgcaggtttaaaatcagcaacaatcaaaatcataggagaatatgcctatggttggctacgtacagaaaccggggttcaccgtttagtgcgtaaaagcccatttgactccggcggacgtcgccatacttcatttagctctgcttttgtttaccctgaagttgatgacaatattgatattgaaatcaacccagccgatctgcgtatcgacgtttaccgcgcatcaggcgctggtggtcagcacgttaataaaacagaatctgcggtacgtattacccacgttcctacagggcttgtcacacaatgccaaaatgatcgctctcaacataagaacaaagatcaggcaatgaaacagatgaaagcgaagttgtatgaactggaaatgcaaaagaaaaatgcagataagcaagtgatggaagataataagtcagatattggctggggtagccaaatccgctcttatgttctagatgattcacgaattaaagatttacgcactggtgtggaaacgcgtaatacacaagcagtgttagatggtgatctcgataaatttattgaagctagcttaaaagcgggcctg

SEQ ID NO: 32244 - DNA, 1389 bp, Proteus mirabilis
atgttgactaaaaaaagaaaattactacttagcgcattagcgatgagtgttggtttatcactctctactctcccggcaaccagtatggccgccctgccttcggtaatgccatctggagaacaactacctagcttggctccaatgctagaaaaagtcttgcccgctgtggtcagtgtgcatgtttctggaactcgagtacaaagccagcaggttccagaagagtttaaatttttctttggtccaaattttccttcacaacaacaaagcatccgcccttttgaaggcttaggttcaggggttattattgatgctgaaaaaggttatgtattaaccaataatcacgttgttgatggagccgataaaattcaactccaaattaatgatggccgtgaatttgacgccaaattaattggtagcgatccacaaacagatatcgccctgctacaaattgagaaacccaataacttaaccgccattaaaatgactgactcggataaattacgtgttggtgactttgcggttgctgtgggtaatccatttggtttaggtcaaaccgcgacttccggtattatttcagccttaggtcgtagtggtttaaatctggaagggttagaaaactttattcaaactgatgcatcaattaaccgtggtaactctggtggtgctttagttaatctcaatggtgaacttatcggtattaataccgcaattttagcaccaggtggtggcaatattggtattggtttcgcgatcccaagtaatatggcgcgtgatctcagccaacaactgattacacatggtgaagtaaaacgcggtattttaggtattcgcggcactgaaatgaatgctgatttagcgaaatcctttaaaattgatgcccaacgcggtgcttttgtcagtgaagtattggcggactcttccgcagctaaagccggtataaaaccaggtgatgtccttatttctattgatggtaaacgcattaatagctttgctgaattaagagcaaaagttggtacaacaccaccaggtaaagagatcctgattggtttgatccgccaaggaaaaccaatggatgtcaaagttacactagagaaacaatcagcagatgcaacgcgagcggataacttctctcccgcacttcaaggggcaacgctcagtaactatgttaacaaacaagttaaagcggttgctgtagattctgtggagaaaggctcagcggcagcagcatcgggcttacaaaaaggcgaccttattattggtatcaacaatatgccaattggctccttaggtgacttacgtaaaaccatcgatgctaaaccaccggttcttgcattaaacattaaacgtggcaacgaagaaatttatcttctgttacgtaacagctcgcgt

SEQ ID NO: 32245 - DNA, 402 bp, Proteus mirabilis
atggtttgggtttatgcactgattggattagttgttggtcttattatcggcgcactggcaatgcgttatggtaataaaaccatgcgccaacaagatgctataaaagcagaattagatactaaaaaagaagaacttgatacatatcgcaacgagcttgtcagccactttgctcgaagtgctgaactactggacaatatggcgaaagactaccgccaactttatcaacacatggcaaaaagctccaatgagttaatgccagacatgcctgttcaagataacccatttaattatcggttaagtgaatcagaggcagccaatgatcaatccccgatcaaaatgccgccacgggattattccgaaggggcatctggattatttagacctaccgataaaaaagatgat

SEQ ID NO: 32246 - DNA, 426 bp, Proteus mirabilis
atgaaaacttttacagctaaaccagaaaccgtaaaacgcgactggtatgttgttgatgcagacggcaaaactttaggtcgtttagcaactgaaatcgcacgccgtttacgcggtaaacataaagcggaatacactccgcacgttgatactggtgactacatcatcgttttaaacgctgagaaagtagcggtaactggtcataaacgtactgacaaagtttactaccgtcatactggtcacgtaggtggtatcaagcaagcgactttcgaagagatgatcgcccgtagtcctgagcgtgtaatcgaaatcgcggtaaaaggcatgctgccaaaagggcctctgggtcgtgctatgtaccgtaaactgaaagtttacgcaggcgctgagcacaaccacgcggcacaacaaccgcaagttctggacatt

SEQ ID NO: 32247 - DNA, 390 bp, Proteus mirabilis
atggctgataatcaatactacggcacaggtcgccgcaaaagttcttccgcacgtgtcttcattaagccaggtagcggtaatatcgtaatcaacaaacgtagccttgaagtttacttcggccgcgaaacagcacgtatggttgttcgtcaaccgctggaattagttgatatgcttggtaaactggatttatatatcactgttaaaggtggtggtatctctggtcaagcaggtgcgattcgtcacggtatcactcgtgcactgatggagtacgatgagactctacgttctgatctgcgtaaagctggtttcgttacccgtgatgcgcgttctgttgaacgtaaaaaagtgggtctgcgcaaagcacgtcgtcgtccacagttctcaaaacgt

SEQ ID NO: 32248 - DNA, 1608 bp, Proteus mirabilis
atgactttttatttgttttggaattcaccacaaatgacagcaaatatccataatcatcgcattcttatccttgatttcggttcgcaatatacacaacttattgctcgccgtattcgcgaaatcggcgtttattgtgaactctgggcatgggatgttaccgaagaacaaattcgtgaatttaaccccaatggtattattctgtctggtggccctgaaagtactacagaagacaatagcccacgcgctccggaatacgtctttaatgcgggggtgccggtattaggcatctgctatggcatgcaaactatgtctatgcaattaggcggtgatgttgaagtctcaggtgaacgtgaatttggttattcacaagttgagatccgcgaaacctgcgaactgttccgtgatattcaagactccgtaagtgaagatggcaaacctttattagatgtatggatgagccacggtgataaagttacggctattcccgctgattttgtcactattgctagcactgaaacttgcccatttgcgattatggcaaatgaagagaagcgtttctatggtgtacagttccacccagaagttacccatacccatcaaggtttagccattttaaaacgctttgtgttagatatctgtggttgtgacgcattatggacatccgcggcgattattgaagatactgttgctcgtttaaaacaacaaattggcgacgatcacgttattctcgcgctatcgggtggtgtagactcttctgttaccgcattattattaaatcgtgccattggtaaacgcttaacctgtgtatttgttgataatggcttattacgccttaacgaagccgaacaagttatggcgatgtttaaaggcaaatttgacctcaatattatccatgttgaagctgaagatcgtttcttaactgcgctaaaaggtgaaaacgatccggagaaaaaacgcaaaattatcggtcataccttcattgaaatctttgatgaagaagcggttaaattaccgcaagtcaaatggctagcacaaggcacaatctatcctgatgtgattgaatcagccgcatctgcaacaggtaaagcgcatgtgatcaaatcacaccataacgtaggtggcttacctgaagatatgaagttaggtttagtggagccattaaaagaactatttaaagatgaagtgcgtaaaatcggacttgagttaggtttaccttacgacatgctataccgtcatccattcccaggaccaggtttaggggtgcgcgtattgggtgaaatcaagaaagagtattgtgatttactacgtcgtgctgatgctatctttattgaagagctacataaagccgatttatacaataaagtcagccaagcatttacagtattcctacctgtccgttcagtgggtgttatgggcgatggccgtaaatacgattgggtagtttcattacgtgctgtggaaaccgtagactttatgactgcacattgggcacacctaccttacgatttcttaggccgtgtttctaaccgcattatcaatgaagtaaatggtatttctcgcgtggtttatgatatcagcggaaaaccaccagcaacgattgagtgggaa

SEQ ID NO: 32249 - DNA, 1443 bp, Proteus mirabilis
atgcaaactgaggttatcgtgccactggttggctatctcttattggtcttcctattatccgcatacgcatatcgtaaacgtgaaaaaggacaatttcttaacgagtattttcttggtaaccgctctatgggtggatttgtccttgcaatgaccatcacggcaacctatgtcagtgctagctcttttattgggggaccaggcgcggcttacaaatacggcattggttgggtacttctttcgatgatccagctccccgcgatttggctctccctcggggtactaggtaaaaaatttgctattttggcgcgtcgttataacgccgtcaccctaaatgatatgctctatgctcgctaccaaagtcgctttttagtctggtttgccagcttaagtctactggtagcttttgtcggcgccatgaccgtacaatttattggtggtgctcgcttattagaaaccgcggcgggtattccctatgaatttggtttgctgatatttggtatctcaatcgcattatatacagcgattggcggatttagagccagtgtattaaatgatgccttacaaggccttgtgatgttattgggcacctttattttgctttttgccattatctacaaggcgggtggtttagatattgcaatacaaaaactaaatgctatcgatcctgcccttacctctcctcatggtgctgacggcattttaactggcccctttatggcgtcattttgggtattggtctgttttggggttatcggccttccccatactgcagtgcgctgtatctcttataaagacagcaaagccatgcacagagggatcatcatcggcaccatcgtgatggcgttattaatgtttggtatgcactttgcgggcgcattaggtcgggcaatcattcctgatctcaccgtgccagatcaagttattccaaccttaatggttgatgtattaccgccttttgctgccggtatatttttagcggcaccgatggcagccatcatgtcaacgattaacgcacaactgctacaatcatcagcgacattggtcaaagatctctatctcaatctcgcgcctcatgccataaacaatgaaaaacgcattgcgcgtttatctagcctatctactttgattttagggatcttattgctatttgctgcatggaacccgccatcaatgataatttggctcaatttacttgcctttggtggactacaagcggttttcttatggcctctagtacttggcctttactggaacaaagcaaaccgttatggcgcgattgcgggcatgataaccggtgccacactctatgctacactggcaacatttaatatccagattgctggatttcatcctattattcctgcgctgttattgagcttagtggcctttcttgtcgcaaataggtttggagaacaaaccttgcctcaatctgctccattacag

SEQ ID NO: 32250 - DNA, 1346 bp, Proteus mirabilis
atgctagaaaaaatcctcattgccaaccgtggtgaaattgcactgcgtatcctaagagcttgtaaggaacttgggatcaaagcagtcgccgttcactccacggcagaccgtgatttaaaacacgttctgctggcagacgagactatctgtattggtcccgctgcttcagcaaaaagttacttaaatattccggcaattattaccgcggcagagataagtggcgcgcaaccattcacccaggatatggcttcctgtctgaaaatgccgattttgccgaacaagttgaacgctcaggctttatttttattggccctaaagcggaaaccattcgcctaatgggtgataaagtttccgctattgaagcgatgaaaaaagccggtgttccttgtgtaccaggctcagatggcccattaggtaacgatacagccaaaaatatcgaaatcgccaaacgcattggttaccctgttatcatcaaagcatcaggtggtggcggtggtcgcggtatgcgtgttgttcgctcagaaaaagacttagcgcaagcaatctccatgacccgtgcggaagccaaagcagcatttagcaacgatatggtctatatggaaaaataccttgaaaatccacgccacgtcgaaattcaggtgatggccgatggacaaggtaatgctatctatttagctgaacgtgactgctcaatgcaacgtcgccaccaaaaagtggttgaagaagcaccagcaccaggtattacccctgagatccgtaaaaatatcggtgaacgctgtgcaaatgcgtgtattgaaattggctaccgcggtgcgggtacgtttgaattcctctatgaaaatggcgaattctactttatcgaaatgaatacccgtattcaggttgagcaccctgttactgagatgatcaccggtgttgaccttatcaaagagcaactgcgtattgcatcaggcttaccattatcggtcacgcaagatcaaattcacgttcatggacatgctattgagtgccgtatcaacgcagaagatccaaaaaccttcttgccaagcccgggaaccatcactcgtttccactcaccaggcggatttggtgtacgttgggaatcacatatttacgcaggttacaccgttccaccacactatgattcaatgattggtaaattgatcacttacggtgaaacacgtgaaattgcgatttctcgtatgaaaaatgcgttggcagaacttattattgacggcattaaaaccaatattgagctacaccaattcattatgaatgatgagcaattccaaaaaggtggcactaatattcactacctagaaaaacgcctaggtttaactgaaaat

SEQ ID NO: 32251 - DNA, 654 bp, Proteus mirabilis
atgagtgctaacgcacttggaatgatcatcttcgcctatttgtgcggctcaatctccagcgcgattttgatttgccgactggcaagactccctgatccaagaaaatttggctctggtaatcctggcgccaccaatgtgctacgtattggtggtaaacttgcagcggcatctgtgcttatctgtgacgtcctaaaagggatgatccccgtttggctcgcctattacctaaatgtgcctcccttttatctcggtattgtcgcaatagcggcttgtctaggccatatttaccctgtttttttccactttaaaggcggaaaaggggttgctactgcatttggctctatcgctgctattggttgggatcttagcggactgattgcgggaacctggctactaactgttttactcagtggctattcctcactgggtgctattatcagtgcattgcttgccccattttatgtctggtggtttaaacccgaattcacttatcccgttgcactattatcatgcttagtactttaccgtcatcatgacaatattcaacgtttatggcgaggacaagagagtcgcatttggcataagctgaaaaaaaagacagagaaaacagataaagagataatccaagaagccaaagagcaagaaaaagaagat

SEQ ID NO: 32252 - DNA, 1221 bp, Proteus mirabilis
gtgaaaatctatcttgttggtggtgctgtgcgcgaccaactattaaatttaccggtaaaagacagagattgggtagtggttggcgcaacgccagagacactattacaacaaggctaccaacaagtgggtaaagattttccggtctttcttcaccctgatactcacgaggagtacgctttagcgcgtaccgaacgaaaatcaggctcaggttacacgggatttacctgctatgcagcccctgatgtgaccttagaagatgatttgcaacggcgtgatttaaccattaacgccattgcttactctgctaaaggtgaatatatcgatccctatcatggcattgatgatattcatgccaaattactgcgccatgtttctgatgcatttagtgaagatccattaagggtactacgtgtcgctcgttttgcggctcgttttgcccctttaggttttacaatagcgccggagacgatgtcattgatgcaagagatgacaaacagcggtgaattaaatgccctcacggctgaacgagtgtggaaagaaacggaaaaagcacttcacagccaagccccacaagtctattttgagatcttacatcaatgtggcgctctaaaaatacttttccctgaaattaatgcactctttggcgttcctgcccctaaaaagtggcatcctgagattgatacgggtatccataccatgatggtattagccatggccagccggttgactgacgatatcgcggtacgttttagcgcgctttgtcatgatctcggtaaaggtgttaccccggtagaaaattggcctcaccatcatggacatggccctgcgggtgttcctttagttgaggctctgtgccaacgttatcgtattcctaaccagatacgtgatctcgccaaactggcagccaaatatcacgatcatctccaccgcatagaaaaaatgcgcccctcaaaaataattcgacttttcgatgcgattgatgcttggcgcaaaccagaacgcatcgatcaactcgctataattagcgaggccgatgcaaggggacgccaaggagcagaaaatttgccttatccccaaggaatattttttcgtcaagcctttaagattgccaatcaagttgatgttaaatcaattgtcagtcgtggtttaaaaggcagtgccatacgagaagcattaactaaacaaagagaagtcgcgataatagaatggaaatcgcgactt

SEQ ID NO: 32253 - DNA, 387 bp, Proteus mirabilis
atgttaaaattaaataaaattcatcatgtggcgattatttgttctgattataccatcagcaaacatttttattgtcaaatactggggcttaccctattaaatgaaaaataccgtgaagaaatacaatcttggaaagctgagcttgcgttaggtacagtctaccaaattgaattatttagcttccctgatgcgccagcacgtttaagttacccagaagcacgtggtctacgccatgtggcatttgcagtggacgatcttgatggttcagttgcttatttacaacaaaacaatattcaatgcgagccaatacgtatagatcctagtagccaaaaacgttttaccttttttcaagatcccgatggcttacctttagagctttattcaata

SEQ ID NO: 32254 - DNA, 1020 bp, Proteus mirabilis
atgcgagttttaggtattgaaacatcttgcgatgaaaccggtatcgcaatttacgatgataaagccggtctgttagcgaatcaactctatagccaaataaaactgcacgccgactatggtggtgttgttcccgagcttgcttcacgagatcatatccgcaaaacagtgccactgatccaagccgcccttaaagaagcaaatttaactgcaaaagatattgatgcggtcgcttatactgcaggaccagggctggtaggggcattgctggtgggggcgaccattggtcgttctctggcgtttgcatgggatgtgcctgctattccagttcaccatatggaagggcatttattagcgccgatgcttgaagagaaaacgccagattttcctttcgtggcgttacttgtctcgggggggcatacacaattaattagtgtaacagggattggggaatataccctgttaggtgagtctattgatgatgctgctggtgaagcatttgataaaacagccaagctattggggcttgattatcccggcggccctgttttatcaaaaatggcacaacaaggtgtagaaggacgttttgtttttcctcgtcccatgacagacagacccggactcgactttagtttctctggtttaaaaacctttgccgctaatactattcgtcaaaacgatgattcagagcaaactcgagcagatattgcgcgtgcttttgaagatgccgtagtagatactttggcaataaaatgtcgtcgagcattagagcaaacaggctttaaacgcttagtgatggcggggggtgtaagtgctaaccgtactttacgcgccaaaatggcaatgataatggaacaactcggaggggaagtgttttatgctcgccctgagttatgtaccgataatggtgccatgattgctttggcggggatgatccgttttaaaggtggtaccgaggggcctttaggggtgacagtgagaccgcgttggcctttagctgaattacctgctttagcggataaa

SEQ ID NO: 32255 - DNA, 981 bp, Proteus mirabilis
atggataataattcgctaaaaaatgcgagtttatttgataatgatcccgttctttatgctgcatggctttactatcaggacggactcagtcaaagtgaagttgcaaatattatgagcgtttctcgagtgactgttgtgaagtatttacatctcgcgagagaaaaaggtttcgttaatataagcttggattcatcagtattttctacgattgattattcaatcagaataaaagcaaaatttaatcttaataatgtgcttattttacctgatgaagaaaagaataaatcgcaacaaacatcaaatatgaatcgagaaagattagctaaagcaggggctatgtatctttctcagataatcagcaatgatgatattttaggcgtagcttggggaagaacaatccataaactagggcactatctccccactaaaacactagaaaatgtcactgtgttacaaatgattggggctgtagctccacaacctgattttactactgcggaatctgccgctttgatcgccaataagttttcaggttgcagtattaatttgcatgtaccggctgtagtgtcaaatgcacgtttggcaatggagctacaagcagaacccataatacggcgtaatttctctgctttaaatcaatgtaataaagctttgtttgtagtgggtaatactcaagatgacaatcctttgattacaacaggcgtactcaccacaaatgagatggcacaatatcgcgatttaggtgctgttggtgtcatttgtggtcgattctatgatgcacaaggtaatcctctgctttctgatatcgaccttagaattatgggaattagtcttgcacagttaagacagatcccacagcgtatttttattgctggaggcgttgaaaatgttgctgcaaccataggcgcaataaaagggggatatgctacagatattgtcatcgatgaagtgacggcattagcattattggaattgagtatt

SEQ ID NO: 32256 - DNA, 546 bp, Proteus mirabilis
atgaaaataaaaacattatcgatccggttcatattgggtctatctgtatccatagggttaacttcagcggcttttgcaataccggacaacctctattttcacggcatattagttgatgagccttgtaccataaaaccgggtgatgaaaccgtggtactcgattttggcaatattcctgataaaaacctttatgcctataaaagaacgccaagcaagttatttcaattacgtctgtcagaatgcgatctctcaatcggtaaaagcgtcaaaataacctttaaaggagaggaaaatcaagcaatggcaggagaaggatttttggcaataagtccgggcagccaagcttctggtattgcggtgggattagagtctgaaaatggtaatgctctacctataaataaagaaacagacaagatgtcattaactgcgggtgacactattttgaatttttatgcctttattcaaggtgagccggatgcgattgcgaataagtcgattaaacgtggtccttttagtgcaatagccaccttctatttgaattatgac

SEQ ID NO: 32257 - DNA, 756 bp, Proteus mirabilis
atgatgttattaaaacgctcatgcattgttgcaaccactttgttaatgggaatggcatttactcatcaagctgttgctgccattgcgctagatcgaactcgtgtcatttttaatggtgccgaaaaatcgattagtttaaatgtcagcaatcaaaataaggacttgccttatcttgctcaaggctggatggaaaatgaaaacggcgaacgtattgaaagcccactgattgttttacccccgatccaacgtattgaaccgggtgataaaagtcagattaaggtgcaatcattacctgatatagccaaattaccacaagatagagaaagtgttttctattttaacctacgtgaaattccaccacgtagtaataagcctaatgtactgcaaattgcattacaaacgcggatcaaattattttatcgtcctgcatcaatctatgcctcgcaaacggatttaaccaatccttggcaagagcagatcactttaactaaaaaaggtgatcgcttcgaagtgaataatccaacgccttactatgtgacattagtcgatggattaaccagtttgaaaggaaaaagcttggatggctttgaaccattaatgatcgcacctaaaagtagcggcacgataaatctgagtgcttccatgtttggtgcttcaccggtattgagctacatcaatgattatggcggtcgccctcagatgaaattcacctgtagtggcaatcaatgcaaagtaacagaaacggcagctggaaac

SEQ ID NO: 32258 - DNA, 1728 bp, Proteus mirabilis
gtgaatattcaggcttttctttcagaaaaaatcagtatggcgatgagtgctgctggcgcccctgctgatagcgaaccacttgtccgtcagtcagctaaagtgcaatttggtgactatcaggcgaatggtgtcatgggagcggcaaaaaaaatgggtatcccaccccgacaactcgcagaaaaaattctggaacaccttgatatcacagatattgcagataaagttgaaatagcaggccctggttttatcaatatcttcttatcacccgtttgggttgcacaacaagccgaattcgcattagcggatgagcaccttaatattaccaaggtaacccctgaaacgattgtgattgactactcatcacctaacgttgcaaagcaaatgcatgtgggtcacttgcgttcaaccattattggtgatgccagcgcacgtactctctcttttttaggtcataatgttattcgcgctaatcaccttggtgattggggtacgcaattcggtatgctgattgcttatttagagaaaaagcaaaatgaaaatgccgcagatatggcattagcggatctcgaagagttctaccgtgaagctaagaaatgttatgacgaagatgaagtattcgctgaacgtgcccgtaattatgtcgttagactacaaggtggtgatgaatactgccgtactatgtggcgcaagcttgtcgatatcacaatgcaacaaaatcagctaacttatcaacgccttaatgtcactttaaccgaagatgatattatgggtgaaagtctttataacccaatgttgccgggtattgttgctgatcttaaagcaaaaggtcttgctgttgaaagtgaaggcgctactgttgttttccttgatgaatataaaaacaaggaaggcgaaccaatgggagtcattatccagaaaaaagatggtggttacctttatacaacaacggatattgcctgtgctaaatatcgccatgaacaattacatgcaaaccgcgtattatattacatcgactcacgtcaacatcagcatttaatgcaagcttggactattgtccgtaaagcaggctatattcctgatagtatgtcactcgaacaccatatgtttggcatgatgttaggtaaagatgggcgtccatttaaaacgcgctcgggtggcacagtacgtttaactgacttactcgatgaggctcatgaaagagcattaacattaattcgcgaaaaaaatcctgatatggatgaagaggaattaaataatattgctcgtgtagtgggcattggtgctgttaaatacgcagatttatcaaaaaacagaaccaccgattatattttcgattgggatctgatgttaagttttgaaggtaatactgcaccttatatgcaatatgcctatactcgtgttgcctctatctttaaacgtgcagaaatagatgaaagcgcattaacccagcctatctcattaacacagcctcatgaaaaacaactggcactacgtttagtacagtttgacgagactatcacgcaggttgcacgtgaaggtacacctcatgtgatgtgtgcatacttatatgatttagcgcagtccttctcaggtttttacgagaactgccctattctatcggccgaagatgacaatgtacgccaaagccgtcttaagctagcgcgtttaacagcaagaaccttaaagcaaggcttagagactttaggtattgaaactgtcgatagaatg

SEQ ID NO: 32259 - DNA, 1641 bp, Proteus mirabilis
gtggcaatccattcaagagctgggcaacatactcgtcaaagcgatctgattaatgtagcgcaattaaccgcacaatattattcactaaaaccgcaagcaaatcagaatgctcatcgtgtgaaatttggtacatcgggtcaccgaggcagtgccaaacgtcatagctttaatgaagcacatattctagcaattgctcaagctattgctgaagtccgagctaataatggtgtaacggggccttgctatgtaggtaaagatacccatgcattatctgagcctgcttttatttcggttttagaagtgcttgctgcaaataaagttaacgtgattattcaagagaataatggttataccccaacgcctagcgtttccttctctattttaacttacaatcaagggcaccaagacattgctgatggtatcgtcattacaccatcacataatcctcctgaagatggggggataaaatacaatccatcaaatggtgggcctgctgatactgatttaacctctgtgattgaaaaacgcgccaatgaattattggaaaataatttatcgggggttaaacgtctttcttatgatgatgcattagcgagtggttatattcacgagcaagatttaattatgccttatgttaaagcgttaggtgacgttgttgatatgaaggcaattaaaaaagcgggtttgaaattaggtgtcgatccactgggtggttcaggaattgaatactggaaacgcataggtgaatattacgaacttgatcttgagttggtaaacgatcaggtggatcaaactttccgctttatgacattagatcatgatggtgtgatccgtatggattgctcatcaccttgggcaatggaaggtttattgcaactgcgtgataaatttgacttagctttcgccaatgaccctgattacgatcgccatggtattgtcactccttcgggcttgatgaatcctaaccactatttagcggcagcgattaattatctttttcgccatcgtcctcagtggtcaaatgaggtaaaagtgggtaaaacactcgtctctagcgcgatgattgaccgagtcgtggctgatttaggtcgtgaacttgttgaagtacctgtcggctttaaatggtttgtgcaaggtctattcagtggcgagtttggttttggtggtgaagagagtgcgggggcatcattcttacgttttaatggtaaaccgtggtcaacagataaagatggtattatcttatgtttactggctgctgaaataaaagcggtaacaggtaaagacccacaacaacattataatgagttagcgcaacgttttggctctccaagctataatcgtatacaagcatctgcaactcatgagcaaaaagcgttgttgtcacgattatcaccagaaatggtcaccgcaaataccttagcaggtgatcctattactgcgcgtttaactcacgcatctggtaatggtgctgctattggtggtttaaaagtaatgaccgattatggttggtttgccgctcgtccttctgggacagaagaagcgtacaaaatttattgtgaaagcttccgtggctctgagcatcgcgaattaattgaaaaagaagccattgaaattgttaataatgtttttgccagtaaacaa

SEQ ID NO: 32260 - DNA, 570 bp, Proteus mirabilis
ataaagaaactatcaagtaatttggagtatacgatggcgaaactgcatgattactacaaagacgaggtagtccaaaaactgatgtctcagtttggttaccattctgtcatgcaagtccctcgggtcgagaagatcaccctgaacatgggtgttggtgaagcaattgctgataaaaaactgctggataatgcagcagctgatttagcagcaatctcaggtcaaaaacctctgatcaccaaagcacgcaaatctgttgcaggcttcaaaatccgccagggctatccgatcggctgtaaagtgaccctgcgtggcgaacgcatgtgggagttctttgaacgtctgatctctattgctgtaccacgtatccgtgacttccgtggtttgtccgctaaatcattcgatggacgtggtaactacagcatgggcgtgcgtgaacaaatcatcttccctgaaatcgattacgataaagtggatcgtgttcgtggtttggatattaccattactacgactgcgaaatctgatgatgaaggtcgcgcattgttagcagcgtttaacttcccgttccgcaag

SEQ ID NO: 32261 - DNA, 303 bp, Proteus mirabilis
atggctaagaaatctatgaaagcacgtgatgtaaaacgtgcgaatttagctgagaaattcttcgcaaaacgcgcagaactgaaagctatcgtttcagatgtaaacgtatctgatgaagatcgttggaatgctgttctgaaactgcaaacactgccacgtgattcaagtccttcacgtcagcgtaaccgctgccgtcaaactggacgtccgcacggtttcctgcggaaatttggcctaagccgtattaaagtccgtgaagccgctatgcgcggtgaaatcccgggccttagaaaggctagctgg

SEQ ID NO: 32262 - DNA, 390 bp, Proteus mirabilis
atgagcatgcaagatcccatcgcggatatgctgacccgtatccgtaacggtcaggccgcgaataaagttgcggtcacaatgccttcctccaagctgaaagtggcgattgccaacgtgcttaaggaagaaggttatatcgaagattttaaaattgaaggcgacactaagccagaactggaaatcactttaaaatatttccaaggtaaggctgtagtagaaagcattcagcgcgtaagccgtccaagtctgcgcatctataaaagaaaagatgagctgccacaagttatggcaggactgggcatcgctgttgtttctacctcaaaaggtgttatgactgatcgtgcagctcgccaagcaggtcttggtggcgagattatctgctacgtagct

SEQ ID NO: 32263 - DNA, 531 bp, Proteus mirabilis
atgtctcgtgtggcaaaagcacccgtcgtcattcctgccggcgtagaggttaaactcaacggtcaggtaattacgattaagggtaaaaacggcgagcttactcgtactatccataatgcagttgaaattcaacatgctgacaaccaactaactttcgcaccacgcgatggttatgctgatgcatgggcacaagcgggtactactcgttcactgctaaatgcaatggttgtaggtgttaccgaaggcttcactaagaaactgcaactggtaggtgtaggttatcgtgcgtctgttaagggcaacacagttaacttatcagtaggttattcacatccagtggaacaccaactgccagcaggcatcactgctgaatgtccaacacaaactgaaatcctactgaaaggtgcggataagcaagtgattggtcaagtagcagctgaactgcgtgcttaccgtcgccctgaaccttataaaggtaaaggtattcgttacgccgacgaagttgtgcgtatcaaagaggctaagaagaag

SEQ ID NO: 32264 - DNA, 351 bp, Proteus mirabilis
atggataagaaagcagctcgtatccgtcgtgcgacccgcgcacgccgtaagctccaggaactgggtgcgactcgcctggtggtacatcgtacccctcgccatatttatgcgcaggttattgcaccaaacggttctgaaactttggtggccgcttctactacagaaaaagctatcattgagcaactgaaaaacactggaaacaaagaagcagcagcagtagttggtaaaattgttgctgaacgcgctctggaaaaaggtatcaaatcagtatcatttgaccgttccggtttccaatatcatggtcgagtccaggcactggcagatgctgcccgtgaagctggccttcagttc

SEQ ID NO: 32265 - DNA, 498 bp, Proteus mirabilis
atggctcacatcgagaaacaagctggcgaactgcaggaaaagctgatcgcggtaaaccgcgtatcgaaaaccgttaaaggtggtcgtatctttagcttcaccgctcttacagtagttggtgatggtaatggccgcgttggttttggatatggcaaagctcgcgaagttccggcagcaatccagaaagcgatggaaaaagcccgtcgcaatatgaaaaccgtcgctttaaacaacggtactctgttccaccctattaaaggtactcatacaggttctcgcgtatttatgcagcctgctcatgaaggtactggtatcatcgcaggtggtgcaatgcgtgcagttctagaagtggctggcgttcgtaacgtactggctaaaacctatggttccacgaatccgattaacgtcgttcgtgcaacactggacgctttagatagcatgaagtctccagaaatggtcgcagctaagcgtggtaaatccgttgaagaaattctgggg

SEQ ID NO: 32266 - DNA, 183 bp, Proteus mirabilis
atgaccatggctaagactattaaaattactcaaacacgcagtttaatcggccgtctgcctaaacataaggcaactatggctggtttaggtctgcgtcgcatcggtcacactgtagaacgcgaagatacaccagcagttcgcggtatgatcaacttggtttcctatatggttaaagttgaggag

SEQ ID NO: 32267 - DNA, 479 bp, Proteus mirabilis
gtgcttgccaaattgctcgatcagcaaaaaggcaccatcattgaaatgtttaacatgttctctggtggtgctcttagccgtgcttctatctttgcgctgggtatcatgccttatatttcggcatcgattattatccaactattatcagtggttaaccctcggttagcggagattaagaaggaaggggaggcgggtcgtcgtaagatcagccaatatacccgttatggtactttggtgctggcgatattccaatctattggtatcgcaacaggcttaccgaatatgccaggaatgcaaggtctggttattaatccaggcttaccattctatattacggctgttgtgagcttagtcacagggacaatgttcctgatgtggttaggtgagcaaatcactgaacgtggtattggtaacggtatctcaaccattatatttgcaggtatcgttgcaggtcttccacctgccattggtcaaaccat

SEQ ID NO: 32268 - DNA, 432 bp, Proteus mirabilis
atgacaaaaactgtattagttcccatcgattttactgagcttggtttattggataaagttgtcactcatctcaaagcattagcgatggccgataaactaaatatccactttttatctgttattcctagctatgagtcctttgtcggatttgcttttggcaaccaagaccgtcttgccaatgataagcagcgtattgaaattgcattatctacgttaaatgatagtttatctcatattgaaattcccaatagcacatcccaatcttatatttccgtaggtaacccacgcgaccgtattttagagaccgcaaaaaaaatccaagctgatctgattgtgataggctcacgcaaccctggaatgaaaacctacttactaggctcgacagcttcttctgttgttagctatgcagaatcttctgtattagttgttcga

SEQ ID NO: 32269 - DNA, 1854 bp, Proteus mirabilis
atggagcaaaacccgcagtcacagctgaagctacttgttacgaaaggtaaggagcaaggctacctgacctatgctgaggtcaatgaccatctgccggaagatatcgtcgattcagatcaaatcgaagacatcatccagatgattaacgacatgggcattcaggtcatggaagaagcacctgatgccgatgatctgatgttggcagaaaattcaaatgacactgatgatgatgctgtcgaagccgctgctcaggtactttctagtgtagaatctgaaattggccgtacaaccgatcctgtgcgtatgtatatgcgcgaaatgggaaccgttgaactgctcacccgggaaggtgaaattgatatcgcaaaacgtattgaagatggtattaaccaagttcaatgctcagttgctgaatatcctgaagcaatcacttatcttcttgaacaatatgatcgtgttgaagccggtgaagcgcgtctttctgatttaattactgcctttattgaccctaatgccgaagaagtggcagaaagtgatgatgtcaatttaggcaaagacgacgatgaaatcgacaacagcgccgatgacgaagatgaagacgaagatgaagatagcgacacagacagcgatagcgatgatgataacagcatcgatcctgaacttgctcgccaaaaattcaccgagcttcgtgaacagtacgaaaaaacgcgtcaatctattaaggccaaaggtcgtaatcataaagataccgaactggaaattttacagttatcagaaattttcaaacagttccgcttagtgccaaaacagtttgattatctggttaacaacatgcgtgaaatgatggacagagtccgtgctcaagagcgtcacatcatgcgtctttgtgttgatcaggtcaaaatgcctaagaaaaacttcattactctgtttacaggaaatgaaactaacgacacatggtttactgccgctcgtgcgatgaataaaccttggtctgaaaaactggcaggtattgaagaagaagtacaacgtagcttacaaaagttacaacaaattgaagttgaaacaggactgacaatcgaacaggttaaagatattaaccgtcgtatgtctatcggtgaagcaaaagcacgccgtgcgaaaaaagagatggtcgaagcgaacttacgtttagttatctctatcgcgaaaaaatataccaaccgtggcttacagttccttgacctgatccaggaagggaatattggtctaatgaaagcggttgataaatttgaatatcgtcgtggttataagttctcaacttatgcaacatggtggatccgtcaggctattactcgttcaatcgccgatcaggcacgtaccattcgtattccggtacatatgattgaaacgattaataagctaaaccgtatctcgcgccaaatgttgcaagagatgggacgtgagccttcaccagaagagcttgcagaacgtatgctgatgcctgaagataaaatccgtaaggtactaaaaatcgctaaagagcctatctccatggaaaccccaattggtgacgatgaagattcacatttaggtgattttatcgaggatactaccctcgaattacctctggattcagcaacatcagaaagcttacgttcagcgacacacgaagtattaggtggtttaacactgcgtgaagctaaagtcctgcgtatgcgctttggtatcgatatgaataccgaccatacattggaagaagtgggtaaacaatttgatgttacccgtgaacgtatccgtcagattgaagcaaaagcgttgcgtaaattacgccacccaagccgttctgaagtgctacgtagcttccttgatgaa

SEQ ID NO: 32270 - DNA, 1041 bp, Proteus mirabilis
atgaaaaagtggtcctctgtacttgctgccagtgtaatggcattaagtattggtacagcatcggctgatgatggtaagacaatctatttctataactggacggaatatgtaccgccaggattgctggaacagtttacaaaagagactgggattaaggtgatttactccacctatgaatctaacgaaagcatgtataccaaattaaaaacctataaagatggtgcttatgatttggtggttccttcaacttattttatttctaaaatgagtcatgaggggatgctacagaagattgataaatcgaagctcagtaattttgataatcttgacccaagtttattacataaatcattcgatcctcaaaatgactactcaatcccttatatttggggagcgactgcgatagggattaatagtgatgaagttgatgtaagtagcattacttcatgggctgatttatggaaaccggaatataaagatagtttactgttaacggatgatgcacgtgaagtattccaaatggctttattaaaattaggctattcaggtaataccacagatccaaaacagattgaagaagcctataaagagttacaaaagctgatgcctaatgtactggcttttaattcggataatcctgctaatccttatatgcaaggagaagtgaatctagggatgatctggaatggctctgcatttattgcgcgagaagccggtgctcctattgagttggtatggccaaaagagggcggtatcttctggatggacagcttagctattcctgcaaatgcaaaaaatgttgaaggtgcgcataagcttatcgacttcttattacgccctgaagttgctgcaaaagtggctgaaaatatcggctatccaacacctaatttagcggcacaaaaattattgccaaaagctatcacaaaagatagctcactttaccctagtgaagagattatcagtaaaggcgaatggcaaaatgatgtgggtgaagcgacggttttatacgaaagctattaccaaaaactgaaagcgggtcgt

SEQ ID NO: 32271 - DNA, 1368 bp, Proteus mirabilis
atggaattatcttcgctgacagcgatttcaccgattgacggtcgttacggtagtaaaacctcgtcgttacggactatttttagtgaattcggtcttttgaaattccgtgtacaggtagaagttcgctggctacaaaagctagcatcttgcaccgacattaaagaagttcccgcctttgaacaaaacgcaatcgattaccttgatgcaattgttgctaacttcaatgaagatgatgctacccgtatcaaaacgatcgagcgcaccaccaatcatgatgtgaaagcggttgaatatttcttaaaagaaaaagtggcagctatccctgcactacagcaagtttctgagtttattcacttcgcttgtacttctgaagatattaataatttatcccatgccatcatgttagaaacagcacgccaagaagtgctactaccagcatggcgcgagcttattgatactatcagtaaaatggcgcaagcatatcgtgatttacccctgctctctcgtactcacggacaaccggcaacaccttcaacggtaggaaaagagtttgcaaacgttgcataccgtatggagcgtcaatatcgccaacttactcaagtagaaattttaggtaaaattaatggtgcagtaggtaactataatgctcacctagctgcctatcctgaagttgattggcaccaatttagtgaagaatttgttacttcattggggatcacatggaacccatatactacgcaaattgagccacacgactatattgccgagctttttgattgcatcagccgctttaatacaattttaattgattttgaccgtgatatttggggttatatcgctcttaatcacttcaaacagaagactattgccggtgagattggctcatcaacaatgcctcataaagtgaatcctatcgattttgaaaactctgaaggtaatttaggtttagctaatgccgttatggggcatctttccagcaaattaccggtttcgcgttggcaacgtgatttaactgactcaaccgtactacgtaacctaggtgtcggtatcggttatgcattaatcgcttaccaatcaaccatgaaaggtttaaataaattagaagttaatgaaagtcatcttcgtgaagagttagatagcaactgggaagttcttgctgaaccaatccaaacggttatgcgtcgctatggtattgaaaagccttatgaaaaacttaaagagttaactcgtggtaaacggatcacagcacaagatatgattgtgtttattgacggtttagcgctaccagaacaagaaaaagcacgcttaaaagcgatgacacctgaaagctatattggttttgccagccaacttgttgataaattagat

SEQ ID NO: 32272 - DNA, 1101 bp, Proteus mirabilis
atgtcagataacagccaaaaaaaagtcatcgttggaatgtccggtggcgtagattcatccgtctcagcctatcttcttaaggaacagggatatcaggtcgttggtctgtttatgaagaactgggaagaagatgacgatacagaatattgctcagcttctgccgaccttgccgacgcgcaagccgtgtgcgataagcttggcatagaacttcacactatcaattttgccgctgaatattgggataatgtatttgaacactttttatctgaatataaagctggccgcacccctaatcccgatattctatgtaataaagagataaaatttaaagcgtttttagaatatgcagctgaagatttaggggccgactatattgcaacgggccactatgttcgtcgccgtgatattgatggtaaaagccaattactgcgcggtgttgataacaacaaagatcaaagctacttcttatatacattaagtcatcagcaaatcgcccaaagccttttccctgtcggtgaaatggaaaaacctgaggtgagaaaaattgccgagaagcttgatttagcaaccgccaagaaaaaagactctacggggatctgctttatcggtgaacgcaagtttactgatttcttatcgcgctatttacctgccaaaccgggtcctatcgtcaccgtagatggcgaaaccattggtgaacatcaagggttgatgtaccacaccttaggtcaacgtaaaggtctgggtatcggtggcacaaaagaaggtagcgaagatccttggtatgtagtcgataaagatgttgcaaataacatattaattgtcgcacaaggtcatgaacaccctcgattaatgtccgtaggcttaattgctcaacaacttcattgggtcgcaagagagcctattaccgaagcttttcgttgcacggtgaaaacacgatatcgccaagctgatattccgtgtacagtaacaccattagatgaagataaaattgaagtccgttttgactatcctgttgctgctgttacaccggggcaatcggccgttttctatcaagacgaagtctgtttaggtggcggtattattgaaacacgtattcaggag

SEQ ID NO: 32273 - DNA, 1671 bp, Proteus mirabilis
atgacagaatcttttgctcaactctttgaagaatccctaaaaacaatcgaaactcgtccaggtgcaatcgttcgtggcgttgttgttgctatcgataaagacgttgttctggttgatgcaggtctgaaatcagaatctgcgattcctgtagaacaattcaaaaacgcgcaaggcgaattagaaatccaagtgggtgacgaaattgacgttgctctggacgcggttgaagatggcttcggtgaaaccgttctgtctcgtgagaaagctaaacgtcacgaagcgtggctgatgctggaaaaagcttacgaagaaaacgaaactgttgttggtatcatcaacggtaaagttaaaggtggtttcactgttgaactgaacggcattcgtgcgttcttaccgggttcactggtagacgttcgcccagttcgcgatacaactcatctggaaaacaaagagcttgagttcaaagtcatcaaattagaccaaaaacgtaacaacgttgttgtgtctcgtcgtgcggttatcgaatctgagaacagcgcagaacgtgatcaactgttagaaaacctgcaagaaggcatggaagttaaaggtatcgttaagaaccttactgactacggtgcattcgttgatctgggcggtgttgacggcttactgcacatcactgatatggcttggaaacgtgttaaacacccaagcgaaattgtcaatgttggcgacgaaatcactgttaaagtcctgaaattcgaccgtgagcgtactcgcgtatcattaggtctgaaacaactgggcgaagatccatgggtagctatcgctaaacgttatccagaaggtactaaactgactggtcgtgtaactaacctgactgactatggttgcttcgtagaaatcgaagaaggcgttgaaggtctggtacacgtttctgaaatggattggactaacaaaaacattcacccatctaaagttgttaacgttggtgatgttgttgaagttatggttcttgacatcgatgaagaacgtcgtcgtatttcactgggtctgaaacagtgtaaagcaaatccatggcagcaattcgcagaaactcacaacaaaaacgaccgtgttgaaggtaaaatcaagtctatcactgacttcggtatcttcatcggcttagacggtggtattgacggtctggttcacttatctgacatttcttggaatgttgcaggtgaagaagctgttcgtgagtacaaaaaaggcgacgaaatcgctgcagtagtactgcaagttgacgctgagcgtgagcgtatctctctgggcgttaaacaattatcagaagatccattcaataattacctgtctgctcacaaaaaaggtgctattgtttctggtaaagtaactgctgttgatgctaaaggcgcaactgtagaattagctgacggcgttgaaggttacctacgtgcttcagaagcttcacgtgaccgcgttgaagatgcaactctggttctgaatgttggcgatgctgtagaagctaaatacactggtgttgaccgtaaaaaccgcgttatcaacctgtctgttcgtgctaaagacgaagcagatgagaaagacgctatcgcttctgtaaacaacaaagaagaagctggtttttcaaacaacgctatggctgaagctttcaaagcagctaaaggcgaa

SEQ ID NO: 32274 - DNA, 237 bp, Proteus mirabilis
atggatcaaataagtgccacaaccgcaataaaaaaagcatgtaattatgtcggtgggcagtctgaaatggctaaacgcttgggtatttcaccgcctacagtaaatcaatggatcaatggaactcgaaaaattccagcacgacgttgccctgaaatagaaaaagtaacttcaggagtggttcgatgtgaagaactaaggcctgatgttgattggtcttatttacggggaactcaacaa

SEQ ID NO: 32275 - DNA, 1947 bp, Proteus mirabilis
ttgagtgacatggcgaaaaacctgatcctctggttagtcattgcagtcgtattgatgtcattattccagagcttcggacccagcgattcgaatagtcgtaaggtggattactctacctttatcaatgagttaactaataaccagttacgcgaggtcagcataagtggttatgatattaatgtaactaaaacagataactcaaagtacagcacgtatatgcctatgcgtgatgataacctgctgaccactttaatgaaccgtaatgtaaaagtgaccggtgaacccattgaaggtcaaagccttctaacacaaatttttgtgtcttggttcccaatgcttttactgattggtctttggatcttctttatgcgccaaatgcaaggtggtggcggtaaaggtgcgatgtcttttggtaagagtaaggctcgcatgttgacagaagaccaaattaaaacaacctttgctgatgttgcaggttgtgatgaggcaaaagaagaagtcagcgagctagttgagtatttacgtgatccgggtcgtttccagaaattaggtggtaaaattccgaaaggtatcctaatggttggtcctcctggtacgggtaaaacattattagcaaaagcgattgctggtgaagcaaaagtacctttctttactatttctggttctgacttcgttgaaatgtttgtcggggtcggtgcttctcgtgttcgtgatatgtttgaacaggctaaaaaagcagcaccttgtatcatctttatcgatgaaatcgatgcggttggtcgtcaacgtggtgccggccttggcggtggtcatgatgaacgtgaacaaacgctgaaccagatgctggtcgaaatggatggttttgaaggcaacgaaggtatcatcgtgattgccgcaactaaccgccctgacgtattagaccctgcattattacgtccaggtcgttttgaccgtcaagtcgtcgtaggtttaccagatgttcgtggtcgtgagcaaattctgaaagtgcatatgcgccgagtgccattatcaccagacgttgatcctgcgatccttgctcgtggtactccgggtttctccggtgctgacttggcaaacttggttaatgaagctgcactatttgctgcacgcggtaacaaacgtgttgtttcaatggtcgagttcgaaaaagcaaaagataagatcatgatgggtgctgaacgccgttcaatggttatgaccgaagaacaaaaagcatcaacggcttatcatgaagcgggacacgctattattggtcgtttagtgcctgaacatgatccggtacataaagtgacgattatccctcgtggacgtgcattaggtgtgactttcttcttacctgaaggtgaccaaatcagtgccagccgtcaaaaactggaaagccaaatttcaacactttatggtggtcgtttagcggaagagatcatttatgggcctgaacatgtttcgacaggggcttctaatgatatcaaagtggcaaccaatattgcgcgtaacatggtgacacagtggggcttctctgaaaaattagggccattactgtatgctgatgaagacggtgaggtgttcttaggtcgttcagttgctaaagcgcaacatatgtcagatgaaacggcacgtactatcgacgaagaaattaaagctatcatcgatcgtaactatacccgtgctcgtcaaatcctgatggataacctagatattctgcactcaatgaaagatgcattaatgacttatgaaaccattgatgcacctcaaattgatgacttaatgaatcgtcgtgaagttcgtccaccggcaggttgggaaggcaataatggcaatagtggtgcaaataccgctacagcacagccgacacaaacacatgtgacgaatgagccaaataataagtcaggatcagagagtgacacaccttctgataacaatactcat

SEQ ID NO: 32276 - DNA, 832 bp, Proteus mirabilis
atgaaattaattgccagaggaagagagcttaatttatcttcaccccaagtgatgggcattttaaatgtgacgccagattcattttctgatggcggaacgcataactctcttaatgatgctattaaccacgccgctaaacttattgctgaaggggcttctatcatcgatatcggtggtgaatcaacaaggccgggtgccagtgatgtttctgtcgatgaagagttacatcgtgttattcctgtggtcgaagctatccagcaacgttttgatgtgtggatttctgttgatacatccaaagcacaagtgatcacggagtccgctcaagcgggtgcctctattatcaatgatatacgttcacttaccgaacctggagcacttcaggcggctgcaaaaacggggttacctgtttgtattatgcatatgcaaggtttacctaaaacaatgcaacattcgccgcagtataagaatgtgatgatagaagttgatgcttttctggcagagaatattcaacgttgtattgatgctggtatcgagaaaaatcaaattattcttgatccaggcttcggctttggtaaaaatttagcgcataattatcaattattagcacatctaagtgattttcatcactttggtttaccgatactcgccggaatgtcacgtaaatcaatggtaggacagttactcaatgttccgccacaagagcgtgttgctggtagtgttgcttggcgcagttattgctgcaatgcaaggggcacaaattattcgtgtacacgatgttaaagagactgtagatgcgatgaaagtcgtgcaggcgactctttctgcaaaggaa

SEQ ID NO: 32277 - DNA, 1335 bp, Proteus mirabilis
atgagcgaacgtaaatactttggaacagacggtatccgtggaaaagtaggtgacagccctattacacctgattttgtattaaagctaggctgggctgcaggtaaagtacttgcacgtcacggctcacgtaaaatcattatcggtaaagatactcgtatttctggttatatgttggaatcggctctagaagcaggccttgctgctgcgggattatccgcttcatttacaggcccgatgccaacccccgcggtcgcttatttaacccgtactttcagagcagaagctggcatagtgatttctgcttctcataatccctattatgataatggcatcaaattcttctccattgatggtacaaaactacctgatgaagtagaagaagccattgaagcggaaatggaaaaaccgatcacttgtgtagagtccgcagaattagggcgtgcgaatcgcattgttgatgccgcaggccgttatattgaattttgtaaaggtacgttccctaacgaaaataatttaaatgggttaaaagttgttgtggattgtgcccatggagcaacttaccatattgcgcctaatgtttttcgtgaactcggggctgaggttatcactattggttgtgagcctacgggcatcaatatcaatgacgaatgtggtgcaacagatgtacgtatgttgcaaaaacgcgtgttagaagagggtgccgacgttggtttagcctttgatggtgatggtgaccgtattattatggttgatcatagaggcctaaaagtagatggtgaccaaattctctatatcattgcgcgagaagcattgcgtcaaggtcaactacgtggtggtgccgtcggtacactaatgagtaatatggggttagagattgccttaaaacagcttggtattccttttgtgagagcgaaagtgggtgaccgctatgtgcttgagaaattgcaagaaaaaggctggcgtttaggggcggaaaactcgggtcatattattttacttgataagacaacaacgggtgatggtattgttgctggtctgcaagtattaagcgcaatggttcgtaaccatatgagcttgcatgatctatgcagtggcatgaaattattaccacaaattttggtgaatgttcgttttacgggaaatcacgatcctctacaatccacagaagttcagcaagtcgcaaaagaagtcgaggcggagcttggtggtaagggacgcgttttattacgtaaatcaggaacagaaccattaattcgagtgatggttgaaggcgaaaatgaagagcaagtcacagcgatggcgaatcgtattgctgatgcagtaaaacatgttggc

SEQ ID NO: 32278 - DNA, 2130 bp, Proteus mirabilis
gtgtcccgtacaattatgctagtcccaactgatacacgcgtaggtttaaccagcgtcagcttgggtgtaatccgttctatggaacaaaaaggcgttcgccttagtgtattcaaacctatcgcacagcctcgtgttaaaggcgcattagatcaaaccactgcgattatccgctctcactccacaattcaatccgcagaacctttaaatatggattacgttgagtcattactcagctccaataaaaaagatgttctgatggaagaaattgttgctagatatcacgaaaatactgctgatgcagaagttgtactgattgaaggcttagtgccaatgcgtaagcacccttttgcacaatctttaaactatgagattgccaaaacattaggtgctgaaattgttttcgttactgcattaggcaacaacaccgctgagcagttaaaagagcgcattgaatttgctcgtgctgaatttggtggtgtaaaaaatcaaaatatcacaggtgtgattgttaataaattaaatgcccctgtggatgatcaaggtcgtactcgccctgatttatcagaaatttttgatgactcaagcaaagcgattatctctaatgtcgatttaaataccatcgaaaaaaatagcccacttcctttattgggttgcattccatggaacttcgatttaatcgctactcgtgctacagatatggcaaaacacttaaatgcgactatcatcaataagggtgatattgaaactcgtcgtattaagtctgtgactttctgtgctcgtagtattccacatatgttagagcatttccgcccaggttcattgcttgtcacttctgccgatcgcccagatgttttagtttcagcatgtcttgctgcaatgaatggcgttgaaatcggtgctatcttactcacaggtggttaccaaatcgatgcaccaattaaacaattgtgtgagcgtgcatttgaaactggtctacctatctttatggttaattcaaacacttggcagacttcattaaatctgcaaagctttagcttagaagtgccagcagatgaccatgagcgtatcgaaaaaattcagaactatgttgctcaacatatcaataaccaatggattgattcactgacagcaaactctgaacgtcctaatcgtttatcaccaccagcattccgttatcaattaacggaattagctcgtaaggcgaaaaaacgcatcgtattacctgaaggtgatgaacctcgtaccgttaaagccgcgtctatttgtgctgaacgtggtatcgcaacctgtgtactgttaggtgatcctgaagaaattcgtcgtgttgctgcagcacaaggtgttgaattaggtacaggtattgaactcatcaatcctaaagaagtacgtgaaatttatgtacctcgcttagttgaactgcgtaaaaacaaaggtatgacagaagttgttgctcgtgaacagttagaagataacgttgttctcggtaccttaatgttagaaaaaggcgtcgttgatggtcttgtttctggcgctgttcatacaaccgctaacactattcgcccaccactacagttaattaaaactgcacccggtagctcattagtgtcttctgtgttctttatgctattaccagaacaagtctatgtttatggtgactgcgcaattaacccagatccaaccgcagaacaactggctgaaatcgctattcaatctgcagactcagcaaaagcgtttggtatcgacccacgcgttgcgatgatctcttactctacaggtaactcaggtgctggcagtgacgttgaaaaagtgcgagaagcaactcgtttagcacaagaaaaacgtccagatctgattattgatggtcctttacaatacgatgcggctgtaatggctgacgttgctaaatctaaagcaccaaactcacctgttgcaggtaaagcaactgtgtttatcttccctgatctaaacaccggtaacactacctataaagcagtacaacgttcagcagacttggtttccattggaccaatgttacaaggtatgcgtaaacctgttaacgacctttctcgtggcgcgttagtcgatgatatcgtctacactgttgcattaactgcaattcaagcaagccaa

SEQ ID NO: 32279 - DNA, 1023 bp, Proteus mirabilis
atggcaacaataaaagacgtggcaaaacgcgcaggcgtatcaaccacgactgtttctcatgtgatcaacaaaactcgttttgttgctgagaacacaagagcggcagtttgggctgcgataaaagaattaaattattcgccaagtgctgtcgcacgtagtttaaaagtcaatcacactaaatctattggtttattagccacgtccagtgaagcaccttactttgctgaagtgattgaagctgttgaaaatagttgttatagcaaaggctacacgctaattttatgtaattcacataataatcttgataaacaaaaagcttatttagctatgttggcacaaaaacgtgttgatggtttattagtcatgtgttcagaatatcccgatcatcttctttctctcttagaaggttatcgtaatattccgatggtcgtcatggactggggaaaagcccgtggtgactttactgataccattattgataacgcattccatggtggctatatagccggtcgttatcttattgaacgaggtcatcgtgatattggtattatccccggtcctctagagcgaaataccggaggcggtcgtttacagggctttttaaaagccatggaagaagcgaaaattacggtaaaagaagagtggattgtacaaggtgactttgaacctgaatctggttacaaagccatgacccaaatgctcaatcaaaagcaacgccctactgccgtattttgtggcggtgatgttatggcgatgggagcaatatgtgcagctgatgagttaggattacgtgttcctgccgatatttccattgtcggctacgacaatatccgtaatgcacgctatttcacaccagctttaaccacggttcaccagccgaaagagcgtttaggacaaatggctttttccatgttactcgaccgtattgtgaataaacgcgaggatgcacaaactatcgaagtacacccgcgcctagtagaacgtcgctctgttgccgatggtccatttattgattatcgccgc

SEQ ID NO: 32280 - DNA, 711 bp, Proteus mirabilis
atgataaaaaagatctcacgccaaaaagcgtcgcaacaaattcttgatcaaattaagcaaaatatttatgacgggacctatcctattggtgaaaaactaccgtctgaaaatgtactcgctgacgcctttggcgttagcagagttcccatcagagaagcattaggggtattagaagcgagtggcattattacgtcacgccaaggaggcggtagacgcgttattgaccactctatcttgagtaaatacgaacctattgtgatggaaattgcttgtcctcaagaaattgaatcactgcttgaaatgcgtgaggtcattgaacatgaagcggcagccattgccgctttacgtcgaacaccagaagaattgctgacgatagagcaagcacatcaggcctttatcttagccacgcagaaaaacaacaacattggtcatcaagaagattatcaatttcatcgtgccattatggttgcttcacataatccttttttcgtgcgcatcctcgataacttacatgagctttatcttggcgtattgatgtattccttaagccaaaataaaggacgtattgccgaaactgagcgtgttattgcagagcatgaagctattgttgaagcaataagacaacaagatagtgatgaaactagccacaaaatgcgtcttcatttagccaatgtacgtggaaagttaaagcgcttacaacaagaaaaaaat

SEQ ID NO: 32281 - DNA, 1502 bp, Proteus mirabilis
gtaattggggtctgtatgaataaaactattagtgaacatgtagatgtcgcgctcattggtgctggcattatgagtgcaacacttggcacacttcttaaagaactagagcctaatttaaaagtcgcgatgtttgaaagacttaatgattgtggtcaagaaagctctaactcatggaataacgcgggaacaggacatgctgctaactgtgagctaaattatacgccaccaaatcctgacggcaccgttaatatcagtaaagcgttagaagtgaacaccgagttcgatttatcgcgccaattatggtcttatttagtaacaaaaggaaaaattgccgatccgcgtgattttattcatgcttgccctcatatgagttttgtttggggtgcagataacgttaaattccttcatcaacgtatcgccaaatgtctgccaatcactgttatgaaaatatgcaatacagtgaagacaaacagcaaattgaagattgggcgccattaattatggaagggcgtgatccgaatcaacagcttgctgtcacccgagtagctactggtactgatgtcgattatggcgcattaacacatctattagttaagcaactttctcaacaagataattttgagttgcactataaacatgatgttattgatatcaaaagaaatgagactggtggttggaatatcgaagttaaagatctcaccacccatgataaatacctaattacagctaaatatgtatttgttggtgccggtggacgcgctatcgatttactccaaaaatcaggtattccagaaggtaaaggctacggtggtttccctgttagtggtatttggctacgttgtgatgaagataaaatcagctctcgccatcatgccaaagtttatggaaaagcagatgtaggctcaccaccgatgtctgtcccccatcttgatactcgtattattgcaggtaaacgctccctactctttggcccctatgctggattttcaagtaaatttttaaaacacggctcctatttagatttatttgagtcaattcgccccagcaatattgaacctatgctagatgtcgcgaaagataactggtcattaactgaatatttaattggtcaagtattacaaacgtcagcacatcaatttgaaatgcttaaacagttctatcctcaggctcaacatgaggattggcaagaagctgttgcaggtcaacgagtgcagattattaaacccgcagctaaacatcatggcgtattagagtttggtactgagctaattagtagcgcagataaatcattttcagtgttattgggggcatcacctggcgcttctacagcagcatttattgccatcaatatcattaaatcttgctttaagcagcaacttgaaaatgagggttgggaagatcgtcttaaaacgattattccaacttatggtattgatctcaaaatagatgccgatgcttgtcgtaatattcgtgcatcaacggctaagatattaaaattagaa

SEQ ID NO: 32282 - DNA, 1875 bp, Proteus mirabilis
atgaatgtaaaagagatcattcgtcatgaaccatttggaacattactcggttatgcacctggtggtgttgcgatttactcttcagattacagcagtatagataaagaagattatgccgccaatgattcattccgtagttatattggtaatgagtatatggggcataagtggcaatgtgttgaatttgcacgccgttttctctatttacattacggggttgtttttactgatgtgggaatggcctatgagatcttctcgttacgtttcttacgaagaacgattgatgacgatattttacccttgcaagcttttgcaaatggcagcaaacagccaccgacggtaggagcgttgcttatttggcaagaagggggagagtttaaagtcaccggtcatgtggcggttattaccgaagtattagaagataaaatccgtattgcagaacaaaatgtgatccacactaggttaccgcgaggtcaacaatggacacgagagttaccacttaaagtgagtgataatggctattttatcgaagatacctttgataataccaccttgctaggttggatgatccaaacagaacctaatgcctacagtttacctcaacctaaagttgcccctgaattgttagctattcatgaggccaaattagccaacaaggggcaatttgctggaaaatggctagatgaaagcgatccgttagaaaaagcctatgtgctagcacagcacggtcatacgattaatcaagacagctatgaatatttcaccatttcagaaagtgctgagcatgaacttatacgtgctagcaatgaaatgcatttgatgtatctgcatgcaacggaaaaagtgctgaaagacgataatttactgcgtttatttgcgatccctgaagtgttatggccccgtatccgcctatcatggcaaaatagacgtcatcaaatgatcactggacggttagatttttgtatggatgagcgcggtatcaaggtgtatgaatataacgctgattctgcatcttgccatactgaagccggattaattattgaaaaatgggctaaacagggtggcattaaagcaggttataacccgggtgaacgtctattagatgcgttatcagatgcttggaaacacagtgatgcgaagccatttgtacatattcttcaagatgatgataatgaagaagattatcatgctcgctttatgcaacaagcactgactaaagccggttatagcagcaaaattctgcgtggactaaaagagctgcattggaatagtcgtggtcagttaattgatggtgataaacgtattgttgaatgtgtatggaaaacatgggcttgggaaaccgcgttagatcaactaagagaagagagtgaacaacagtcacttattcctattcgtattggtgatccggcgggagaagttcgtttagttgatgttcttttacgccctgaaatcacggtttttgaacctctttggacacttattccaagtaataaagcgatattacctattttgtggcaactttttccagataatccttatctacttgatactgagttcactttaaccccacgtttgtcgcagagtggttatgcagttaagcctattgctgggcgctgtggtagtaatattggtttagttgatcaccaagaaaatgtattaggtgaaaccagtggtcaatttgaacatcaagaaaatatttatcaagagttatggtgtttaccaaaagtgtctaaccgatatattcaggtttgtacctttacggtagatggacattatggtggttgttgcatacgctctgatccgacattagtgataaaaaaagacagtgatattgagccattaattgtccttgaagataaacactttttagcggat

SEQ ID NO: 32283 - DNA, 2832 bp, Proteus mirabilis
atggataaaatcgaagtacggggcgctcgcacccataacctaaaaaatatcaatttggtcattcctcgcgataaacttattgttattacgggactttctggctcaggtaaatcctctttagcctttgatacgctttatgcggaaggccaacggcgttacgttgaatcgctttcagcttatgctcgtcagtttctttccttaatggaaaagcctgatgttgatcatattgaagggttatcgcccgctatttcgattgagcagaaatcgacatcacataacccacgctcaacggtcggtaccattaccgagatccacgattacctacgtctattatttgcacgtgtgggtgaaccgcgctgtcctgatcacgatatccctttagcggctcaaacggtaagccaaatggtggataatgttttagcgcaacctgaaggtaaacgcttaatgttattggcgccaatcgtaaaagagcgcaaaggtgagcatgtaaaattactcaataatcttgctgcacaaggctatattcgtgctcgtatcgatggtgaagtgtgtgatttatcagatccccctaccttggagttacagaaaaagcacaccattgaagtggtcattgatcgctttaaagttcgtgacgatctggctcaacgtttagcagaatcttttgaaaccgcattagagctttctggcggtactgctgttatctctgatatggacgatagcagtgctgaagatattgttttttctgcaaactttgcctgtcctatttgtggttatagcatgagtgaactagagccacggttattctcttttaataaccccgcaggtgcgtgtcctacttgtgatggtttaggggttcaacaatttttcgatcctgatttggtgatccagaatcgagaaatttctctggccggtggtgcgattaaagggtgggatcggcgcaatttttactatttccaaatgttgcgctcattaggcgagcactatcattttgatgttgaagccccctttgactcattacccgacaagatccagaaagtgattttatccggttcaggtaaagaaaatattgaatttaaatacaccaatgatcgaggggatgttgtggtccgccatcatccttttgaaggggtattaaataatatggagcgccgctatcgtgaaacagaatcgagtgcggtgcgtgaagagttagctaaatatattagcaatcgtccttgtgcctcttgtggaggtactcgcttacgtcgcgaagctcgccatgtgtatgttgaaaataccacgttacctgaaattgcggattacagtattggtcatgcgatgagctttttccaaaatctaaaactcagtggtcagcgagcgaaaattgccgaaaaagtattaaaagagattggtgacagattaaaattcttggtcaatgtgggattaaattacctcactctttctcgttcagcggagacattatcaggcggcgaagcgcagcgtattcgcctagcaagccaaattggtgctggattagttggggtaatgtatgtacttgatgagccttcaattggtttgcatcaacgcgataacgatcgcctactggaaacgttgatccacttgcgtgatttaggtaacacggtgatcgtcgttgagcatgatgaagacgctatccgtgccgctgatcatattattgatattgggccgggtgctggcgttcatggtggtgagatagtcgctcagggtacactggaagatattgttaataatcccaactcattaaccggtaaattcttaagtggcgaacgccgtattgctatccctgaaaagcgtgttcctgttgatcgcgaaaaaatgctcactattttaggggcgaaaggtaataacctaaaaaacgttaatttaaaaatacctgttggtttatttacttgtattactggtgtatctggctcgggtaaatcaaccttaattaatgatacgttattccccattgctcaacgtcaattaaatggcgccactaatagcgtgccagcaccttatttagatgttgagggattagagcactttgataaagtgattgatattaaccaaagtcctatcggtcgtacgccacgttccaaccctgcgacttataccggagtatttaccccgatccgtgaactttttgctggtgtaccagaatcacgaactcgcggttatacgccggggcgctttagttttaatgtgaagggggggcgttgcgaagcttgccaaggcgatggtgtattaaaagttgaaatgcactttttacctgatgtgtatgtgccttgtgatcagtgtaaagggcaacgttataatcgtgaaacccttgagattaaatataaagggaaaaatattcacgaagcgctagatatgacaatcgaagaagcaagagagttttttgatgcggtgcctgcattagcgcgtaagctacaaacattgattgatgtgggactctcttatattcgtttaggacaatctgccactacgttatcgggtggtgaagcacaacgggttaaattagccaaagagttgtcaaaacggggtacaggccaaaccctctatattttggatgaaccgaccacgggtttgcactttgccgatattgagttacttcttgatgtgctccatcagttgcgtgatcagggtaatacaattgtggtgattgagcataacctcgatgtgatcaaaaccgctgactggatcgttgatttagggcctgaagggggcagtggaggtggtcagatcttgatatccggtacgccagagcaagttgctgactttgaaggctcccacacggcaaggtttttgaaaccaattttagagcgcggttat

SEQ ID NO: 32284 - DNA, 1500 bp, Proteus mirabilis
atgagttatacaaaacggttgtcacttatttgtgctatctgtttaggcacatttatggccactcttgatattagtatcgtcaatgttgctctacctactattcagaatgatattaatgccaatatggctacattacagtggattgtggatgcttatgcactatgtctatcagcttgtattttgtcttcagggccattaagtgatcgtttcggacgaaaaaaagtgtggctctggggggtgattattttcactctaggctcccttatctgtgctattgcacaacaacatgaaatattaatccttgggcgtattatccaaggtattgcagctgcagcccttattcctggcgcattatcacttattacacatgcctttcctgttgatattgaacgtatccgtattattggtatttggtcttcggttagtgcattatcgctgattattggccctatccttggtggtgcattagttcatgccagtggttgggcaagtatatttcttattaatattcctattggtgctattacagtattactaggctggtatggattaagtgaaagtgccgatcctgaggatgttgcgttagatcccctaggacaattaaccagtatcttgggattaggtttactaacctatggttttattgaagctggctctgtaggttggtctgattatcgtactgtattcgcattaattgtcggtctgatttttattaccctgtttgttatagtcgaaaaacgtattgaacgcccgttattaccgctatcgttatttaaagatcgctcgtttttccaatataacctttcctcttttactttgggatttgccacttatagtaatgtcttttttatcgcttttttcctacaaaaagcacaaggctggagtgcattagaaacaggtttaagaatggctcctgagtttatcgccatggctcttttttctatgttatttggacggttctctcgttatatatctgttagaaaattaatgatctttggctttttgttgattgcaatatcttcttgtttattggcaacattagcaacaaatagctcttacacaataacaggaagctatttatttatcttaggtgcaggaatgggattagcgacacccgcaatcggggttttagtgatgaaaagtgtagcaccgtcccgctcgggcatggcgtctgcaaccatgaatgcattaagacaaaccggtatgacaatgggaattgcgttattaggtacattaatgatacagcaagcaattaattatatgatgatacaaagtcaagcattaggaatagtggcagaaccgattaatattattacgttagtaacagaaaataaaaccgcttccctagataatcagttggttgccctattacctgaagcatttaattcaggatttgcctatgccatgctaaccgcaggactttcctgttttattactctgtttattatgctttttccttgcaaagagaaacaaggtgcactttctcagcagatagcggat

SEQ ID NO: 32285 - DNA, 960 bp, Proteus mirabilis
atgtctattattcatcttgaatttgaaaagcctattgttgaattagacgagaaaatagatgcattacttgcatttaaacagtctcaagatgaaacaacggcagttgatatagacgaagaaatcgccaaacttcgccaaaaaagcctttcattaacacgctctatattttctgatttaggggattgggagatcgtacagttagcacgtcatcctatgcgcccttatacattagattatatcaaagctatttttactgatttccaagagttggccggcgatcgtgcttatgctgatgataaagcgattgttgcagggttagcgcgtttagatagaaaaccagtgatgattatcggtcaacaaaaagggcgagatactaaagagaaagtaaaaagaaactttggtatgccatcaccagaaggttatcggaaagcattacgcctgatgaaaatggctgaacgcttccatttaccagtgattatttttattgactccgcgggtgcttatccgggggttggcgctgaagagcgggggcaatcagaagccatagcacgaaatattcttgaaatgtcccgattaaaaacaccgataatttgtacaataacaggggaaggtttttctggtggtgcattagcaataggtgtgggggatcgagtaaatatgttgcaatatagtacttatgctgccatatcgcccgaaggctgtgcctctatcttatggaaaaatgctgataaagcgcctattgccgcccaaaccatgggaatgacggcacctaaattacaggcattgggtattatagactcgattattcctgaaccattgggaggcgcacatcgccactaccagcaagcggctgaattcgtaaaaaaacagctcctcgcagatttaacagaattgaatagttattctaaagaagaactgcttgagaaacgttatcaaaaattaatgtcctatggttattgt

SEQ ID NO: 32286 - DNA, 615 bp, Proteus mirabilis
atgacacaaccccctgttttccagcaaagagatcagatacgtaaagctatccgccaaaaacgccgtcaacttactgtggcacaacagcaagatgctgcacataaactctctgaacgggtactccatcatcccaaagtcaagcaagctaaaacaattgccttatttctctcttttgacggcgagattgataccgctcctctaatcactcatttatgggatttaaataaacaggtttgtctgcctgtattacacccttttcatcgccatcatttactttttttacgttacgctcccaccacgcagttagtgaaaaatcgttttaatatttttgagcctccactcaatgtgaataatattattccaatatctgatattgatattatctttacgccactggttgccttcgatgaaagcggtcagcgactcggtatgggcggaggtttttatgatagaacattagaaaactggcaacggcagtcattttatcctatggggcttgctcatacatgccaacaagttcattcgttaccgagcgcagattgggatataccgttacctgaaattattacacctgataaagtatggcgttttgatgaacgactgatacagagaaat

SEQ ID NO: 32287 - DNA, 2613 bp, Proteus mirabilis
atggttagatcattcaaaaccgtttgtttagagaagcgagaaaagagaaaaaagcatgctattcggcctgttgctatattgatctatttaattgttactggggcatccagtctttcaaattcagctttagcgaatagcgatattgagtttaatgctgatattttagatcttaaagataaacaaaatatcgatttatctgatttctctcgagctggctatattatgccagggcgctacgaatttgttgttcgtataaataataatgaacttcccgatatctacaacattaattatgttgtacctgcagatgatcccaaaggaagtgaaccttgcttacctcctgaattagttcgtcaattaggactaaaaccagagtggcttgataaaattcgttttaacgataatcaaacttgccttgatacatcatctattcccggaatgacaataaatgccagtttaggtagtggtaatttattattaacgatacctcaagcttatttggagtattcagcaccaaactgggatccgccttctcgttgggatgacggtatttcagggatactttttgattataacgtcaatgcaaatgtgactgatcctgctaaaggaaaacaacgtcagcaagtgacggggttaggtacgttaggggcgaacttaggtgcttggcgttttcgcgctgattggcaagcgagctaccaacatacgacagggatccctcaaagtacagaaaacagctggaaatggaatcaatactatctctatagagctatccctcaatgggaagcgcgctttgtcatgggagagacttactcgcgctccgatatttttgatagtttccgttttaccggggttcatctcgcaactgacgacaatatgttgccacctaatttacgtggatatgcgccagaagtcacaggtgtagcaaaaaccaatgccaaagtgacaattagccaacagggtcgagtgatctacgagacgcaagttgctccaggaccatttcgtattcaagatattaatgatgccgttagcggtaaattagatgtacgtgtcgaagagcaagatggctctgtacaagagtttcaaatggatacggcaagtattccttatttaactcgaccaggacgagtgcaatataaattctcggcaggtaaaccttctaatattgaccataataccgaaggccccgtttttggtatgggggaattttcatggggggtgagtaacggttggtcactttatgggggctcaattgttgcgggtgattataacgccttgtctgcgggtatcggccgtgacttaatggcttttggtgctctctcttttgatgctactcactcttgggcaaaaattcctcgtgatgataagcgttataacggtggctcttatcgattaagttattcaaaacgttttgaagctattaatagccaagtcacctttgctggttatcgcttctcagaacgcgactttatgaccatggatcagtatttagagcgtcgctatcgcgatggtaatgctgataataacaaagaactttataccattatgtttagtaagcaatttcctgactggggattgagtacttacttaaactatagtcaccaaacatattggaataagccaactaatgataattacaacttatcgttagcgaaaagcgcggatattggtcgttttaaaaatatcaattttagtctctccgctttccgtaataaatttaatggcaccaatgataatggcgtttatatgaatgtcagtatgccttggggtgatcgtgcgaccatcagttacaacactgtcattaataagagcggtaactctcataatgtcagctattacgatcgaattgatgacaatagcagttatcgtgttggcgctggggtaagtagcaatggtaaaccttcagccgatgcttattttatgcattatgctgatgcggccttagtcaccgccagtgcaagtcatatcaatggtgaatatacctctgccactttatcgctacaaggtggtgccacacttacgccgaaaggtggagcattacaccgcgttagtcgtacaggtagtactcgcttacttattgatacagacggtatcgctaatattcccgtgaagaattttggtgcgatttcccataccaatatgtttggtaaagcggtattgccagatattaatgattactaccgtagtagcgcgagtatcgatcttaatcgattacctgaaaatgtcgaagcattacgctcaattcagcaattaaccctaaccgaaggggcgattggttaccgtcgatttgatgttatcgaagggcaaaaagccatggcggttattcggttaaaagatggaaccttcccaccatttggcgccagtgtcacaacagaaaaagggcgtgagttaggcatcattaatgatggtggaaatgtttatctaaccggtattaataccggggatgtattgagtgttcgttggagtggtaaagagcagtgcaaagtacttattccaacattggtggagaatatgcaaatttcatcactgttattgacctgtagtgatgatggcacagcaacctctactttcaatcaaagagaagtctccttacctaaaacgaagtttctatctcgt

SEQ ID NO: 32288 - DNA, 1545 bp, Proteus mirabilis
atgaaaaaactctttactaacaaaatattgcaatgccttattttgcttatatttgttttattactacatatctcattaggatatacattacgccccttctatgttctgacttttaccgcttttcttctatgcttatctggatattttaaaagaacctatttcatctttataatattattgatgatagttggtgctatttatttaccaataggtttaaagtatggctcaccaaatatcaactctatcatctctatcttctataccaatacacatgagagcttagagtttatcttatctgtttctcctataagcttagcatttagttgtttacttatattatttggcttacttagtcttaaagtgaacctcttaattggaaagaaactatcactatttactgtctctatttttatcttaaccagtgttacatggccggtaaaagcccttattactcatgatgattactcttttgaagccaaattacctataattcgcttttttagtgatataaaaaaacattatgatacagtgataatagaaaataattggataaatacagaacttaacaaaaaagatagttggttacctattaataatagtaaatataaaaattatattttaattatcggcgaaagtgccagaaaagactttatgcaaagctatggtttcccaattcaaaatacaccatttttagagaaatctcctgtaatacagtttgacgactatatttcatcagcaccatctactttcttttctcttcctccttcattaaccttaaaaaaccataaaactggtgatatggagttacaaaacaacatcattaccttagctaaaaaagcgggtatctatacttattggttttctaatcaaggttctatgattggctctgattctattatttctactataggtaaacgtgctgatgtatatcacttcttaagcaaaggtgattatcataataacggaagaagcactgatgatgatttattgcctgatatcaaagcagctctttcaacaaatagccataaaaccaacctcattgttgtacatttaattggctcccattcacaagcctgtgctagaacccaaggacaatacgatgagttttttcaatcaaccgaagtctcttgttatgtgcaaagtataaaaaacacagataagttattagaaaaaatcgtctcgatgtcaaatgcaacgggcaattcatggtctttgctctatttttctgatcacggattatcttatgaacataagggagaaagctatactaaacttatccataatgatcaatttaaacaaaattttgaggtaccactctttatactttcgagtgatagtcacgagaaatatcacataacagcaagaagaaatggtagatattttatgacgttattttctgagtggataggcattcaagatcccaaaatttctaatcattgccatatgatgtcaaatgatatttgcactgatcaagatacggttatcaactttcaaaaagaagaaatcgattataattcactaccagaagacaaaataatatatcaa

SEQ ID NO: 32289 - DNA, 975 bp, Proteus mirabilis
atggttaatgggatcaaaagaattggggttttaacaagtggtggtgatgcaccgggtatgaatgccgcgatccgtggtgttgtccgtgcagcactcagcgaaggtttagaagtgtacggtatttttgatggctatatgggcttatatgaaaaccgtatgaaaaaactcgatcgctttagtgtgtcagacatgatcaaccgtggtggtacctttttaggctcagcgcgtttcccagaattccgcgaagataatgtgcgtgccgttgctattgaaaatatgaagcaaaatgagctagatgcactggtggttatcgggggagatggttcttatctgggggcgaaaaaattaactgaagcgggtttcccatgtattggtttaccgggcaccattgataatgacgttgcgggtactgattacactattggttatttcacggcgttagaaacggcggtagaagcgattgaccgcttacgtgatacctctacatcccataaacgtatctctatcgttgaagtgatgggacgttattgtggtgatttaaccttatccgctgctattgcgggtggttgtgagttcgtggtgttgcctgaatccgaattaccttttgatcgtgatgaattattagcagaaattaaagcgggtattgagcgtggtaaacgtcatgctatcgtggcaattaccgaacatgtgtgtgatgtacatgagctagcacgttttattgaagcagaaaccaaacatgaaacacgtgccactgtattaggccatattcaacgtggcggctctccggttgcctacgatcgtattttagcctctcgtatgggtgcttactcggtacaactgctactagaaggttatggtggtcgttgtgtagggatccaaaatgaaaaactggttcaccatgatattattgatgcggttatgaatatgaaacgtgtctttaaagccgattggtatgaaactgcgaaaaaactgtat

SEQ ID NO: 32290 - DNA, 1257 bp, Proteus mirabilis
ttggatgaacgtcagtacaaacaaattattcagaaaacaattaacacgctcaatgaaacagggtcaatggaagcagtttgttttctgactgagctacatgttaaaggccgtaataattactggaaagtacgccaagcggttgagactgcaaaagactgcctctatacctttgatcaactgaaaagtaataaaaccgaattacgtcgtccattacgtaaaatggtctttaatgtccctactcgacgtgaattaccaagcggtgagcgtgctattgcccacggcttagctattgcatcagggatcaaagcctgtaaagatttagctaatatgccacctaatatctgtaatgcggcatacttagcctctcaagctcgccaactcgctgactcatccgcgaatgtctctacccgagtcattggtgaagagcagatgaaagagctaaatatgaatgcctatttagcggtcggtcaaggttcacaaaatgaatctttaatgtcgattattgaatataaaggtaatcaagatcctgaatcccgtccaatcgtactggttggtaaagggctcacctttgattctggtggtatttcaattaaacctgctgatggcatggatgaaatgaaatacgacatgtgtggtgcagcaaccgtatatggtgtgatgcgcgtcgttgctgagttacaactacctattaatgtcatcggtgtattggctggctgtgaaaatatgccgggtggtaaagcctatcgtcctggtgatattcttactactatgtcaggccagactgttgaggtattaaatacggatgctgaaggtcgcttagtgctgtgtgatacattaacctacgttgagcgctttgagcctgagttagtgattgatatcgccacattaacaggggcttgtatggtggcattaggtcatcattatagtggattaatgtctaaccataacccattagcccatgaattaatgaatgcttcagagcaagcgggcgatcgcgcatggcgtttacctttaggcgaagagttctatgagcaaattgaatctaattttgccgatcttgccaatacgggtggacgtttaaggggagccattaccgcaggttgtttcttagcgcgctttgcaagcaaatataactgggcacatttagatatcgcaggtacggcatggcgctctggtaaagcgaaaggtgctacgggtcgcccagtatctttactgtcgcagttcttattaaaccgcgcaggtttgaatagcgacgag

SEQ ID NO: 32291 - DNA, 447 bp, Proteus mirabilis
atgaaaaacgccacgttttatttaatggaacatccatcaatacatcaagatttacaagcccatgaatggcttgcttgtcaacttgccgcagaacattggcgtttaggcaaacgggttttgctcgtctgtgattcacagccacaagctgaattgttggatgaagcactatgggcaagagagccacatcaatttgtgcctcataacctagcaggtgaagggcctcgttatggtgcgcctgttgaattatgttggccgggcaaacggggcaatgccccgcgtgatctcctgattaatttgcagtcacaatttgcagactttgccacagctttccatgaagtgatagacttcgtacctatcgatgaacaattaaaacagttggcgcgagaacgatataaaatttatcgtagcgtcggctttactttgacaatggctacgccgccaacctat

SEQ ID NO: 32292 - DNA, 1362 bp, Proteus mirabilis
atgcatagcactgatactatcgtcgctcaggccacacctcctggaagaggcggtgttggtatcctacgcgtttctggccctaaagcggctgttgtggcacaaactattttaggcaaagtacctaagccacgttatgccgactatcttccttttcgcaatgaagataactcagtgcttgatcagggtatcgcccttttcttccctaatcctaactcttttacgggtgaagatgttttagaactacaaggccatggtgggccaattattctcgacttactcttaaagcgtattctacaaattcccggtatccgtattgctaagcccggtgagttctcagagcgagccttcttaaacgataaactcgatttagcgcaagctgaagcgattgccgatttaattgatgccagttcagagcaagcggcacgctctgcgattaactctttacaaggtgctttctcctctcatattaatgagatggtcgagtccttaaccaatttacgtatctatgttgaagcggctattgatttccctgatgaagagatagactttctttctgacggggtgatcgagggcaaactcaatacggttatcagtcaattagacgatgttcgtgcgcaagcgcgccaaggcagcctattgcgtgaagggatgaaagtcgtcattgccgggcgccctaatgccggtaaatcaagcctattaaatgcattagcgggaagagaagcggccattgtcaccgatatagcgggtacgacacgagatgtattacgcgaacatatccatattgatggtatgccattacatattatcgatacagcaggtttacgtgaagccagtgacgaagtagaacgtattggtatcgagcgtgcatggcaagagattgagcaagcagatagagtcctctttatggttgatagtaccaccaccgaggcgacgacaccggaagagatctggcctgagtttatggctcgtttacctagcacactgccggtcaccgttattcgcaacaaatcagatttaacgggtgaacctgccgagatcacctcgcaaggtgactatccgatgatccgtttatctgcccgtgatggaatgggcattgaattactacgctcacaccttaaagaagccatgggctttaacagcaatactgaagggggcttcttagcgcgccgtcgtcatttacaagcattaaacacagccgctgaacacctacaacaaggctatcagcaattggtttatgccaagtcaggtgagctattagcagaagagttaagacttgctcaacaagcattaagcgaaattactggtgaatttacatcagatgatttattagggcgaattttctctagtttctgtattgggaag

SEQ ID NO: 32293 - DNA, 150 bp, Proteus mirabilis
atgggttggacagaagccgctgacttaatcattaaaggtatggaaggcgcaatcgaagcgaagaccgttacttatgatttcgaacgtctaatgaaaggcgctaaactgctgaaatgtagcgagttcggtgacgcgattatcaaacatatg

SEQ ID NO: 32294 - DNA, 2124 bp, Proteus mirabilis
atgtcaacagatgaagcaaataacacaccaaaacctcgtttaatattagatgaaccagttttatcccattcttctggaataatgatctcagcagcagagcaacgtgctcgtatacaaagacatgtcgaacttcttgatatgttagaacaagggttactgaaaacgggtttagtttttacttgccaagtagctggattagctgacgatacttttcaagtcactcaatttgatttaaacgaaggactttctgagctatttacactcactattcaagtcgtgagtactcaaagtgatattgatttttcatattatttgggaggggcatcatcacttacagtaagaagaaacggtaaaaaaattcgtacggtacaaggtctattatcgagtgcagaacaaagtaatactgatggtattaaaacttggtatcagttagagatccgtcctgaaatgtgggtgatgacacttaatcaagatagtcgcatttttcagcataaaacagtacctgaaatcttaaaacatttacttgatgaagcacatatcaaatatgataacaggctctaccaacctgaacttcatcaacctcgtcattatgttactcaaaaacgtgaatcagcttatgatttttggtgtcgtttagcttttgaagagggaattaacttttggtttgaggaaggcccgaagcttttttacagcgataatcatttaggcatgacggcggggatcactttaacttataacccacagtctgaaacagatattaccgacagtactgcaacgaaatggcgttatatagaacgtttatgcagtgatgtccgtatagataaagactataaccaaatacgtccttcctaccccttatcgcaacaaacaacagggaaaaatcatcaacaacaccctatatttgaaagttatggtcgctttcaagaagatgcacagggccagccatttaatcaactgcgttatgaacaatctcaaaaccatcgtcaaacgggctatgcacaaactaattgttttgctcttatgcctggtaagatatttaccttaactaatcatccgtgtacaagaatgaatgaatgttggcaagtagttagcgttactcatcatggtgtacagcctttaggagataacagtgaaggacaaggcactcaactttctaatcacgttacctttattccgagtatgcaagagtggcgaccaccatttcattataaaccattagctgatggtgatgaattagctacagttgttggtccagatggagaagaaatttataccaatgaacaaggtgctgtaaaagtttattttcattgggatagaagaggaacacctgatcatagtggatcgtgctggcttcgggttgcgcagggatggagtggcaatggttttggctttatagctatcccgcgtgtagggcaggaagtgattgtttcctatttaaatggcgatattgacagacctattattacgggatgtacttacaatggccgtaatacaccaccgcttgatttaccgaaagaaaaaaccaaaaccacatttcgtagtaaaactcataaaggtactggatttaatgaactaagatttgaagatgcgggtggccgtgaagaagtgtatttgcatgcacaaaatgatttaaatattcatgtgcaacatgatagtcattggcataccgaacatgatgttaggcaacggatagataatcaaagagtaactgaaatagctggtgatgagcattttattttgaagggaacacaaaaatcattaattgaaggtaatgtttcattacaaatcaaaggcgcgaagcattgcaaagtaaatgatgcattaatagctgaaagcggtaagaaaactcattttaaaagcggtggaaaaattattcttgaagctgtaagcgaaattaccttaaaagtaggaagtagttttatccgacttaccccaaatgcaatctttacttctggaaatttagatattggatcaagtggaccaggaataggtcaagatcctaacattcaactacctgatggtgtcactccttttgaacaacccctttttgcgattaaaaaatattgtgttttaacagcaaatgaagcaggtagtttattaataaagccagctaaggacgaaaat

SEQ ID NO: 32295 - DNA, 495 bp, Proteus mirabilis
atggctaacggatcagtaaacaaagtaatcctcattggcaatttaggtcgtgatcctgaaattcgctacctgctttctggtggtgctgttgccaatttggctgtggccacaagtgaaaaatggcgtgataaacaaacgggtgaaaaccgcgaaaaaacagaatggcatcgtgttgttttgtttggaaagcttgcagatatagccagtggctatttgtgtaaaggctcacaagtttatatcgagggccaactacaaacgcgcgagtgggatgataacggcgttaaacgttatacaacagaaattgctgtaaaagttggcggttcaatgcagatgttaggcggtgctagtaaatcagtaggttcacaaccggcacagcaaaatcagccaccagctcaacctcaagccaaaagcaatcagccaccaatggattttgacgatgatattccttttgctccgattgggcttatgcatccacgccatttaattaatgtgctt

SEQ ID NO: 32296 - DNA, 1416 bp, Proteus mirabilis
atgagtaaaataaaaacccgttttgcaccaagtcctacaggctatctacatgttggtggtgctcgtactgcactgtattcctggttatttagccgtcacaacaagggtgagtttgtactgcgtattgaagacaccgatttagaacgttctactcaacctgccattgatgcaattatggacggtatgaattggttaaatctaaactgggatgaaggtccttactatcaaaccaaacgctttgatcgttataatcaagttatcgatcaaatgttagcagctggtactgcttatcgttgttattgttctaaagaacgtttagagaaactacgtgaagatcaaatggcgaaaggtgagaaacctcgctacgatggttgttgccgtcacggtgatcacaaccataccccagatgaacctcatgtagttcgttttttaaatcctcaagaaggatctgtgatttttgatgacaaaattcgtggcccgattgagtttagtaaccaagagcttgatgacttaattatccgtcgtactgatggttcacctacctataatttctgtgtagtgattgatgactgggatatggaaattacacacgttattcgtggtgaagatcatatcaacaataccccacgtcagatcaatatattaaaagcacttggtgctccagtacctgaatatgcacacgtatccatgatcttaggtgatgatggtaaaaaattatctaaacgctataacgcagtaagtgtaatgcaatatcgtgatgacggttatttaccagaagcgttattaaactacttagtacgtttaggttggtctcatggcgaccaagagatctttagcatcgatgaaatgattaaagatttcactttagaagctattagtaaatcagcaagtgcatttaatactgacaaattactttggttaaaccatcactatattaataccttacctgctgaacaagtagccgtacacctagattggcatatcaaacaacaaaatattgatactagtaatggcccatcactggttgaattgattaaattactcggcgagcgttgcaaaacattaaaagagatggcggaaagttgtcactacttttatgttgactttgatagtttcgaagaaaccgcggcgaaaaaacacttacgtcctgtcgctcgtcaaccattagaagtagttcgtgataaattatcagcaattactgattggacagcggaaaatgtacataaagcaatccaagaaaccgctgaagaattagaagttggtatgggtaaagtcggtatgcctctacgtgttgctgtcacaggtgcgggccaatctcctgcactagatgttactgttcatgctattggtaaagctcgtagcatcgctcgtattaataaagcattagattttattactgacagagaaaatcaagct

SEQ ID NO: 32297 - DNA, 292 bp, Proteus mirabilis
gtgtctaaagaaaaatttgaacgttcaaaaccgcacgttaacgttggtactatcggccacgttgaccacggtaaaacaactctgactgctgcaatcactacagttttagctaaaacttacggtggtgctgctcggtgcattcgaccaaatcgataatgcgccagaagaaaaagcgcgtggtatcaccatctctacttcacacgtagaatacgatactccaactcgccaatacgcacacgtagactgcccaggtcacgccgactatgttaaaaacatgatcactggtgctgcg

SEQ ID NO: 32298 - DNA, 555 bp, Proteus mirabilis
atgaaatttaataaaatagcattaacagttctattagctacttcagctatttctttaaatgctatggctgataattctaatacaggtgttatcaagtttagtggtactgttgtaaatactccatgtaatattgatcaagaatcattagagcaagatgttaagtttggccagttatctcgcaaatcattagaatctggtcaggccgcggagaaggagttttctataaaatttactaattgtaattttgatgagtttagtaaagatgcttcaggtaaccctgtaccagttaaaaccatgaatatggtatttactggtcaaaattatgctgatgcaggtaaaacattgttagcgacatctacaggaaatacaaataatttaggtattgcaatcgatggttttgaatttggtaagccaacagatgttctatcacgaattgttaataaaattggtgataatactttaacatttaaagcattagcaaaagtcgtcgatccatctaaagatgtggtagaaggtacatttagcgcgatctctaatttccgcattacttacgaa

SEQ ID NO: 32299 - DNA, 639 bp, Proteus mirabilis
atgaaaaaactttctgcgcttattctagcggctgcaacacttgcaccgtctatttcttttgctcatcaagcgggtgattttttattccgtgcgggtactgcaacagttcgtcctaatacaggttcagatactatattaggtgggcattttgatgctaataacaacactcaattaggtttaacctttggttatatggtaactgataatattggggttgagttattagcagcaacaccttttgagcataaagtttctttaactggtgtgggcgaaattgctaaagttaaacatttaccgccaacattaatggcacagtattactttggtggtgctgaagataaattacgcccttatttaggtgctggtctaaactttacgactttctttgatgaaaaattcaataataatccagcggtaggccaacttggattaaatgatcttgatcttaaaaactcttggggctttgcagcacaagcaggtttagactataacctagataaaaactggatgctgaatgcttctgtttggtggatgaatatcgaaaccgatgtcaaatttaaagatggcgatggaaaccactataaagtggatactcgcttagacccatttgtgtttatgttcggtgttggttatcgtttc

SEQ ID NO: 32300 - DNA, 651 bp, Proteus mirabilis
atgaaaaacggctggcttaagcaattacttgatttcgctccactattagtgttttttatcttttataaatggcaagatattttctatgcttctggcgcattaattgtagcaacatggatctcagtcggtttaacatggcttattttccataaagtcgaaaaagcaccactgatcaccgcaatcgttgtaacgatatttggtacattgactatcgctttccattcagatgtctttattaaatggaaagtcaccgcaatctacgccatttttgcgctagtgcttattgcgatgcaactctttacgccgaaaacattaatggaaagaatgctaggtaaagaattagcgatgccagcgactaattggaaaaaactcaatatcgcttgggtactgttctttttagcttgtgcgctgggtaatctttatgtcgcattttctttatctcaagaaacttgggtaaactttaaagtctttgggttaacaatattaaccttaatctttactgtgattagtgttgtgtatatctggaacaaccggttacccgaagaagagacgaaagaggaatcaacagaaagtcatacatctgaaacatcagataacggaacaacatcaacatctaaagtattacataaagatgtgacatctaaatctgaa

SEQ ID NO: 32301 - DNA, 429 bp, Proteus mirabilis
atgactgaacaacaatctttgcctaatggtgagctagtattacgtacgcttgccatgccagctgatactaacgccaatggtgatattttcggtggctggataatgtctcaaatggacattggtggtgccattttagcgaaagaaattgccttaggtcgcgttgttactgtaagtgtaacaggcattacctttctaaaacctgttgccgttggcgacgtcgtttgctgttatgctcgttgtttaaaaaccggtaactcttcaattactgttaatattgaagtgtgggttaaaaaagtagcaaccgagccggtaggtcaacggtatcgtgccactgaagccgtgtttacttatgtggcagtcgatgagaataatagtgctcgtcgcctacctgaaggtaaaaccaattttaccttagcaagtaccatggaa

SEQ ID NO: 32302 - DNA, 738 bp, Proteus mirabilis
atgaaaaaaatattatttgcagcacttctgaccagtatcacactttctgcaacagcggctgataaagagactattcgttttgctactgaggcaacttatcctccatttgaaatgattgatgcaaacaatcaaatcgttggttttgatgtagatttagcaaatgccatgtgtgaaaaaattaatgctgaatgtacttttaccaatcaatcatttgatagcttaattcctagcttaaaattccgccgttttgacgcattaatggcggggattgatattacgcctgagcgtcaaaaacaggtagattttactgattcttactatgacaactcagcggtctttatcaccgtgacaggtaaaatttccgatgttgcaagcttaaaaggcaagcaaattggtgtccaaaatgggacaacccatcagaaattcatcaatgaacaacataaagagatgaaaacggtgccttatgacagttaccaaaatgccgtgttagacctaaaaaatggtcgtatcgaggctatctttggtgataccgctgtggttaatgaatggctgaaaaagaatcctgaattaggtattgttggtgatggtgataaggtcactgatcctaactattttggtacaggccttgctattgcagtaagaaaaggtaatgctgatttacaagataaattaaacaaagcattatctgaagtaaaagccgatggcacctatgatgtcatttataaaaaatggtttgaa

SEQ ID NO: 32303 - DNA, 702 bp, Proteus mirabilis
atgaatgaaataacaacgctagcaggtgcgaccgtgactacggtcacacttgctatttctgctcttattatcggattagttctagccatgctgtttactgcgtgggaatccgcaaagtggaaagcctttgcttttctaggaacttgctgggtaacactaattagaggactgccagaaatgctggtggttctttttgtctattatggcaccttacaaggtgtcatgatgctcatggatggtattgaattaggtcctttcaccttacaatttgactttggtgatactgaatctttacctttctattgtggtgttatcgccctttcacttctgtatgcgtcttacgcttcacaaactttacgtggtgcattaaaagccgtgccaaccggacagtgggaagcaggacaggcattgggtatgggaaaaatcaccatttttttccgctttatcatgcctcaaatgtggcgtcacgcgttacccggactcggtaatcagtggttagtgctcttaaaagataccgctttagtctcattaattagcgttaatgatttaatgctacaaacccagagtattgccaatcgtactcaagagccttttacttggtatagcattgtggcacttatctatttagccattacattagtcagccaatatattctgaaatggttagagatgagaacgacccgatttgaacggagtgcctca

SEQ ID NO: 32304 - DNA, 1587 bp, Proteus mirabilis
atgtctaatcctatttttcagcaagaagttgctcgccgtagaacttttgccattatttcccaccccgatgcgggtaaaacaaccatcactgaaaaagtgttgttattcggacaagctatccaacgtgctggaacagtaaaagggcgtggctcaaatcagcatgctaaatcagactggatggaaatggaaaaacaacgtggtatctccattaccacttctgttatgcagtttccttacgctgattgtctagttaacttacttgataccccagggcacgaagacttctctgaagatacttatcgtactttaactgccgttgactgttgtttaatggtcattgactcttcaaaaggggtcgaagatcgtacccgtaaattaatggaagtgactcgattacgtgatacgccaattttgacctttatgaataaattggatcgtgatattcgtgatccgatggaattaatggacgaagttgaaactgagctaaaaattgcctgtagtcctgttacttggccgattggctgtggaaaactgtttaaaggggtttaccatatcttaagagatgaaacctatctttatcaaacaggccaaggtcatactatccaaaactcacgagtgatcaaagggttggataatcctgagttagatgaagcgattggtgatgatttagccgttcaattacgtgatgagctagagttggtgttaggtgcatcacatgagtttgatcatgaagctttcttagcgggtgaattgactccggttttctttggtaccgcattaggtaactttggtgttaatcacatgcttgatggtttggtgaagtgggcgccagcgccaatgcctcgtcaaactgatatgcgagaagtgacagcggctgaagagacattcacgggttttgtctttaaaattcaagctaatatggatcccaaacaccgcgaccgtgttgcttttttacgggtggtgtcaggcatgtatgataaagggatgaaactgcaccaggtacgcacgaaaaaagatgtggtgatttcagatgcattgacctttatggcaggggatcgttctcatgttgagcatgcttatcctggtgatattattggcctgcataatcacggtaccattcaaattggtgatacttttactcaaggtgaaatgttaaaattcaccggtattcctaacttcgctccggaattattccgccgtattcgtctgcgtgatccgctaaaacaaaaacaattgttaaaaggtctggtgcaattatctgaagaaggtgcggtacaggtgtttagacccctagctaataatgatttaattgttggcgcagttggggtgctacagtttgatgtcgtggttgcacgcttaaaaggtgagtataacgttgaagccatttatgaatctgtgaatgtatcgacggctcgttgggttgaatgtagtaacgaaaagaaactcgaagaatttaagcgtaaaaatgagcaacatctggcattagatggtggtgataacttaacttatattgcaccaacgatggttaacttaaatttaacccgtgaacgctatcctgatattgagttccatcaaacgcgtgaacac

SEQ ID NO: 32305 - DNA, 717 bp, Proteus mirabilis
atgaaagttaatttttatgcaacctgtcttggtgatgtgctaaaagcagattcggcacgagataccgtattattgctcgaaaaattaggttgcgaagtattatttcaagagcgccagggttgctgtggtcagccagcacttaatagcggttatgttaatgatgcaaaacccgcaatgaaatcattaattgagacattagaagttaatgattatccgattatttcccctgcaggctcttgcacttatgcgattaaaggctatcccagctatcttgccgatgagcctcaatgggcgcagcgagcccaaggtgtggccgatcgtttaattgatcttaccagctttatcgtcaacaccttaggtgtggttgatgttggcgcccgccttgcgggtaaagcggtttatcacccctcttgtagtttaacgcgaaagttaggggttgttagtgaacctttaaccttattaaaacatgttgaaggactcgaaatgttacctttcgccaattcagaaacttgttgtggttttggcggcaccttctcagtaaaaatgtcagaaatttccggtgaaatggtcactgaaaaagtaaaacatatcatggaagtcagccctgattacgtcattggtgcagataccagttgtttaattaatattcaaggccgtttaagtcgtgaaaagcgtcctgtcaaagtgctacatattgcacaagttttaatgagtcaa

SEQ ID NO: 32306 - DNA, 1896 bp, Proteus mirabilis
atggcaaaagaaaaaaaaggttttttctcatggctcggatttggccgtaataaagaagaaaatactgcacaagagaaagaacaacaacgtttagaggccgaacgtgcagagcaggcacgtttagccgaagaagaagctcaacgtcaagcgcaacttgaagcagaacaagcacgccaagaagcgcaaagagcagaggcagaacgattagctgctgaacgtgcggagcaggcacgtttagccgaagaagaagcccaacgtcaagcgcaacttgaagctgaacaagcacgccaagaagcgcaaagagcagaagctgaaaaattagctgctgaacgtgcagagcaggcacgtttagccgaagaagaagcccagcgtcaagcgcagcaagaagctgaacaagcacgccaagaagcgcaaagagcagaggcagaacgattagctgctgaacgtgcagagcaggcacgtttagccgaagaagaagcccagcgtcaagcgcagcaagaagctgaacaagcacgccaagaagcgcaaagagcagaggcagaacgattagctgctgaacgtgcagagcaggcgcgtttagctgaagaagaagcccagcgtcaagcgcaacttgaagctgaacaagcacgccaagaagcgcaaagagcagaagctgaaaaattagctgctgaacgtgcagagcaagcgcgtttagccgaagaagaagctcaacgtcaagcgcaacttgaagctgaacaagcacgccaagaagcgcaaagagcagaggcagaacgattagctgctgaacgtgcagagcagactcgtttagccgaagaagaagcccaacgtcaagcgcaacttgaagctgaacaagcacgccaagaagctgaagctgaagaaaaagcgcgtattgcacaagcacaagccgaagcggaagatattgtcgcgttacgcgaagaggtattagtcgataaacccgtagagcaagagagaccgaaaaaagaaggctttttctctcgcttgaaaaagggattattaaaaacacgacaaaatttaggctccggttttatggggctattccgcggtaagaaaattgatgacgagcttttcgaagagttagaagagcagttgttaattgccgatgtgggaatggataccactagcaagatcattaacagtttgactcagcatgctagtcgtaaagatctcaaagatgctgaatctctttatggtaagttgcgtgaagagatgggcgatattttaaataaagtggataagccattaaatattgaaggtaaaaaaccttttgtcattttaatggtcggagttaatggggtcggtaaaacgaccactatcggtaagttagcccgccaataccaagctgaaggtaaatcggtgatgttagctgcaggagataccttccgtgcagcggcggttgagcaactacaagtttggggtgagcgtaatcatatccctgttattgctcagcatacgggggctgatccagcatcggttatttttgatgctattcaatcggcgcaagcaaaaggtgtcgatgttctgattgcggataccgcgggacgattgcaaaataaatctcatttaatggaagagctgaaaaaaatcgtccgtgtaatgaaaaaattagacgaggaagcaccacatgaagtgatgctgacactcgatgccagtacagggcaaaatgctgttagccaagcaaaattgtttaatgaaacggttgggctgacaggattaaccttgacgaaactggatggtactgcaaaagggggcgttatcttctctatcgctgatcagtttggtattcctattcgctatatcggcgtcggtgaaggtattgaagatttacgtccgtttaaggccgacgattttattgaggctctgtttgcccgcgaggag

SEQ ID NO: 32307 - DNA, 306 bp, Proteus mirabilis
atgtacgcggttttccaaagtggtggtaaacaacaccgagtcagcgaaggtcaaacaattcgcttagaaaagcttgaagtagcaactggcgaaactattgagtttgacaccgtcatgatggtcgctgatggcgacaacattcaaattggcgctccaatccttgagggcgttaaagttaaagcggaagtggttgctcacggtcgcggcgagaaagttaaaattgttaagttccgtcgtcgtaaacacagccgtaaacaacagggccaccgtcagtggtttactgatgttaaaatcactggtatcgct

SEQ ID NO: 32308 - DNA, 255 bp, Proteus mirabilis
atggcacacaaaaaggctggcggctcgactcgtaacggtcgcgattccgaagcaaaacgtctaggtgtaaaacgtttcggtggtgaagctgtattagcaggtagcatcatcgttcgtcaacgtggtactaagttccatgcaggtactaacgttggttgtggtcgtgaccacaccctgtttgcgttagctgacggaaaagttaaattcgaagttaaaggtccaaacaatcgtaaatttatcagcatcgaagctgaa

SEQ ID NO: 32309 - DNA, 1167 bp, Proteus mirabilis
atgaaatttgttgatgaggccaagatcctaatcgtcgctggcgacggtggtaacggctgtgtaagctttcgtcgagaaaaatatatcccgaaagggggaccagacggtggtgatggcggtgatggtggtgatgtctacatggttgcagacgaaaacctcaacacccttatcgattaccgttttactaaatcttatcgcgctgagcgtggtgaaaatggccaaagccgtgattgtacgggaaaacgtggtcaagatattactattaatgtccctgtggggacgcgtgcccgtgatcttgctacaggtgagatcattgctgacttaacggtacatggtcaaaaacaaatggtcgctaaaggtggcttccatggtttagggaatacgcgttttaaatcatcagtcaatcgtgcaccacgtcaacgcacaatgggtacaccgggtgaatcacgtgaagtactgttagagctgatgttacttgcggatgtaggtatgttaggtatgccgaatgccggtaaatctacctttattcgagccgtctcggcagccaaaccaaaagtggcagattatccatttactacactagtacctagcttaggtgttgtgcgtatggacagccatcaaagctttgtcgttgcggatataccggggctgatcgaaggggctgctgatggcgcgggtcttgggatccagttcctgaaacatttagaacgttgccgtgtattattgcatttgatcgacatcgatcctattgatggttctgatcccgttgaaaatgccaaaatcattatttctgaattagaaaaatacagcgataaactggcacaaaaaccacgttggttagttttcaataaagtggatctgcttgatgccgatgaagcaaaacagaaagcacaagcgatagttgaagcgttgggttgggaaggtgattattatatgattgctgctatcaaccaagaaggggtgaaaaaactttgttgggatattatggaattcctgaaagtgaccccacgtgagcaagatattgctaccgctttagccgctgaagaaaaagttgattttatgtgggatgactaccataaagaacaacttgaaaatcctgaccttgaagacgatgacgaagattgggatgaagaagatgatgatggtgtagagtttatctaccaacgc

SEQ ID NO: 32310 - DNA, 1440 bp, Proteus mirabilis
atgcgcttattacctatattccgcggaatattttataccttgagtctgttaagcttttcaaccctcgccattcctgttgaaaaatatatagaacttttgcctgatggcactcaagtcggtttaatcacccaaactgttggcgcatcctcccctaacctaacttataatgataatcaattatctttgccagccagcacacaaaaagtggtcacagctttagccgccctattgcaattagggggcgattatcaatttaccaccacaatggaaacggaaggtaagataaaaaacaatcaactagagggtgatttaattttccgttttagtggtgatcctacgctaactcgccagcaattacgagcaatggttgccgtattaaaacaatctggcgtcacaaaaataacgggaaatttattaattgatacctctgctttctccagccatgacaaagcgccgggatgggtttggaatgatatgacccaatgctttagtgccccaccaagtgccgctattgtagataaaaattgtttttccgtcttactgcaaagtggtcaaaaagaaggtgatatcgccaccatacgtaaagcgtctttttatcctgtcacggttttaagcgaagttgaaacctatgaaaaaggctcaacacgaacccgcttttgcgaattagacgtcacggtgagagatttaaatacttatgtgataacaggctgcattcctaaacgtgaagaagccatgccgctgatgttttccattcaagatggtgcgcactgggcaggtatattgctaaaagaagagttacaacgtgcagatattgagctggacggttatgtcaaacgccgctcccaacctaaagcccctgttactgttttagcacaaacacaatctaaaccgttacacactttattgacgacgatgttaaaagagtctgacaatatgattgcagatgccgtatttagaactattggtcgtgaatattatggtgttgctggcacttggcgttcaggggcggatgccactcgtgctattttaaaacaaaaagcgggcattgatttagctaatacaattatggtggatggatctgggctttcccgccataacctgatagcccccgcaaccatgatgcaagtattacaatatgtcggacaacatgatagtgaattaaattttatcagtatgcttcctcttgccggtcatgatggtacattgcaatatcgtggtggttttactgaagcgggcgtcaacggtaaagtttccgctaaaacaggttcactcaagggagtgtataatctagctggctttatgaccacagccaatggacagaaagtggcatttgtacaatttatttctgcctactctccccctacacaaaatcgcaatgctggacgcgcctatttggttcgttttgaaacgaatttatataaagatatctataacaataaa

SEQ ID NO: 32311 - DNA, 459 bp, Proteus mirabilis
atgacaattaacaacagcaacaatcttacgggcaatgagccggctaatgatgaaacctatatgcgtcgagcgatagagttagctgcattaggacgttttacaacatcacctaacccaaatgtgggatgcgtgattgtgaaagaagggaagattataggtgaaggttatcaccatcatgcaggtggtccacatgcagaagtgaatgcattaaatatggcgggtgaaaatgccaaaggtgctaccgtctatgttacgcttgagccatgtagccactttggtaaaacgcctccttgtgctgatgctttaatcaacgccggggtaaaacgtgttgttgctgcaatgcaagatcccaatcctcaagtggcaggacgtggtttacataaattagtcgctgcaggtattgatgtttctcatggcgtattaatgcaagaagctgaaaaattgaatatcggctttttt

SEQ ID NO: 32312 - DNA, 1140 bp, Proteus mirabilis
gtgaaatacgaattagataaaacagatggtcatgcccgtcgtggtcgtcttaagtttgaacgcggtgtcgttgaaacacctgcatttatgcctgtagggacatacggtacggttaaagggatgacacctgaagaagttgcagccacaggtgcacaaatccttttaggcaatactttccatttatggttacgtcctggtcaagagatcatgaaattacacggtgatttgcatgactttatgcagtggaaagggccaattttaaccgattcaggtggtttccaagtctttagtttaggcgcaatgcgtaaaattaaagaagaaggtgtgcatttccgtaacccaattaatggtgaaaagattttcttaagcccagaaaaatcaatggaaattcagtacgatcttggatcagatattgtgatgatctttgatgagtgtacgccatatccatcagattgggattatgctaaaaattccatggagatgtcattacgctgggctaaacgtagtcgtcaacgctttgatgaattaaacaacaaaaatgcattattcggtattattcaaggcggcgtttacgaagatttacgtgatatctcagtgaaagggctagtggaaatcggctttgacggttacgctgttgggggcctagctgttggtgaacctaaagaagatatgcaccgtattttagaacatgtttgtccacaaatccctgcggataaacctcgttatttaatgggtgtaggtaaacctgaagatttagttgaaggtgttcgtcgtggtatcgatatgtttgactgtgtgatgccaacacgaaatgcacgtaatggacatctgtttgtaacaaatggtgtcattaaaattcgtaatgctaaacatcgttcagatacatcaactctggatgaacattgtgattgctacacctgtaaaaattatagtcgcgcttacctacatcatcttgatcgctgtaacgaaattttaggtgcaaggctgaataccatccataacttacgctattatcagcgtctaatggctgaaattcgtcaagcaattgatgagtcacgtttcgaagatttcgtgcatgagttctacgaacgtattggtaaaccagttccaccgctaaatagcagtgcgagtaagtgcgat

SEQ ID NO: 32313 - DNA, 1026 bp, Proteus mirabilis
atgacgacttcagtagaaaaaaaggctcaaaagcctattgtattcagtggtgcacaaccttctggtgagttaactatcgggaactatatgggagcactacgtcagtgggtacaaatgcaagatgactacgattgcatttactgtatcgttgaccaacatgccatcactgtacgccaagatcctaccgaactgcgaaaaagaaccttagatacactggctctttatctcgcttgtggcattgatcctgaaaagagcacaatctttgtacaatctcatgttccacaacatgcacaattaggctgggcgctaaactgctacacctactttggtgaattaagccgtatgacccaatttaaagataaatcagctcgtcatgctgaaaatatcaatgcaggattatttgattatccggtcttaatggcagccgatatcctcctttatcaaaccaaccaagtacccgttggtattgaccaaaaacaacatcttgaattaagccgtgatatcgcccaacgctttaatgccatctatggggacattttcaccgtacccgatccttttattccaaaaggtggcgcacgcgtgatggcattacaagatcccgctaagaaaatgtctaaatctgatgataaccgcaataatgttatcgctttacttgaagatcccaaagcggcggcgaaaaaaataaaacgtgctgttacagactcagaagagccacctcgcgttgcgtatgatctagaaaacaaagctggtgtttctaacttattagatattttagcgggtgtaacaggtaaaactatccctgaactcgaagctgaatttgaaggcaaaatgtacggtcatctaaaaggcgcggttgctgaggctgtatcagatatgctgacaaatattcaagaacgctttaacaccttccgtaatgatgaagcactattaaataaaatcatgaaagaaggtgctgataaggcgaaaacgcgcgctcaaacaaccttagataaggtttatgaggctattgggtttattgctcaccca

SEQ ID NO: 32314 - DNA, 351 bp, Proteus mirabilis
atgagcaatattattaaacaaatcgaacaagaacaaatgaagcaagatgtaccttcatttcgtccaggcgataatgtagaagttaaggtatgggtcgttgaaggttctaaaaaacgtctgcaggcattcgagggcgtggttatcgctattcgtaaccgcggtctgcactctgcatttactgttcgtaaaatttctaatggcgaaggtgttgagcgtgtattccaaactcactccccagtcgtagatagcatcacagttaaacgtcgtggtgcggttcgtaaagctaaactgtactacctgcgtgagcgttcaggtaaggctgcacgtattaaagagcgtcttaacgctaaa

SEQ ID NO: 32315 - DNA, 750 bp, Proteus mirabilis
atgtggattggggtaattagcctatttcctgaaatgttccgcgctataaccgagtacggggtgactggtcgggcagtgaagcatggtctgctgaatgtggaatgttgggatccccgagatttcacttatgacagacatcatacagtagatgatcgcccttatggcggtggtcccggtatgttgatgatggtacaaccgttaagggaagctattcatcaagcaaaagctgcggcaggtgatggtgcaaaggtgatttatttatcacctcaagggcgcaaactcgatcaacaaggtgtttgcgaattggctacaaatgagaaattaattctggtttgcggtcgatacgaaggaatagatgagcgtgtcattcagaccgaaatcgatgaagagtggtctgttggtgattacgtattaagtggtggggaactccctgccatgataatgatagatgcagtagcacgttttgttcctggtgttcttggacatgcggcttcggcgaaagaagactcttttgcagaaggattactggatcatcctcactatactcgtccagaggtgttagatggtatggcggttccggcagtgttactgtctggtaatcacgctcatattaatcgctggcgtatgaaacaatcgctgggccggacctggctaagaagacctgagcttctggaaagcctagctctgactgacgagcaaagagtgctgttagcagaattccagcaggaacatttgcaaagaacagcagag

SEQ ID NO: 32316 - DNA, 292 bp, Proteus mirabilis
tttcgggctttttatatgacaaccggacgccattcctcgatggggtctggttgttttgttaactaatgaggatgttatggtaacaattcgtttagctcgtggcggcgcaaaaaagcgtccgttttaccaagtagtcgtgaccgatagccgcaatgcgcgtgatggtcgttttattgaacgtgtaggtttttataacccactggcaaccggtaatgcagaagaattacgtttagacgtagaccgtgttgaacattgggttgctcaaggcgcaactgtttcagaacgtgttgct

SEQ ID NO: 32317 - DNA, 1404 bp, Proteus mirabilis
atggaaaagagtaaaaaaataaaatgggctatgcctgatgcctttattattatttttggcatcgttattttagcggccatcgccacctatttgatccccgcgggaagttatcagcgggaaaccgttaatggattaaaccgcgttgtccctaatagctttaattatgttgcacaaaatccagcttcattgatggatgtgttttatgcaatccctgtagggttaaaacaatctgccagtattattttcttgatctttatgattggtggcgcgattgccatttatgatcgcacccgtgctattgattcaggtattaatgcgcttattgttaaaaccaaaggtaattatcaagctcttattattacggttgcttttatttttggtatgttgtcatcccttgggcttgcggccaatgccgttattgcgtttatccctataggaatagccctttcgcgatcaatgaaacttgatgctattacgggggttgcagttgtttatttaggctattatgcaggtaatgcggttggtgtattagatccaactattttaggtactgcacaaacattagctgaagttcctcttttttctggtgttatttttcgagttgtattattcgctatcttaattgttgtcactattgcctatattgtctggtatgccagacgtattgcgaatgatccaacgaccagttatatgtatggaatagctaaagatgatcctgattatgaacagccacacactcaatcattagatagcaccttctcattgaggcaaaaattgagtttggtggtatttatagcgtttattggattgtttttatatggcgcttttgaatataaatgggggattgaacatctatcagccatttttattatgatgagcattgttgtggcggctatgtttaaaattgcccctaatgactatatcaaaacctttatgaaaggtgctcaatctttagtgtatggggcattggtggtggggatcgccagagcggttattgttattttagatgaaggacgagtgcttgattctattgtacaagccacattagtgccattacagcaaacctctcacttttggggtgctcaattactttatttctttaatttactatttaacttgctagtcacatcaggaacgggacaagcatcgattgttatgcctattatggtgcctattctcgatattcttgatcttacacgtcaaaccggtgtccttattttaaaactcggtgatggctttaccaatattattaccccaacatcaggtgtacttatggcggtactggcggtaggtaaagtgccgtggacgcgttgggttaaatttgtattccctattttaatgatttgggtcgtgataggtatggctgcaattggtattgctaccgcaataagttatggaccagtg

SEQ ID NO: 32318 - DNA, 878 bp, Proteus mirabilis
cttaatgacttcaatagttggagcggaattcacctagcgctatactaagcaattatgtaccctattatgtaagcgaaactatgcccgttatatcaatctctatcgttgctgtctgcgcttatttactcagtctggtgtttattctccccagtttgctgagaaaagagcaaaatggataccgtggattagcgctactttttgcggtgatcgcccttgtgacccatgctatctcattaaaatttttgattttccgtccacatagcgggcaaaatctgtcactcaccaatttaggggcggtggtcagtttaatggtctgcgttatcatgaccattgttgcttcccgtggtagagcttggtttttgctgcctattgtttattgcttttccatagtcaatctcattattgccgccttgatgccaggtgagtttgtcacccaccttgaaagtagcacatcgctctttattcatattgggcttgctttattaagttacgccactttgttaattgctgctttatatgccttacaactcagctggctcgactatcaactaaaaaataagaaactaaaattttcaccacaaatgccaccattaatgtcaattgaacgtaaaatgtttcatattacccaagtgggggtagtattactgacattaaccttgtgtaccggcctgttatatatggataatatctttggtaaagaaaatatccataaatcaatattttctattattgcgtggtttgtctacatcattttattatggggacacttccgtgagggttggcgtgggaaaaaagtggttatttttaacctgatcggtgccattattttgacattagctttttttggtaatcgtttattgcaagagttaatgcttaat

SEQ ID NO: 32319 - DNA, 1359 bp, Proteus mirabilis
atgtttgagaatttaagtgacagattatcgcgcacattgcgcaatatcagcggcagaggccgactgaccgaagaaaacattaaagacacactgcgcgaagtgcgtatggctttattagaagctgatgtggctttgcccgtggttcgtgagtttattgcacgtgtcaaagagagtgcagtaggtcatgaagttaacaaaagtctgaccccaggtcaggaatttgtcaaaattgtacaaaatgagctggtaaatgcgatgggagaggtcaataacgatcttgacctttcagctcagccacctgccgtggtattaatggctggtttacagggtgcgggtaaaacgacaagtgttgctaaactcggtaaatttttaaaagagaaaaagaagaaaaaagtattagtagtttctgctgacgtctatcgtcccgcagcgattaaacaactggaaaccttagccgaaacggttggtgttgactttttcccttcaacggtacaagaaaatcccgtcaccattgctagcaatgcgttaaaacatgctcagctccaattttatgatgtattgctggtggatactgcgggtcgtttacatgttgatgaaggcatgatggaggagatccaacttcttcataaagcaatcaatccagtagaaaccctattcgttgttgatgcaatgacagggcaagatgctgccaacaccgcaaaagcctttaatgaagcactccctttaacaggggtggtattaactaaagttgatggtgatgctcgtggtggtgccgcattatctattcgtcatatcacagggaaaccaattaaattcctcggtgttggtgaaaaaacagaagcattagaacctttccatcccgatcgtattgcctcacgtattttaggcatgggcgatgttctttcattaattgaagatatcgaaagtaaagttgaccgagcgcaagctgaaaagctggcaactaaactaaaaaaaggggacggttttgatttaaatgatttcttagatcagttaaagcaaatgaaaaacatggggggcatggcgagtatgctaagtaaaatgcccggcatgtctcaggtgcctgatgcggtgaaatcacaaatggacgactcaattttagtcaaaatggaagctattattagctcaatgacgaaaaaagagcgccaaaaacctgaaatcatcaaaggttctcgtaaacgtcgtattgcgatgggatcgggaacacaagtgcaagacgtcaaccgcttattaaagcagtttgatgatatgcaacgtatgatgaaaaagatgaagaagggcggcttggctaagatgatgcgtggcatgaaaggtatgatgccaccaggctttccaggtcgc

SEQ ID NO: 32320 - DNA, 1215 bp, Proteus mirabilis
atgataaatcaacgtattaatagggcaacttacgatcaggtaatgttgccaatttattcaccagcagattttattcctgttaaagggcaaggtagccgtgtttgggatcaacagggaaaatcctatattgattttgctggtggtattgctgttctagcgcttgggcatgcgcatccactattgaataaagcactgcaagagcaaagtgagaagctttggcatgtaagtaatgtgtttactaatgagccggcattatgtttagctcagaaattaatccaacatacttttgctgaacgtgtcttttttgccaattctggggcagaagcgaatgaagccgcacttaaattagcacgacattacgctattacccgtcataatccttataaaacgaagataattgccttccaccacgcctttcatggtagaacattttttacagtctctgttgggggacaacctaaatatgcggatggttttggtcctaaacctgcggatattatacatgtcccttttaactctcttgatgctgtaaaagccgtgattgactctcatacttgtgccgtaatactggagcctatccaaggtgagggcggagtgacaccggcgacagcggagtttatgcatggcttacgtacactatgtgataagcatcaagcgctattaattcttgatgaagtacaaacgggtatggggcgaaccggcaaactatttgcttatatgcactatgatatacagcccgatattattaccagtgccaaagcattaggtagtggttttcctctcagtgcgatgttaaccaccgaggatatcgcttcggtaatgggggtaggaacacatggtacgacttatggggggaacccattagcctgtgcagtaggcaatgctgcttttgatttaatcaacactcaggcggtattagaaggtgtcagtgagcgtcatcgttggatagtggatgaattgcaggcgataaaccaaacttatgctgtgttttctcaaattcgtggacaaggcttattaattggcgcgcagttagcaccactgtatgcaggtaaagcaaaagagttacttgcactggcctctaagcatggcttaatgatattaaatgccggggctgatgtaatacgctttacaccatcgctgattattaccctcgaagagttacaagagggcatgaatgcgttacgaaaagcgcttgatgagtttgtaaaagcagag

SEQ ID NO: 32321 - DNA, 3498 bp, Proteus mirabilis
atgtgttgggagttaactacaaccaagagttcacattacacgcttatgtcctcagaatatcgttatcaacttcctgtaaaacaaggggatactcgccagctgggtcagctgacaggtgccgcttgcgccctagaatgtgcagaaatcatcaaacgtcatgctggattagtcgttcttgtcactcgtgatatgcaaaatgcactgcgtttacaagatgaaatccatcagttttgtgattatcctgtagagacattatctgattgggaaacattgccttacgacagtttttctccccatcaagaaataatctctaaccgcctttctacgctataccgtattccatcacttctcaagggaattttaatcttacccgtcaatacgttaatgcaaaaagtctgcccaacagattatctcgcaagtcatgcattaataatgagtaaaggagagcaactttctcgcgacaatttacgcaaaacatttgatgaggcgggttatcgtcatgtagaacaagtgttagagcatggcgagtatgcaacacgcggagcattacttgacctattcccgatgggcagtgaatttccttatcgaattgacttttttgatgatgagatagatagcctaagaacttttgatgttgatacgcaacgcaccttaacagaagtcgagcagatcaaactattaccggctcatgagtttccaactgatcctaatgcgattgaactctttcgtagccaatggcgtgaacgttttgaagtaagacgtgatcctgaacatatctatcaacaagtaagtaagcaagtattacccgcaggaattgaatactggcaaccgctcttttttagtcagccattatccaatttatttgcttatttcccacaaaacaccttaattgtgacgcaagatctgcaagattgcgctgataaattttggcaagatatcaaccaacgttatgaaagccgtcgtgttgatcccatgcggccattactgccaccagatgatatttggcttaatgtcgaaacgctcaatcaacagttaaaacagtggccacgtattcaacttaaaacgcaagcactgccggaaaaagcgggttataccaatttaggttatcaaccactgcctgatttatcagtcaatgcgcaaagtaaatcaccgcttgataatctacgccgtttccaagagcaattttctggcagtattgttttttcggttgaaagtgaaggccggcgggaaaccgttcaagagctcttatctagaattaaaattgcccccaaacaaattattgaattagcggatgctaaagagaaagggtgttattttattattggctctgcagagcatggctttattgacaattatcgtcagttagcgctgatctgcgaaagtgatatgttaggtgagcgagtccaccgtcgccgtcaagataatcgtcgcaccatcaataccgatacactgatccgcaatctggcagaattaagtcccggacaacctgttgtccatcttcagcatggggtgggtcgttatcaaggtatgaccaccttagaagcgggtggcgtaaaagcagagtacttgatcctctcgtatgcgggagatgacaaactctatgttcctgtttcgtcactgcatttgatcagtcgctactctggtggggcggatgaaaatgcgcctcttcataaattagggggtgatgcttggactcgtgcacgccaaaaagcagccgaaaaagtgcgggatgtggcggcggaattattagatgtctacgctcaacgagccgtaaaatctggttttgcgtttaaattagataaagaacaatatcacactttccgccaaagcttcccttttgaaaccacacccgatcaagagatggcaattaatgccgtattaagtgatatgtgccaagccattgccatggataggttagtatgtggtgatgttggttttggtaagacagaagttgctatgcgtgcggcatttcttgcaataagcaacaataagcaagtggctattttggtgcctactaccctactggctcaacaacactttgaaaactttcgtgatcgctttgctaattggccggtcaatattgagatgatctcacgttttcgtagtgccaaagagcagcagcagatcaccgaaaaattagcagaaggcaccattgatatcgttattggtacacataaattattacaaccgggcattcaatggaaagacttagggttattaattgttgatgaggagcatcgcttcggtgtacgtcataaagagcgtattaaagcaatgcgtgccaatgtcgatatattaaccttaacggccacccctattcctcgtacgctaaatatggcgatgagtggtatgcgtgatctgtcaattattgccaccccacctgctcgccgtttatccgttaaaacatttgtccgcgaatatgatgatctggttgttagagaggctatcttgcgtgaaacattacgtggcgggcaagtgtactatttatataacgatgttgaaaatatagagaaagcgcgtgataggctagcacagttagtacctgaagctcgtattggtattggccatgggcaaatgcgtgaacgtgagcttgaacgtgtgatgaacgattttcaccatcaacgatttaatgtattgctctgcaccaccattatagaaacgggtattgatattccgagtgccaataccattattattgaacgtgctgatcactttggtttagcgcagctacaccaattacgtggacgcgttggccgctctcaccatcaagcctatgcttatctattaacccctcatcccaaagcaatgactaaagatgcccataaacgcttagaagcgattgcctccctagaagatctcggcgcaggttttgctttagccacacatgatctagaaattcgtggtgcgggagagttattaggtgaagagcaaagcggtcaaatgaataccgttggcttctctttatatatggagttactagaaagtgcagttgaagcattaaaagagggtcgagagccatcattagaagatctgaccaatcagcaaaccgaaattgaattaagaatgccggtgctattgcccgatgactatattcctgatgtcaatgtaagactctctttctataaacgtattgccagtgccaaagacttaaatgaacttaatgatctaagggcagagcttattgatagattcggcaccttacctgatgcaggacgcaacttattacgtaatgcggcgattcgattaagcgccatgagtttaggtatatctcgcattgaagcccatgacaaaggtggctttattgagtttggtgaaaaaaataatgtcgacccgacttatttaatcggtttattgcaagagcaaccgagcgtcttccgtttagatggccctaccaaattgaaatttatgataagcctaaccgatcgagaaaaacgactcacttttatcgacgatatgctcaccgcttttagtgaacacaaaataaacgcattgtctgtt

SEQ ID NO: 32322 - DNA, 639 bp, Proteus mirabilis
atggctgtcgctgccaacaaacgttcggtaatgactttgttttccggtccgactgatattttcagccatcaggtcagaattgtccttgcggagaaaggtgtcagtgttgaaattgaacaggttgaagctggtaatcttccacaagatcttatcgatcttaacccgtaccagagtgtgccgactttggtcgatcgtgaactgactttatatgattcacgtattattatggaatatcttgatgaacgcttccctcatcctcctttgatgccagtgtatcctgttgctcgtggtagtagccgtttaatgatgcatcgcattgaacaagattggtactctttaatgaatgttattgaaaagggtaacgatcaacaagctaatgcagcacgtaaacaactcgccgaagagctattggcggtatctccggtatttaaagaatacccttattttatgagtgaagagtttagcttagtggattgctacctagctcctctcttatggcgtttacctgtattaggcgtggatttaagcggtgcaggtgcgaaagatgtacaaatttatatgcaacgtgtttttgagcgggattctttccttgcgtcattaaccgaagcagagcgcgaaatgcgtttaccttcaagagga

SEQ ID NO: 32323 - DNA, 306 bp, Proteus mirabilis
tttcaagtaggagagatcgctaaaaagacgggattaacgatccgtactctccatcattatgaagagataggtttattgcaaccgactgcaagaaccgatgcaggttatcgactctatgatatgaaaagcatagagcgattaacgcaaattcaaatgctacgtcaaattggcgtcaaactgaaagacatcggtcatattcttaatggtcatagtgcagagatagcttgtttaattgaagagcgcattagccaattaaccacgcaaatgcaacaaattgccaaattgcgttatcagctagagcatgtt

SEQ ID NO: 32324 - DNA, 3375 bp, Proteus mirabilis
atgttccatatttaccattcaaatcaattatcactacttaaatcactgatggtacattttatgcaaaatcggccactatcatcgccttttgagcaagaagtgattttagtgcaaagtcccggaatgtcgcagtggttacaaatccaattagcagaaagtttgggtattgctgctaatatccgttatccattacccgctacttttatttgggaaatgtttactcgggtattatcaggtatacctaaagaaagtgcgttttctaaagatgccatgacatggaaactaatggcattattgcctaattaccttgatgatccggcatttaaacccttgcgacattatcttaaagatgatgaagacaaacgtaaattacatcaactagcggggcgtgtggcggatctctttgaccaatatctggtttatcgtcccgattggttgtcggcatgggaaaatgatcaactaattgatggcttgagtgacaatcaatattggcaaaaaacactgtggttggcactgcaacgctatacagaagatcttgcgcaacctaaatggcatcgtgctaatctttatcaacaatttatttctactttgaatgatgcgccagtaggggcgcttgcgcactgttttccatcgcgtatttttatttgtggtatttcagcattgccacaagtctatttgcaagcactgcaagcaatcggcagacataccgaaatctatttattgtttactaatccttgccgctattactggggagatattcaagatccaaaattcctcgctcgtctaaatagtagaaagcctcgacattatcagcaacttcatgaactaccttggtttaaagatgaacaaaatgcatcgacactatttaatgaagaaggggagcaaaatgtcggcaatccactattagcgtcttggggaaagttaggtaaagataatctctattttctttctgagcttgaatatagcgatgtgttagatgcttttgttgatataccaagagataatttattacatcaacttcaggccgatatactcgatttagaggatttttcacaaataggtcagacgcttgaggattaccaaagtagtgaaaaaaaacggatcatcgccaatgatgatcgttctttgacctttcatgctagccatagcccacaacgggaagttgaggtattacaagaccaattattgcatctcctcgagcaagatgctgatttattaccgcgagatattattgttatggtggcggatattgatagctatacgccctatattcaagccgtatttggtaatgcgcccgcagagcgttatattccttttgccatttcagaccgaaaagctcgccaagtacatcctgtcttacaagcttttatcactttattagaattacctcaaagccgttttaccgcagagcaagtgcttgcattacttgaagtacccgccttagctgcacattttgccatttttgaaaatgagttgaagctactacggcgctgggttgaagagtcaggtatacgttggggattagatgatgaaaatgtggcctcctttttattacctgtgacaggaaaaaatacgtgggagtttgggttattaaggatgcttcttggttatgcgatggacagtgaggcagggccgtggcaaggggtactgccttacgatgaatcaagtggcctagtcgctgagttagcagggcatctagcagattttttatataccttaagtgaatggcgcacacgattaagcgaaactcgcaacttagaagagtggcttgatatcggtcaacagcttgttgatgctttttttgacacagatgaagagacagagctggtattggcgcttatcacacaacagtggcaaaaggtgataaaaaatggtctagaggcgcactatcaacatgaaattccattagtgctgatccgcgatgaacttacagtgcgttttgatgatgagaaaattagccaacgctttttagccggaagccttaatttttgtaccttaatgccaatgcgttcaattccatttaaagcagtctgtttattgggaatgaatgatggggtctacccacgtaatattcagccattaggatttgatttaatggcagaaaaacgtcgtcgaggtgatagaaaacgtcgtgatgatgatcgctacctgtttttagaagcattaagctcagcagaaaaatacctttatatcagttatattggtaaatctattcgtgacgatcgtgaatgtaatccttcggtattgattaaagagttacaagattatattgggcaaaatttccgtttaagggaagatgcatcattaaatgttgatgacagtgcgcagcgtatcatcagccacttattaacccaacatagtcgagtgccttttgcgccagaaaactttaaaacggatgccctatatcgctcttatgccgctgaatggttaccggcagcaagtgggaaaggaactgctcaccaagcattttcaacgccattaaataaaaaaattgagaaagtctctttagatgaactatcacgcttttatcgccatcccgtacgtgcttttttccagcaaagtctaaaaacgaattttgttattgaagagaccgagctaccggaagaagagccttttgtcattaatgcattacaacgttatctattaaaccaatggttattaaaagccttaatcgaagggacatcaacagaagcactttatgaacgcattaaagctgctggaaaattaccagctagtgcgtttggtcaaatttattgggagcaacaaatagaaacgttgcaacctttagccgaaaaagtcagaagtgaacgtttagcaacccattctgtcacaatagaataccaatttaatacgatcccattaattggtcgtttaaatgaagtacaagccgatgggttactccgttggcgacccgccacattaacagctaatgatctactgcaattatggatagaacatctcgtgtactgcttaagtggtggaactggcgaaagccgtttttatggtagaaaagagtcgcaatggtgtctatcaccggtgtctgcggatattgcgtattcaacccttgaaagattgatccaagattatcaaacagggatgaatacacctttagccttattcgccaacagtggttgggcttggttacaagcttgcttcgataaaaaaacacagacgtttttatttgatgatgaagagatacaaaacaaggcagaattggtattaacgcaatatttaaccgatagctataaccgagaaggtgaaatgaatgatatctatattcaacgtgtatttcatcagcttgatgcaccttttcttgaggcagtaaaacagaccacgttagccatatttaagccaatcattccatttataaaaaaa

SEQ ID NO: 32325 - DNA, 849 bp, Proteus mirabilis
atgaagcagtatctggcattgtgtcaacgcattatcgatgaaggtgaatggattgataataaacggacaggaacccgttgtttaacggtgataaatgccgatctggaatatgatgttgccaataaccaatttccactcataacaacgcgtaaaagtttttacaaagccgcgattgcggaactattagggtacttacgtggttatgataatgcagcacaatttcgtgctattggctgtaatacgtggaacgcgaatgctaatgaaaatagcgcatggttaaataatccgcatcgtaagggtgaagatgatatgggccgagtctatggtgttcaaggacgccaatggcaacgccctgatggctcgcactttgatcaattacgtaaagtggtagataacttaactaacggtattgacgatcgtggtgagatagtcactttttataatcccggagaaacagcgttagggtgtttacgtccatgcatgcatacacatactttttcattgctcggtgacaggctttatttaacctcatatcaacgtagctgtgatgtcccattagggttgaattttaatcaaattcaatgctttgtattattagcgctggtggctcaaatcacagggcataaaccaggtaaagcattccataagatagttaatgctcacatttatgagaaccaattacctctgatgcgtgatgttcaactaaaaagagagccattgccattacctaagctacatattaatccaaacattaagacattagatgatatagaaacttgggtcacgacagatgactttagtgttgaaggttatcagtgtcacgaggcgataaaatacccgttcacggtg

SEQ ID NO: 32326 - DNA, 1692 bp, Proteus mirabilis
atgattcggatctttaaagcggggttgtttgctgcagcaggcgcattaatcataaatgcgggtgttgatgcatttatgatctctttattgaaacctctgcttgatgaaggcttcggtaaagcaagtaatgatgtattaaaatggatgcctttagccgttattggcctgatagttctgcgtggtatatctaactttatttctagttactgcctttcttgggtatcaggaaaagtcgtgatgaatatgcgccgtcggctgttttctcatattatgggaatgccggtgagcttttttgatcagcaatctacaggtacgttattatcacgtattacctatgattcagaacaggtcgcttcatcttcatcaggggctttgatcactgttgtccgtgaaggggcttatatcatcggcttatttggcttgatgttctactatagctggcagttatcacttatcttgattgtgatcgcacctattgtggcggtggtgatcagaatggtatcaacacgctttagaaccatcagtaagcgtatccaaaatagtatggggcaggtgacaacaagtgctgaacaaatgcttaaaggccataaagaagtcttaatttttaatggtcaagaagttgagaataagcgctttaatcatgttagtaaccatattcgtcgccaaggtatgcgtatggtggtggcatcttctatatcagatcccattatccagcttattgcttcttttgctttagcctttgttttatatgcagccagttttcctgagattatggataccctgactgcagggacaattacggtggtcttctcttcaatggtcgctttaatgcgcccattaaaatcattaactaacgttaatgctcaattccaacgaggcatggctgcttgccaaacattatttgctatccttgatatggaacaagagaaagataccggcacccttgagctgaaaaaaccaacaggtgatattgagttccgtaatgtcactttccaatatatcaccaaagatacacctgctttgaaaaatctgtccttcactattcctgaagggaaaacagtggcactagtagggcgttcaggctcaggtaaatctactattgcaaacctcctcactcgtttttatgacgttaacgaaggggagattttgatcaatggtcacgatattcgtgattacacattaagatcactacgtaatcaggttgcgttagtttcacaaaatgtgcatctgtttaatgaaacggtagcaaacaatattgtttatgcttgtgaagaccaatatacccgtgaggatatcgagaaagcggctaaaatggctcatgctatggactttatccaaaaattagataatggtctcgatactgaaattggtgaaaatggcgtgttgttatcaggtggtcagcgtcaacgtattgccattgcaagggcactattgcgtgatgcgcctattcttattttagatgaggcaacttcagcattagatactgagtcagagcgggcaattcaagccgcacttgatgaactgcaaaaaaatagaacatcattagtgattgctcaccgtctatcaaccattgaaaaagcagatgaaattttagtgattgaagatggggaaattgttgaacgtggtgctcatcttgatttaattgagcgaaaaggcgtttatgctcagctacacaggatgcaatttggcaaa

SEQ ID NO: 32327 - DNA, 834 bp, Proteus mirabilis
atgaaaactagctttaaccatatcgagcgagataatagtgatatcacccataaccataaaaatactcatagttcctgcaactgcacccaagaaataataacttctttaaatcattatattaataaacatccagaatgtactatctaccaaaattctttaatgagtagtcttattgctggtgtttatgatagtgatgttactattgctgatttattaaagcatggtgattttggtttaggtacttttaatcatcttgatggcgaattggtcgcctttgatagtaacgtttttcaattacgttcagatggcagtgcgcgagaagcccgtccagatcaaggctcgccttttgctgtaatgacattctttaaacctgatattacacatcagttttcggctcctgtctcccaacaacaggttcacaatattattaaccaatatgtcccttccgataatctattttgtgccatcaaaattgaaggcgaatttgaattagttaaaacacgtacagtgccacgtcaagagcctccttatgtgcccatgctagaagccattgaaaatcagcctatttttacctttcacgatgaaatgggtattattgccggctttcgttccccgcaatttactcaaggccttaatgttgctggatttcatgagcattatattaatcaccaacgtgaaggtggtggccatgtacttgattatcaattaaaaaaaggcaccctacaaatcggtgttatctctcgttttactattgacttacctcatcaatcaacattcttagaagctaatttaatgcccgatgaccttcatcaggcaatagaacaagccgaaaac

SEQ ID NO: 32328 - DNA, 1677 bp, Proteus mirabilis
atgaactctcatcattggaattgcggtgctgacttggtggttaagcaattagaacaacatggtgttaaacaagtttttgggatccccggagccaaaattgaccgtgtttttgattctttggttgattcaacaattaaaactattgttgtgcgtcacgaagccaatgcagcttttatggcgggtgcggtaggacgtttaaccggtaaagcgggtgtggcgatagccacttctggtcccggttgttctaatctagcaacgggcattgcgacagctacatcagaaggtgatcctctagttgccttaggaggctcagttaaatctacggatagacttaaactggttcatcaaagtatggacacagtaacaatgtttaacccaatcactaagttttgcgctgaagttgattcttcacaatcaatttcagagacgttagccaatgcttttcgtcatgcggagtcaggtcgtcccggctcggcttttttaacctttccaatggatatactcaataatgaggtagatagcccgttattaacacctaaatccaaacctaatttaggtgccgcgagtgatagtgcaattcaagaagcgatcagcttattattacaagcgaaaaaccctgtgatattaatagggcttcaagccagcgatccagaaaatgctcttgccttacagaattttcttgatatttttcctgttcctattgtaggtacttatcaatctgccggggctattgctcatcgccattttccactctttgccggacgaattggcttatttaataatcagccaggggatgaattactggcacacgctgatttagttatcactttaggttatagcccgattgagtatgaaccttccttatggaacagtcataatgccaatattatccatattgatgagatccaagctgaaatcgatttagcttactgccctgccttagaattaacaggcaatattaaattaacactggataagttaacgcaacaattaactcaccagcctaattcaaaattacaattatctaatcagagccaaggaatactagagaaaatacgtcagcaaagggaaattttgcaacaaaatagttattttagacaaggcacacctattcatcctttaactatcatacatgaaatgcaagatatcattgataacgatgtcactctttgtattgatatggggagttttcatatttggcttgcacgttacctttatagttttagagcgagacaaatgctaatttctaatggccaacaaaccatgggagttgcattaccttggggaataggcgcttcttttgtacgtccttgcgataaaattatctctgtttctggtgatgggggatttatgcaatcttcaatggagctagaaaccgcagttcgtcttaataccaatatattgcatattatctgggttgataatgcttataatatggtggagatgcaagaagaggtaaaatatggccgtccttctggcgtaaaatttggtcccattgattttaaacgctatgcagaatcttttggtgctaaaggattttctgttgagtgcgcatctcaacttcgtgaaaccttacgtaaagcgatagctgttgatggtcctgctgtgttagccattcctgttgattatcgtgataacgataaattaatgaagcacattaattataatttaattatt

SEQ ID NO: 32329 - DNA, 549 bp, Proteus mirabilis
atgaaattaactaaattagcgattgcaactgtatttgcggcatctgttgttccattcagctcaatggccgataacacagggacaattaactttctgggctctgttgttaacacaccttgcaatattgagcagtcttctctgaaacaaactgttgattttgggcagttgtcacgtaaagcattagaaagtggtaaagcggcggaagcagatttcgatatcaaatttacaggctgtgattttgctaactttggcaaagatactgaaggtaaacctgtagcagtgaaatcaatggaattggtatttactggtcaaacttatgcagataaagacaatacattgttggcaacttcaacaggaaatacaaacaaccttggtattttgatcgacggtttcgaattcggtaaagcgactgacgtattacctcgtattgcaaaccaaactggtgataatacattaactttcaaggcactagctaaagcagttgatacaactaaagatgtagctgaaggtaaattcagtgctatctctaacttccgtatcacatatcaa

SEQ ID NO: 32330 - DNA, 1011 bp, Proteus mirabilis
atgtcctcattgtcccctgccagcgaagttattcttcgtcatctagatcatttcgcagacaggcacgtactcatagcaggtgatcttcaagacacgctagcatcacaaattcaggccaaaagtgttagagcctatacaaatcaatatcaccagtggctaccgctactcaaatccatgggtgataatgcattttttggtttagcggcagatcaatcattcgtaaaatattgcgacactttgatttatttttggcctaagaataagaatgaagcaacttttcagttacgtagcttatgtgcaagtttatctgtcgatactgaaatcttcatcgtcggcgaaaaccgtagtggtgtaaaaagtgctacggaattaatgaatggtatagcaaagctaaaaaaaatagattcagcacgtcgttgtagcctcttttttggttcactaacctatcaaacactctttgatcgaaataactggtggcaaacttatcgttatgacgatttaacggtgatggcattacccggtgtttttagtcaaaccgcattagatgaaggcagccgattattactctctacatttgatgatgcaatggtaggtgatttactggatatggcctgtggttgtggggtgattgccactgtattaggcaagaaaaacccgatgttaaaactcacactctgtgacgtcaatgcagccgctatttcatccagtattgccacgttaaatgttaatgaattagaaggacgggttattgcaagcaatgtctattctgcggtagaagaaacttatgattggatagtctctaatcctcctttccatgatggcttaggtaccagctatcaagctgcagaagacattattcgtctcgcgcctaactttttgaaaaaaggcggtaaactgcgtattgttgccaatgctttcttaccttatcaagatattcttgatcacgtgtttggctctcatgaagtgcttgcatcaacaggtaagttcaaagtttaccaagcaaccaagaaa

SEQ ID NO: 32331 - DNA, 315 bp, Proteus mirabilis
atggctgaatggaacggtgaatatatcagcccttacgctgagcatggtaaaaaaagcgaacaagtcaaaaaaattacagtttcaatcccattgaaagtgctaaaaattttgacagatgagcgcactcgtcgtcaggtcaataacctaaaacatgccaccaatagtgaattattgtgtgaagcatttttacacgcatttaccggacagcctctccccaatgatgaagacttacgcaaagagcgtaacgatgaaatccctgaagaggcaaaagaaataatgcgccagcggggtgttgatcccgagacttgggaatat

SEQ ID NO: 32332 - DNA, 819 bp, Proteus mirabilis
atgtcgctagaagaactaacaagagtctgggatcatattaaaagcgaagcgcgtgcattggcagattgtgagccaatgttagccagtttctttcatgcgacacttctcaaacacgaaaatttaggtagtgcattaagctatatgctggccaataagctggcaactcagactatgccagccattgcagtacgcgaaatcgttgaagaggcttatcgtcacgatagctcaatgattgagtcggccgcttgtgatctctccgcggtacgcctacgtgatcccgcggtagataaatattcaaccccattgctttatttaaaagggtttcatgcactacaagcctaccgtattgcccattggctatggcaacaaaatcgccaagcgctagccatttatctacaaaaccaaatatcagtcacctttggggtggatatccacccagcggcacgtattggacacggtattatgctcgaccatgcgacaggtattgtgattggtgaaacggcggtggttgaaaatgatgtctccattttacaatctgtgaccttagggggaacaggtaaaacagggggcgatcgtcacccgaaagtgcgtgaaggggtaatgattggcgcaggagctaaaatccttggtaatatcgagattggtcgtggtgccaaaattggcgctggctcggtagtattacatgaagtaccggctcatactacggtggcgggggtgcctgcccgcattgtcggtcgtcctgatagtgaaaaaccgtcattcgatatggatcaacactttaatggtgttgtacccggctttgagtgtggtgatggtatt

SEQ ID NO: 32333 - DNA, 1011 bp, Proteus mirabilis
atgaacgcttctatgacagttatcggtgccggttcatacggcaccgctttagcgattaccttagcgcgtaatgggcacgatgttgtgctgtgggggcatgatcccaagcacgttgcggcattagaacaagcgcgctgtaatcaagcctttctgcccgatgtttcctttcctgatagtttatatatggaagcttctttgcaaaaagcgattgaagcgagccgtaatattcttgtggtgatcccaagccatgtgtttggtgaagtactgcaacaaatcaaaccctttttacgtcaggatgcgcgtgttgtttgggcgacaaaaggtcttgaagcacatactggtcgcttattacaagatgttgcccgtgaagtattaggtaatgaaatcccgctcgcagtattatctggccctacttttgctaaagagcttgcagcgggtttacccaccgcgattgcagtggcctcgacggataatctctttttagaacagttacaacagctatttcattgtggtaaaagcttccgagtctataaaaaccctgattttatcggtgtgcaactggggggcgctgttaaaaacgtgattgctattggtgcgggtatgtctgatggtatgggatttggcgctaatgcgcgtactgcacttattacccgtggtctggccgaaatgagccgcttaggtaaagccttaggtgcagatgcggcaacttttatgggcatggctggtttgggtgatttagttttaacctgtactgacaaccaatcacgtaatcgtcgcttcggtatgatgctaggtcaaggttttggtgttgatacagcccaagagaaaattggccaggtagtcgaaggttatcgtaacaccaaagaagttcgcgcattagccgaacaggtgggtgtagaaatgccaatcaccgaacagatctaccaaattttatatcaacataaagatgtaaaagaggctgcattggctttattagggcgagcaaccaaagatgagatagacagcagcctg

SEQ ID NO: 32334 - DNA, 1260 bp, Proteus mirabilis
atggataaatttagagtacaagggcctacctgcttatccggtgaggtcactatttcaggcgcaaaaaatgctgcactaccaattctgttcgctgctatccttgccgaagagccagtagaattaaccaatgttcctaagctaaaagatattgataccaccattaagttacttaatcgtttaggtactaaagtcgaacgcaacggctctgtttttgttgatgctcgtcatatcaacgaattttgtgccccctatgaattagttaaaacgatgcgtgcctctatttgggcattagggccattagttgcacgtttcggacgtggtcaggtttctttgccgggtggttgtgcgattggtgcgcgcccagttgatctgcatattacaggtttagagcagcttggtgcggaaattacgctggatgaaggttatgtgaaagcgcgtgttgatggtcgcttaaaaggggcacatattgtaatggataaagtgagcgtaggtgccactattaccattatgactgctgctgttttagccgaaggtaaaaccattattgaaaacgcggcgagagagccagaaattgaagataccgcgaattttcttaataccttaggcgcaaaaatcagtggtgcaggcaccgatagcattactattgaaggggtcgaacgccttggtggtggaacctatcaaattttaccagaccgtattgaaacagggacattcttagtcgcggcggcggtttctcgtggtcgtgttgtttgtcgcaatgctaaaccagatacgcttgatgcggtattagctaaattacgtgaagcgggtgctgatattgaaacgggcgaagactggataagccttgatatgcatggtaaacgtcctaaagcggtcactctgcgtacggcaccacatcctggttttccaaccgatatgcaagctcagtttagtcttttaaatcttgtggctgatggagcaggaatgatcactgaaacgatttttgaaaatcgttttatgcatattcctgaacttatccgtatgggggctcatgctgaaatcgaaagcaatactgtactttgtcatggtgttgataagctttcaggcgctcaagtgatggctaccgatttacgtgcttctgccagcttagtattagccggttgcattgcggaaggtacgacgattgttgatcgtatctatcatatcgaccgtggctatgaaaatattgaagccaaattacagggtttaggggctaaaatcgaacgtctacattctaatgac

SEQ ID NO: 32335 - DNA, 576 bp, Proteus mirabilis
gtgaaaggcaaaagagttgttattgttcatggctatactgcatctcccaaggataattggtttccatggttgaaagaagagcttggatcattaggatatgatgtcagtatacctatgatgcctgagcctaatcatcctaaccctaatgagtggcaacaaaaacttgccgatgaaaacataatacttgataaagatactattcttgttgggcatagtctgggatgtataactttattacgttttctttctgaacaggcttgtgaagatataacaataggcgggtatattttagtcgctggttttaatagtgaacaaaaaactttacctgagttgaactctcatatttataataatctgaattatagtaagttaattaaaatatcggataaaagggtgtcattaatatcatccaatgattggattgtgagtcctgattcatccaaaaaattagctagtcaattacaaactcaaattgttattgaagaagatgcgggtcattttcttgataaagaaggctatattaaattgccagtcatgcttgatatttttaaatatatgttgaatgagcataagcta

SEQ ID NO: 32336 - DNA, 714 bp, Proteus mirabilis
atgaatatattaatcgttgatgatgagccgcttgctcgtgaaaatttacgttgtttactcgaagaagaaaaagatattcatattattggtgaatgcagtaatgctattgaagcgataggggaaatacatcgtaaaaaacctgatgtggtttttcttgatattcaaatgccacgtattactggcttagaaatggtctcaatgcttgatcctgaacatcgcccttatattgtctttctaaccgcatttgaagaatatgctattcaagcattcgaagagcacgcttttgattatttgctcaaaccattagagcaagagcgtttagccaaaacattaagtcgtttacgccaaggcaataaacaaaatattgatttattatcaccacctgaagaacgcttaaagtgcattccttgtactgggcatagccgtatttggctaatgccaatcgatgaagccgtgtttgctacatcacgattaagcggtgtctatgtcaccaataatcaagggcaagaaggttttactgagcttacattacgtactttagaaacacgcactccgctggtacgttgccatcgtcaatatttagtgaatatggattatgtcaatgaaattgtatttggtgataatggacaagcagaacttattttacataataataaacaaattccggtcagtcgacgttaccttaaacccttaaaagaggcgattggcttaatt

SEQ ID NO: 32337 - DNA, 1701 bp, Proteus mirabilis
atgtacgaatttgatttaattttgctgttattacagcaaatgtgcgtttatctcattattgcgtggtttctcagcaaaacgccgctatttacgcctcttttacaagtgactatcaaacttccacataaattaatgtgctatgtgattttctccattttctgcattatgggcacctattttggattgcatattaatgactctattgctaatacccgtgctattggctccgtattaggcggattattaggtggcccgtatgtaggctttctcgttggcttcacgggtggcttacaccgctattccctcggcggaatgacagcgttaagttgtatggtatccactatcgcagaaggattaattggtggattagttcatcgttattatgtaaaacatggacaaatgcaccgcatatttaatccttggacagcggctaccgtcaccttttttgccgaaataatacagatgagtattattttattactcgctcgtccttttgatgaagcactttctttagtaaaaaatattgccgctcctatgattgtagcaaatacaataggtgctgcgatgtttattaggatattacaagatagacgtgccatttttgaaaaatataccagtgctttctccgctcaagcattaaaaattgcggtttgtactgaaggtattttacgtaaaggctttaaccaagataatagtactcgtgttgcaaaagttatctaccaagaattaaaagtcagtgctgtcgccattacggatagagataaactactcgcttttattggtattggcgctgatcatcatttgccaggtacaccgatttcctcagaacaatccaaacaagccattaataataacgaagtcgtgtatgcggacggcaatgagacaccttatcgatgtaccctttctccaaattgtaaattaggctcgacactggttattcctttacgaggagaaaataatcgcgttattggcaccataaaactctatgaagcaaagaatcgcttatttagctccattaatagaaccttaggagaagggatcgccagtctattatcagcacaaattcttgccggacaatacgaaagaaataaacaatcactattagaatcagaaattaaattactacacgcacaagtcaatccccactttttatttaatgcattaaatacattacaagccgttattcgtcgtgatagtgatcaagcaaaacagttagtgcaatttctgtcggcttttttccgtaagaatttaaaaagacccgaagcgatagtgacactcagtgatgaaattgaacacgtcacggcttatttacaaattgaaaaagcgcgctttcaagaaagtttacagatagatattcagatacctgaacatttagccactgcgcgccttcctgcattttcgcttcagcctatggttgaaaatgcaattaaacatggaacatcacagttattaggtatcggaaagattacaattagagcacatcaagaagaccacttaatagtgatcgaaattagtgataatgcagggctttatcattcgcaaggcgcatcacatcagctcggtttaggaatgagacttgtcgataagcggcttaaattacgctatggtgatctatatggtgtactcgtggagtgtcagcctgataactataccaaaataaaaatctgtttacccttagaaaaaaatatggataacgcagca

SEQ ID NO: 32338 - DNA, 1980 bp, Proteus mirabilis
atgaaagcaatagtatttgcctatcatgatattggctgtgttggtttaaaagcacttgaaaaagcgggtttcgatattcaagctgtatttacccatactgacgatcctaacgaaaatcatttcttctcatccgtagcgcgtgttagcgcagaaatgggattaaccgtgtttgctccagaaaacgttaatcatccattatggattgagcgtattcgtgagatgaagccagatgtcattttctctttctattatcgccatatgctaagcgatgagatcctgaatttagcacctaaaggtgcatttaatttacatggctctttattacctaaatatcgcggtcgtgcacctatcaattgggccattgtcaatggtgaaactgaaacaggtgtcactttacataaaatgacggctaaagcagatgctggtgatatcgttgcacaagaaaaagtaacgattgaagatactgatacttcattaattttacatgaaaaagtcagagaagctgcggcgaaattaatggctcatacgttaccgcatatcgcctcaggtaactattcaacaacagcgcaagatgaaagccaagcaacttattatggtcgtcgttgtgctgatgatggtttaattgactggaatgcagatgctaaaacggttcataatttagttcgtgccgttactgaaccatacccaggtgctttcactttcttaggtgagcgcaaaatgattatctggcgcgcacgtccagtggcagataaccaaggtaaacgtccgggtactgttatttcaactgagcctttagttatcgcatgtgcgaaaggtgcaattgaagttatcacaggtcaaagtgaaaatggtctttatgttcaaggcagccgtttagccactgaaatggggatcgtgacagatgtacgcgttggaccaaaagcaacagcacaagtgaaacgtcgtcaacgtgtactgattttaggtgtcaatggctttattggtaaccacctaactgagcgtttattaaaagatggtaactatgatatctacggtatggatatcggttcatcagcaattgaacgctttattggtaaccctcgtttccactttattgaaggtgatgtcagcattcatacagaatggattgaatatcacatcaagaaatgtgatgtgatcttgccattagtagcgattgcaacaccgattgaatatacccgtaatccattacgtgtatttgaattagattttgaagagaacttaaaaattgttcgttattgtgttaaatacaataaacgtattattttcccatccacatcagaagtatacggtatgtgcgatgataaagagttcgatgaagataattcacgcttaatcgtcggtcctattaataaacaacgttggatttactctgtttctaaacagttattagaccgagttatttgggcttatggtgctaaagaagggctgaaattcactttattccgtccatttaactggatggggccacgtcttgataacttaaattcagcgcgtattggtagctctcgtgcaattactcagttaattttgaacttagtggaaggttcaccgattaaactggttgatggtggtgagcaaaaacgttgtttcactgatattaatgatggtattgaagcattattccgcattattgaaaatcgtgataacaaatgtgatggtcagatcatcaatatcggtaacccaactaacgaagcaagtattcgtgagctagcagaaatgctgttagattgctttgaaaaacatgagttacgcggtcacttccctccatttgctggcttcaagaaaatcgaaagtagcagttactacggtaaaggctatcaagatgttgaacaccgcaaaccaagcatcaaaaatgctgagcgtctattagattggaaaccaactatcgaaacacgccaaacggtagaagagacattagacttcttcttacgtggtgcagttgaagagttaggtaataag

SEQ ID NO: 32339 - DNA, 1089 bp, Proteus mirabilis
atggtaattaacaataaaataaacgaaacaataggagtttccgtgactaaacctctttatgagagctacctgcaagcaaaaaatgaaaaaaaagcatcttatgcgcgtgatttagcaacttaccttaatgtaagtgaagctgagcttactcacgcgcgtgttgggcacgatgctaaacgcttacatggtgatgttcgtgatattttaaccgctctcgcaaccgtaggcaaagtgaaagccattactcgtaatgaaattgcggttcatgaacatcttggtgaatataccaatgctcgttttaacgatcatgcaggattgatcttaaaccctcgagccctcgatttacgctttttcttctctcattgggcaagtatctttgcattaaccgaagagacggctcgtggcattcgtcatagtattcaattctttgatcttcatggtgattctctccataaagtgtataccactgataatactcatatggacgcatggaataccttaatcgatacttatttatcaccagaaaatcccgtattagagattacccccgctaaatcttttactgatgcaccggtaacaacggcattagcacaacagttagaacagcaatggcgctcgatgactgacgttcatcaattctttaaaatcctgcaagaaaataatctcagtcgccagcaagcgttcaaagcggtcagtgatgatttagcttatcaagtagataatagtgccttaaaaacattattagcactggcgaaagaagtacaaaatgaaattatgattttcgtgggaaatagaggttgtgtacagatctttaccggtaaaattgatcgtttagtacctcatcaatttgaaaatagtgaacaagtatggattaacatttttaatcctgcatttacactgcatttaattgagagcgaaattgtggaaagctggatcactcgtaagccaacccaagatggttttgtcacaagtcttgaactatttgatagcaaaggtcaacaaattgctcagctttatggacaacgcactgagggaacaaaagaacaacaacaatggcgtgagcaactcaacgctcttgctaaaatagct

SEQ ID NO: 32340 - DNA, 747 bp, Proteus mirabilis
atgctagccattattcgaggcattattgtcattctgtacaccattattgtggtgacttttgggatgatctattgcatgttttctcccagaaatccgaaacacgtaatgacttatggacgtttattcggcaaattatcacatgtctttgggatcaaattagttgagcgttttcctaaagaagctaaaagttatggacccagtatttatattggtaaccatcaaaataactttgatatggtgacaatgtcgaatgcggtacaacctaataccgtgacggtgggtaaaaaaagcttggtgtttattcctttctttggacagctttattggatcactggcaatattttgattgatagaggtaatcgctctaaagcccatagcaccatcactcaggttgcagagcaaatcaaagcgaaaaaaatctctgtatggatgtttcctgaaggaacacgtagccgaggacgtggtttattaccttttaaaacaggggcttttcacgcggcgatgcaagcgggggtgcctattgtgcctgtttgtgtctctaccacacaaggtaagataaaattaaatcgctggaataatggctacgtgattgttgaaatgttgcctcccattgatgtatcaaaatataacaaagatcaggtgagagaattagctgaagattgtcgtcagatcatgaaggctaaaattgaagagcttgataaagaagtggaagaaatgaataaacgcgattttgcaggtaagttaaat

SEQ ID NO: 32341 - DNA, 210 bp, Proteus mirabilis
atgtctaatacaatgactggtacagttaaatggtttaacgacgataaaggctttggctttatcacacctaaagatggtagcaaagatgtatttgttcacttttcagcaattcaaagcgatagctttaaatcactgaaagaaggccaagaagtatcattttctattgaaaatggtgcaaaaggtccagcagctgctaatgttatcggtctg

SEQ ID NO: 32342 - DNA, 1359 bp, Proteus mirabilis
atgaaccgtaaaaacctgtttactcgcacagctctcgctgccattgtaggaacactttcctcttatgcaagcgctgccggttttcagttaaatgaatattcaacttcagcactaggtcgtgctttttcaggagaaggcgttattgcagatgatgcgagtgtaggtagtcgaaaccctgccgcattgaccatgtttgatcgtcctgagttttccgttggtgctatccatattaatcccagtgttgatattaaaggtaaatctccactctctggcgccagcactaatgccggcgatatcgccccaagtgctttagtccccaatattcactttgttgcgcctatcaacgataaatgggcaattggtgcatcaggtactactaactttggtttagctaccgactttaaaaaagattacccagcaggtttaattggcggaaaaactgatttagaaaccatgaacttaaatttaagtgcaggttatcgagttaataaacaatttagtgtcggtttaggcttaaatgcgctctatgctgatgctgaaattacccgccatgtaggtgaagccggtaagctattgggtggtaccttatctcaacatccagatactaactatcagggattaggccgttatttatcaagcttatcgccaagtgatcgttttgcacaattaaaaggggatgcttggggctttggctggaacgccggtttattatatgagtttgatgaagataaccgtatcagcttcacttatcgctctaaagtaaaagtgaaatttaaagatggtgattatcaaagtgatatccgctcattacccgcactagaaggtatgggagtgattggtactaatggagacaccatcaaaggtaaattagaccttaacctaccggagatttgggaatttgccgcttaccaccgtgtcgcccctaaatgggctgtccattataatttagcttataccagttggagtgagtttaaagagttaagagcaacacgtaaaagtgatggtcaacaactcttcaacaaagaagaaggcttccgtgatgcatggcgtattgcattaggaaccacttattaccatgatgataattggacattccgcaccggtattgcctttgatgatagtcctgttcctgcggataaacgctctatctcgatccctgaccaagatcgcttctggttaagtgcaggggcaacctacgcatttaataaagatatgtctgtggatgttggtttagcctatatgcacggtaagaaagtgacgattaaagagaagctatctgaaagcttaccattgccggcttatgaatttgaatcatcaggtaaagcatggttatacggtatgaactttaactatcgcttc

SEQ ID NO: 32343 - DNA, 675 bp, Proteus mirabilis
atgaaaaagatatttgcttttattatttttttattcccacttattgcttattctaatggtgtttcattaggtgctacgcgtattatttataattctaatattaaacaaactaatcttgttgtgactaattcagataaagagaatagttttctaattcaatcatgggtatctgataatcaaggtaataaaaataatgattttattgttacccctcctttatatattcttgacgctaataaagagaatgctttaagaattatgtatacaggtgaacctttacctgcagatcgcgaaagtttattttggatgaatgtcaaagctattccttctttagatgaaaagcttgccaatgaaaatacactacaaattgccatccagagtcggataaagcttttctaccgtcctagtggattgtccgcttatactgaaaaatatgccaatgaagtgactttttcctataaaaatggggagttaattgcccataatccaacaccttatcatattactatggtcaatttagccgcagccgacagtcaacttccttcaagtattatgattaacccattttcacaattaacattaggaaaagttaatcagaatgctaataccatttcattccaaaccattaatgattatggcgcacagactcctgttttaaaaaaagaaatcgttcat

SEQ ID NO: 32344 - DNA, 2529 bp, Proteus mirabilis
atggttaataagaatactaataaagatatcgtttattttctctttccaagtgtcattgcattgtcattgacgctgtccttttcatcatatagcgcaaaccgatttaatcctgcatttttggctgactctcctgatgccgtcaccgatttaagttattttgaagcaggcaaccgcattaaacccggtgattatcttcttgatattgtttttaatcatgagtatctgcgtagtgaaaatattcattttattagtcaagataaccatgttattccttgtttaaatcgagattattatcaatcactcgggatcaatattaaactatttgctgattttgaaaaattctcggcaaatgaatgtattgatattgaaaaaatcattccagattctgttgttaattatgatattgagaaacaagctttaaatattcaagtccctcaagccgcgttagatctgaaagcgcgcggttatattccaccagaaaaatgggataacggtataacagcaggtattttaaattacacctttagtggcgctaatagctggggaaattctcataataatagctactatttaaatctacgtagtgggatcaatattggtgcttggcgattacgcgattattccacttggaattcgtcaaacgggaaaaaccaatggaaccatatcaatacctatctgcaacgcaatattgtgtcattaagaagccaattacaaattggtgatagttatacctcatcaacactttttgacagtgttaattttcgaggtatttcattagaaagtgacgacactatgttacctgatagccaaagaggatttgcacctgtggtcagaggtattgctaaaggcaatgctaaagtggtgatccgccaaaacggttatgtgatttatcaaacctttgtttctccgggtgcttttgaaatccgtgatctctatccaacgtcaaatagtggcgacctctatgtcaccattgaagaaaatgatggtagcaaacacagctatgttgtgccttattctgctgtacctattttacagcgagaaggccaaaaacagtttgtcatccaagccggtgaaatacgccaaaataaccaacataaaaaacctcgctttatacaaggtcatcttatttatggcttaccctatgacaccactgtctatggcggtgcattagcaacaaaagattaccaatcttatgccctaggagcaggtaaaaatatgggtaccctaggtgccttctctaccgatatcacctttgctcatagccaattgccaaataactcaacatcagatggttattctttacgttttctttatgccaagtcgttaaaccaatttggcacaaactttcaattgctcggttatcgttactctacttcgggtttttacacattagatgagacattaaatacacgtatgtccggttatctgtatgaagataatcaaaaaaaaccgttgagttattttaatttgcataatcgcaagaaagggagcctacaaattaatttatcacaacaactgggggattatggctctatttttatgatgaccaactggcaaaattattggggaactaatgagaaaaatgtcctagtacaaaccggctacaatggcaatattaaagggctctcttataacgtcatttatagttataacagaatgatgaatagtggtcagcgtgaccaaacattgtctgtgggtctttctatcccattacaattgctaatgccgacaagttatcaatccatcaatagcacttatctcacatataattacagccacaataataacggttactcgacacataatgcggggattgctggtacattattggaagacaatacccttaattacagtgttcaacaaggttatagcaatcaaggcggaaactataccggtagtgcggcgttgggttatcaaagtcgctatggcaatttaaatgctagctataactatcatcaagatgctcaacaaattaactatagcctcgctggaggtatgctactccatagtggcggattaaccttaagccaacccttaagcgctaatgccattttagtagatgctcgtaatactgcggatgtaccgattgataatgcgacaggggtttatactgactggcgagggtttgccgttattccctatgctaccgcttatcgacaaaatcgagtggcattagacaccaccgcattacccgataatgttgaaattgagcaaaacattaagcaagtgatcccaacacaaggcgccgtcattaaagttcagtttgatgctaaaaaagggtatcgcttattactgacgctacaacaccaaggtcgcccactcccttttggggcaatagcaactgataaacaaaatcatctgtccggtattgttggcgatgatggcttactctacttatcgggtgtccctgattcaggaaaattagagatccgctgggggcataatgcctctcaatactgtcaagtgaactatcaattacccgcctctcaacttgatgaaccttttgtgaaaatgacacaggagtgccaa

SEQ ID NO: 32345 - DNA, 1299 bp, Proteus mirabilis
atgtccaaaatcgttaaagtacttggtcgtgaaattatcgattctcgtggcaacccaacagttgaagctgaagttcacttagaaggtggttttgttggtatggcggcggctccatcaggcgcatcaacaggttctcgtgaagctttagaattacgtgatggcgataagtcacgtttcttaggtaaaggtgttctgaaagcggttgaagctgttaatggaccaatcgctaaagctcttttgggtcaagatgctaaagaccaagctaatatcgataaaatcatgatcgatttagatggtactgaaaacaaatcaaactttggtgcaaacgcaatcctagctgtttctttagcaaacgcaaaagcagctgctgcagcgaaaggtatgcctttgtatgagcatatttctgatctgaacggtactcacggtcaatactcaatgcctttaccaatgatgaatatcatcaatggtggtgagcatgctgataacaacgttgatatccaagagtttatgatccaacctgttggcgcgcctactctgaaagaagcggttcgtatgggttctgaaatattccatcacttagcaaaagtgctgaaagcaaaaggcatgaacaccgcggtaggtgatgaaggtggttatgcgccaaacttagaatctaatgcggctgcattagcggctatcaaagaagcagtagaagctgcgggttatgttttaggtaaagatgtaactctggctatggactgtgctgcatctgaattctataacaatgagactggtaactacgaactgaaaggcgaaggtaaaactttcacttcacaagaattcactcattacttagaagagctgactaaacagtatccaatcgtttctatcgaagatggcttaaacgaatctgactgggatggtttcgcataccaaactaaagtacttggtgacaaaatccaactggttggtgacgacctgtttgtaactaatactaagatcctaaaagaaggtatcgataaaggtattgctaactctatcctgatcaaattcaaccaaatcggttcactgacagaaacgttagctgctatcaaaatggcgaaagacgcaggttatactgctatcatctctcaccgctctggtgaaacagaagatgcaactatcgctgatttagcagtaggtacagcagcaggtcaaatcaaaacaggttctatgagccgttctgaccgtgttgctaaatataaccagctgatccgtatcgaagaagcattaggtagcaaagcacctttcaatggtctgaaagaagttaaaggccaagca

SEQ ID NO: 32346 - DNA, 795 bp, Proteus mirabilis
atgtcagaaaaccgtgaaattttacgtttattagccattatggcgcaattacgtgatcctcaaacaggctgtgagtgggatagggtacaaacctttgacaccatcgccccctatacattagaagaaacctatgaagtactagatgccattgcccgcaaagattttagcgcacttaaagaagagttaggggacttactctatcaggtcgttttttatgccagaatggcgcaagagcagcaattatttgattttaatgatgtctgtgaagctatcagcaataaattagaacgtcgtcatccgcatatttttgctacagaaaatgaaaataatttagcgactgaaaagcatcgttgggaaaaaatcaaggctcaagagcgtgaagcgaaagcacaatattcattacttgatgatattcctgctactttaccggcactgatgaaagcagagaaaatacaaaagcgctgtgcctccgttggctttgattggcacgagctttcccctgtattagataaagtgtatgaagaaatagatgaagtgatggcagaggtgaaaaaagcccctagagatgatcaacgtattgaggatgagttgggggatttgcttttttctgtggttaatttatcgcgccatttaaaacagaagccagagcaggcacttaatcgagcttgtcgtaaatttgagcaacggtttaggtttgttgaaaaaatgctcacagagcagggtataaacatagaaaatgcttcattagaagagatggagatcggttggcaaaaagcgaaggaaaaagaaattgag

SEQ ID NO: 32347 - DNA, 462 bp, Proteus mirabilis
gtgaattaccatcaatattaccctgttgatgttgtcaatggcccaggaacacgttgcaccctgtttgttgcagggtgcgtacaccaatgtcgtggttgctataataaatcaacttggtcactaacatctggcaagccgtttacccaagaagtggaagatcagatcattgctgatttacaagacactcgtattaaacgacaaggactatcactttccggtggtgatcccctgcacccccaaaatctttctgctatattaaaattggtaaaacgtgttaaaacgcaatgccctgagaaagatatttgggtttggacaggctatttattggctgacttaaccccagagcaacaagaagtcgttagctatattaacgtactgattgacggcaaattcgtacaagaactttatgatcccgcattactgtggcgcggtagtagtaatcaggtgatccataaattgaag

SEQ ID NO: 32348 - DNA, 243 bp, Proteus mirabilis
atgcgtgtggaaattttatttaacaaacaatctaatgtcactgactcactatttccgctgttagaacatgaactaagaaaaaaaattattcctatttatcctgatatgcagtttcgtatcgcttttagtagcatgaatacgatccaagtcacgggcgtgaaagatgaagctaagcatgagcatattatggagttaattcaaagtgtttgggaagatgatagttggctccaaacgaatgatgat

SEQ ID NO: 32349 - DNA, 477 bp, Proteus mirabilis
atgaataaagtaattttatctttggttgcagcgatgtctttgtctgcttgcgcacaagcggttgatagtttagaaaaagtcgctccttatcctaaagcaaaggaaaatcaaattcgtcatgttattgagttagaacaaaaagaaaacgaaggcaattaccaagttgagttgatcgtgggtaaagagatgatggttgattgtaatcgtcaatggtttggtgctgagttagataaaaaagatctcgaaggttggggttatgattactatatcgtaagcgacttaaatggcccaatgtctacgatgatgggttgtcttgataacactaaaaaacccgcctttgttcaagctaatatggggcaagcggcatttatccgctataacagcaaattacctattgttgtctatgcaccaaaagatgtagatgtgaaatatcgtgtgtggtctacttctgacgaggttaaagattcaacaaagaaa

SEQ ID NO: 32350 - DNA, 435 bp, Proteus mirabilis
atgtacaaaaaaattctagttcctatcgatattctagaagacgagctttctcaggaactgatcactcacattgaacaaattgctcaagttggcaaacccgagatccacttcctcaccgttattccaaatgcagaacttttctttggtattgagtttgccgctattcctgaaaaatttaaagactcttcagagcgcactcgcctcgcttttattgctctgcaagatatgatcaaagatgcgaaaattcccgatgagcaaattgtttgcaatgtcggtgttggtaatgcaaaagatgaaattttagagtatgcacgtcaaatcgatgcagatttaattgctattgcttcacatcgtcctaatgtttcttcctacttattaggctcaacagcatcatctattgttcgccatgcaaaaatgtcggtattggtgatccgt

SEQ ID NO: 32351 - DNA, 1080 bp, Proteus mirabilis
atgaagccttctattgtcgctaagttggaagctctacaagagcgttatgaagaaattcaagcacttctagcagaagctgatgttattgcctctcaggagcgttttcgtgcgctttcaaaagagtatgctcaattaacggatgtcacatcttgttatcgtcaatggcgaaaagtgcaagatgatatggaagcggcagaaatgatgcttgatgatcctgaaatgaaagagatggctcaagaagagctaaaagaagcacaaagcgtcaatgaggagctagaacagcaacttcaagtactgttattacctaaagatcctgatgatgagttcaactgtttccttgaaattcgtgccggaacgggtggtgatgaagccgcacttttcgccggtgacctgttccgtatgtatagccgttatgccgaagcacgtcgttggcgtattgaagtgatgaatgcaaacgaaggcgaacatggcggttataaagagatcattgccaaagtcattggtgatggcgcttatggggtactgaaatttgaatcaggtgggcatcgtgtacaacgcgtgcctgaaacagaatctcaaggacgcattcatacttctgcttgtacagttgcggtattgcctgaagtgccagaagctgaattacctgaaattagcccaagtgatttacgtattgatacttttcgctcatcaggggcgggtggtcagcacgtaaataccacggattcggccatccgtattacgcatatcccgacaggcattgtggtagagtgtcaggatgagcgttctcaacataaaaacaaagcgaaagcgatgtcagtattaggtgcgcgtattcgtgctgccgaagtacaaaaacgtcaagaagccgaagcatctgaacgccgtaacttattaggttcaggagatcgttctgatcgtattagaacttataatttcccacaaggtcgcgtgacggatcatcgcataaaccttacgctttaccggttagatgaggtgatggaaggtaaactagatgcacttattcaacctattgtcactgaatatcaagccgatcagctatccgctttatctgagcaagat

SEQ ID NO: 32352 - DNA, 852 bp, Proteus mirabilis
atgcaacataaagtggtgagtattggtgatatcaaggtagcaaataatttaccctttgtgctctttggtggcatgaatgtattggaatcgcgcgatttagccatgcgtatttgtgagcattacgtcacggttactcaaaaattagatattccttatgtatttaaggcctcttttgataaagcaaaccgctcatctatccactcttatcgtggaccgggtcttgatgaaggaatgaaaattttccaagagctaaaagagacttttggggtaaaaattatcacggatgttcatgaaccttcacaagctcagcctgtatctgaagtcgttgatgttattcagctaccggcattcttagcgcgtcaaaccgatttggttgaggcaatggccaaaaccggtgcggtaattaacgtgaaaaagccacagtttgttagccctggtcaaatgggaaatatcgtcgagaaatttaaagaaggcggtaacgaccaagtgattttatgtgaccgtggtagtaattttggttacgataatttagtggtcgatatgctaggttttcatgtcatgatgcaagcctcagaaggggctccagtgatttttgatgttacccactcactacaatgccgtgatccattcggtgcggcttctggtggtcgtcgtggacaagtcgctgagttagctcgtgcaggtatggcagtgggtctggcagggttatttcttgaagctcatcccgatcctgatcatgcccgctgtgatggcccatcagctttaccattagctaaattagaacctttcttagctcaaattaaagcgattgactctctggtaaaaagcttccctgagttagataccagtaaa

SEQ ID NO: 32353 - DNA, 993 bp, Proteus mirabilis
atgactatcaaagtaggtattaatggttgtggtcgtatcggccgcatcgttgtccgtgctgcacaagaacggtcagatatcgaaatcgtaggtattaacgatctgttagacgcagaatacatggcatacatgctgaaatacgattcaactcatggtcgtttcaacggtactgttgaagtaaaagatggccacctcgttgttaatggtaaaaccatccgcgtaacatcagaaagagatccagcaaacctgaaatggaacgaaattggtgttgatgttgttgctgaagcaactggtctgttcttaactgacgaaactgcacgtaaacacatccaagctggtgcgaaaaaagttgttctgactggtccttcaaaagacagcacacctatgttcgttatgggtgtaaaccacaaatcatatgcaggtcaagatatcgtttctaacgcatcttgtacaactaactgcttagcgcctttagcaaaagttatcaacgacaaattcggtatcgttgaaggtctgatgacaactgttcacgcaacaactgcaactcaacgtactgttgatggtccttcaatgaaagactggcgtggtggtcgtggtgcttctcaaaacatcatcccttcatcaactggtgctgctaaagcagtaggtaaagttattcctgaactgaacggcaaactgactggtatgtctttccgtgttcctactcctaacgtttctgttgttgacttaactgcacgtctggaaaaaccagcaacttatgctcaaatctgtgaagcaatcaaagaagctgccgaaggcgaactgaaaggcgttctgggttacactgaagatgcagttgtttcaactgacttcaacggtgaagtattaacttcagtattcgatgctaaagcaggtatcgcgctgaatgacaactttgttaaattagtttcttggtacgataacgaagttggttattcaaacaaagttctagatctgatttctcatatctctaaa

SEQ ID NO: 32354 - DNA, 1446 bp, Proteus mirabilis
gtgaaaataactgacaatccctatttccgtgaacaaggatatattgacggtatttggtgtgatgcaaaaagcaaagacacggttgaagtgattgatcctgcaacaaatcagcccattggtactgtgccaaatatggcaacagaagaagccaaagcggctgttgatgcagccgccaaagcattaccgacatggcgtgcgttaaccgcacatcaaagaagcactttactgcaacgctggttccaactgatacaggataacaagcgtcaacttgcagaactgatgacatttgaacaaggtaaacctgttgccgaagcggaaggcgaaatcacctacgcagcctcatttattgagtggtttgctgagcaaggtaaaagaaccaacggtgaaattatcccctccccttcatcagataagcggcttatggtgatcaaacaagggattggtgtttgtgcggctatcacaccttggaacttccctgctgccatgatcacccgtaaagcagccccagcattagccgcggggtgtactatggtgataaaacctgccaacgaaaccccctatacagcccttgcgttagctgaattagccgcgcaagcaggaatacctgccggtgttattaatattgtcaccggtgatgcagttaaaatcggtgaggtgttcacatcagacaaccgcgtgcgtaaattgagttttactggctctacaggggttggccgtttattaatgcgccaatgtgctgacagtgtgaaaaaagtctcactggagctagggggaaatgcgccatttattgtctttaatgacgccgatattgagaaagcggttgcaggtgctatgggggcgaaattccgtaacgccggacagacttgcgtgtgtgcaaatcgtttttatatccataaagatgtatatcaacaatttagtgaacgctttgttgctgaggttaaaaaactaaaagtcggtaatggctttaccgaaggcgtgactattgggcctcttattaatcataaggcggtagaaaaatcacaatcactccttgctgataccttacaacgcggtgcgacactgctatgtggtggtgaaaaagataaagcaggtgaaaatttctttcagcctaccgtggtcggtaatgtgcctgctgatagtcatattcttgaagaagagatctttggccccgtggcacctttagtcatttttgacaatgaagaagaagtagtacatctagccaataataccatctatggcttagccgcttatttctacagtgaagatcctcaacgtatttggcgtgtggctgaaaatctagaatatggcatggtcggtattaacacaggtctaatttccaatgaagtggctcctttcggtggtataaagcagtctggcttaggtcgtgaaggctctgagcatggtattgaggactatatggaaatgaaatacctctgccaaggcctg

SEQ ID NO: 32355 - DNA, 1206 bp, Proteus mirabilis
atgaaacgtctacaagcctttaaattccagttaagacctaatggtcagcaagagcgtgagatgagacgctttgcaggggcttgtcgttttgttttcaatcgggcattagcacgtcagaatgaaaaccacgaagcagggaataaatacattccctatacaaaaatggcttcatggctcattgagtggaaatctgacacagagacacaatggttgaaggaagccccatcacaaccgttacaacagtcacttaaagatttggaacgggcttacaagaattttttccagaagcgtaccgcttttcctcgattcaagaaacacggtaaaaatgacgcttttcgctacccgcagggcgtgaagctcgatcaatccaatagtcgtatatcattgccaaagttgggatggatgcgctaccgcaacagtcgtgaagtcgtcggagaagtgagaaacgtcacggtcagtcagtcatgcggtaaatggtacgtcagcattcagactgagtatgaagcgacagaaccaccacatgaatcaacctcaatagtcgggcttgatgcaggggttacaaaactggccacgctttcagacggtacggtatacccgcccgtcagcagttttaaagtcaaccagcgaaagctggcaaggcttcaacggaaattaagccgtaaaatcaaattcagtgccaactggcaaaaacaaaagcgcaaaattcaacgtctgcattctcatattgccaatatcaggaaagactaccttcacaaagtcaccagcgaaatcagcaaaaaccacgcaatgattgtcattgaggacttaaaggtcagtaacatgtctaaatcggcaaaaggtacgacagaacggcctggacggaacgtaaaagctaaatctggtttaaaccgctcaatactggagcagggctggtatgaaatgcgccgacagcttgagtacaagcagctctggcgaggtggtcaggtactggcaataccccctgcctacaccagtcagaagtgcgcttgctgtggtcatacagcaaaggaaaaccgccagtcacaaagtcaattcgagtgccttgaatgtggatatacagcgaatgctgatatcaacggggcacgtaacattttagcggcaggacatgccgtgctagcctgtggagggagggtgcagtcagaccgcccgtcgaagcaggaacccgccgaggtgattcagacatcagtc

SEQ ID NO: 32356 - DNA, 987 bp, Proteus mirabilis
atggcagctaaagacgtcaaattcggtatagacgctcgtaataaaatgttacgtggtgttaatgttcttgcagatgcagttaaagtaactttaggccctaaaggtcgtaacgttgttttagataaatctttcggtgcacctgttatcactaaagacggtgtttctgttgcccgtgaaatcgaattagaagataaattcgagaatatgggtgctcagatggtgaaagaagttgcttctaaagctaatgatgcggcaggtgacggtactacaactgcaacagtgttagcacaagcaattatcgccgaaggcttaaaagcagttgccgctggcatgaaccctatggatctgaaacgcggtatcgataaagccgttgtgggcgcagtagaagaactgaaaaaactgtctgttccatgttcagatactaaagctattgctcaagtaggtactatttctgctaactctgatgaaaccgttggtactctgattgctcaagcaatggaaaaagtgggtaaagaaggtgtcatcactgtagaagaaggtactggcttagaagatgagctggatgttgttgaaggtatgcagtttgaccgcggttacctgtctccttacttcatcaacaaaccagaaacaggtacagctgagttagaaaatccattcatcctattagttgataaaaaagtctctaatatccgtgaattacttcctgttttagaaggtgttgctaaagcaaacaaacctctgctgatcattgcagaagatgttgaaggtgaagcactggcaacattagtcgtcaacaacatgcgtggtatcgtgaaagttgctgcggttaaagcaccaggttttggtgatcgccgtaaagcaatgttacaagatatcgctattctaactaatggtactgtgatttctgaagaaatcggtatggagttagaaaaagcaacgctggaagatttaggccaagcgaaacgtgttgttatcaacaaagatacg

SEQ ID NO: 32357 - DNA, 888 bp, Proteus mirabilis
atgaaactaaaaaaaatagcaacgcttctctcagtggttgctctaagcgctaccataagtgccaatgcattagcaaaagagtctatcgccctcgttatttcaacgctcaataatcctttctttgtcaccatgaaagacagtgcacaaaaagaggcggataaattaggttatgacttagtcgtgcttgattcaatggataatccagccaaagaattggcaaatgtgcaggacttaaccgtaaaaggcacccgtttaatgctcattaatccaacggattctgatgctgtaggtaatgccgtgttaatggcaaataaagctaaaattcctgtagtaaccctagatagagtagccaataaaggtgaggttgttagccatgttgcttctgataaccgtctaggaggaaaaatggcgggagattatattgcggaaaaagtgggtaatgatgccaaagtgatccaactagaagggatcgccggaacctccgcttctcgtgagcgtggagaaggctttaaacaagctgttgacgctcacaaacttaatatcttggcaagccaacctgctgactttgaccgtactaaaggtcttaatgttatgcaaaatctattaaccgctaatccttcagtgcaagcggtatttgctcaaaacgatgaaatggcattaggggcattgcgtgcattacaaacagcaggtcgtaccgatgtcttagtcgttggctttgatggcacaaatgatggcattaaagcggttaaccgaggtgttttaggtgcgactattgcacaacgccccgatcaaattggtattattggtattcaaaccgctgataaaattctgaaaggggaaaaagtggatcccactattcctgttgagcttgaattagtcactcaaaaa

SEQ ID NO: 32358 - DNA, 963 bp, Proteus mirabilis
atgagtacaaaatcaataccagcgtcaaaacgatggttctctaaggcttggttattagaacaaaaatcactcattgccttattgttgcttattgtcgtggtttcaacactcagcccgaatttttttaccttaaataatatttttaacattctacaacaaacctctgttaacgcaattatggctgtaggtatgacattagtcattttaacctctggtatcgatttatcggtaggttcattactcgctttaaccggtgctgttgctgcttctatggtaggggctgatgttaatgcgttagtggctgttgtcggtgctttagcattaggagccgctattggtggcgttacaggtgtcattatcgctaaaggtaaagtgcaggcatttattgccacattagtgatgatgctgttattgcgtggtgtcacgcgtgtttatactgatggcagtccaataaatacaggatttagcgataatgccgacctgtttagctggtttggtattggacgcccctttgggatccccacccctatttggctgatgatgattgtctttttaagcgcgtggtatgtattgcatcacacacgcttgggtcgctatatctatgcccttggaggaaacgaagcagcaacccgtttatctggtattagtgtcgataaaatcaaaattattgtttatgcgctttgcggtttattagcggcccttgccagtgtcattgaagttgctcgtctttcttccgcccaaccaatggctggcaatggttatgaactggatgctatcgccgctgtcgtcttaggtggtaccagtcttgctggcggtaaaggacgcataatgggcacacttattggtgcgttaattttaggctttctcaataatgcactcaatttattaggcatatcatccaattatcaaatgatagtcaaagctgttgtcatcttacttgccgtgctggttgataacaaaaaa

SEQ ID NO: 32359 - DNA, 561 bp, Proteus mirabilis
atgtctttaattaataccccaatcaaaccattcaaaaacatggcatttaaagacggtcaattcgtagaagtgactgaaaaggacgtcgaaggcaaatggagcattttcttcttctatccagctgactttacctttgtttgtccaacagaattaggtgacttagctgatcattatgaagaattccaaaaaatgggtgtagaaatttactctgtttctactgacactcattttactcataaagcatggcatagcagctcagaaactatcggtaaaatcaaatatggcatgatcggtgacccaactggcgcattaactcgtaactttgaaaatatgcgtgaagcggaaggtctggcagatcgtggtactttcgttgttgacccacaaggtatcatccaagcaatcgaaattactgctgaaggtattggccgtgatgcagctgacctgttacgtaaagtaaaagcggctcaatatgttgctagccacccaggtgaagtttgcccagcaaaatggaaagaaggtgatgcaactttagctccatcactggatttagttggcaaaatc

SEQ ID NO: 32360 - DNA, 1008 bp, Proteus mirabilis
atgggagagggttggaatattgcgcttgtgggcgcaacaggtgctgtgggtgaagctattttagagcttctgcaagagcgtgattttcctattggcgaattaacggcgatcgccagtgaagacagtattggcaaaactatccgtgtaaagggtaaaagtgttgcagtacaaggtattcataatatcgaatgggcggatattcaactcgctttttttgccgcgccggttgagattagtgcgcaatacgcacaacttgcagcagattcaggttgtattgttattgattgcagtggtttatttgcgatggagtgggatgtacctttagttgtaccaggggtgaatacatctatgctggcagagtatcgtaaccgcaatattatcgctattgctgatagcatggtaagccaactgttacgcgctatctatccattaaccgaagccgcaggcttaactcgcttgaatgtgacaaatttgatgtcagtatctcgttttggtaaacaagctgttgatgaattagcggggcaaagtgcgcgcttactgaacggtgttcctccagaacttggtcgctttaataaacaactggcatttaatattttaccattgttagttgataatgaaggctctattcaagaagagcgccaaatggttgatcagatccgtaaaatcttgcaagacgatggactacctatctcagtaaccacattacaagcgcctgttttctatggtcatgcacaatctgtgcagttggaaacatcacgtccaatgggaagtgaagaagcacgggaaacattacaagaacatgactccctcaatattagtgatgaaaatgattttccaactcaagtcaccgatgcctccggtaatgttagcttgaacttaggttgcttacgtaatgattatggtgtgcctgaagcgttacaattttggtctgttgcagataacgtgcgttttggcggagcattaatggctgtagaagtggctgaaaaattagtgcaggagcagttttac

SEQ ID NO: 32361 - DNA, 1125 bp, Proteus mirabilis
gtgaaaattctggttgatgaaaacatgccttatgcgcagcagcttttttgccaattaggcgaagtaaaagctgtaccgggtcgccctttacctattgaagagctcgatgatactgatgcattgatggtgagatcgattactaaagtcaatgcatcactattagcgggcaaaccggtaaaatttgtcggcaccgcaacggcaggttttgatcatgttgatacagcatggctagagcaacaaaaaatagcgttttcatctgcgccaggttgtaatgcgatcgctgttgttgaatatgtcttctctgcgttgatggtgtttgctgagcaagaaggatttcaattaacagataaaaccgttggcattgttggcgttggcaatgttggagggagactggcaaaacgcttacgcgcattaggtgtgaatgtactactttgtgatccgcctagagctgatagaggggatgatgaacaatttcattctttagaaacgctattaaagcaggcggatatcctgactttccatacaccgctaaataaatcgggtcgttataacagttaccatttaattaatgagagcaacctcgatattttacctgaaggtcgtattttaattaatgcaagccgtggcgaggttattgataatgctgcattattatcagccttaaaccaaggtaaaaagttacgcgttgttctagatgtttgggagccagaacccgatctttctcttgagttattaaataaagttgatatcgcaacaccacatattgctggctataccttagaagggaaggcgagaggaacaacgcaggtttatgaggcttattgtgattttattggtcaacctcaacacgttgaattatcaacactgttaccaaaaccgttgatctccacaatttctgtacaaggtgaattaactcaaacattactcaaacagcttattcatcttgtctatgatgtacgtcgtgatgatgcaccattgcgcaaagttgccggtatcaaaggggagtttgataagctacgtaagttttaccctgtccgtcgtgaatggtcttcattacaggtggtatgtgataacccgacaacggcgagcttactcaatgctattgggtttaatgcaacacataaa

SEQ ID NO: 32362 - DNA, 918 bp, Proteus mirabilis
atgaaaagtataatcttcccgctgttagcggtacttatttggtcaattaatgcggttgtcaataaagcggcaacatctgtgatagatccagccgctatctcattttatcgctggttcttagcatttttactgatgacgccgtttctattagtccctgtttggcatcatcgtaaaaccgtaaaacaatattggtggaaattatttattctcggcgcattaggtatggggttatatcaaagtttagcttactatgcggcttattatgtgacagcaacctttatgggaatattgaattcacttattccattattaaccgttattattagtatttttgtactgcgtgtcgtgcctactgtagggattgcactcggaactattttatctattagtggacttgtctggttagtcagccacggtgatccttcacaactcctttctcaaggattaggacgtggtgaattaatgatgtttatcgcatcaactgcctatgcattttacggagtacttaccaaacgttggtcaattcctttacctaattggcagtctctatatgtacaaataggttttggtgttttattactaatacctaattttcttaccgcagaaagtattgcattaacaaaagataatgttggattagttatttttgcaggggttggagcctctattttagcgccttatctgtggatcttaggtgtaatgaaattaggtgcaaatacaacctctatctttatgaatttaattcctctatttaccgcaatgatcgctgtagcggtgctaggtgaagagatgcacagttatcattttattggtggaggcgttattttattgggaatattcttagtacaaaaactaagagcaccactgaatttccgtcgtcaatctgtcacaaaaaaagcagattgtcagcaggagatg

SEQ ID NO: 32363 - DNA, 1134 bp, Proteus mirabilis
atgcaatacgttgatgaatttcgtgatcccgaattggccaaagcattattagctcaaatacgtgaaactatttcacaatggcctcatcccatcactcgcccattacagattatggaagtgtgtggcggacatacgcatgccatttttaaatttggtctcgaccgcttattaccacaagagattgagtttgttcatggtcccggttgcccggtatgtgtgttacctatggggcgcattgatgcttgcttagaaattgcagcccgtccagaggtcattttctgtactttcggtgatgcgatgcgggtgcccggtcgtcatggttcaatgcttgatgctcgtcgtcgcggtagtgatatccgtattgtttactcaccgcttgattcattaaaaattgcgcaagataatcctgataaacaagtggtattttttggcttaggttttgaaactaccatgccaagtacggcgatgacgctgcaacaagcgaaattacgtggactgaaaaatttttcgctattttgtcagcacattactatcgtaccgactttacgttgcttattagagcaagaagatgtacgtattgatggttttattgcccccggtcatgtcagtatggtgattggctgcacgccttatcaacctttatgtgatgaatttgaaaaaccctttgtggtgacaggttttgaaccgttggatttattacaagctatactgatggtagtaaaacagcttaaagcaaaagctgagaatgcagattatgttttaagtattgaaaatcaatatagtcgtattgtccctaatgaaggcaataaacttgcgcaaaaagcattgaaagatgtttttatgctaaaagagagcagtgaatggcgtggacttggggagatccctatgtctggtattcaactaacacccgcttatgctgagtttgacgctgaacgacgttttacaccagcaccacaacaagtggctgataatccacaatcacgctgtggcgatgtattaaccggacgatgcaaaccttctgattgcccattatttggtaaaagttgtacaccagaaacggcattaggtgccttaatggtgtcatcagaaggtgcatgtgcggcttattatcagtatcgccgtgaaggtaatata

SEQ ID NO: 32364 - DNA, 1125 bp, Proteus mirabilis
atgcttatgccactggctatcgatatgtatctgccaagtttacctactatagcgcgggattttggcgtgcctggtggtcaagttcagatgacattaagtagctatatctttggttttgctattgggcaaatggtctatgggccgatggcagatagtctagggcgtaaaccggttattctaggtggtgtgattgtttttgcattagcgtcgagcgcttgtgcattatctgactcgatcgatatgctaattggtatgcgttttctacatggatttgctgctgccgctgcaagtgttgtcattaatgctttaatgcgggatatgttttcaagagatgagttctcaagaagcatgtcatttgttgcattagtcatgacgattgctccattattagcgccattacttggtgcttgggtgatgaactggttctcatggcatgctattttttggagtatcgctattgcggcgatcattgctgctgcattaattgcgctctatataccggaaactttgcccaaacagcatcgccaacgttttagcctgcgagtgacatttagtcaatttattagcttatttagagcacgtcgagtactttgctatatcctggcatcgggattttcttttgcagggatgttttcatttttaagtgcagggccttttgtttatatcgaactacatggtattccattcgaccaatttggcttgtactttggttttaatattattttcttgattgtcatgaccagtatcaatgggcgctatgtgcgccgatttggtgcactgaatatgttacgttttgggttaactgtgcagtttttaatgggcatattcttaatattggtggttgcccttaatttacatttttacttccttgttgtgggagtggctatgtatgttggtgggatagccatgataacctcaaatgcgatggccgttattcttgaagactatccacatatggcgggtacggtatcttctttagccggtactatccgttttggtgtgggggctttagttggaaccgctattgcaatgttacctgctaaaactgagtggccgatggtgagttcgatggcattttgtgttatctgtgccatgagtttcttgttacttgctcgtcgttataaa

SEQ ID NO: 32365 - DNA, 702 bp, Proteus mirabilis
atgcgattagataaatttttatcccagcaattggggattagccgtaatttagtagctcgtgaacttagagcggggcttgtgactatagatggtgaaatggtaaaaacaggtgcgactaaaatcacacctgaacaagaagttgcttatgatggcaatgtgttgacacaaattttaggcccgcgttattttatgttgaacaaacctattggttatgtgtgttcaacggatgatcctgttaaccccaccattctttattttattgatgagccactagcacataaattacatgctgcggggcgtttagatattgatactacagggttagtgctattaaccgataatggtcaatggtctcatcgtataacggcacctaaacatcactgtgaaaaaacgtatgtcgtaacgttggaacagcctattgctacggatgtcgccgagaaatttaaaacgggtgttcagttaaatggcgaaaaagaattgactaagcctgcgacattggaagtaataacaccgactgaggtaaaactgaccatcagtgaagggaagtaccatcaagttaaacgtatgtttgctgcggtgggtaatcatgttgtcgcgttacatcgagagcgtatcggtgatatcacattagatgatgctttagcgccaggagaataccgaccgctaacagaagaagaaatcaatagcattcatctacctaaa

SEQ ID NO: 32366 - DNA, 1767 bp, Proteus mirabilis
atggttatggcttttacactcagaccttatcagcttgacgcggttaacgcgacaatcacttattttcgccaacataaaacaccagcacttattgtattacctaccggtgctggaaaaagcttagtcattgccgaacttgctaaaagagcacgtgggcgggtattggttctagcacatgtaaaggaattagtagagcagaaccatagcaaatatgaagcctatggtctatctgcggatatttatgccgccggattacagcaaaaagagagtcgaggcaaggttgttttcggcagtgtacaatcggtagcacgtaacttatcgcagtttgagcatgctttttctctattaattattgatgaatgtcaccgtattagtctgtctgaagatagccaataccaacaagtgatcaaacaacttcaaaccattaacccccaactacgcatcttaggattaacggctactccttatcgtttaccgactggttggatttaccaatatcactatcacggtatggtaaaaggagatgacaattgtttttttcgtgactgtatttatgaattacctttacgctacatgataagtcaccatttcttagtcccaccaacacgtttagatatgcctattttgcaatatgactttagccaagttagaacgagccaaaatggtatttttaatcaagaagatctcaatcgcgaaataaaaaaacaacagcgtattacaccccatattgtgtcacagataattgaatacggtgaacaacgccgtggtgtgatgatatttgcggcaacagtcgaacatgcgacagaaatcttcacattattaccccaaggacaagccgcgttagtcagtgctgagaccccctcttctgagcgtgacgcattaatttcacagtttaaacagcaacagctacgttatatggttaatgttgctgtattaaccacaggctttgatgcgccccatgttgatttaattgctattttacgtccaacggagtccgtcagtttatatcaacaaatagtaggacgaggattaaggttatttgcaggaaaaacagaatgtttaatcttagattatgcaggtaaccctcacgacctttatcttcctgaagtgggtagtaaaaagcccaatccaaatagcaaaccggtacaagtgttttgtcctctctgtcaattcgctaacactttctggggcatagttgatgcagatggcgatattattgagcactatgggcgacgttgccaaggttgggagcttgatgagcaaggacaaaaaaaacagtgtgattatcgctttcgttttaaattatgcccacactgtaatgaagaaaatgatatcgccgcacggcgttgtgtgcactgtaatgaaatcctagttgatcctgatgatatgctcaaagctgctttaaagctaaaaggcgcccttatccttcgctgtggaggaatgcaattactcagtggtcaagatgaaaaaggtgagtggcttaaaatcaactattatgatgaagaaggtacttctgtttcagaacgatttcgtttaaaaacgcctgcccaacgtaaagtatttgaactcaagtttttacacgaacaccagcgcgcccctggcgttccttttgtatggcataacgctcaagatattattaatcagtttgatttattacgttatcctgattttattgtggcacaaaaaaataaaaaagatggcttttggcaaattcgtaataagttatttgactatcatggacgctttcgtaaagcagataccttatat

SEQ ID NO: 32367 - DNA, 282 bp, Proteus mirabilis
atgttaactattaatgcaacagtacgtaaagagcagggtaagggtgcgagccgccgcctgcgtgtggctaaccgttttccagctatcgtttatggcggaaatgaagagccaatcgctatcgatttagatcacaacgaagttatcaaccaagaacacaaatctgagttctacgctgatttcgttaacctcgttatcgatggtaaagcaactaaagttaaagttaaagcagtgcaacgtcacgagtataagccaaaaattactcatattgacttcctgcgcgct

SEQ ID NO: 32368 - DNA, 663 bp, Proteus mirabilis
ggtgatggcaatatgctaggcgccgcccgtgttttatcgcgctataatatcaaagtgattggtgtaaaccgcggtaacttaggttttctgaccgatcttgatcctgataacgcattacaacaattaactaatgtattagcaggccattatcgtgaagaaaaacgcttcttacttgaagctcgtgtctgtgctgaaggacaaagaacacggattggcaccgccattaatgaagtcgtgcttcaccccggcaaagtggcgcatatgattgagtttgaagtctatattgatgatcgttttgcattttcacaacgttctgatggtctaattattaccacaccaaccggatcgacggcgtattcactctctgcaggtggccctattcttacacctaatcttgatgcgattgcgctggttccgatgtttccccatacgctctcttcacgccctttagtcattagtagcgacagtcaaattcgcttaaaattctcacaaaccaatattgattatgaagtcagttgtgatagtcagcttgtattacctatcaaagaaggggatgaggtaatcattaagcggagtcgacaaaaacttaacttagtccacccaactgactacaactattttaatacactcagctcaaaattaggttggtcaaaaaaaatgttc

SEQ ID NO: 32369 - DNA, 771 bp, Proteus mirabilis
gtgggaaaatggtcggctaattatatcgttgagaaaatcaacgcatttgcgccaagcgccgatcgtccttttgttcttggtttacctactggtggtacgccattagcaacgtacaaagcgctaattgaattacatcgtgcaggtaaagtaagtttccagcatgttgtcaccttcaatatggacgaatatgttggcattccagcagatcacccacaaagttatcgtacttttatgtatgagaacttttttaatcatattgatattaaagatgaaaatatcaatttattaaacggtaatgcaacagatccacaagcagaatgtgcacgttatgaggcgaaaataaagtcttatggcaaaatcaatctgtttatgggaggtgttggtaatgatggtcatatcgcttttaatgaacccgcctcatcactctcttctcgtacacggatgaaaacgctgactgaagatactcgtctcgctaattcacgattcttcgacaacgatatcaataaagtacctaaatatgcgctaactgtcggtgtagggacattattagatgcagaagagttaatgattttagcgactggcatcaataaggctcaagcagtacaggtggcaacagaaggtgctgttaatcatctatggactatctcttgcgtgcaattacaccctaaagcaattttagtctgtgatgatccggcgacaatggaactgcgtgtgaaaacactgcgttattttcaacaaattgaagcgcaagagcgccagcaataccaagat

SEQ ID NO: 32370 - DNA, 2043 bp, Proteus mirabilis
gtgaatattttaagttatctgcaaaagataggacgggcattgatggtgcccgttgcgacattgcctgctgcagcaattctgatgggaataggctactggattgatccggtaggctggggaaacgataatgcgctagctgctttactgatcaaatcaggtgctgccattatcgataatatgtcagtattgtttgcgataggtgttgcttatggtatgtcaaaagacaaagacggggcggcggccttaactggctttgtcggctttttagtggtgactacactttgttcacctgctgcggtatcgatgatcaaaggtctaccacttgcagaagtgcctgtggcttttggtaaaataaacaaccagtttgtcggtattctggttggggtactttcagctgagctgtataaccgctttagcagtgtcgaattacctcgtgcattatcattttttagtggtcgtcgcttagtgccgatcctcacgtcattcttgatgattatcgtcgcctttattctaatgtatatctggccggtaatttacggcggcttagtgagctttggtgaaagcattaaagatatgggggctttgggcgccggtatttatgctttctttaaccgcctattaattcctgttggtttacaccatgcgctgaactctgtgttctggtttgatgtggcgggtattaatgatattcctaacttccttgctggtcagcaagcgattgatgcgggcttggcaacggtcggtgtgacaggacgttatcaagcaggtttcttcccagttatgatgtttggtttaccaggggcagcactggctatttatcattgtgcgcgcaaagagcataaagcaaaagttgcgggtatcatgatggctggggcatttgcggcattctttacggggatcactgaaccgcttgaattctcctttatgtttgttgctccagtcctttatgttattcacgcattcttaatggcgatttctgtttatattgccgcaagtatggagtggatttcaggctttggctttagtgcgggccttgtggatatgttcttatcttcacgcaaccctctggcggttaaatggtatatgttgattgtgcaaggtatcgcattcttcttcatttactatggtattttccgtttcactattactaaatttaacctgaaaacaccgggtcgtgaagatgaagtggcgggggatgaaaccgcagacggctatgatgaagatatcaaagccgtccccactaatagcaaagaagcagtgcaacaagaagcacgtcaatatatcgctgcagttggtggctcagataacttaactggtattgatgcttgtattactcgtttacgtttaaatgtaaaagatgccagtgtagtcaacgatgcttacgcaaaacacctaggtgcttcaggggttattcgcttaaataaacagagtgttcaagtgattgtgggcacacgggctgaaattgttgcaagtgccatgcgtgatgtattagcacaaggcccagttgccgcttatgctggtagacatacagataacgcggtatcgacagaaaaaacatcagaaaaacagactaataatgatgccaaagtcattcttgaaatggtcgcgccatttgatggtgaagtggttgcattaaaagatgtgcctgatgaagctttctcaagcggtgtcgtgggagatggtcttgctattaaacccacatcaaatattgtgatggcacctgctgccggtacggtagtaaaaatctttgatactaaccacgcattttgcattgaaacggataacggtgttgagattatcgtccatatggggattgatacggtcgcattaggaggaaaaggctttaaacgtctggttgaagaaggtacagaggttaaactcggccagcctatcttagagctagatcttgagtatttaaacactaatgctaaatcaatgataagtccggttatcatcagtaatatcgatgactttgataaagtgagtgatattgcatccggccaagtgacggcaaataacaccataatctataaagtattaaaa

SEQ ID NO: 32371 - DNA, 876 bp, Proteus mirabilis
atggacaccaatttatctactcgtcttaataaatatatcagtgaaagcggtatctgttcacgtcgtgaagccgaccgttatatcgagcaaggtctggttcttatcaatggtaagcgcgcaggcattggcgatcgcgtaacggcgggcgatgaagtgaaagtgaatggacgattaattgaagcgcaagataattctgagctggtgttgattgcactgaataaacctgtaggtatcgtcagtaccacagatgaaggtgagaaagataatattgttgattatgttaaccatagcacccgtattttcccaattggtcgtttagataaagattctcagggactgatttttttgactaaccatggtgatctggtcaataaaatcttacgggcgggtaactcccatgaaaaagagtatttggtcacggttgataaacccattactgatgaatttattcgcggtatgggggcgggtgttcctattctgggacaaaaaaccaagaaatgtaaggtgaaaaaagaagccgcaatggtatttcgtatcaccttagtacaaggtctaaaccgtcaaattcgtcgtatgtgtgaatattttggttatgaagtcaccaagcttgaacgtatccgtattatgaatgttagtttggcgggattacctgtcggggaatggcgtgacttaacggatgatgagctgataaagctatttgatgctattgaagcatcaagctctgaagcccctaaacagaagcaaaataaacctaagaaacagataagtagtaatgcgaaagcgttagggatccatattccgaaaacaaaaaccaaagagacggaaaataatacgcgtaaacgctttgcacaaccagggcgtaaaaagaaaaaacgt

SEQ ID NO: 32372 - DNA, 1407 bp, Proteus mirabilis
atgggtaaaacattatatcaaaaaatttacgatgcacatgttgtcagagaagtagcgaatgaaacacctattatatatatcgatagacatttagtgcatgaagtgacttcacctcaagcttttgatggtttaagaaccaaaggtcgtgctgttcgtcaacccaacaaaacctttgccacaatggatcacaacgtttcaactcaaaccaaagatatcaacgcctgtggtgatatggcgcgtattcaaatgcaagagttaatgaaaaactgtcaagaatttggtgtgaccttgtatgacttaaatcacccatatcaaggaattgttcatgttatggggcctgaacaaggcttaactttaccaggcatgacaattgtttgtggcgactcacatacagcaacacatggtgcctttggtgcattagctttcggtattggcacttctgaggttgagcacgtattagcgacacaaaccttaaaacaatcacgtgctaaaaccttaaaaatcgaagtacaaggcaaaacagccaatggcatcacggcaaaagatatcgtattggcgattatcggaaaattgggtagtgcgggaggtacggggtatattattgaatttacgggagaagctattgaagctttgagtatggaagggcgaatgacgttatgcaatatggcgatagagatgggggcaaaagcaggcttagttgctcctgatgagactacatttgcttacttaaaaggacgtcaatttgcccctcaagccccattgtgggatgaagctgtcgcctattggaaaacgttaaagtcggacgaagatgctatttttgatgctactgtgacgattaatgccgcagagattgcaccacaagtgacttgggggacgaatccgggacaagtgattgctattgaccaaattgttccgcgattgaacagttttaacgatcctgttgaacgagctagcgccgaaaaagccttagcttatatgggattaactgaaggtgttaacttaactgatattacaatagataaagtttttataggctcttgcactaactctcgtattgaagatttacgcgcagcagcaaagatagctaaagggcataaagtcgcctcccatgtacaggcaattgttgttcccggctcaggccctgttaaagcccaagcagaagcagaaggtttagataaaatttttattgaagccggttttgaatggcgtttacccggctgctcaatgtgcttggcaatgaacaatgaccgattaaatcccggagagcgttgcgcatcgaccagcaatcgtaattttgaaggtcgccaaggtcgtggtggcagaactcatttagtcagtccggcaatggccgctgccgccgccattcatgggcatttcgctgatattcgcacttttgcaacagtatca

SEQ ID NO: 32373 - DNA, 1323 bp, Proteus mirabilis
atggaactgaaaaattgtcctcttattaacgaaattaaacgacaaattggctctcatactcatattttagtgggttttagtggtggagttgattcaaccgttttattgcatgggttggtttgcttacgtgataaatatcaacttcctttagaattaacggcaatttatgttcatcatggattgaattcaaaagccgatgattggctcacgcattgcgaacatttttgtcataactggcaggtcagttttatcagtgaaagagtacaagtcaatgggaaagaaggggggattgagcagggtgccagagaagcgcgctatcaagcttatcgccaatatttacagcctaatcaagttttagtgacggcacaacatcaagatgatcaagcggaaactttcctattagcgcttaaacgcggtagtggaccggcagggttgtcttcaatgcctgcaaaaatgccttttgaacaagggtatttattacgaccattacttaatattacacgtgaacaaatcgaagcttatgcacatgagcacggtttattatggattgaggatgatagtaatcaagatgatcgctatgatcgcaatttcttacgtttacatgttatgcctctattgactcagcgctggccacatttttctcaagcagttactcgtagtgccgcactgtgtggtgaacaagaagcgctcttagatgagttactcgatgtagaattgcagcaattgattgatgagcatcagagtttagatatcaatttattgtcccgctgtagcgaaataaaacgtaatgcattgttgcgtcgttggtttgctaaatgtaataaaagcatgccatcaagatctcaattgtcgcggctatggcaagaagttgctttagctaaagcagatgcagagccacggttacgttttttccaagatgaagttaggcgttatcaacaacgcctctatcttgtgccagttatggaagaactaacggatagggttatcgaatggtcattatcacaacctttaattttgcctaatcagttagggatattagcggtgagtcgtgatagcggtaaaacaatctgcagagcaccgttagcagatgaaaaagtgacggttcgttttggcttaacggcttcatctttacgtattgttgggcgagatttggccagatcaagcaagaaaatttggcaagagcttaatattgccccatggcaaagaactcgtatcccattgatttattataacgatacattaattgcagcggttaatacttttgtgactttagagggaaatgcaacaacagaacaaagtataacaattgagtggcaagcgtcg

SEQ ID NO: 32374 - DNA, 1713 bp, Proteus mirabilis
atgcgtactagccactatttgctctctactttgaaagagacgcctgctgatgccgaaattgtcagccatcaactcatgcttcgcgcaggtatgatccgtaaactcgcatctggtctttatgattggatgccgaccggtgttcgtgtcctgagaaaaattgagaaaattgttcgtgaagagatggacaacgcaggctcacttgaaatttcaatgccggttgttcagcctgctgatctatggcaagaaagtggccgttgggaacaatatggcccagaattgttgcgttttacagatcgcggtgagcgtccttttgttttaggtccaacccatgaagaagtggtgaccgatattgttcgtaatgaaatcacctcttacaaacaactaccactcaacctttaccaaattcaaactaaattccgtgatgaagtacgcccgcgctttggtgttatgcgttcacgtgagtttatcatgaaagatgcctattcattccatatctctcaagagtctctacaagagacttacgacagaatgtatcaagcctatagcaatatctttactcgtattggtttagacttccgtccagtattggctgatacaggctctattggtggtagtgcctctcatgaattccaagtattagcagatagcggagaagatgatatcgtattctcaacagcatctgactatgctgctaatattgaattagcagaagcggttatgccagcaacacctcgttcaccagcaacagaagagttgcgtttagtagatacaccaaacgcaaaaactattgctgaattagttgaacaatttaatctgcctattgaaaaaacagttaaaacacttattgttcatgcaactgaagaaagtggtcataaattagtggctttattagtccgtggtgatcatgagctcaatgaaataaaagcagaaaaatgtagcattgtcgcttcacctttagttttcgcgactgaagaagagatccgccaagctgttaatgcaggtccaggctctcttggtccaattaacttgccattaccaatcattatcgatcgcgctgtatctgttatgagcgattttggtgctggtgcaaatattgatggtaaacactactttggtattaactgggagcgtgatttacctcttgctgaaatggcggatatccgtaatgttgtcgaaggtgatccaagcccagatggtaaaggtactttacttatcaaacgtggtattgaagtcggtcatatcttccaactaggtaagaaatattctgaagcattaaaagcgacggtacaaaacgaagaaggccataaccaagttgtgactatgggttgttatggtattggtattactcgtatcgttgcagcggcaatcgaacaaaatcacgatgctcgtggtattatctggcctgatgctatcgcacctttccaagttgccattttaccaatgaacatgcatcgttcttatcgtgtaaaagaagtagcagagaaactctatgctgacttacgtgcacagggtattgatgtattatttgatgatcgcaaagagcgcccaggtgtgatgtttgcagatatggagctgattggtgtaccacacaccatcgtgattggtgatcgtaatctggataacgaacaagttgagtataaagcacgccgtagtgatgataaatcgctggtcaatgtgaatgatgttgttgcctttattaaagagcaactggtt

SEQ ID NO: 32375 - DNA, 705 bp, Proteus mirabilis
atgaatagctaccaaataacatctatagggcatattatcagcccttataaagagaaatttgccgttcctcgccaacctggattagtccaggatggcgtaggccagctaatactacacacaccttataatcatcctgatgcagtaagaggcttagaacaatttagccatctttggttattatttatttttcatcaaacagcgcaacaaggttggcatccattagtgcgcccaccaagattaggggggaatagcaaactcggggttttcgccactcgctcaacttttcgccctaatgctatcggcatgtcattagtcgagctaaaagatatcattattgaaaagcaatcggtgattttgcaactaggcagtctagatcttattgatggaacccccattattgatatcaagccgtaccttccctatgctgagtctattgcggatgcaacagcaggctttgcccaatatgctcctcatgaagagatggagattcttttttctgaagatgccacacagcagttacaatattactctcatcaatatcctcatcttatgcgatttatcactcaagtattgcaacaagatccgcgtcctgcttataaaaaaagcgaacaaagtgatagagtatatgccgtgcatttactggattttaatattcgttggcaagtcaatgggcagcaaacacttgttcttagtatagaaccgcgc

SEQ ID NO: 32376 - DNA, 918 bp, Proteus mirabilis
atgaaaaattgtacgttaggtaatgagactgataattctttgatctcaaatgcatttggttttttacgttttccactgaattttcaaccttatagcagtgatgctgattgggtgatcactggggtgccttttgatatggcaacttcaggtcgtgcaggtactcgccatgggcccggcgctattcgccagatttcgactaacttagcgtgggaaggacatcgctggccttggcacttcgatatgcgtgaacgcctcaaagttgttgattgtggtgatttagtatttaacttcggtgatgcacaagatatgagtgataagctacaagctcatacggaaaaattgctagcagcaggtaaaagatgtttaacctttggtggtgatcactttgtgacattacctctattacgtgctcacgctaaacactttggcaaaatggccttggtgcattttgatgctcataccgatacttatgctaatggcagtaagtttgatcacggtacgatgttctatcatgctcctaatgaaggtttgattgatccacagcattcagtgcaaattggtattcgtaccgagcatgacactaataacggctttactgtcttggatgctgcacaagttaatgatcgtggcgttgatgatttagtcgcgcaaattaaagagattgtgggttcacttcctgtttatttgacttttgatattgattgccttgatcccgcatttgcaccgggtacaggaacaccggttgtgggtggattaaccacggataaggcgctgaaaatgctgcgtgctttacagccgttaaatattgtaggcatggacttagttgaagtatcgccagcgtatgaccaatcagatattactgcccttgccggagcaaccattgcacttgatatgctatatctgcaagcggctaaaaaa

SEQ ID NO: 32377 - DNA, 1158 bp, Proteus mirabilis
atgactacacacctttttacttctgaatcagtatcagaaggtcatccagacaaaattgcggatcaaatttctgatgccgtattggatgcaattttagaacaagatccaaaagcacgtgttgcctgtgaaacttacgttaaaacaggcatggtgatggtaggcggagaaattaccaccaaagcttgggttgatatcgaagagatcacacgtaaaacagtacgtgaaatcggttataccagttcagatatgggctttgatgctaattcctgcgccgttatcagtgcgattggtaaacaatccccagatatcaaccaaggtgttgaccgcgcagatccccttgaacaaggtgccggtgaccaaggcttaatgtttggttatgccactaatgaaactgacgttctgatgccagcgcctattacttatgctcaccgcttagtccagcgccaagctcaagtacgtaaaaatggcacactaccatggttacgtccagatgctaaaagtcagatcactttccaatacgacaataacaacattgttggtattgatgccgtggttttatcaactcagcatgctgaagatatttcacaaaaagacttacatgaagcggtaatggaagagatcattaaacctattctgccaacagaatggttaaatgaacaaaccaaatatttcattaacccaacaggtcgttttgttatcggtggcccaatgggcgactgtggattaacaggtcgtaagatcattgttgatacttatggtggtatggcacgccacggcggtggggcattctctggtaaagatccttccaaagttgaccgttctgcggcttatgctgcacgttatgttgcaaaaaatattgttgctgcgggcttagcagatcgctgtgaaattcaagtgtcttacgctattggtgttgcagagccaacatctattatggtcgaaacatttggtactgaaaaaatccctacctcacaactgatcttattagtacgtgagttctttgatttacgcccttatggcttaattcaaatgctggatttactgcatccgatctaccaaaaaacagcagcatacggtcattttggtcgtgctgaattcccttgggaagcaacagataaagctgagattttacgtgaagctgcgggtttaaaataaatt

SEQ ID NO: 32378 - DNA, 1056 bp, Proteus mirabilis
atgaatatttattgtattaaattgaatataaattcaattataggatacttatctatgaaccctttctaccaaagatcatttttacgtttgctcgacttctcatcagcagaaatacaacaattactggctttatcattagaactcaaacaagcaaaaaaatcaggccatgaacagcagtatctcacaggaaaaaatattgcgctgatttttgaaaaagattccacccgtacccgttgtgcctttgaagtggccgcctttgatcaaggtgcgaatgtgacctatctcggtggaggaagccaaatcggtcataaagaatcgataaaagataccgctcgcgtgttaggacgtatgtatgatggtattcaatatcgtggttatggccaaaaaacagtagaaatgctggcaaaatatgctgatgtaccggtttggaatggattaaccgatgagtttcaccccacacaattattagcggatttgctcactattactgaacatcaaacaaaaccattatcagaaaccatttttgcttatcttggtgatgcacgtaacaatatgggcaataccctactcgaagcggctgccttaacaggaatggatttacgcctagtcgcaccaaaagcgtgttggccacaagcagaattagtcgctgaatgccaaaatatcgctcagcaaaatggggggaaaattaccttaactgaaaatgtcgcagaaggcgttaaaaacgccgattttctctacacggatgtgtgggtatctatgggagagccaaaagaagtttggaaagagcgtattacgttactcaaaccttatcaggttaatatggatgtaatcaaactaacgggtaatccagacgttaaattcctgcattgtttaccggcttttcatgatgaagagacaacaatggggcaagcattagcagaagaatttggcttatatggtggttttgaagtcactaacgaggtttttgaatcaaaacacagtattgtatttgatgaagcagaaaatcgtctacacacgattaaagcggttatggtggcgaccttagcaaatcctttt

SEQ ID NO: 32379 - DNA, 2847 bp, Proteus mirabilis
atgtggcattctagtcatatcaatgaacctcagaacaatgatgaacagattatggtccagatagcagaaaacccctttatccttgtagatggctcttcatacctttatcgtgcctatcatgcttttcctccgctaactaatagcaaaggagaacccacaggggcgatgtatggtgtgttaaacatgctacgcagcctaataattcagtataagcctagtcatgtggcggttgtgtttgatgctaaaggcaaaacattccgtgatgagttgtatgaggaatataaatctaatcgcccaccaatgccagatgatctgcgtgagcagattgagcctttgcatgaaatggttcaagcgatgggcttaccgttactttctattactggcgtcgaagctgatgatgtgattggcacattggcattaaaagcagccagtgatggtcgtaatgtgttaatcagtaccggtgataaagatatggcacagctagttacgcccaatatcacacttatcaacacgatgacgaatgttattttaggccccgatgaagtgaaagaaaaatatggggtgccaccggagttgattatcgactttctcgcactgatgggtgactcatcagataatattcccggtgttccaggggtaggtgaaaaaacagcattagggctattgcaaggacttggtagcttagaggatatttatcaacagcttgataaaatagccacattgagtttccggggtgcgaaaacacttggcgccaaaatggttgaacatgagaaagttgccaaactttcttatcaattagcgacaattaaaacagatgtagcgcttgataaaacctttgatgacttagtggttaatgaacctaatttagataagttacttgaaatgtttacgcgttatgaatttaaacgctggataagtgacttacaaaatggtggttggttagctcaacgcagtagccgtaaagcgccagtcccctatagtgcagaagtcgcaacacccaaagagcagccagctgcagacaatttcccggttatctctcaagagaactatgagtctatattgactcatgaaagcttaatgcgctgggttgaggtactgaaaaaagcgcccgcctttgcttttgatactgaaacagatagcttgaataatattgatgcacgtttaatcggtctgtcatttgcggtagagcctggcaaggccgcttatattccattgcgtcatgattatctagatgcaccagagcaattacctgttgatgaggtactaactgctttaaaaccgattttagaagataaaaccatcttaaaaattgggcaaaacctgaaattcgaccgcggcattatggaaaatgaaggcatcgaattaaacggtatttattttgataccatgttggagtcttatgtcttaaatagtgtgagtagccgccatgatatggataccttagcggaaaagcatttaaatcataaaacgacgacatttgaagagattgctggtaaaggtaaggggcaacttacttttaatcagattgaggttgaacaagcgaccttatatgcagcggaagatgctgatattaccttgttactgcatcaagcgctttatcctcaaatagaggcgattgcaccgctaaaacacgtttatcatgatattgagatgccattagtccctgtgctttcacgcatggagcgtaagggcgtattgattgacgcacaagtgcttgccatgcaatcccaagaaatcactcaacgtttagctgagattgaaaaagagacattcgcgttagcagggcaagaatttaatctctcttcacctaagcaattacaagagattttatttgaaaaactcaatcttcctattatcaagaaaacaccaaaaggtgctccttcaacaaatgaagaagtgttagaagcgttagcgcatagtcatgagttacctcgtttaattttagaacatcgtggattggcaaaattaaaatcgacttatacggataaattgccgttgatggtcaatagtaaaactaagcgggtgcatacttcatatcatcaggcggtgactgcgacaggacgtttatcttctcgtgatcctaatctgcaaaatattccagtaagaaatgaagaggggcgtcgtattcgccaagcgtttattgcccgtgatggttttaaaatagttgctgccgactattctcaaatcgaattacgtattatggcgcatttatcgcaagataaaggtttgcttgatgcttttgctcaagggaaagatattcaccgagctactgcatctgaagtgtttggtatacctttagacgaagtcaccgctgagcaacgccgtagcgctaaagcaattaattttggtctgatttatgggatgagtgcttttggtttatctcaacaaattggtgttgaacgaaaagaagcacagcgatatatggatctctattttgaacgttatccaggggtattagattatatggagcgtacccgcaaacaagcgtcacagcaaggctatgtggaaacgttagatggacgccgtttatatctgccagagattaattctaaaaatgcgatccgacgtaaagcatcagagcgtgaagcgattaacgcacctatgcagggaacagcagccgatatcattaaaaaagcaatgattgcggtggataattggatctgtcatgaatgccctgatgatgtacatatgattatgcaggtacacgatgaattagtgtttgaggtacgagagtcatatttagaaaaagcaaatgcgatgatccataaactcatggaaagtagcatggagcttgctattccactgaaagtcgaagtcggagtcggtaataactgggatgaagcccat

SEQ ID NO: 32380 - DNA, 822 bp, Proteus mirabilis
atgcaagcattacaatctattattgataacgcctttgaacaacgcgctgaaatcacaccagataatgttgaaccacaggtacgcgatgcgattaataacgttatcgctcaactagacagtggaaaattgcgagttgctgagaaaattaatggtcagtgggttactcatcaatggctaaaaaaagcggttctactctcttttcgtatcagtcacaatcaagtgatcgacggtagcgaaagccgttattttgataaagtgccaatgaaatttgcaaattacgatcaagctcgttttgaaaaagagggatttcgtgttgtgccacctgctgccgtcagacaaggggcctatattgctcgtaatacagttctaatgccttcttatgtcaatattggtgcttatgtggatgaaggaagtatggtggatacatgggcaaccgttggttcatgtgcgcaaattggtaaaaatgtccatttatccggtggcgttgggatcggtggcgtattagaacctttacaagctaacccaaccattattgaagataactgctttattggagcacgttctgaaattgttgaaggtgtgattgttgaagaaggctctgtcatttcaatgggtgtttatattggacaaagtaccaaaatttatgacagagaaactggcgagatccattacggccgtgttcctgctggttcagtggtggtttctggtaatttaccgtcaaaagatggtcgttacagtttgtactgtgctgtgattgtaaaaaaagtcgatgctaaaacacgtggaaaagtgggtattaatgaattgttaagaactatcgac

SEQ ID NO: 32381 - DNA, 468 bp, Proteus mirabilis
atggatattcgtaaaattaaaaaactgatcgagctagtcgaagagtctggcatttctgaactggaaatttctgaaggtgaagagtcagtacgcatcagtcgcaactctggcgttcagggtcaaatggctcctcagcaatattttgcggcaccagcagcacctcaacctgcattagcagctgctgtggcacctgtagcaccagaaacaccagcggctacagcaacgcaagaaattagcggccatgttgttcgctcaccaatggtaggtaccttctatcgttcaccaagcccagaagcaaaagtctttgttgaagtgggtcagcaagtcaatgttggcgatacactgtgtatcgttgaagcaatgaaaatgatgaaccaaatcgaatctgataaagcgggcgttgttaaatctatcctttgccaagatggcgatactattgagtttgacgatccactctttgtcatcgaa

SEQ ID NO: 32382 - DNA, 1041 bp, Proteus mirabilis
atgtttaaaaaatttcgtggcatgttttccaacgatctgtctattgacttgggtaccgccaataccctgatttatgtcaaaggacaaggtattgttctcgatgaaccttctgtagttgcgatccgccaagatcgcgcaggtacatcaaaaagtgttgcagccgtcgggcatgaagccaaacagatgctagggcgtacacctgggaatatcgcagctattcgtccaatgaaagacggtgttattgctgatttttatgtaaccgaaaaaatgcttcaacacttcataaaacaggttcataacaacagctttatgcgtccaagccctcgtgtattagtgtgtgtacctgttggtgcgacacaagttgagcgtagggctatccgcgagtcggcacttagtgcgggtgctcgcgaagtctttttaattgaagaacctatgtctgctgcaattggtgcaggtttaccggtatctgaagcgacgggttcaatggtcgttgatattggtggtgggactacagaagttgcggttatctcattaaatggtgtggtttattcctcttctgtacgtattgggggagaccgttttgatgaagctatcattaactatgtacgtcgtaactacggttcgttgattggtgaagcaaccgctgagcgtattaagcatgatattggctcggcttatccttcagacgaattaaatgagattgaagtacgtggacgtaatttagcggaaggggtaccacgtagctttactttaaattccaatgagatcctcgaagccttacaagagccattaacaggtattgtaagtgctgtgatggttgccttagaacagtgtccgccagagcttgcttctgatatttcagaacgaggtatggtcttaacgggtggtggggcactgttacgtaacttagaccgtttattaatggaagaaacaggtattcctgttattgtggctgaagatccgcttacctgtgtggctcgtggtggtggtaaagcattagaaatgatcgatatgcacggtggcgatctatttagcgaagat

SEQ ID NO: 32383 - DNA, 816 bp, Proteus mirabilis
atgaataatagagtccatcaggggcactttgcccgcaaacgcttcgggcagaactttttaacagacagctatattattgaaagtattgttgaatctatttatccacaacccggtgaagccgttattgaaatcggtcctggtttaggcgcgcttactgagccggtgggggaaagaatggataaaatgacggtcgtcgaaattgaccgtgatttagctgcacgcttagaagttcaccctacattaaaagataagctaaccattattcagcaagatgcgatgacgattgattttgcccaattagcaaaagagcgtcagcaacctctgcgggtttttggtaacctaccttataatatttcaacgccattaatgttccatctatttagttttgctgatgccatttctgacatgacttttatgttgcaaaaagaggtggttaatcgcctagtggcaagtcatggtagtaaaacttatggccgcttaagtgtcatggcacaataccactgccaagtcattcctattattgaagtgccaccaagctcatttaagccagccccgaaagtagattctgccgttgtgcgtctgatcccttataaggaaaaaccctatccggtgacagatattgctatgttaagccgtatcacatcacaagcctttaatcagcgccgtaaaacgttacgtaatagcttaggtggactacttacagcagaagatatgctggcattagatattgatcccactgcacgcgcagaaaatatttctgttgagcaatactgtaaagtggcaaactggttatcatcacaacagcaacacgctgag

SEQ ID NO: 32384 - DNA, 171 bp, Proteus mirabilis
atgacgtcaagtcatcatggcccttacgagtagggctacacacgtgctacaatggcagatacaaagagaagcgacctcgcgagagcaagcggaactcataaagtctgtcgtagtccggattggagtctgcaactcgactccatgaagtcggaatcgctagtaatcgtagat

SEQ ID NO: 32385 - DNA, 957 bp, Proteus mirabilis
atgagtcttaattttctggattttgaacagccaattgccgagttagaagcgaaaatcgattcgctaaccgcagttagccaacatgatgaaaaaattgatattaatattgatgaagaagttgcacgcttaagagaaaaaagtttagaacttactcgaaaaattttctctgatcttggtgcatggcaagtggcacaacttgctcgtcatccattaagaccttatacccttgattatattaatcgtgtttttactgattttcaggagttggcgggcgatcgcgcttatgctgatgataaagcgattgtcggtggtattgctcgtttagacggtcgtccggtgatgatcattggtcatcaaaaaggacgtgaaacgaaagaaaaaattcgtcgtaattttggtatgccggctcctgaaggttatcgcaaagcgctgcgtttaatggaaatggcacaacgttttaaattacctattattacttttattgatactccgggagcttatccgggggtgggcgctgaagagcgtggacaatcagaagcgattgctcgtaatttaagagaaatgtctcgctttggtgtgccaattatttgtaccgttattggcgaaggtggctctggtggtgctttggcgattggtgtgggtgataaagtgaatatgttgcagtacagcacctattccgttatttcgccagaaggttgtgcttctattctatggaagagtgctgataaagcaccattagctgctgaagctatggggatcacggcaaatcgtttaaaagaattaaaattgattgatacggtgatccctgaacctttaggtggtgctcatcgtcattatgatgaaatggcagcatcactaaaagcacagctaaaagctgatttagcgcagttagatgagtttgatacagaagagctaactaaccgccgttatcaacgcttaatggaatatggctattgc

SEQ ID NO: 32386 - DNA, 3432 bp, Proteus mirabilis
atgatcgatggattggcaaaaacagggcctcttgtgaagaaagtggcttcgctgggtatgcctgcttttgcaattacagatttcactaacttatgtgggttagtgaaattttatggagcggctcatggtgccggtatcaaacctattgttggtgcagatgtctatctggaaacggaactattaggtgatgaatacgcgcatttaaccattctcgcccgtgataatgtgggatatcaaaacctaacactattgatttctgaagcttataaacatggttatggtgctgccggaccggttatcaaacaagagtggttaacaacatataaagaaggtctcttgttgctttctggcggtagaatgggagatgttggtaaattcctactacgcggtaatcgagctttagttgagcaatgtcttgaatattatcaaacgcactttcctgatagctattatttagagcttattcgtactgggcgtccggatgaagagagctacttacacgaagctgtagccttagcatcagaaaaagggcttcctgttgttgcgacaaatgatgtccgttttctggatagtgatgattttgatgctcatgaaattcgcgtggctattcatgatggtttcacattatccgatcctaaacgtcctaaacactacagtcctcagcaatatatgcgcacagaagaagagatgtgtgagctttttgctgatattcctgaagcattagaaaacagtgttgaaatagccaaacgctgtaatgtgaccattcgtttaggtgaatactttcttcctcaattcccgaccggggatatgagtacagaagatttcttaattaaaaagtccaaagagggcttagaagagcgccttgcctttttatttcctgatccgcaagagagagaaaagcgacgtcctgaatacgatgagcgccttgagattgaacttaaagttattaaccagatgggattccccggttactttttgatagtgatggaatttatccagtggtctaaagataacggtgttcctgtagggccaggacgtggttcaggtgctggctcactggtggcttattcgcttaagataacagatctcgatcctcttgagtttgatctactgtttgaacgttttcttaatccagaacgtgtatcaatgcctgactttgacgttgatttctgtatggagaagcgcgatagagttatcgatcacgttgcggatatgtatggtcgtgatgccgtatcacagatcattacctttggtactatggcggccaaagctgttattcgagatgttgggcgtgttttaggacacccttatggcttcgttgatagaatttccaagcttgttccccctgatccgggaatgacgttagaaaaagcctttgccgccgagcctcagttacctgaaatttacgaagctgatgaagaagtgaaatcgcttattgatatggcgcgtaaattagaaggggtaacgcgtaatgcgggtaagcatgccggtggtgtcgttatttctccaaccaaaattaccgactttgcgccactttattgcgatccggaagggaataacccggttacacaatttgataagaatgatgttgaatatgccggtcttgttaaatttgacttcttagggttaagaacgctgacgataatcaactgggcattagaaatgattaatgctcgacgggctaaaaaatcacttgagcctgttgatatatcagccatttcattaaccgatcagcgtagcttcgatatgttgcaacgctctgaaaccacagcggtattccaattggaatcccgtggcatgaaagatctgataaagcgtctgcgaccagactgcttcgaagatatgattgcgttagttgcactgtttcgcccagggcctttacagtcggggatggtggataactttatcgaccgaaaacacggtgttgaagagatttcctaccctgatgttaaatggcaacatgagagcttacagcctgtattagagccaacttatggtgttatcttgtatcaagagcaagtgatgcagattgcacaggtacttgccggttataccttgggtggcgcggatatgttacgacgcgcgatgggtaagaaaaaacctgaggagatggcaaaacagcgctctgtgtttgaagcgggggcgattaaaaatggtgttgatggcgaattagccatgaaaatctttgacttggtagagaaatttgccggttatggatttaacaaatcgcactcagcggcttatgccttagtttcttatcaaacgctctggttaaaagctcactatcctgcggagtttatggcggcagtcatgactgccgatatggataataccgaaaaagtggtcggtctggtggatgaatgttggcgaatgggtttaaaagtccttcctccagatattaatagtgggctttatcatttccatgttaatgatgaaggcgaaatagtgtatggcataggggccatcaaaggggttggagaaggccctattgaggcaattgtcgaagcgcgtcaacaaggtggtcattttaaagatatttttgatctctgtgcgagaacagaaaccaaaaaattgaatcgccgagtgatggaaaaactgataatgtcaggcgcatttgataaattagggcctcaccgtgcagcattaatgtcttcgctggaagatgccttaaaggcggcagatcaacacgcaaaagcggaagccattgggcaatccgatatgtttggtgtattggcagaagccccagagcaagtggaacgttcttatgccaatgtacctaaatggccagatcaagttgttttagaaggtgagcgagaaaccctcggtttatatttaacgggacatcccatcacccgttatctaaaagaaattgaacgatatgcggcaggaacccgtctaaaagatttagtacctaccccccgaggtcagatggtaaaagtggcaggattagtccttgcttcgaaagtctttaccactaaacgagggaatagaattggtatatgtacgttagatgatcgttctggtcgtttggaaattatgttattttccgatgcattagataaataccaacatctattggaacaagatcggattttaattgctaccgggcaggtcagctttgatgatttcaacggtgggcttaaaatgacagtccgcgaattaatggatattaacgaagcgcgtgaaaaatatgctcgagggcttgctatctcgttatcagacaggcaaattaatgagcaattattaaatcgtcttcgcggcgttttagaacctcatcgttcaggcacgatcccggttcatctttattttcaaaagcatgatgcctgtgcacgtttgcgttttggtgcaacatggcgagtaacgccgactgatatgcttttgaccgatctgcgaactctgctgggtaatgagcaggtggaattagaatttgac

SEQ ID NO: 32387 - DNA, 588 bp, Proteus mirabilis
atggaatttgtctatcctaaagcaaacctaattgctggcgtcgatgaagtcggtcgcggaccattggtgggggcggtagttactgctgcggtgatcctcgatccagctaatcctattcaaggattaatggactcgaaaaaattgaccgagaaaaaacgcaatgcgctttatgatgaaataaaagaaaaagcattatgttgggctattggacgtgctgagcctgaagagatagataaactgaatattctttgggcaacgatgaaagccatggagcgtgctgtcgcgggattatccataacgcctgatatggtcttagtcgacggaaaccgttgtcctaacttgccaatggcatctcaagcggtgattaaaggtgatagtttagttcaagaaattagcgcagcgtcaatactggctaaagttacccgtgatagggaaatggaacagctagataaactttatcctgattacggctttgccaaacataaaggctatccaacagccttccatatggaaaaactggcttcattaggggcaacgccttatcatcgtaaaagttttgcgcctgtaaaacgtgctttaaatttagtc

SEQ ID NO: 32388 - DNA, 1170 bp, Proteus mirabilis
atgaccttgtcaggccaatcatctataaaacagcgtccgttagttatcggccttgtggctggtgaaacgtccggtgatatcttgggcgcgggattaatccgcgctcttaaacaaatgcatcccaatattcgttttgttggtgtcgcaggtcctttgatgcaagcagaaggttgtgaagcttggtatgaaatggaagagcttgcggtgatgggggtcgtggaagtacttgaacgtttgccacgattattgaagatcagaaaagatctcactcaacgctttacacaacttaagccagatgtttttgttggtattgatgctcctgattttaatatcacccttgaaggtcgcttaaaacaaaaagggttgaaaactatccattatgtcagtccatcagtatgggcttggcgtcaaaaacgggtttttaaaattggtaaagcaacggatttggttttagctttccttccttttgaaaaagcgttttacgataaatatcaggttccttgtcgctttatcggtcatacaatggctgatgcaattgcgttacaccctgataaaaaagcggctcgtgaacacctaggtattgatcaagaggcaatctgtttagctctgctaccaggaagtcggcattctgaagtggaaatgctcagtgcggactttataaaaacagcgcagcgattaaagcaacagatccccgcattacatattgttgtccctttggtaaatgcgaagcgacgggcacaatttgaacaaatacatcaaagtgttgccccaaaacttgaaatccaactcttagatggacaagcaagagaggcgatgaccgccagtgatgcgactttattagcatctggtacagccgccttagaatgcatgttaacgaaatgcccgatggtagtgggttatcgtatgaaaccatttaccttttggttagcaaaaaaattagttaaaacgccctatgtctctttacccaatttattagcaggacgggaaataattaaagagttgctgcaagaagagtgcacaccagaagcactggcagaacaattactccccctattaacggatgcggaaaaagcacaacacttaaaagagatatttttacaattacactcagctatccgttgtcgtgctgatgagcaagcagcgaatgcagttttagaattagcaggtcaa

SEQ ID NO: 32389 - DNA, 518 bp, Proteus mirabilis
cctttttgagtcacagcaggtcgtgtcattcttaattagattcagttttattagacaggaagagtattgcaatgagtgataatcatactctgcaaatcgaagaaattttagatttacttccacaccgttacccatttttattggttgaccgtgtccttgattttgaagaagggaaatttctaagagcagtaaaaaatgtatcttttaatgagcctttctttcaaggtcacttcccaggcaaacctattttccctggtgtactgatcctcgaagcaatggcgcaggcaacaggtattttagcattcaaaagcgtaggaaaactggaacccggtgaactttactattttgctgctattgacggtgctcgctttaaacgtcctgtcttacctggagaccaaatggttcttgaggttgaattcattaaagaacgccgtggcgttgcacgctttaaaggcgtcgctaaagttgatggagaaattgcctgcgaactcgagatgatgtgtgctcgccgccgtgag

SEQ ID NO: 32390 - DNA, 1026 bp, Proteus mirabilis
atgttttcaattcgattagctgatcttgctcagcaattgaatgcacagttacacggcgatggtgatatcactatcgccggtcttgcttcaatgggcttagcaaatggtgaacaaattacctttctttccgatagtcgctatcgtgaaaaattaagtgaatgtcaggccgctgcggtggtattaacagaggctgatcttcctttttgtcctgttgctgcactggtggtgaaaaatccttatctggcttatgctcaaatggctcagattatggatactacgcccgcgccagcacaagatatacatccttctgctgttattgccgctgatgctaaattagggaataacgtctcaattggtgccaatgcggtcattgagtcaggtgttgagttaggtaataacgtagttattggtgcaggatgttttattggtaaaaaagcacatatcggcgataatagccgtttgtgggcaaatgtctctatttatcatgaagttattattggtaaagattgtttagtacaatctggtactgtcattggttctgatggttttggttatgccaatgagcgtggcaattggattaaaattcctcagttaggctcagtgatcattggtgaccgtgtcgaaattggtgcatgtactaccatcgatagaggcgcattagataacacagttatcggtaatggtgttatcattgataaccagtgccaaatcgcacataacgtcattattggtgacaatactgctgtggcaggtggtgtcatcatggcggggagcctgaaaattgggcgttactgtatgattggtggagcaagtgttatcaatggtcacatggaaatttgtgataaagttacggtaacaggaatggggatggttatgcgtcctatcactgaacctggggtttattcttctggcattccgttacaaccgaataaagcatggcgtaaaaccgcagcactggtgctgcgaattgatgaaatgcaaaaaaggctaaagtcgctagaacgtcaagtagaaaatagcgataag

SEQ ID NO: 32391 - DNA, 483 bp, Proteus mirabilis
atgaatattagtttaatcgcagcattagcggcggatcgtattattggtatggaaaaggcgatgccttggacattaccgggtgatctcgcatggtttaaaaaaaatacattaaataaacccgttattatgggccgggtgacttatgagtctatcgggcgtcctttacctaatcgtctcaatattgtattaagcagtcagcctggaaatgatgacaatgttgtttgggtgaaatccgttgaagaagcactacaagctgctgaaaataatgatgaaatcatggtgattggtggcggtaaggtttatgagcaattcctaccaatggcgaataaattataccttactcatattgatgctgaagtgattggtgatacaaccttccccgattatgagcctgatgagtgggattctacttttatggaataccatgaggcagatgaaaataattcgcataactactgttttgaaatattaaaaagaagaaaa

SEQ ID NO: 32392 - DNA, 399 bp, Proteus mirabilis
atgaaaaccggttacttatgggccatcgccagcgcattattagtcacagttgcacaactactgttaaaactaggtatgtcagaattacctgatctgcaattagaaaaacagtggtttgatcttcattggttatgggcaaacataatacctatcagcgttgttttcgtgggactgattggctacgtactgtcaatggtttgttggttattgactttacgtacaatccccctaaacaaagcttatccactcatcagccttagctatgtctttgtttatattcttgcggtggttttaccttggtttcaagaaacactgtcgtggtctaaaacaataggtatcatttttattatgctaggtgtttggttaataagccaaaaaacggagcaaacaacatcgcat

SEQ ID NO: 32393 - DNA, 1335 bp, Proteus mirabilis
atggcacatcgattaacttccagagacattctggcattaggttttatgacttttgctctatttgttggagcagggaatattatttttcccccgatggtggggttgcaatcaggggagtttgtttggactgcggccattggttttttgctaaccggagttggcttacctgtgctaacagtggtggcattagcgaaagtgggagggggaattgaagcattaagcacccccattggtaaatctatgggacttttattagcaatagtcgcttatcttgctgtcggccctttatttgccacccctcgaaccgcaacggtctcttttaaagttggcattgctcctttagtgggtgatagtgatattgccttacttatttatagtgtcatttactttttaattgttatcggtatttcactgtatccgggaaaattacttgatagtgttggtcacattctggcaccgattaaaattttagccttagctgtattaggtttagctgcgctattttggccagcaggaacgccgatccccgctacacaagcatatcaagatatggcatttacccaaggttttattaatggctatcttaccatggatacgttaggcgcgatggtctttggtattgttattgtcaatgcggcccgctcaagagggattgataattcgtctttattaacacgttatactatgtgggcgggaattatcgcgggtgtgttattaacggcgatttatcttagtttatttaagcttggttctgctagcggcagcattattccagaagcaaaagatggcgcagatattttacatgcttatgtgcaacatactttcggtaattttggtagtttctttttagctctgcttattttcttagcttgtatggtgacagcggtaggtttaacttgtgcttgtgcggagttttttagccgctatttgcctatttcttatcgtacattagtattgattttggctgtattttccgcggtagtctctaatcttggtttaagtaaactgattgcgttctccattcctgttctggtgatgatttatcctccttgtattgtgattattctgatgagtttcactttacgtttttggcataatccaagccgcattattgcccctgcaatggcaataagcttattttttggcatttttgatgccattaaagcatccgatcatttaaaacatttattaccggattgggcggctaaattaccattaagtgagcaaggattagcgtggttaatccctgtattagtgactattgttatatgcgctatttacgataaagtagctggctcacaacataaaaaagtgatccactctgggataaacaaa

SEQ ID NO: 32394 - DNA, 1290 bp, Proteus mirabilis
gtgttagaacgactctcatggaaagccctcgtgtgggggctatttctattttgtttacctgcctttgtattatcactatttatcggccaccttccttggttgctcgtggtctcattactgagtgccttgatatggcacgcctataatttaatgaaattatctaaatggttatggctcgatagatcggtattacccccagaagggaaagggggctgggagcctattttttatggtatacgacaaacacagcaacgtaaccgtaaacgccgtcgagaattaggtgatttaattaagcgttttcgtagcggggcggagagcctaccagatgccgttgtgatgatcactaatgaaggaaatatcttttggtgtaatagtcttgctcagcatcttctaggctttcgttggcctgatgataatggacaaaatatttttaatttattgcgctatcccgattttttacattatttcaccgtcgccgattttagccgccctttaactattgcattaaataatggtgctattgttgaatttcgggtgatgccttatgcggatgatcaacgtttaatggttgctcgcgatgtgaccgagaagaataagttagaaaattcgcgacgtgatttttttgctaatgtgagccatgaattaagaacacctttaacggttattcaaggctatcttgagatgatggaagagaataccgcagaaaacccggctgaacataaagtgattaagaccatgcaagagcaagcaaagcgtatggacttattagtacaacaactgttacagctttcacgtattgaatctgcgcctcatattgatttgaacacggttgtcgatatgcctgcgctattaagcgtgcttgagcatgacgcgcactcattaagccaagaacaacaaaatatcatctttgatattgaccataaatgggctgttcgtggtaatgaagagcaattgcgtagtgccgtatctaaccttgtctataacgccataaatcatacccctgagggtacgactattcgcgtgagttggaaaaaagtaccacaaggtatgttgtttagtgtgtcagataatgggccgggtatcagtgctgaacatttaacgcgcttaaccgaacgtttttatcgtgtagataaagcgcgctcccgccacacaggtggtacagggcttggattggcgattgtcaaaaagtccttacaacatcatcactcaatactgaatattgaaagtaaagtcggtgtaggaagcactttttcttttatcatgccgcaaacattgttaacagaaaaaaaa

SEQ ID NO: 32395 - DNA, 1230 bp, Proteus mirabilis
atgcggattattcacacctcagattggcatttaggacaatatttttttacaaaaactcgcgcccaagagcaccaacaatttctcgattggctattagcgcaaatccgtgaacaacaagttgatgcagttattgttgcaggggatatctttgatactggctccccccccagttatgcccgagagctttataatcgatttgtcgtcgcaataagagatactcagtgccaactgattattttagggggtaatcatgattctgtggcaacgctaaatgaatctaaatcactgttagcgtgtttaaataccaccgtcattgctaatgttcacactgaaaccccacaagcccctattattctttatcaaaaaaatcacacacctggagcattactttgtgcaatcccctatttacgccctagagatatgataaatagcaaaagtgggcaatcgggagcagacaaacagggcgctttaaaagaagcgatcgcagattattatcaacaccaatatcaagccgcgctcgacttacgaaaacaactcaatgttaacatccctatcattgccacagggcatctgacaacgattggcgccagtgttagcgattcggtacgtgaaatttatatcggcacattagaagcctttaacgcaaccctatttcctccatttgactatatcgcccttggtcatattcatcgcccacagcgcgtcaataaatcgggtcatattcgctacagtggttcacctattccattaagttttgatgaaagtgcacaacagaaaagtgtttgtcttatcgattttgagcaagataagttagcggaaatgacactattacccatccctgagtttcagctattacgcactctttcaggctcgttacaagaaattgccacacaactcgaaaagttagcaacacaatataatgaaatggataccacgatttggctagatattgaagtttcaactcaagattatctcagtgatattcaaacccgtattcaagagctaactcaatcgccactctttgaagtgatcgtattaagaagagcgagaaaacaacgtcaagcactgatgcaaaatgagaaagaaaccctaactgaactgactgtatatgatgtatttgaaaggcgcttagctcaacaccagtttgaaaccgaggaagacaaaatacggttaaccacactctttaagcaagcggttgaaatggcagagcaagaggataacaacgcacga

SEQ ID NO: 32396 - DNA, 3723 bp, Proteus mirabilis
atgaaaatcttaagtctgcgctttaaaaacattaactcactcaaaggcgaatggaaaattaactttgatcaagagccttttgttagcaatggactatttgccattacaggcccgacaggtgcgggtaaaaccacgctcttagatgcaattagtttagccttatatcacagaacgccacgcttagataaagtaacccaatctcaaaatgaattaatgactcgtcacactgcagaatgtttagctgaagtggaatttgaagttaaaggggttgcctatcgggcattttgggaacaacgtcgtgctaattataaagaagagggaaacttacaagccccacaggctgagttagcaaaaattaatcgtttaggcggtgaagataaagttttagccaataaaattagccaagtaaaagaaaaaataatctcgatcaccggattagatttcgatcgcttcactaaatccatgttgttatcacaagggcaatttgctgcatttctcaacgctgatgacaaatctcgtgcagagctacttgaagagcttactggtacagatatctatcgccatatttcacaaacaatttttaaacattggcgcgaagaagagcaggctttaaatacgctaaaacaacaagctcaaatgatggcattattggatgcaacaacacgccaagagctattaacacaacaagccaatattcaagcacaaataacaaggttacaaaaagagcaacaggaataccaagttgctaagcaatggcaagaaaaagcgctagaaattcagcagcaacaacaatcagcccaagcgggactcaatgaggctcaacaggcattaattattgctcaacccgatattcaacgcttagaaaaaaatgagccagcagaaaaaattcgccctctttatgatgaaaaaaatcgtcgtcttacagagcaaaactatttagcaacacaattaacaagcttaaaaacagaaaaacaggctattgaacaacaaagcctacctatcaataaaaaattggcagactttcatgaacaattaaaaacgcatcatgagaaaaaacagcacactttacagttaattcgtgagaaggtactgcctttagataatcaattggtgctgttacaacaagaaattagtactaataaccaacacaagcataaattagaaaaaatatgcgctgaatatctgcaacattctcagttagccgagaaaaaattaatcaccacacaacaacaagttaatcaattaaataacgacttaacacaacacgcctatcatgcacaacttgcggaaaatctacccttatggcaacactattttcagcaatataatgaaatatcaaaccaatatcttgccaaccaaaaacgagaaacagcagagcaggaaaaagtcataagtttggaaaaagcattacaacaagctacccaaacattagccacccaacaagagcaacttaatttacagcaacagcaactacaatcttatcaaacacaattggaagcgcgtcaaaaggcagacaaacccgatgaaataaaaccgcgattacaacaaattaatctgcaaaaaaatgcattggcaaaaattataaatttacacactcaattacaacgtaatggcaaagagcagcaacattatcaaacgacattgagtgaaaatcagcaaaaaatagcgactctaacccaaacgattgcagaaaatgatctggcactaaaagagaaagcacaacatcttaaagatttaaatgacaactatcttttgctacaaaaagtcgccgaatatgagcaagagcgtgcacgtttactgaaagataaaccttgccctctatgtggctcaacacagcatccttatgtagaaacctatcatgacatcaaaccagatgagacaaagctacgtttagaagcattacaacagcaggtgcattcactcaccatcaccttagccgaacagcgaacccaactggtaaactatggctcacaaaatagcaccttgagtgacaatatcgctcagttaacccaagagaatagcgtactgacccaacagtggcagacgttagcacaagcacaccatttaccgttagttgatgatgcagataacttactgacattagaacaatcattaaatcagcaagagcttattctcacagaaaaacttgacagttatcagcaattagaagcccaaacacatcaaaagaatacgcattttctcaatgcaaaagagcaatttaatcaacaacaacaatcggttaagcaacagcaaaatgatttagattatttgcaaaaaacaatcaaaacctatcagcaacaaagcgagcacttgcaccaacagcaacaacaattagcacaacatattcagtcagcgattgaaaaacaaggctatacactccctgaatttgagcagttcacgccatggttggcggctcgtcaacaagagcaccagcaatatcaaagtcagttaaaagagcttcagctattacaacaaagcctacgtgaacagcaagtgacgcaaaatgaaaaaaaacgttatttagcagaaaaacaggctgaacttgaggcactattagcaaaattaagccaacaacaacaccaacaaacacaatggcaggatcaacgacaagccttatttggttcacaatctgtagagcaggtacgcagtgaacttgataaacatagccaatttttacaaacccagattgagcaatatactcaagaaaaaaaccaactagaaaaccgacttaatcaattaattggccaatatcaagagaatgaaaaagccctacaacgagcaataacacaagcacaacaagccactgaacactatcaacacgcgttaaaagagagtctttttgccgatgaaaatgactttttagcctctctattatcggtagaggaaagaacacgtctacaagagcagcaaaaacagcgacttgataaacttttacaagaaaaaacgcgccttgagactcaagaaaaagcctatcaacaacatttattacaacaaccattactctcaacccaatgtactgctgagcaatgtaatatccatttagacgacttagcaaagcaacacaaagcgttgcaagaaacactatttagtctgcaaatacaattacgccaagatgatgaaaaacggatagagcaacaaacactattagcgcaaatagccaaacagcaagcgcattatgatgattggagttatttaaatgagttagttggctctgcatctggtgataaatttagtcgctttgcccaagggttaaccctcgaccatcttatctatctggctaatcgtcgcttagaaaaactacatggtcgttactttttacaacgcaaaacgacaggtagccttgaattacagattgccgatacatggcaagcagatgctctacgcgatacacgtacactttctggtggagagagttttttagtcagcttatcccttgccttagcgttatctgatttagtcagtaataagacgcaaattgagtcactctttttagatgaaggctttggcaccctcgatcctgatacactagatattgctttagatgccttagatagccttaatgcttctggcaaaattattggtgtgatcagtcatgttgaagcgatgaaagagcgtattccggtacaaataaaagtgaaaaaagcggggggtttaggaataagtcagctagcacctgagtttagatatggtaataagagcaatgaaaatcaatcagttaaagac

SEQ ID NO: 32397 - DNA, 465 bp, Proteus mirabilis
atgaacaacgatacaaagatgaatattagcgacgtacttactctggcatgtacacataacaatgtgcattgcacaagtaaaaaacgcgcgttagaaattatcagtgagaatgcagctcaagcactgaatttaccagagacactgatttttgaggctttattaacgcgtgaaaaagtcggtacaacagggattgggggtggattggctatccctcatgggcgtattgaaagtgatgaaactgaaaaagttgttggtgtgtttcttcacctaagcgagcctattgccttcgacgctattgataatcaacctgtcgatttgttgtttgcattactcgttcctgcaacacaatgtaaggaacatttacacacactgtctttgattgcaaaacagttggctgacaaaaatttatgtcgccgactacgctccgcacaaagtgatgaagagctttatcagattatcacagaa

SEQ ID NO: 32398 - DNA, 852 bp, Proteus mirabilis
atggtgctgatgatagtcagcggacgctctggttcaggtaagtcagtcgctttgcgtgcgcttgaggacatgggattttattgcgttgataacttacctgtcgatctgttaccggagcttgcgaaaacactggctgagcgtgatgctgccgctgccgcagtcagtattgacgtacgtaatatgccagaatcaccggagattttcgaaaaggcgctggaaagtttacccgcggaatattctccacaactgttatttttagatgctgatagaaatacgctgatccgccgttatagtgatactcgacgcctacaccctctttcaacgaaaaacctctcgctagaaatggcgattgatacagagagtgatctgctcgaacctttacgatcacgggctgatctgattattgatacctcagagatgtcagtgcatgaattagccgaaatgctacgtacacgcttactcggtaaacgtgaacgcgaattgaccatggtatttgagtctttcggttttaaacatggtattccgatcgatgctgattatgtctttgatgtacgatttttacctaatccccactgggatcccaaattacgcccaatgacggggttagatcgtccagtcgcagccttcctcgatcgccataccgaagtgcataactttatttatcaaacaagaagttatctagaactttggctaccgatgttagagacgaataatcgtagttacctaactgttgctattggttgtactggcggcaaacatcgttctgtttacgtggctgaacaactggctgactatttccgctctagagggaaaaacgtacaatcacgccatagaacacttgaaaagcgcaaa

SEQ ID NO: 32399 - DNA, 558 bp, Proteus mirabilis
atggcaaagcagccagaagagtggcactacctcaatcctgaatttgacaatacaccgttagaagaggaagaagaggaagagatcatttgggtcagcaaaagtgaaattaaacgtgatgctgaagcgttaaagaaattaggcaccgaacttgttgagttaagtgctcaagagcttgaacgtgttcctcttgatgaaaaactactcgcttcaattaaattggcgcaaaaggtacaacgcgaagcgcgtcgtcgccaaattcaatatatcggtaagttactccgtaatgttgatgaagagccgatccgccaagcactagataaactaaaaaatcgccataatcagcaaattttagtgttacataaactagaagatctgcgtacacgtctgattgacggtggtaatgaagtgattgaggaagtggtagcgctttatcctatggccgatcgccagcaattacgcacacttattcgtaatgctaaaaaagagaaagaagccaataaaccgccaaaatcattccgcttattgtttcaatatctaaaagatctctcagagtcagct

SEQ ID NO: 32400 - DNA, 732 bp, Proteus mirabilis
gtgaaagtaaaagcaatggtattagcatccatgttagcccttggagcaccctcaatcgctttagccggggcggtacctgaaggaccccatataactacatcaggtaatgcaacaattaaagcgactcctgatatggcgacacttaatattcaggttagtgaaaaagcaaaagatgcagctcaagctaaaaaacaagtggatgagcgtgttgcaaaatattttgcctttttaaaagaaaacggtgtgacgaaagaagatattgatgctgccaacattcgtacacagcctaattatgagtatgataaaaaagcagaacgttcggtgataaatggctatacagcaacacgaaccgtagatgtaaaaatcaaaaaacttgatcagcttaataccttactggatggggcattagcggcagggctaaatgaaattaataacgttgagtttggcgttaatgatccagaacagtacaaagctaaagcacgagaagtggcaattaaaaatgccatacaacaggcaagttcagtggcaaaagggtttggtgctgatttaggggctgtttatagcgtaagttatcgcgcaccagaagcaacaccttatccaatagcacgaatgaaaatggatgctatggcattaagtgccccgtcaccggaagcagtaaaagagacctatcaacaacaaagcattgagtttaaagattacgttgacgtggtatttgaattaaaaacagctaaa

SEQ ID NO: 32401 - DNA, 897 bp, Proteus mirabilis
atgaaacgtcctgattatcgggccctgcaagcccttgatgccgttattcgagagcgtggttttgaacgagccgcacaaaaactatgtattacgcaatctgccgtttcacaaagaataaaacaacttgaaaatctatttggacaacctttattagtacgtacggttccgccccaacccacagagcaggggcaaaagctactcgcattactgcatcaggtcgaaatgttagaagagcagtggttaggtgatgaaaatagtggctcgacgcctcttttactctctttagctgtcaacgcggatagtttagctacttggttattgcctgctttgcacccggtattaacacaacttcctatccggcttaatattcaagtagaagatgaaactcgtacccaagagcgattaagacgtggtgaagtggttggcgctatcagtattcagcctcaagcattgcctagctgtctagtcgaccaattaggcgcattagactatctttttgtggcatcccctgattttgcccaacgttattttgcaaatggggtcactaaatcatctctgttaaaagcccccgctgtcgcatttgaccatcttgatgatatgcatcaggccttcttacagcaaaacttcggcttatctcccggtagtgtgccttgccatattgttaattcttccgaagcctttgttcagttagctaaacaaggctcaacatgttgtatgatccctcatctacaaattgccgatgagctaaaaagtggtgaattgattgatttaacgccaggattatgccaacgccgcatgttgtattggcaccgttttgccccagaaagcagaacgatgagaaaggtaacggatgcgttacttgattatggtcgtaaagtgcttaagcaagatgaagag

SEQ ID NO: 32402 - DNA, 1032 bp, Proteus mirabilis
atgggctatttactaaacaatatgaataatcaatatgatgatccgcttaatcaattacgacacaaacagcaaattagtgataagctaaaactcactttgctggtgttagttttatttgttcttattgttatctcactttcagccggtgaaatttggttattccccaataaatggctcactgaagaagctagtttatttatttggcaaattaggcttccaagaatattggctgtgatgatggttggcgcaagcttagcgattgctggtgccattatgcaggcaatctttgaaaatccgttagcagagccgggacttttaggtgtaagcagtggtgcgggtgtttgtgttgtgttactgattgttttccaattaggaactgcatactggttaataagcagtgccgcgatattaggggctttggggatcacctgcttattaatgtttttctcacaaataaaaaaactatctaatgctcaattattattaataggcgtagcattaggggtattagcaagtgctgttatgacttggctggtctattttagctctgcgttagatttaagacaattaatgtactggcttatggggagctttagtggcattgactggcgtcaccaaatattattttgggcattacttccaatcatcacacttcttatttggcaagccgatattttaaattacctttctctggggagttttgaagccaaaaaactcggcatttctgtgattatatggcgtaattggtttattttaaccgttggtttattaattggttttagcgttgctctagccggcgcaattagttttgtcgggttgattgtaccgcatttattacgattgtctggtatcacacattataaaaccttgttaccgggctgtgctttaacgggagcgagtttactgatattcgctgatttaatatcaaggctgatgttaaatggcgcagaagtccctattggcgtgataactgccaccttaggcgcacctctttttatttggttattagccactaaacagatggagcgctta

SEQ ID NO: 32403 - DNA, 2385 bp, Proteus mirabilis
atgaaattcagtgaactttggttacgtgagtgggtaaacccagcaattagtagcgaagagctttctgaacagctaaccatggctggccttgaagttgatggtgtagagcctgttgccggtgattttcacggtgttgttgtgggtgaagtggttgaatgtggacaacacccaaatgcagataaactacgagtgacaaaagtcaatgtcggtggtgagcgtttattggacatcgtgtgtggtgcgccaaattgtcgccaaggcttaaaagttgctgtagcaacggttggggcggtattaccgggtaactttaaaattaaagcagccaaactacgtggtgagccttcagaaggtatgctgtgctctttttctgaattagctatctcagaaaaccatgaaggcattatcgaattacctgctgatgcacctatcggtaccgatattcgcgaatacttaaaattaaatgataatgcgattgaaatcagcattacaccaaaccgagcagattgcttaggtattatgggtgttgctcgcgatatcgctgtcattaataaaatgacatgccaaatccctgatatgtcaccaattgcagccacttcttcagcgacatttcctgtgcgagttgaagcaccacaagcttgtcctcgctatttaggtcgtgttttcactaatgtgaatgtgaaagcgaacacaccattatggatgcaagaaaaattacgtcgtggtggtattcgctctatcgatccaatcgttgatatcactaactttgtcttacttgaaatgggacaaccattacatgcgtttgatcttgaccatgtcgatggggctgtggttgttcgtatgggcaaagagggtgaaaaactaactttacttgatggtaatgaaatcaccttaaaagatgatgtactggttattgctgatgaaaaacaagcattaggaatggcaggtattttcggtggtgaatcttctggtgttaatgaagcaactaaaaacgtatttttagagtgcgcattcttctctccattagcgatcaccggccgtgcacgtcgttatggtttacataccgatgcatctcatcgttttgagcgtggtgttgattcagcgctgcaatatcaggccattgagcgagcaacgaaattattactcgaaatttgtggtggtgaagtgggggaaattattgatgtcaccaatgacagctatttaccccatgtcgctcctatcaaattaacacgtgcaaaactagaccgtttattaggtcatgttattgatgatgaacaagttgttgattcgttaacacgtttaggttttggcgtcaccgttgaaaatgacgggtggttagccactgtaccttcatggcgttttgatgttgaaattgaagaagacttaattgaagaagttgcacgtatttacgggtataacaatattccagatgtacctttacgtgccgatctgattatgacagaccaccgtgaagcggatctgccattaaaacgtgtaaaaaccatgctggttgataatggattccaagaagctatcacttatagctttgttgatccgaagatccaaagcttactacatcctaatgaagaagcgttgatcttacctaacccaatttctgccgatatgtcagccatgcgtttgtcattgttgaccggattattaaccacagtggtttacaatcagaaccgtcaacaggctagagttaggttatttgaagcaggtctgcgttttgttcctgataatcaagcagaatatggaatacgtcaggaacttatgctagctggtgtgatcgcgggcaaccgttatgaagaacattggactttagagaagcaaactgttgatttctttgatttgaaaggtaatattgaatcaattctggaattgacaggccagttagatgaaattacatttaaaccagccaatcattcagcgctccatccgggacaaagtgctgagatttatctgagaaatgaatatattggctgtattggtgttgttcacccagagcttgaacgtaaacttgatttaaacggccgtacggtagtattcgaaatacgttgggacgcaatcgcaaaccgcaatttaccgcaagcgaaagctgtttcacgtttcccttcgaatcgtagagatatcgctgtagttgttccaaatgatgtggctgcagaagatattttagctgaatgtaagaaagttggcggaaatcaaatagttggcataaacttatttgacgtgtattgtggtaagggagtagcggagggttataagagcctcgctattagcttaatcttgcaggatatcgagcatactctggaagaagatgagattgctgccacagtcaatacctgtgttgcagcattgaaacagcgattccaagcatccttgagggac

SEQ ID NO: 32404 - DNA, 981 bp, Proteus mirabilis
atgccacatctcgctgaactcgttgctcaagctaaagcagctatcgaagaggcacaggatgttgctgcgctggattcggttcgtgttgaatacttggggaaaaaaggtcatttaacgctccagatgtccacgctgcgcgacttacccgctgaagagcgtccagctgctggagcggtcattaatcaggcaaaacaagaggttcagcaagcactgaacgctcgtaaagaacaaatggaatcagcgctattaaacgaacgtttagcggctgagaaaattgatgtctctttgcctggacgtcgtattgaaaatggtggtctgcaccctgttactcgcacaattgaacgtattgaaactttctttggcgaattagggttctctgtggaatcaggccctgaaattgaagatgactatcataactttgatgcgttaaatattcctgctcatcaccctgcaagagctgatcatgacactttctggtttgatgctaaacgtttattgcgtactcaaacctctggtgtacaaattcgcactatgcaaaataaacagccaccgatccgcattattgcacctggccgtgtttatcgtaatgactatgaccaaactcatactccaatgttccatcaagttgaaggcttaattgttgataaagacattagcttcactaatttaaaaggaacactgcacgattttctgaaaaacttctttgaagaagatatggaaattcgcttccgcccatcctattttccatttacagagccttcagctgaagttgatgtaatgggtaaaaatggcaaatggttagaagtcttgggctgcggtatggtgcatccaaatgtgttgcgtaatgtaggtatcgatcctgaagtttattctggttttgctttcgggatgggtatggaacgcttaactatgttacgttacggtgtcaccgatttacgttcattcttcgaaaatgatcttcgtttcctcaaacagtttaaa

SEQ ID NO: 32405 - DNA, 354 bp, Proteus mirabilis
atggctcgcgctaaacgtggtgttatcgcccgtgctcgtcacaagaaaattttaaagcaagctaaaggttattacggtgcacgttctcgtgtatatcgtgtagctttccaggctgttatcaaagctggtcaatatgcgtaccgtgaccgtcgtcagaaaaaacgtcagttccgtcagctgtggattgcgcgtatcaacgcagcagctcgtcagaacggcatgtcttacagccgtttcatcaatggattaagaaaagcatctattgaaatcgaccgtaagatcctggcggatatcgctgtattcgacaaagctgcatttgctgctttagttgaaaaagcgaaaggtgctctggct

SEQ ID NO: 32406 - DNA, 858 bp, Proteus mirabilis
atgaatgaattacctgcgagtttagatgaagcaacaggttggtttgttgctaatcaagaactctttattcaatatgctgtgaatatcgttgctgcattcttgatcctatttattggtctttttgtcgctaaaatggtcagtaaaggggttgcacgaattttaacgttacgccatatcgacgcaactgttgtgacattcttgtctgtcttggtgcgttataccgttattgcattcactttgattgcagtattaggtcgattaggggttcaaacagcttctgttatcgcagtacttggtgcggcaggtttagcggttggtttagcattacaaggctcactctctaactttgcagcgggtgttttaattgttatcttccgtcctattcgtgctggtgaatacgtgatgattggtgctgtcgaaggtacggtgcgagatgtacaaatattctcgaccacattacgttcagcggatgaccggatcattgttattccaaatagcaaaattatcagtagtgaggttattaaccttagccgtgagccaaatcgtcgtacacaaattattgtcggcgttgcttatgatgctgatattgataaagtcaaaaaagtgctcggtgatgttgttgcgcaagataaacgtattcaacataaccaaggcgtgacaatacgtttacatgaaatggcgccttcttcattaaactttgtggtacgtgtttggaccaccaatgatgatgcatggccagtttattgggatcttatggaaaactttaaacgcgcgctagatgcaaataatattggtattccattcccacaaatggatgtctatatgcatcaagcacaaaataccgtgatgaaagcagaa

SEQ ID NO: 32407 - DNA, 2595 bp, Proteus mirabilis
gtgctagaagaataccgtaagcacgtagcagagcgtgcagctgaaggtgtcgttccaaaacctctcgatgccacacaaacagccgcacttgttgagctattaaagtcccccccaaaaggcgaagaagaattccttcttgatttaattgttaaccgtgttccacccggcgttgatgaagccgcttatgttaaagcaggttttttaacggctctcgcaaaaggtgaaacaacatcaccgcttatcacgccagaaaaagccgtagaattattaggtactatgcaaggtggctataatatccatgcattaattgaagcgctagataacgacaaactggctcctattgcggcaaaagcactttctcataccttattgatgtttgatagcttttatgacgttgaagaaaaagcgaaagctggcaacgtttacgcgaaacaaattatgcaatcttgggctgatggcgagtggtttactgaacgtccagaacttgctgaaaaaatcacggtaaccgtgtttaaagtgacgggtgaaaccaatacagatgatttatcaccagcaccagatgcttggtctcgtcctgatatcccattacacgctctagctatgctaaaaaatgcccgcgaaggcattgaacccgaccaaccgggtagcgttggcccgattaaacaaatcgaagcactgaataaaaaaggtttcccactggcttatgtgggggatgttgtcggaacaggctcttcacgtaaatctgcaaccaactcggtactttggtttatgggggatgatatcccttatgtaccaaataaacgcggtggtggagttgtattgggtggcaaaattgcccctatctttttcaacacgatggaagatgccggtgcattacctattgaggttgatgtttctaaattaaatatgggtgatgttattgatatttacccatacaaaggtgaaatccgtaaccatgaaaccaatgagttattggaaacctttgcactaaaaacagaagtactgattgatgaagtgcgtgcgggtggccgtattcctttgatcatcggtcgtggattgacctcaaaagctcgtagcgccttaggtttaccacctagcactttattccgtcatgccaaagcagtggaacagagcgatcgtggtttctcacttgcacaaaaaatggtgggacgcgcttgtggtcgtgatggtattcgccctggtgaatattgcgaacccaaaatgacctccgttggctctcaagatactacagggccaatgacacgtgatgaactgaaagatttagcatgcttaggtttctccgctgatttggttatgcaatcattctgtcatactgccgcttatccaaaacctgttgatgtaaccacccatcacacgttacctgattttattatgaatcgtggaggggtttcactgcgtccgggtgatggcattattcactcgtggttaaaccgtatgttattgcctgatactgttggtactggcggtgactcacatacacgtttccctattggtatttcattccctgcaggttcaggcttagtcgcttttgcagcggctacaggggtaatgccattagacatgccagaatcggtgttagtacgctttaaaggtaaaatgcaaccgggggtaacgttacgtgatctggttcatgccatcccactttatgccattaaaaaagggttattgactgttgagaaaaaaggtaaaaagaatattttctctggtcgtatcttagaaattgaaggtttacctgaacttaaagttgagcaagcttttgagctagctgatgcatcggctgagcgttctgctgcgggttgtacgattaaattagataaagcaccgattatcgaatatctacaatctaacattgtcttattaaaatggatgatagcagaaggttatggtgatcgtcgtacacttgagcgtcgtattacggcaatggaaaattggttagctgatccgcaattacttgaagcagatgcggatgctgaatatgcggctgtaattgaaatcgacttaaacgaaatcaaagagcctattctttgcgcaccaaacgatcctgatgatgctcgtctattatcagaagttgcaaacagcaaaattgatgaagtctttattggctcttgcatgaccaatattgggcatttccgtgcggcgggtaaattactcgatcaacataaaggtcaattaccgacacgcttatgggttgcaccaccaacaaaaatggatgcagcacaactgactgaagaaggttattacagcgtctttggtaagagtggcgctcgtatcgaagtgccgggatgttcattatgtatgggtaaccaagcgcgagtggcggatggggcaacggttgtttcaacatcaacacgtaacttcccgaatcgtttaggtacgggggcgaatgtctaccttgcatccgcagagcttgcggcagtggcttcactgttaggacgtctaccagagccacaagagtatcttgatttcatcaataaagtcgatgaaacggcggaagatacttaccgttatctcaattttgaccaactagagcaatatacagataaagcaacacaagtgattttccaaaccacggta

SEQ ID NO: 32408 - DNA, 2625 bp, Proteus mirabilis
atgagcaaaagcaccgctgagatccgtcaggcgtttctcgacttttttcatactaaaggacatcaaatagtaccaagcagttctttggttccaaataatgatccaacattgctgtttacaaacgcagggatgaaccaatttaaagatgtatttcttggattggacaaccgaccttattcccgagcgacaaccgcgcaacgttgtgtgcgcgcgggtggtaaacataatgatttagaaaatgtgggttatacagcacgtcaccatacattttttgaaatgttaggtaactttagttttggtgactatttcaaacatgatgcaattaactttgcctgggaattattaactggcaaagagtggtttaacttacctaaagagagactttgggtaaccgtttatgccactgatgatgaagcttatgatatctggaataaagaagtcggtgttccagctgagcgcattattcgtattggtgataataaaggcgcaccatttgcttcagataacttctggcaaatgggagatacggggccttgtggtccatgtactgagatattttacgatcatggtgatcatatttgggggggaccgccaggaacacctgaagaagacggtgatcgctatattgagatctggaatatcgtctttatgcagttcaaccgtaaatcagatggtacaatggatccattgccgaagccttctgttgatacgggaatgggattagagcgtattactgctgtactacagcatgttaattctaactatgatattgatttattccgcgcattaattaaatccgttgctgaagtgactaatgcgacagacttagcaaataaatcattacgtgtgattgccgaccatatccgttcttgttctttccttgtttgtgatggtgtcattccttctaatgaaggtcgaggctatgtgctacgtcgtattatccgtcgtgctgtacgtcatggttatatgttaggtgcgaaagatactttcttctataaactcgttgcaccgcttattgatgtaatggctgaagccggtaaagaacttaagaatcaacaagaaatcgttgaaaaagtacttaaaacggaagaagagcagtttgcacgtactttagagcgcggtttacaattattagatgaagagctagaaaaattaaccggtgatactttagcgggtgaaacggctttccgtctttatgatacatatggtttcccattagatttaactgcggatgtttgccgtgaaagaaatatcaaagttgatgaagaaggctttgaactggcaatggaagagcaacgtaaacgtgctcgtgaatctagcggttttggtactgactataacgaactgattaaagtcgatagtcgcagtgatttctcaggttatgaccataatgagcaacaaggtactattaatgcgattttccataatggtcaaacagtcactgagcttaaagcaggtgaagaagggattatcttcttagataaaacggctttttatgctgagtctggtggccaagtaggtgataaaggtcttctgattggcaaagatagccagtttgaagttaccgacacgcaaaaatatggcaaggctattggtcatattggtaaagtcatttctggatcttttattgttaatcataagatcaatgcagtcattgatgtggctcgtcgtgatgctattcgcttaaatcactcagcaacgcatttattgcatgcggcattacgccaagtattaggcactcatgttacccagaaaggctctttagttaacgataaatatctgcgttttgacttctctcactttgaagcagtaaaaccagaacagttacgtgaaattgaagacattgttaacgcgcaaatccgccttaactcgccggttgtcaccgagttaatggatcttgaagatgcgaagcaaaaaggtgcgatggcactctttggtgagaaatatgaagaacgtgttcgtgttttaaccatgggggatttctcaactgaactttgtggtggtactcacgcagccagaacgggtgatattggtctattccgcattatgagtgaatcagggactgcggccggtattcgccgaattgaagcgattacgggggctacagcgattgaaagtgttcatgagcaatcggatctgatttctcttgtggcacatgcacttaaaagtgatggtagtaatttagttgagaaaattaaaacggttcaagaaaaataccgttcattagaaaaagaacttcaacaactgaaagatcagcaagcagctcaagaaagctcctcgttaggaagccaagctaagaatgtgaaaggtatcaaacttttagttcgtgaactgaataatgttgaaccaaaaatgttaagaacaatggttgatgatttaaaaaatcaattaggttcagcaataattgtactttctactatttctgatggtaaagtgagcttaattgtcggtgtgactaaggatttgactgctaaaataaaagcaggtgagctaattagttttgtcgctcagcaaatcggtggtaaaggtggtggtcgccctgatatggcacaagctggtggtacagatgttgaagcgttacccgctgctttagcgagtgttgacgagtgggtagaatcgcatctt

SEQ ID NO: 32409 - DNA, 1065 bp, Proteus mirabilis
atggctattgatgaaaacaaacaaaaagcattggccgcagcacttggtcaaattgaaaagcaatttggtaaaggttctatcatgcgtctgggcgaagaccgttccatgaacgtagaaactatctctacaggatctttatcattagacgttgctttaggtgcaggtggattgccacgtggccgtattgttgaaatctatggccctgaatcttctggtaaaacaaccttgactctacaagttattgcctctgctcagcgtgaaggaaaaatttgtgcatttattgatgctgaacatgcattagacccaatttatgctcaaaagctaggtgtcgatatcgataatctactctgctctcaacctgacacaggtgaacaagctctggaaatttgtgatgcattatctcgctctggtgcggtcgatgttattgtcgtggactccgtggcagcattaacaccaaaagctgaaattgaaggtgaaattggtgattcacacgttggtttagccgcacgtatgatgagccaagctatgcgtaaactagcgggtaaccttaaaaactctaatacactgctgattttcattaaccaaattcgtatgaaaatcggtgttatgtttggtaacccagaaaccacgaccggtggtaatgcgcttaaattctatgcttctgttcgtttagacattcgtcgcattggctctgtcaaaaatggtgatgaagtcattggtagtgagactcgcgttaaagttgttaaaaataaagtggctgcaccgtttaaacaagctgaattccaaattatgtacggtgaaggtattaatacctatggcgaactgattgatttaggtgttaaacataagttagtagagaaagcaggtgcttggtatagctacaatggcgaaaaaattggtcaaggtaaagctaacgcaaccaattacttaaaagaacatcctgaaatgtacaatgagttaaacactaaattgcgtgaaatgttgttaaatcatgctggtgaattcacaagtgctgcggattttgcaggtgaagagtcagacagtgatgctgacgacacaaaagag

SEQ ID NO: 32410 - DNA, 789 bp, Proteus mirabilis
atgaatgcctatatagataatactttaaaatttaaaaacattattttctctaaccacattcttttgttaattagaaaagattgtgaaatatccataacaaaagataatgttaaatatcaaatagataacgacagtatcgtttttataaaaaaaaattcagcattagatattatcttaggaaaaaataaaatgcctgaatttatatttttatctcatgaagttatgatggaagtattaaaaattactattaacaataaaaaagaggaagttactcaagataataataaagatagctttataaaacaagcaaatcatgaagatattctatttttcaatagattaaaaaataaatttaatgatgaagtcattacaaataacaaaacttcgcttagtcagatactaaaaatcgcatatttactgttaaactttgatatacctaaccttatattaaaatcaaaaccagaattaacatcagtaaaagtaaaagatattattattagtgacttacaacatagctggtctctaaaagagattagtagtaaattatttattagtgagtcttcattacgaaaaaaacttgaagcagaaaaaactaattttatgactttattaacaacggtaagaatggcacacgcaatgaatcttctggctacaacaaatttaacaataggacagatatcttcattgtctgggtataaaaatacttcctattttattaaaaaattcaagaagtattataaaagctctccgaaaaaacttaaatgtctaaattatagggataagataatt

SEQ ID NO: 32411 - DNA, 549 bp, Proteus mirabilis
atgaaattgaataaattagcgatgttcgctattgcatcaatggctttttctgcgactgttgctcaagcggcttcaggtgatggtactattactttcactggtaaagttattgatgcaccttgtggtattgctaccgaaagtgctaaccaagctatcgattttggtcaaatcagcaaaagcctattagagaaagatggtatttctcaagttaaacaaatcccaattaaattggttaattgtgatttaactaaagccggttctgatactggtgctgctggttcttataaaggcgtaaaagtaacctttaatggaaatactattactggtgcaacagaagagttagcaacaactggtaatacagggactgctattgttatttcaggaacaacaactggttcactggttaaattcaatgaagcaggtgaattacaagcactaggtaataatgataatacgctgatgtatacagcttgggctaagaaagcaacaaacggaacaattgctgaaggtgagtttaacgctacaacaaacttcacattagcctatgaa

SEQ ID NO: 32412 - DNA, 1089 bp, Proteus mirabilis
atgggatttaaatgtggtatcgtcggtctgcctaacgtagggaaatctacactgtttaatgccttaactaaggcaggtattgaggcagccaacttcccattctgtactattgagccaaatacaggtgttgtacccatgcctgatcctcgcttagataagttagcagaaattgtaaaaccacaacgagtgttacctacaacaatggagtttgttgatattgcaggtttggttaaaggcgcatctaaaggtgaaggcttaggtaaccaattccttaccaatatccgcgaaactgaagctatcggccatgtcgtgcgttgttttgaaaatgacaatattgtgcatgtggcgggtaaagtcgatcctgcagaagatattgaaactattaataccgaattagcgctttctgatttagatacctgtgaacgagcaatgcatcgtaatcagaaaaaagccaaaggtggtgataaagttgctaaagcagagatggaagttttagagaaatgtttaccgcacttagaaaaagccggtatgttgcgtgcattagatttaagtgatgaagaaaaagcgattatccgttatttaagctttttaaccctgaaaccaaccatgtatattgctaacgtcaatgaagatggtttcgacaataatccttatcttgatacggtacgtaaaatcgctgaagccgaaggctctgttgttgttcctgtttgtgctgctatcgaagcagatattgcagagctagacgatgaagagcgcgaagagtttatgcaagatttaggcatcgaagagccgggcttaaaccgtgttatccgtgcaggttatgcgttactcgatttacaaacttactttactgctggtgtaaaagaagtccgtgcttggacaatccctgtaggtgcaactgccccacaagctgcaggtaagatccatactgactttgaaaaaggttttatccgcgcccaaaccatctcatataatgactttatcacttatggtggtgaacaaggtgcgaaagaagccggtaaaatgcgtgcggaaggtaaagattatatcgtgcaagatggcgatgtgatgaacttcttgtttaatgtg

SEQ ID NO: 32413 - DNA, 945 bp, Proteus mirabilis
gtgcccgatatgaagctttttgctggtaacgcaaccccggaactggctcaacgtgttgccaatcgactctatactagcttaggagacgctgctgtaggtcgttttagcgacggtgaagtcagtgtgcaaatcaacgaaaacgtacgtggtggtgatgtttttatcattcaatcaacctgcgcaccaactaatgataacttaatggaattagtggtcatggttgatgcattacgtcgagcttccgctggtcgtatcactgctgttattccttacttcggctatgcccgtcaggatcgccgtgttcgttcagcccgtgttcctatcacggctaaagttgttgcggatttcttatctagtgtaggcgtagaccgtgttttaacctgcgacttacatgcagaacaaatccaagggttctttgatgtaccggttgacaatgtcttcggcagcccgatccttttagaagatatgcttcaaaaagaattggacaaccctattgttgtttctccagatattggcggtgttgttcgcgctcgagctatcgctaaacttctgaatgatactgatatggcaattattgataaacgtcgccctcgtgctaacgtttctcaagttatgcatattatcggtgacgttgctaatcgcgactgtatccttgttgacgatatgatcgatacaggtggtacattatgtaaagcagcagaagcgctgaaagaacgtggtgctaaacgtgtatttgcttacgcgactcaccctattttctctggtaatgctgttgagaacatcagaagctctgttattgatgaagtggttgtctgcgatacaattccattgtcagcagaaatcaaagcattaaataaagtccgctcattgaccttgtctggtatgttggctgaagccattcgtcgtatcagtaatgaagagtcaatttctgcgatgttcgaacat

SEQ ID NO: 32414 - DNA, 1262 bp, Proteus mirabilis
atgacgttattagcattaggtattaatcacaaaacagcccccgtagcgttacgtgagaaagtctctttttctcctgataccatgggtgacgccttaaataacttgttacagcaacctgctgtaagaggtggtgtagtgctgtctactgtaaccgtactgagctttatctgagtctagaagataaagaaaatagccatgaacaactgatcagttggttatgtcagtatcaccaaattgagcctcatgagcttaaaaatagtgtttattggcatcaagataatcaagcagtgagccacctgatgcgcgttgctagtggtttagattctttggtattaggtgaaccgcaaattttagggcaagtcaaaaaagcgtttgccgattctcaaaattatcactcgctctcttcagagctggaacgtctgtttcagaaatccttttcagttgcgaaaagagtgagaacagagacccaaattggtgctaatgctgtttctgtcgcttttgctgcctgtactttagcgcgccaaatctttgagtcattatcatcattgactatcttattggtcggtgcgggtgaaacgattgaattagtggcgcgtcacttacgtgaacatcaagtcaaaaaaatcattattgctaatcgcaccaaagagcgagcgcaacgtttagcgaatgaagttgacgctgaggttatcactttatctgatattgatgagtcactttctcaagcggatattgtgatcagttcaacagcaagtccgttgcctattattggcaaaggcatggtagaaagggcgttaaagaaacgtcgtaatcaaccaatgctactcgttgatattgctgtgcctcgtgatattgaacaagatattgaaaaactgagtaacgtttatctttatagtgttgatgatttagaagctatcattcagcataaccgtgaacagcgccaagccgcagccattgaagctgaacatatcgtgcaacaagagagtggccaatttatggattggttacgtgctcaaggtgctgtcggggcgattagagaatatcgcgatagtgcagaaatgttacgtgcagaaatggcagaaaaagcgattgcattgatacaaaatggcgctgatgcagaaaaagtgatccaacagctttctcatcagttgatgaatcgccttattcatacaccaaccaaatctcttcaacaggctgccagtgatggtgatattgaacgcctgaatctcttacgtgaaagtttgggtattacccataattaa

SEQ ID NO: 32415 - DNA, 783 bp, Proteus mirabilis
atgtttttagttgattcacactgccatcttgacagcttagattatgaaaaactgcacaaaaatattgatgatgttgtagaaaaagcacaacagcgtgatgtcaaatatatgttagctgtcgcaacaacattacctggctttaaaaatatgcgcgaactgatcggcaagcgtgataatgtggctttttcttgtgggattcacccattaaaccttgatgagggacacgatgtcgctgagcttgcgcgccttgcagctgaggccgatgttgttgcattaggcgaaacaggtttagactactattatcaacaagaaaatgcgtcacttcagcgtgaaattttccgtgaacatattcgcattgggcgccaagttaataaacctgttattgtacatacgcgtagcgctcgtgaagatacgctaactattttaaaagaagaaaaggttcaagactgtggcggtgtattgcactgttttacggaagataaagaaacagcaatggcgctacttgatcttggtatgtacatctctttttcaggcattgtgacatttagaaatgccgagcaaattagagaagctgcacggatcgtaccacttgatcgtattctggttgaaacggactcaccctatttagcgccagtgcctcatcgtggtaaagagaaccaacccgcttatgtacgtgatgttgctgagtatatggccgtattaaaaggggtgagcatagaagagcttgctcagcaaaccacccgtaattttgcaacactttttcaaataccaaacctcgcggac

SEQ ID NO: 32416 - DNA, 993 bp, Proteus mirabilis
atggccatatctgcctcatttaattttcaaggattgtctcccaatagtatttgggatgcgctaattaatattgggttttatcctgattcagggctgacggaattaaacagctacgaaaatcgtgtttttcagtttatggatgagcacaaacaacgttatgtggtgaaattttatcgtcctcaacgttggagttattcacaaataaaagaagaacatgaatttgttttagcgctaaaagaggcacaggtttctgtcgcagcgcctatcgaggtaaaaggcgaaacagttcatctttctaatgaagggttttattttgcattattcccaagtattgggggaagagcatatgaaactgataatctatttcagcttgaagaggtggggcggacattaggacgtatccaccaaataggtagaaaaaagagctatcaatatcggccgacactgtctgttgcggactatttggtcgcgccaaaattagaatttgaacaaagtgatttagttccaacgcaattaaaatctcaatttattgatgctattgataaaattattcatgaagtgagtcctaaattatcagactcaacatggaaaaaattacgactacatggggattgtcatcccggcaatatattgtggcgtgatgaagtcgttatggttgattttgatgagtctcgtatgggaagtgcaattcaagatttttggatgttattaagtggctcaaagcaagatcagcttatacagctagatacattgcttgagtcttataatgaatatcaagattttgatgtgagagaactatcattaattgaacctctacgtgcgatgagaatggtgcattatctcgctagggtattaaagcgtaggaaggatcctgcttttccaagaacctttgtttggtttcaagagcaagacttttggtttaaacaactcgctttatttaaagggcaagtggagcaattaaatgagccacctttacaacttagcccaatgtat

SEQ ID NO: 32417 - DNA, 1362 bp, Proteus mirabilis
atggctaataaaatagaacatctcgacaccttagcatcagaaatagaaaaacaggctggtgggtttagcaatatcgcaaccttaacacattgcatgacccgtattcgtttgatcttaaaagatagttcgctatttaataccgaagcattaaaacaagtcgaaggtgtcaaaggcgtggtatttaatggcgagcaacatcaagtcatagtaggaatgggaacggccgccaaagtttattcaatcatgaataaacgtatgcaaaaaaacacagataatagcgaagaaacccctgcgtcaacaccagtgaaaaaagggttttccattcgtcgtatgctaaatacgttggcggctatttttgttcctactatcccagcattaattggctgtggtttaattatggggctaattaatattatccgtttagtggctcccggcttagttgatcagtttcctgaactctttaagctatttaaactgatcggaagcaccgtatttgcttatctctctattatgataggtataaatacggctaaagagttaggggcttcaacctccataggtgctgttatggcgggattattagccatgccgggactggctgatatcacattatttggtgagaaattacagcctaatagtggcgggatcttcgcggtcttaatggtggtggtattctcttcaaaattagaactatggtttcgcagtattgtaaaagagagtcttgatcttattttaaccccctttgtcactattttagtttctgcgttagtggcgattatggtattccaacctattggtcattatctgaatcaactattagcgcaaggcgtctccttatcactattaaatcatggtggcggtgcggttgtgacaggcgcagcgttagggggcagtttcttattcttattactaaccggtctacaccaaggtttaataccgatccacactgaaattttaaatacctttgggttaaattacctattccctattttagcaatgggcggaatggggcaagtaggctcttgtttctgggtttatttacgtactaaaaaccaacgcttaaagaaaacgttaatgggtgcattgcctgtcggaattttcggcgtgggtgagcctttattatttggtgtctctttacctttaggtaagccctttattgcaggttgtattggcggagctgcgggtggtgcattaatggcttattttcaggttgggatcattattccatttggtactgctgggttatcattaattccactggtaggggatgggcagatcatcaaattccttatcgcagtattgggggcttgggttgtcggttttattgccagtatattaatcggatttaccgatccagaaaaa

SEQ ID NO: 32418 - DNA, 666 bp, Proteus mirabilis
atgcgtccattagctaattatatcgatcatactctacttgctgcagatacaactgaagcacaaatcaaacaattatgtgctgaagctgttgaacacggtttcttctctgtgtgtattaacacttcttatatccctttagcaagaacttgcctaaccggaagtgatgtaaaagtatgttgtgttatcgacttcccatttggtgcaggcttaacagcaaccaaagcatttgaagcggcagaagctattcgccaaggtgctcaagaagtcgatatggttatcaacattggcatgttaaaaagtggtcgttttgattttgtaaaacaagatattgccgcggtaaaagccgcttgcggaaatacaacactaaaagttattctagaaacatgcctattaactgacgacgaagtacgtttagtttgtgaaatgtgttgcgaagtcggtgttgattttgttaaaacatcaactggatacagtacaatgggtgccacagaacaccatgtcgctttaatgcgtcaaactgtcggtgacaaaatgggcgtaaaagcgtcaggtggtgtacgtgatcgccaaactgccttaaagatgatcaaagcgggggcaacacgtattggtgcaagtgccagtgttgcgattgtaacagattcagatgcaccagaatcaaattac

SEQ ID NO: 32419 - DNA, 1314 bp, Proteus mirabilis
atgtcttactttgataaaattgaacaaattcaatatgaaggtaccaccagcgataaccctctcgcttttcgctactataatccagatgaaattattttagggaaaagaatggaagatcatctgcgatttgctgcctgctattggcataacttctgctggaatggttcggatatgtttggtattggtacgtttgatagaccttggcagacaccgggagaagcactagaacaagcaaagcgtaaagcggatgttgcttttgaatttttccataaactcaatgtacctttttactgttttcatgatgttgatgttatctctgaaggaaatagcattaatgaatatatcaccaatatggcagcaataactgaggtattagcgcaaaaacagcaagaaacgggcgttaaattattatggggaactgcaaattgttttactcatcctcgttacggagctggtgctgcaacaaatcctgatccagaagtatttgcttgggcggcaactcaagtttgtgaagcgatgaaagcaacaaaaacgctgggaggcgaaaattatgtgttatggggaggccgcgaaggttacgaaacattattaaatacagatttacgccaagagcgggaacaaattggtcgttttatgcagatggttgttgagcataaacataaaattggattccaaggtacactgctcatcgagccgaagccacaagagccaactaagcatcaatatgattatgatactgcgacagtttatggtttcttaaaacaatttggtttagaaaaagaagttaaagtgaacatagaagctaaccatgcaactttagcgggtcacagtttccatcatgaaatcgccacagctattgcattaggtattttaggctcagtcgatgctaaccgaggtgatccacaattaggttgggacacagaccaattccccaatagtgtagaagaaaatgcattagttatgtatgaaattctcaaatccggtggttttacgactggtggattaaactttgatgccaaagtacgtcgtcaaagtaatgataaatacgatcttttctatgggcatatatccggaatggacaccatggcaatggcattacgtattgcagcaagaatgatccaagacggtggacttgataaatttattgctcaacgttatgcgggatggagtgctgaacttggccaaaatatcctacaaggtaaattaagtcttgaagaagtggcaaaatatgcacaaagcaataccttagcgccccgcttacaaagcggacgtcaagagatgctagagagtttagtgaatcgttatatttttggt

SEQ ID NO: 32420 - DNA, 1452 bp, Proteus mirabilis
atgtatttagggctagacttaggcacatcaagtgttaaagcgatcatcatgaatgagcaaggtgatgtcgttgccagtcattctatacctttaaccctctcacgccctcatcctcaatggtcagagcaagatccacaagcatggtggcaggcaactgatgaagcgataaaacaactgagtcgtactcaacctatggaacagatccaagccattggtctcagtggtcaaatgcatggcgcggtattacttgatgcgcagcaaaatatattacgccctgctattttatggaacgacggccgcagtgtgaaacaatgtttacgactggcaaagcagtaccctcaatttaaagaaattacgggcaatttagttatgcctgggtttacagcgcctaaattgcaatgggtcgcagaaaacgaagcggagatcttttgtcagattgctcatgtgctattaccaaaagattttctacgttggaaaatgagtggtaattttgccagtgatatgtcggatgcggcgggtacactgtggttggatatgcaaaaacgcgattggagtgatgaattattagcggcaacggggctttctcgatgtcaaatgccgaccttatttgaaggtaaccagataacgggttacttactgccagaaattgctaaaaaatggcaaatgaaacaagtaccgattatagcgggcggtggtgataatgcagcgggtgcaattggtgtaggagtatatcaaccgggtcaaggaatgctctctttgggcacatccggtgtctattttgttgtcagtgaaaagtttctccaaaacagtgacaatgcggtacatagtttttgccatgcattgccacaaacttggcacttaatgtcggtaatattaagtgcggcttcttgtctagattgggtatgccaattaacggggatcagtgatgttggtgcaatgtttaaagaaatagaacagcatgcacattctgatagttccctgctctttttgccttatctttctggtgaacggacaccttataacaatgcggatgccaaaggtgtattttgggggttaactcaccaacatcagcgtgcggatttatgtcgagcggtgttagaaggtgttagttttgcgttgaggcaaggaattgaagtagcggataaggctggacaacatgcagacaatataacgttaattggtggaggggcaagaagtgaatattggcgacaattactagctgatattacaggaaaaaccttggattatcgtcaaggtggtgatgttggtcccgcgctgggagctgctagactggcgcaattagcgataaatccggctcatttatcacaaattattctttctcagccaaaacttgaaacacgtcatgttcccaacttagaaaaacataaggcatatcaagataaatataatgcctttaaaaagctctacacacttattgaaacaatgaaaata

SEQ ID NO: 32421 - DNA, 1350 bp, Proteus mirabilis
atgtttattggctttgactatggaacatcaaattgttctgtggcaataatgaaagaggggaaaccaacgctattacctttagaaggtgagaatgtttatattccatctactctttgtgcgccaacccgtgaatctgtttccgaacatttatttcgccacttaaatattaaacctaccaactctattggcgaacaactattaagaaaatcaatcgcgtttaatcgtgatgaagatattgaattagtgcctgaggatattgttttcggtcaggcagcattaagtttgtatctaaaagatccccatgatgtttattacgtcaaatcgcctaaatcttttcttggtgcctcaggcttacatgagatacaaatcagcttttttgaagatttagtgtgcgccatgatggccaatataaaacaacaagcggaaaaaagcacccaagcaaccattactgatgccatgattggtaaacctattaattttaatgggttagggggagaggctgccaataagcaagccgagcgtattttaattaatgcagctaaacgggccggctttaaacaggttttatttgaatttgaaccagtagccgcaggtttagaatatgaatccacattaaccaaagaccaaacagtcttggtagttgatattggtggtggtacaacggactgctcattgattcaaatgggccctagctatcggggtaaaaccgatcgtgccagtacactattagcgcatagtggacaacgtgtgggtggtaatgatcttgatatctacctagcttttaaacagctaatgcctttatttggcatgacagggctaacttcatcgggcataaaattgccgttaaaacaattttgggatcctattgccatcaataatgttgaagcacaaaaagatttttattctcaacaaaacttagcggcattaaatcaactacgtcgtgatgctcaagagccagaaaagataaaacgcttaattgaagtctataatgaaacactaggatatggcattgtccgcaaagcggaagaggcgaaaatggcattatcagattgccatacctatttagccagcatcgcgttattaagtgaaacattagaaaccaatatcactcgccagcaaatggttgaagccattggatcccctaaagataaaatgattgatttggtcaatgatgccgtacaacaagggggcgtggtacctgatgtggtgtttatgacgggaggctctgcgcgttcaccgattttatgtcaagctatcgagcaacagttacctaatgtgcctattgtaaaaggtaatgatttcggctcagtaaccgcaggattagcccgttggggtgaagtttgttttaaa

SEQ ID NO: 32422 - DNA, 2172 bp, Proteus mirabilis
gtgttcaatttgtttaatggcgcccgccgatttatctataatagccactttttatattatattcgcataataatcgcacttacgggaacgactttatttccatgggctttaggacaagaaccaaaatatactatacctcttacattaggtgttgtcgcagccgcattaactgacttagatgataggcttgtgggccgcttaagaaaccttgtgatcaccttatgttgtttcttattagcatcaacatctatcggattactctacccttaccctattttattcttttgtggtcttgctatctccacttgggggtttattttattaggcgccttgggtcagcgttatgctaccatcgcctttggtgcgctattaatcgctatttataccatgttaggtatgccgattttcccagaatggcatgaacaacctatttggctccttttaggcgcggtttggtataatttgcttaccttaattggtcacctacttttccctattcgtcccgttcaagatagccttacgcgttattatcagcagctttccgcttatctagaagccaaggccgcattatttgatcccgatattgaaggtgatcaacagcaattactgtataacttggcattggctaataatcagttaattgaggcaatgagccaaactaaactaacattactaagccgtttaaaaggtgataggggccagcgtagcagtcgtttcacattgcattattactttgtggctcaagatattcatgaacgggccagctcttctcatattcaatatcaattactgagtgatagattacgccacagtgatgtccttttccgctttcagcgcttactgtcaatgcaagcaagagcctgcgaacaagtcgctcaatctattctttggcataaaaagtaccaacataatcctcattttgaacgtgcaatcactcatttagaaaatgcacttaataatgtaaaaaacagtacttctgatccacaaattattgcgccactctataatttattacaaaacttacagggcatcgatgctttattaaaaagtattagtacagagcaatatcaaatctctcatgaccaaaaagaagaaactcagttatctgatgaagggcttactgggtggcgagatatcgtgctaagaataaaaggtcacttaacaccaaaatcagctctatttagacatgcagtacgaatgtcacttgtcttatgtataggttatgtgatcatccagttttttgatttgcatcgagggtactggattttattaaccagtttgtttgtttgtcagcctaactataatgcgacacgtagacgattaacattacgggtcagtggcactattattggtattttaattggtttccctattctctattttgtgccttccatcgaaggtcaattagtgcttattgttgtgacaggtacgctcttttttgctttccgaaccgtacaatacgctcatgccactttgtttattaccctactcgttttattaagttttaatttattaggtgaaggctatgatgtcgcactaccgcggatcattgatacgttaattggatgtgccattgcctggtttgcagtcagttttatttggccggattggaagttccgtcagttgccattgctcatccaaaaaaccatgaccaataactgctactatcttgatgcgatcctcattcagtattatcaaggaagagataatagcgttaattatcgtattgcacgccgtaatgcacatagcagtgatggtgagttagcatctttaatttctaatatgtcatcagagcctaaaagctttcaaacctctcaagaagaagcatttaaattactgtgtttaaatcatactttactgagctatatttcagcgttaggtgttcatcgttgcaaaattgaagatgaagcggtactcaccctgcttaatgatactgtctgttatattgattcagcgttgagacgtaaaaaaccacaagataatgattttatacaatctcacgatcaacttatcgcacgtgttaatgcacaaccaagttcagataacgcccgtattcaattagtgttaacgcaaatacgcttgttactggatttattgccacaaattgtcaattgcattgagctaattgagcaaacagaatggcaaaacgataaagataaattagctacagct

SEQ ID NO: 32423 - DNA, 7074 bp, Proteus mirabilis
atgacgacgttaaataatgtaccttccccacgccccagttctattacgagaaaagtcgcttggcttaatatttttatacaattagcatttcctattgtgacaaccatgcctacgcagacttttgccaatgagaataactttaaaaaacataatattagcgatataaaccaacaaaatacttatcaagtcaaagcgggtgataccccagaatctatcgcaaaaaaatttaatataaaattatttaaattgattgaagctaatccacaacatgtatcgttaacgggtgagctaaaaataaatgatggaactattcttaatattcctaatgaatatttattaaaaaaaaagtggctcaataatcaagatgaggcaatcccctcaacagagggcgaagagctcgctaaaattattgttgataattcatttttactcaataaagatatcgatgtaacacaatatgcaattagccaaatctccagtaaatccaatcagaaaatagaacaatggcttaatcaatttgggcatgcgcgagtttcactttcagcagataaaaatctcaccttaaaaaatagctcagcggaattgttaattccattatatgaacaaaaagaaaagctgatctttgctcaaactaactatcatcgcaaagatcttcgtagccaatttaattatggtattggttatcgctattttactgaaaaatttatggtcggcattaatggcttttatgatcatgatttaacgcatcatcataatcgtttgggaattggcgccgaaatttggcgagactatttcaaattaagttctaaccattatcaccgtctatcaagttggcgagcctctaataatatcttagattatagtgaacgccctgcgaatggttgggacattcgaacagaaggctattttccagcttatccacaattaggcactaaattaatctttgaacaatactacggtaaagaagttggtctatttggcaaagataaacgggacaaaaatccacatacctacacattagggattaattatactccgataccattagtcacattaaatgccgagcgtcgtattggcttacatgatcgtgctgataataacttgaatatcaacttgtcctaccgcataggagaatcactcgcttcacaacttaatcctgataatgtcaaagcaatacgtacattagcaggaagtcgttatgactttgttaatcgtaataacgatatgattttagaatataaaaaggaaactttagttttcctttctatggttgattcaataaatggttatgctaaagaggagcgcgatttacaagttcaagtaaaaacaaaatatccgttagccaatattgaatggtccgcaagtaagttaaatgcccaaggcgggcaaataaaacatcatggtggaactcactacaccgtgattttgcctcaatatcaaattggtgcaattgagaaaaatagctatatcattagtgctgttgccattgatacccatggcaatcgttcagcgcctgttcaaacaacggttattgtagataaatcgttaatcaatacgcgtaatagcctattttcacctaaacagagccaactattcgctaacggtgaagcaacccaaaagttaatattatccatcgttgataatgataatttacccgttgatattgatagtaaagaaattactttacagcaacagtctgatacagaaaaaggcaatagccgtatttctactttctctcgtttagctgctgggaaatatcaattaacggttacagcaggaagcataccggaaaaattaaccctaacccccgtattccgtgataataccttcaactcagcaaccgtgacacttattgccgataatcaaactgcccatattgcaaaaggcaacctaacggttacaaaagataacgcgccagccgacggtaaaagtcaaaataaaatcaaagtacgagtcactgatagcaaccacaatccattggctcattatccagtcaactttactgccagtaatggtgctaatgtcattagctcaagaaaaacggatgaacaaggtgagattattgcttcagtgactaatactcaagtagggagttcgcagattggtgtacaagtaaaagggataacctattcgactgaagtccattttagtgtggataatgatagcgcctatattccacaacaaaacttcacgatcataccaccactttctctagccgatggtaaaacagaaaaaaacatttcattacaagttgttgataagcaaaataatccgatacccgctactcatgtgacattatcggcagataaccaagcacaattaaaacaaaccatattaaccacagacgagcaaggtaaggcgaccaccactatgataagtaaagtcgccggtacggtcaccgtgagggccaaaataaacgacaagatgactcacgcgacaacccaatttatcgccaaccaagctaagggggttattgtctccataaccccatcctctacaactcatgtcgcagatggtcaaaccccggtcatccttactgcattagtacaagatcagttcggtgagccgctccctcatgcacaaattagctgggaaactgagcacgataaaagtattgttaaaattgaacataccacaatgactaatgagcaagggatcaccaccaacaagttaaccagtacacaagcactcagtgtgcgggtaactgcgcgtataaataacaatgcctttactgctgagccaattacttttattgctaatgggcaacaagctttgattagtgaattattggttaataaaaatcagattgttgcagataagcaagatcccgcagaacttactgcaatagtaacagataaactgggtaatcaacttcctgatactattgttaattggcaagggagtgctggtactcaatttgctcagcaacaaactaagaccgatgctcaaggtatcgccaaaaatacgctaacaacatcacaatcaggtatcacaaccatcaccgcgcgattaaataatggtcaacatgcacaaactaacttagttgccgttgcagatctcaaaagtgccactctcacattaacgacattaaataataagcaatctgccatagcagataaccaagatagcattaccgtagtagcaaacttaactgatgcttatcataacccattgaaaaatatccctgtctattggcaatcaagtattaatcatattgatgaaactactactcaaacagatgaaaaaggcagaacgcaagttgtcatttcaggaaccaaagcacagccaacaacaattaccgcctatttatcaaataaagagaaaaaaagcattcaggtaacctttgttgcgggggcgccagtgcaacaaaatagttatttgacgattgaaccacaatctatcattgccgatggtaatgcctttgctgtgggtaaaatagacctgcgtgataaatttgataatccggtaataggtcgtagtaacgatattgcgttaattggggataacagcaccatccaattcagtaaaatcacagaaacggctaacggcaattatcaagctcatattagaggtacaaaagcgggactcagtcaaattaccgccactattgatagtattacggtaacgcaatctttaggatttttaacagataataaaacagtcaagatccactccgttaaggttatggcaccttataccgtaacagcgaatggtaaagacaaagtcattattcaagcacaaatcaccgataaacataacaatccagtatcaaaaggcgttactgtcggttggataagtgatctcggtaagcttgcagcaccattaagcatgaccaataagcaaggaatagctgaaattaccctctcaagtactcaggcaggaaaagcgaaagtaacggcagtgctcaataaccaacaatctgtcaatgctgatcacattgtcacctttacggaaggtgatatttcggcctctctttctactgttgccatattccctgacactattgtcgcaggggcaaataaagcgaccgtaacaataaccttaaaggataaagaaggtaatttattgcccaacttagccaataaaatcaccttaacgccgcagactaatttacaaacaacgattacgccctttaaagagaaacaaaaaggcatttatcaagcccaagtgagcgcattaaaaaccggaaaaacctcgttatcggctcacgttgctccattagcaataaaacaatccgtttctttaacggtgctccctaataacacaacagcaaaggtgaaaaactttactattagcaatatgcaaccacatgctggggagtctattacttataaagcctatttagttgataaccatgataatcctgtcggtatgggtgtacctgtcgcttggtcaacgaatgaaggtagtcaactcgaaacaccattaacttttacagatgataatggtgtagcaatagttggattatctcgacgctctgtcggtgttgccaaagtcagcgcaatattagcaacaggtacttatatagcagatgatgttcactttttaacgggtcacattgatgaaacgatgtcagaactgtcgttgaacccgagtcaaatcattgctaatggcaaagataaggcattattgacatttgtgattaaagataaaaatggaaatatcatccccaaccaacaagtaagcggattttctaaaaatccaaccatcaaatttagtcaagcacaacaaatatcaccgggacgctatgagattgaaataacaggaactcaatcgggcacagcacaaattggtgttatggtaaatggcacccatttcaaaaaacaaaaaatattacaacttaatgccgatgtgacgacatggaaaatacgcgctgttgaggttgatagaacaaccataaccgcaggagataaaggtgttaactaccaagcaactgtcgttgatgccaataataatgtattacctaatgttattgtgtcatggaaattactcggatcagcagatgattatcattacagcacttatactaatgataaggggatagcaacgaatcgagtgactagtcatgtcgcgggacgcttgaagatgagcgcttatcttgattctaataattataaatcaacacaagatattactgtaataccggctgaaatagatattcataaatcaacctttaatagtcatcgtcgttctataaatgctgataataaagatagtacgttattaagcgtaaaattaatggataaatacgataatactattgatggtaagaatgttgagattaaaactatcagtggtaagcctaattttagtgacaatccattaaagtcagtgggcaatggtgaatatcaaacaaatgttacagcaaatacgatgtccgatattatcttaaccgctcaagctgaaacaataactatcgcagagccattgacgattaaagtggctatccctaaatctgaaattacctttgagaaacctatccaacaggaaatctacaaatcaactgtgattgatgcgttaagttataaaggtgtaccacaaaatatgcaggtaatatggtcaagctctgatcctactgttgcttccattgatacaacaagtgggcaaatctccatgaaaaaggctggtactacaattattaccttacaaaccttaggtaatgagcaatatccatcagctaaaaatagctatcctttagtgatagaaaaagcgccacccaaactgaaagtgatttctcctcacaccatacaatcgatctggaatgatggcattacccatcaaatagcagcggaatttgataatccagaggctaaaaatatccccattcatttctctagtagcgataccttggtagccaccattgatagtaaaggtaacttaaccgccattaaaccaggaaaaacaaaaatagtaatacaaagtgatgctacagataaattcctagcggatagccaaactgtagactatcagcaagaaaaagccgcactaagttattattttaaaaagaattatattgtattaacaactgattctgctgcagataaattattgatggctcaaagccctacgccagatgtccccgttgaagcgaatgcaacttggtatagtagtcaacctaacatagttgaaatcaccccagatgggattatcaaaaaccttaatattgggcaaacaacattaacacttgaggtgaaaaataataattattttcaagatcatgagcaaagctataacgtcattatacaagcatcgcctcgcatcaaaattaactcatttgagtttctatctgcgggagagagcaaatcaaatacacatttggatgatttaacttggcaacctttatacacttcagacgatcagtttattgttaaatggtcttcatcagacacacctaaagcgattaacttcgagttatttgatgaaaatggcacttctatcgccttagaagaaagacaaaactatgcacctaaatataatatacatgccccagtaaaaattcaggtaccgaaacaatatctaaccagtccaaaacaattaacactagaagtcacaacctttgatagtaataatcagccttatgtcgatcctaaaaagtataaaattaatattgactattttcctgccaataacgcatataaaataatctctcttgattataattctaaatttatctatacagatacaggtacccttgcttcatcttgtcaaaatggttggtcaaccactacaacacatcttattttaacgccaagattagtatttaaaggtgagccgaaaaagttactttatcccatttatattactacggaattatatgatgtaacattaaatccatcggataaactcatcggacatattaatgagaaattaacttatccagataagattatatttagcgagcattctaaaaaaatagctgaaatatcgccgacatcagcacactacgcattagacgaagaatgtagaattaatgattctggtcatggtacgttaaaagcaaatataaccataggtaacagatccagttatcttaaaaaagaatttcattgggatggccaaatagggggatatttt

SEQ ID NO: 32424 - DNA, 786 bp, Proteus mirabilis
atgggctttatgaccggcaaacgcattctgattactggtgttgcgagcaaattatcaattgcttatggtattgccaaagccatgcatgatcaaggcgctgaactggcttttacttatcagaatgaaaaactcaaacctcgcgttgaagagtttgcagcctcattaaattctaacatcgtattagagtgtgatgtgtcaaaagatgaaagcattgacgcaatgtatgcagagctagcaaaagtttggcctaaatatgatggttttgttcactctatcggtttcgcacctgctgaccaattagatggcgactatgttaacgctgtcactcgtgaaggctttaaaattgcccatgacatcagtgcatatagctttgttgcaatggcaaaagcaagccgtgcaatgttaaatccaaactctgcattattaacgctgacttacctcggtgctgagcgtgcaattcctaactataatgttatggggttagctaaagcttctctagaagcaaacgtacgttatatggcaaatgctatgggtcctgaaggtattcgtgttaacggtatctctgcaggtccaattcgtaccttagcggcatctggtatcaaagatttccgtaaaatgttaaatcattgcgaatccgtcacccctttacgtcgcacagtcactactgaagatgtgggtaatactgcagctttcttatgctctgacttatctggcgggatcaccggtgaaatcattcacgtagacggtggttttagcattgccgcaatgaatgaattagagttgaaa

SEQ ID NO: 32425 - DNA, 966 bp, Proteus mirabilis
atgacagatactaataaaaaaaagttaacaatcaatgatatagccaaactttgtggtgtgggcaaatcgactgtttcaagagtacttaatcaagatcctatggttaatgaagaaacaaggaaaaaagttaactcaattattgagaaatataaattcacgccgtcaaaatctgcacgagcaatgcggggatactctaatcgttcttttggtattatcgtcactcgcctggattcttatgcggaaaatcaagcggttagtgccatattaccgatcctttatcaaaacaacattgaccctattattttagaaagccaatttagccaagccaaagtagaagaaaacttaaaaatgctcgcccaccagaaaatcgatggcgtaatattatttgcattttcagggatcaatgcggctaacttagcaagttggaaacaaaaaatggttgttatagcaagaccactagaaggttttgtttccatttgtcatgacgatgaacgagctgttaacgctttaatgcattatttccatcgagacaaacattatcaacatataagttttatcgggatccaaatcaatgatgaaacaacgggtttattacgttatcaaacttatcttcaatattgccagcaacatcaattaatatctcaagctcaacttggtgaacttaattatcaaagtggctatttacttgccaaacaagcattagcaagcaagcctcaagctattttatgtgcgaccgactcactggcctttggtgtacaaaaatatttagccgaacagaaaatagatcatattgaggtggcctgtatcggtcgtaatgatctactcacctttttatttcctcaaactaaattctatcgattaggttttagagaaagtggacaagaagctgctaacatattgatacaaatgctagaaaaaaatattcctgcacaaaaaatcattatatcaagtcatgacttaaaccca

SEQ ID NO: 32426 - DNA, 2715 bp, Proteus mirabilis
atgaattatatctctgttattctttctgatactgatatcacaattaaatatctttcagaaaaaagccattattcatttaataccacaaatagccattaccttgattggctaaatatggctaaagctattaaccataaatttaaatctgctcaaggtggtttgatatattcgacaagtaataaattggatagcgatattattaaaaccattgataataaagtaataaatttatcaaatttctttactgaaatatttaataaaccttttatttatatcaataaagcgcagcttgaacatcatcataatttagaagaaaaaatggttacagttgccaataactttgcttggtcaattgaatattcaggcttagaaacaggaaaagatgaatattgccaagagtctctcttaactacggccaatggttatattgggttaagaggaactttgcccgaaatgactataagtgatgagcactaccccgctacctatattgctggcctatataatcaagcaagttcacaaatagaaaaccatcaggtgattaatgaagattttgttaatgcacctaatggacaatttatttctcttaaaattggtaagggagaatatcttcatccaaagcaactgataacacaccatttaacacgtcatttagatttgaaaacgggtgtattcactagccaatggcgtgtagaaacccctgaaggacagcaacttgatattcattgtacaaaatttgccaatatggctgatatgtcacattacgccattttatatacctttaaaccattaaatttctcaggtgagataacggttataactcgcctagaaggaaatacttataattacggtgtacaacgctaccgtagccttaatccccatcattatcatgtgttacaaactggagcgaataagcaacacgcatttatattagctcaaacagatcagtcaaaaatagggatcggattatcgtcaacaataagtggtgatttctttgcaaatgaagatattgtttgtcatgtttcagatacgcttgttgaacaaaccatcaccttcaacgctcaacaaaataccacctatcaacttgaaaaatgtgttgctgtaacaacctctacggcttacccagactcatggcaagatgtggttaattgggaacaacaacctttacacagccaattgataaatagccaaaaagcgtggcaaacgttatgggatagtgccgatatctcgatttctggcgatctgatgacccaaaaattactacgcttacataccttccatttactgtcatccgcatcaccatttagcaatcagcaacatcaattagatgtttcagtcaccgcccgagggttacacggggaagcctatcgaggccatattttctgggatgagatctttattctgccattttatattatgcacttccctgaaaccgcacgccaactattactatatcgttaccacaggctacctgctgcgcgtcttgcggcacgagcagaaggatttcaaggtgctatgttcccttggcaatcagggcatgatggtagtgagcaaacccagacactgcatttaaaccccttatcagggcaatgggatgccgaccacagttgtcgtcaacgtcatgtctcattagcgattgcctataatgtgtggctatattggctaaatactcatgatcaccaatttatggaacagtatggacttgaactactcaatgacattaccttgttctggttagaccaatgtcagtgggatgaaggcgatcaacgttttcatattgatggagttatggggccggatgaatttcatgagaaatacgcagactcacttgaaggtggcttaaaagataacgcatacactaatttaatggtgatttggttgtttaatcaaatagagatgttcataaacaatgatcgtttttctaaaaaattacaacagctaaacagccaatctagcgttttcaataaaatacaagaagttaaaaatcgtattgctatcaatattgatgctcatgaaattattgaacagttctcaggttattttcaattaaaagatctggattgggaaagctatcgaaaaaaatacggcaatatctatcgtatggatagaattttgcgtaaagaaaataaatctgccgatgattacaaagtagctaaacaagcagataccctgatgttatttaataacttagataagcaaaccgtacattccctaattacctctcttggttattcagtttctaagcactttgctgaaaaaaatctacattactatttagaaagaacctctcatggttccacactgtcacgcattgtccatgcttatctcgcagaacaaatacagttacatgatttgtcatggcaactttatcaagatgctctttattcagattataatgatattcaaggtggaacaactgccgaaggtattcatactggtgtcatggcggcaacattaaataccaccatcatggcttatgccggtgttgatattcgtcaggatatgctgaccatcaccccttcactccctcaacaatggcaaaagctaagctttaaattattgcatcgctctactttatatcaaattaatctcactcataaagaaattagtattttaagtgataagcccagtactattttaattaaccatcaaacgcataagctaaccgccaatacgttattagtattaaatttaaatggagacacgcaaaatgac

SEQ ID NO: 32427 - DNA, 996 bp, Proteus mirabilis
atgagccaatcagcacgtatcactctgttgttgctgttattctcagtggctgtagttattgctatcactagtggtaagtattcacttacagtcaatgaactgtggacagtcgtcagtagcaaattaaccgggcatattgaagagagtcgaacagcaaccgtgttctggcaaatacgcttgcctcgagtgcttgctgccattttaattggaggtgggcttgctattgcgggggcggcttatcaaggtatgttccgtaacccactagtatcacctgatattctcggagtgtcatcaggggctggtgtcggtgctgtattgggtatttttcttggtcactccatgttgtcaattcagctttttgcttttgtcggagggcttatcactgttgctttagtctattttattgccaaattggcgaaacaacaggatccggtcctttctcttgttttagttggtattgcgattagcgccttatgtggctcagctatttcattaatgaaaattttagctgatccttatactcagctaccttccatcactttttggctgttaggagggctatcaactatcacggcgcctgatttactctctgttgcacctttaatgctactcgggtttattccactgattttattacgctggcgaatgaatattctcagcctttctgatgaagaagcgcgctccttaggccttaatgtagaaattaccagacttatctttattttatcggccacattaatcaccgcgagtgcagtttctattgcgggcattattggctggttaggtttaattgttccgcatatcgcaagattgttagttggtgctaacttcggatatcaactgcctatttccttacttgtgggcgcaacaatgttattaataacggatacactagcacgaactattgcgaatattgagttgcctttaggcattttaacctcagctattggtgcgcctttctttctgatgttattactcaaaacaaggcgggataga

SEQ ID NO: 32428 - DNA, 2124 bp, Proteus mirabilis
ttgtacctgtttgaaagcctgaatcaaatcgttcaaaaatacttgccacctgagcaagttgaacaactcaaaaaagcctttatcgtcgccagagatgcccacgaggggcagactcgttcaagtggtgagccttatattactcaccctgtggcggttgcctgtattcttgccgatatgcgattagatcatcaaacgctaatggcggcattgttgcatgatgtcattgaagatacacctgcaacatttaaagatatcgaaactctgtttggcagtacggtggcagatctggttgaaggcgtctcaaaactggataaattaaagtttcgagataaaaaagaggctcaggctgaaaactttcgcaaaatgatcatggcgatggtaaaagacattcgcgttattttgatcaaattggcagaccgaactcacaatatgcgcacgctgggttcactacgcccagataaacgtcgccgtattgcacgcgaaacgctggaaatttatagtcctcttgctcaccgtttaggtatacaccatattaaaactgagctagaagaattaggctttgaggcactacatcctaatcgctaccgcgtgattaaagaagttgttaaggcagctcgtggtaaccgtaaagagatgattaataaaatcctctctgaaattgaagggcgccttacagaagcgagtattcaatgcaaagttaacggtcgcgaaaaacacctttattccatttatcgtaaaatgttgctaaaagagcaacgttttcactcaattatggatatttatgcctttcgcgtcatcgttaaagatgtcgatacctgctatcgcgtgttaggccaaatgcatagcctttataaacctcgccctggccgcgttaaagactatattgctatccccaaagctaatggttatcaatcccttcacacttcgctcattggtcctcatggtgtccctgttgaagtacaaattcgtaccgaagatatggatcaaatggctgaaatgggcgttgcggcccattgggcttataaagagcaaggtgagcagccggggacaacagcccaagtcagagcacaacgttggatgcaaagtttacttgaattgcaacaaagtgcaggtagctcttttgaatttatcgaaaacgtgaaatcagacctttttcctgatgaaatttacgttttcaccccagaaggtcgcattgttgaattaccaacgggtgcgactccggttgattttgcttacgcagttcatactgatattggtcatgcttgtgtcggtgcaagggttgatagacaaccttatccactctcacagtctttacgtaccggacagaccgttgaaatcattactgcgccgggtgcaagaccaaatgcggcttggttaaactttgtcgtcagttcaagagcccgttcaaagataagacagttgctcaaaaatctaaaacgtgaagactctattaatttaggtcgtcgtctacttaatcacgctttaggccatcataaagtggcagatattccgctagaaaatattgaacgagagttgaagcgcatgaagcttcactcaatggacgatattatggctgagataggtttaggtaatgcgatgagtgttgttgtggcgcgtaacttattgattgacaaccaacaacaagaagaacacacacatctaagcataaccaatgacgaaacacctaaattacctattaaaggggctgatggtgtacttatctcatttgctaaatgttgtcgccctattcctggtgatcctattgttgcgcacattagccctggtaaaggcttagttattcaccacgaatcttgtcgtaatattcgcggttatcaaaaagagccagaaaaattcatgccagttgagtgggataaagatattgatggtgattttattaccgaaatcaaagtcgatatgataaaccatcaaggtgcattagcgaatttaaccgcagcaattaatgacgctaattcaagcattcagagcatgaataccgaagagaaagatggacgcgtctattgtgcatttattcgactgacagccaaagatcgcatccaattagccaatattatgcgtaaacttcgtatcatgcctgatgtattacgtgtcagccgtaataaaaac

SEQ ID NO: 32429 - DNA, 345 bp, Proteus mirabilis
atggctgtgatccccaaaaactatgcaaaactagaaagcggttaccgcgaaaaggcgctaaaactctacccttgggtttgtggacgttgtgctcgtgaatttgtctattcaaatctgcgtgaattaaccgttcatcatattgatcacgaccacaccaataatcccgaagatggcagtaactgggagttactgtgtctgtattgtcatgatcatgagcactcaaaatacacagaagcagaagagtacggctctaccgttgtagcaggggaagatgcccaagatgatgttgggcaagcaacctataatccctttgctgatttaaaggcgatgctgaataagaaaaag

SEQ ID NO: 32430 - DNA, 3888 bp, Proteus mirabilis
atggaaatcctgcgtggctcccccgctttatccgcttttcgtattaataaactattaactttatgtcaggaaaaccaacttcctgtccgtggtatttatgcggagtttatccattttgtaaaagtggatggacagctatctgaagatgaacaagctaaattaagcaagttactgcactatggcccttcattaacagagcatgagcttgttggagagatgcgtattgttgtaccacgaccgggaaccatttcaccatggtcgactaaagcgacagatattgcccataattgtggtttaacacaagtggttagaattgaacgtggtattgcttattatatagatagcgatacgatggacgaagaacagtggcagttgttatacggttttatttatgatcgtatgatggaaacaatttttaccgattatcaacaagttaatgcgctatttgctgaacagacacccaccccattaaaaacaattgatgttcttgctcacggtaaagatgcgctagttgctgccaatattgaaatggggttagcgctggctgatgatgaagttgattatctagtagatgtttttaaacgtttgcaacgtaatccaactgatgtagaactttatatgttcgctcaagcaaactcagagcattgccgtcataaaatttttaatgcagattggataatcgacggtaaagcgcaagacaaatcattatttaaaatgattaaaaatacttttgagcaaactcctgattatgtcttgtcggcttataaagataatgctgctgtaatggaaggctccgttgctgggcgtttttatcccgatacggaaaaagggcattaccgttatcatcaagagcctgtccatatcttaatgaaagtggaaacgcacaatcacccaacggcaatttccccgtggcctggtgcagcaactggctctggcggcgaaattcgtgatgaaggggcgacaggccgtggggcaaaacctaaagcgggtttagtcggtttttccgtttctaacttacgtattccggggtttgaacaaccttgggaagaagattttggcagaccagaacgtattgtcagtgcactggacattatgacagaaggccctttaggtggagccgcatttaataatgaatttggtcgccccgccttattaggttatttcagaacctatgaagagcaggttaatagccataatggtgttgaaattcgaggctaccataaacctattatgttggctggtggtattggtaatattcgcgaagatcacgtgcaaaaaggtgagatctccgtgggtgctaagttaattgtacttggtggcccatcgatgaatatcggcctaggaggtggtgcggcttcttctatgacttccggccagtcagatgctgatttagattttgcttctgtgcaacgagataacccagaaatggagcgtcgttgccaagaggttatcgatcgctgttggcaattaggtgatgataacccgattttatttattcatgatgtcggagcgggggggctttctaatgccatgcctgagcttgtcaatgatggcgggcgtggaggtcattttgagttacgtaacgttttaaatgatgaaccgggtatgagtcctctagagatctggtgtaatgagtcgcaagagcgttatgtattagcggtatccccagaaaaaatgccactatttgatgcgctatgccaacgagaaagagccccttatgcggtcattggcgaggcaacacaagagcgtgaattagtgttaaatgatacacactttgataataaaccaatagatatgcctttagatatcttgttgggtaaagcgccgaaaatgttgcgtgatgtcacatcacatcaaacagcaggtgaatatctcgatcgtaaagatatcgatttaaaagaagcggtttatcgcgtacttcatttacccgccgttgctgagaagacgttcttaattactattggtgatcgtagtgttacgggaatggttgcgcgtgaccaaatggttggaccttggcaaattccggtggctaactgtgcggtaacaacggccacattagatagctattacggcgaggcgatgtcaataggggaaagagcccctattgcactattagattttgccgcttcagcgcgaatggcggtaggtgaagccttaaccaatatggcgggttgcgatgtacagtcacttaatcgtataaaactttccgcaaactggatggctgcggcgggtcaccctggcgaagatgcgggattatatgatgcagtaaaagccattggtgaagagctatgcccacaattaggtattactattccggtgggtaaggactcaatgtccatgaaaacgcgttggcaagatgaacaagggaaaacgaaagaagttatttcccctctctctttagttatcaccgcattttcccgtgttgaagatgtacgtaaaactgtcacccctgagctttctacccaagaaggaaaccgtttatatctaatcgatttaggtaatggtcataatgcattaggggcaacagcattagctcaagtttatcgtcagctaggacaaaaagcggctgatttacgtgatgtagagcagttaaaacagttttttaatgtcattcaacaattggtgagcgacggtaaattactggcttatcatgaccgctctgatggtggcttatttgtgactttggccgaaatggcgtttgcgggacattgtggccttaatgttgatatcagtgcttatgacgaagatattttagcaggtctatttaatgaagagctaggtgcggtgttccaaattaaaggggagcatcaagaaagcgttgaaacactgtttactgaacatggtttagcagattgtttacattacttagggcaagcaacaccaagtgatgacattattattcaaagccgtgaaacggaagtttaccacgaaaaacgtagtacattacgtgtctggtgggctgaaacgacatggcaaatgcaacgtttacgtgataatcctgaatgtgcagatgaagaacatcgtgccaaacaagatagtcacgatccgggattaaatgttcacttaacctttgatcccgcagaggatattgcggcgccttatattgctacaggcagtcgtcctcgtattgcggtattaagagagcaaggtgttaactctcatgtggaaatggcagcagcttttgatcgcgctggatttgatgctattgatgttcatatgagtgatttacatacggcacaacgctcattaagtgattttgatgtactggttgcttgtggtggtttctcttatggtgatgtactcggtgcgggtgagggatgggctaaatctattttatttaatcatcgtttacgtgatgagtttgcccaattctttgcacgtcaagatacgttatcacttggggtttgtaatggttgccaaatgatgtcaacgttggccgagcttattccgggggcagatttatggccgcgctttgtacgcaatcgctcagagcgttttgaagcccgctttagcttagtaaaagtaactgatagcccgtcgctattattacaaggtatggcgggttcacagatgccaattgcggtatcccatggtgaaggttttgctgaatttcgtgacgctgcacaattagcgcagttagaagcacaaaatttagtaggattgcgttttgttgatcactatggtcaaccaacagagcaatacccattaaaccctaatggatcagtaaaagggatcaccgctgttaccacaacagatggccgctcaacaatcatgatgcctcaccctgagcgcgtttttagaacagtgagccattcttggcatccagaaaattggggagaagatagcccttggatgcgcttattccgtaatgccagaaagcaatttgac

SEQ ID NO: 32431 - DNA, 2373 bp, Proteus mirabilis
atgcagatattaatgcctaagcaatcgggcaaactcggtagacgcctttatttggcgtttatctttagttcgttactcactttattgattggtggggtgatattttttatgtggggaaaattagccactcaaatcaatgcgtctgttggtgactccttacctatgttaaccaccagctataatatggagcgttacagcactaatttacagatgctattaaaagagcgtgaacaaacacaacgtaaatcagtttcagaacaacaaaaacagcagatttatcaactattagataatctgcgcgagtttccgattgagcaacaatcacaacgcactttttataatcaattagtggatgacttatcaaacttaattgagcagcaagatattttattagataaacgtcgtgaactcgaaaataggttagcacagcttttaggtcaattggcttggatgcatgatgcggtaggtgaagatattaagcctctacttaatgaaattgagtggcatgtcagccaaatgcttaatgaaaaaaatgtacaggaaaatagcttacaactgcttttagaatcaacgttacttcaagagttattcactacagaaaatgaattaattagcttagtggaagaaattgcacatcaacgctatagccgtgatattgatgtcgcatttcactatataagtgtcaaaattgatgaaattatcgctttaaatcaaaaattaaaaagctatccttctaccattgctcatcgccaagtattgcaagaaattattgcgatcactcgttttgacggtgatatctatcaaacattgattgatgatgtcgaaaccgaaaaaaaacttaaagcacttacccctaaattaaatgaaaaattatctcagtttgataatgcagtaagaagtaatgtgcttgccaccagtgaagcattgaataagctcaatgataatacgcgacaactgatggcaacgggaaaaattgtcattatcttaattgtcgttgcttcactattgctcagcattattgtcatgaaaatcttaatagataggcgactgatttctagattaaataagttgagtgatgatcttgcccatgttgctaaaggtcatttaacagagcctgtattaattgaagggcaagatgaaattggattattaagtcgccgtttgcggcgcttttggcgtcaaatgaaagaagttgaagccacgaatgccctgaatctgattaataataccgatgccagtttaattacttgtcatcatgatggacgtatggaaaccgtcaatcccagtgctgctactttattaggtattggtcatgaacagagcaataaaccattatggttattatttagtggtgaagccaatacgatattaagagcgcagtttagtcccacaagtccgctttatttgtttgggcaaagtgagtctattgtgagcatggtaaaacaaggaaagcctcattttctgcaatttaatattcgcgaatatcctcataaagacgagcataaatatattgtgacgatcacggatattactcgccaagaattaagtcgattagaattaaaacatcttgtggcattaaaaacccaagatttacaagaaaagaaccaacaattaaatgaagagattgtgcgtcgtgaacaagcacaaaaacacttaattcagacacaagaagagttagtgcaagcggccaaaatggcagtagtaggacaggcaatgaccagtcttgctcatgaattaaatcaaccgctttcagccattaatacctacttatatagcgttaaattaacactacagatggagaaatatgaccaactccctgatcccattgagcgtattgaaaaattatgtgctcgtatgaataggatcattacagcattacgtaatttttctaaaaaatcctcatctgaagtcagttatgtttcagcgccgttacaggggctggtggaaagtgccatggtattagtggaatcgcgctctaaacgagagcagtgcaccattatcaataatatccccagtgaactgaatatttgtgccgatccaacacaaatagagcaggtcttagttaacctgtttgttaatgcaatggatgcggtcgcgggaatgggcgaaagtcagatcagcgtcgacctattatcggatgaagctaaatatcaacgagtaggcattaccgatagtggcaaaggatttaatgctgatgttttaccaaaattattcaccccttttaccaccaccaaagatgttgggctagggttagggctatcgatttgccgttctattatgcaacggtttggttatgaaatttacttagcatcggcattaaatggcggtgcgatggttgttttggagtttactcatgacacagtcactgctgtc

SEQ ID NO: 32432 - DNA, 1644 bp, Proteus mirabilis
atgaaaaatgtaaacccaactcataccttagcttggaaggcattagaagaccattttgccgtgatgaaagatacagaaatgaaaacactgttctctcaagatccatcacgctttaacaccttttcaagaacgttttcagaccaaattctagtcgatttttcaaaaaaccgtatcacccaagaaacattagataaattacaggctctggctaaagagtgtgatgttgctggtgcgataaagagcatgtttagcggtgaaaaaatcaactgtacggaagatcgtgcggtactccacaccgcattacgcaaccgtagcaatacaccggttatggtcgatggcaaagatgtgatgccagaagtcaatgctgtattgcataaaatgaaagtatttagtgagcgtgtgattagtggtgaatggaaaggttacacaggtaaagcgattactgatgtggtcaatatcggtattggtggttctgatttaggcccgtatatggtgacagaagcactgcgcccttataaaaaccacttgaccatgcattttgtttctaatgttgatggtacacatattgcagaaaccttgaaaaaatgcgatccagaaacaacgctattcttgattgcttcaaaaacctttaccacacaagaaaccatgactaatgcacactctgcaagagattggttcttatctgcggctaaagagagtgcttttgtcgcgaaacactttgttgcgttatcaactaatagtgctgaagtagaaaaatttggtattgataccgcaaatatgtttgagttttgggattgggttggtggccgctactcattatggtcagcaattggtttatccattgtattatctattggttatgacaactttgagcagttactgtctggtgctcatgctatggataatcactttagaaccactgaagctgaaaataatattccgatgatattggcgcttattggcatttggtataacaatttttttggtaccgaaactgaagcgattctgccatacgatcaatatatgcaccgttttgctgcttacttccaacaaggtaatatggaatccaatggtaaatatatcgaccgtgatggaaacaaagtcagttaccaaaccggacctattatttggggagagccggggactaatggccagcatgcgttttatcaattaattcatcaaggaaccaaactgatcccttgtgattttattgcaccagcgatcagccataatccattatctgatcatcatgcaaaactaatgtcgaacttctttgcacaaaccgaagcattagcatttggtaaaactcgtgagcaagtcgatgcagagtttgcctcagcaggaaaagatcctgcaaccatgggatatgtggcaccatttaaagtgtttgaagggaatcgtcccaccaactccattcttttaaaagagatcactccctattcattaggcgcgttaattgcgatgtatgaacataaaatctttgtacaaggtgtaattttcaatatcttcacctttgaccaatggggcgttgagttgggcaaacaattagctaatcgcatattgccagagttaaaaggtaaggaaagtgttaacagtcatgatagttcaacaaataatttaattaatcgttacaaagcatggcgt

SEQ ID NO: 32433 - DNA, 369 bp, Proteus mirabilis
atggctaatcaaaataaaggtcttacccgaatcattaaagctggtggctattcatatcagggcttacgcgccgcttggatcaatgaagccgcttttagacaagaagctattgtgaccttaatagcaattatccttgcattttttatcgatgtcagtgttctagagcgcattttattgattggttcagtcgtccttgtcgtcattttagaactggtcaatagtgctatagaagctgtcgtcgatcgcattggtacagaacgtcatgaattatcaggacgagcaaaggatatgggatcagctgccgttctcgtcgctattatattgggattatttacttggggaaccattctttggcatcatttttttgca

SEQ ID NO: 32434 - DNA, 522 bp, Proteus mirabilis
atggcgagcagaggcgttaacaaagttattcttatcggtaatttagggcaggatccagaaatccgttatatgccaagtggtggtgcagtggcaaatctgacactagcaacttcagaaagctggcgcgacaaacaaaccggtgaaatgaaagagaaaaccgaatggcaccgtgtggtcattttcggcaaactagcagaaattgctggcgagtatctgcgtaaaggttcacaagtttatattgaaggtcaattacaaacacgtaaatggcaagatcaaagtggtcaagatcgctacagcactgaagttgtggtgaatatcggtggcacaatgcagatgttaggtggccgtggtggtcaagataatgcaccttcacaaggccaaggcggttggggtcaacctcagcaaccacaagcatcacaacagtttagtggtggcgcaccatctcgcccagcacaacaacccgcagcggcaccagcgccaagtaatgaaccaccaatggactttgatgacgatattccgttc

SEQ ID NO: 32435 - DNA, 1246 bp, Proteus mirabilis
caactatcacgatttgggcaaaaatttgctcgccactcaggtatttctcgcttgatgcaagacttaaatgaaggaatacgtacaccagaagcggtgatgttaggaggaggaaatcctgcccatattcctgagatggacagctattttcaccaattattacaagagatggtgaataatggctcattaagtgatgccgtatgtaattacgatgggccacaaggtaaagatgcgatgctcaacgccttggctatttgtttaaaagaaaaattaggatggaatatttccgctaaaaatattgcgcttactaacggcagtcaaagtgctttcttttatctttttaatttactcggtggccaatctgctgagggtaaaaagcgcaaaattctttttcccatcgctccggaatatattggatatgccgatgccggattagaagaagatttgtttgttgcgaataaacccactattgaaatgctacctgatggacaatttaaatatcatgtagattttgaacatttaacgataggtgatgatattagtgctatttgtgtttctagaccaacaaatccaacaggtaatgtgatcactgatgatgaagtaaaaaagctggatgccttagcgaaaaaacatgatatcccactgattattgataatgcttacggcgtgccctttccggggattattttttcccaagcaactccccactggaatgacaacaccattctttgtatgagcctctctaagctaggattaccgggggctcgttgtggcattattatcgctaatgaagagcttattactgcaatcacgaatgtgaatggcattattagtcttgcccctggaggtattggccctgcgatggcattagaaatgctcaaacgtgatgatttaatgcgattatcccaagagataattagatctttttatcatcaacgagtacttgaaactattgatattattcgtcgctatctacctaaagagcgttgccttatccataaaccggaaggggctattttcttgtggctttggtttaaagatttaccaatctcaagtgaagaactctatcggcgtttaaaaaaacgtggtgtattgatggttcctggtcactatttctttccaggcttagaagagtcgtggcaacatgcacatcaatgtatgcgaatgaattatgtaccagagcctgcattaattgaaaaaggaataaagatcctatcggaagagatagaacgatgcttatcgccagaat

SEQ ID NO: 32436 - DNA, 903 bp, Proteus mirabilis
atgcaaaagtttgataccaaaacctttcaggggctgatcctgacattacaggattattgggctcgtcagggctgtaccattgttcaaccattagatatggaagtaggagcaggtacctcacacccaatgacctgtttacgagcattaggtccagagcctattgcagcggcttatgttcaaccatcacgccgtccaactgacggacgttacggtgaaaaccctaaccgtctacagcactattaccaattccaagttatcatcaagccatcaccggataacatccaagagctttatcttggctctttaagagaattaggattagatcctactatccatgatattcgttttgttgaagataactgggaaaacccaacattaggtgcttggggattaggctgggaagtttggctcaacggcatggaagtgacgcaatttacctatttccaacaagtcggcggattagagtgtaaacccgtcactggcgaaattacttacggtttagagcgtctggcaatgtacattcaaggcgttgatagcgtttatgacttagtttggtgtgatggcccattaggtaaaaccacctacggcgatatttatcaccaaaatgaagtggaacaatcaacttataactttgaatatgcagatgttgacttcttattctcttgtttcgaacaatatgaaaaagaagctcgtgagttgttagagttagaaaaacctctgcctttacctgcttacgaacgtatcttaaaagcaggtcacacttttaacttattggatgcacgtaaagcgatttctgttacagagcgtcaacgctatattttacgtatccgtactttaaccaaagccgtcgctgaagcttattatgcttcccgtgaggcgcttggtttccctatgtgtaaaaag

SEQ ID NO: 32437 - DNA, 2070 bp, Proteus mirabilis
atgacaactgagactttccttgtggaaatcggcacagaagagttaccgccgaaagcgcttcgttctttagccgaatcttttgcgacccattttacggctgaactggataacgccaatattactcatggtgatgtatcttggtttgccgctcctcgtcgtttagccatcaaagtggcaaatatggcaaaatctcaagcagataggatcgttgaaaaacgaggccctgctatagcgcaagcatttgatgctgaaggtaagccaactaaagccgcagaaggttgggctagaggtaacggcatcactgttgatcaagctgaacgtttatcaacggataaaggtgagtggctcttttatcgtgctgaagttaaaggcgaagccgttaaccaactactggctggtatggtaagcaatgcactggcaaaactgcctatccctaaattaatgcgttggggtgataaagaaacgcattttgtgcgtccagtgcatactgttactttattattgggtgataccctcattgacggtgaaatcttaggtgtacaaagcgatcgtattattcgtggccaccgttttatgggtgaagctgaatttactatcgataatgcagaccagtaccctgaaatcctttatgaacgtggtaaggtcattgccgattacgaaaaccgtaaatccatcattcttcatgatgcacgtcttgcggctgaaaaactaggtggtgtcgctgatttaagtgacagcctagttgaagaagtcacttcattagttgaatggcctgtggtgttaacggcaaaatttgaggaaaaattccttgaagttccggctgaagcactggtttacaccatgaaaggcgatcagaaatattttcctgtttacgataaacaaggtgcgctattacctcactttattttcgtttctaacattgaatcctctgatcctcaacagataatcagtggtaacgaaaaagtggttcgccctcgtttagcggatgcggaattcttctttaaaactgaccgaaaacagcgtttagaagataacttaccacgccttgaaactgttcttttccaaaaagatttaggctctctacgcgacaaaacagaccgtattcaagctctcgccggttttattgctgagaaaatgggtgctgatgtcaataaagcaacacgtgctggtttattatcaaaatgtgacttaatgaccaatatggtgtttgaattcaccgatacccaaggggttatggggatgcattatgctcgccatgatggtgaagatgaagaagttgctgtcgcattaaaagagcaatatcaaccacgttttgcaggtgatgcactaccatctaacccagtagcaagtgctgtcgctatagctgaaaaaatggatacgctggcgggtatctttggtattggtcaacaccctaaaggggataaagatcctttcgctttacgtcgtgctgcccttggtgtgctacgtattattgttgaacaagatttaccattagatattgaagaattaacccaagaagcggctcgcttatatggtgacaaactgacgaacaaaaatgtcgtcagtgatgtcgtagagtttatgctaggtcgtttccgtgcttggtatcaagagctgggttatagtattgatactattcaagcggtattagcgcgccgcccaacacaacctgctgactttaacgctcgtgtaaaagccgttacttacttccgaaccttagaagaagcagctgcattagccgaagccaataaacgtgtttctaatatcttagcaaaatcagcagatgttaagctcaacgataaagtattagcctcggtgctaaaagcgcctgaagaagttcagctagcggctaatctttctgtgctacaagataagctagcccctctatttgctgaacgtaaataccaagaagcattagttgaactcgcctctttacgtgatgttgtgaataacttctttgataaagtgatggtaatggataaagacgaagaaattcgtgtcaaccgtttaaccatgctacatgaattacgcgagttgttcttaaaagtcgctgatatttctgttttacaa

SEQ ID NO: 32438 - DNA, 288 bp, Proteus mirabilis
atggggatgaaaagcgtgaataaaactcaactgatcgacaaaattgctgcgaatgcagatatcactaaagcggcagcgggtcgtgttgtagatgcaatggtagcttcaatcactgaatctttacaaaaaggtgatgacgttgcattagtgggcttcggtacatttaccgtacgtgatcgcgcagcacgtactggccgtaatccacaaacaggtaaagaaattcaaattgctgcggccaaagtgcctgcattccgtgcgggtaaaggtctaaaagacgcagtaaatcaa

SEQ ID NO: 32439 - DNA, 2352 bp, Proteus mirabilis
atgaatcctgagcgtccagaacgtattgaaatacctgtattgccattacgtgatgtcgttgtatatccacatatggtgatcccgttgtttgttggtcgtgaaaaatctattcattgcttagaagctgcgatgaacgacaacaaacaaattatgctggttgcgcagaaagatgcatctactgacgaaccaggtgttaatgatcttttttctgtggggacagtggcttctgttttacagatgctgaaactgcctgacggaaccgtaaaagtgcttgttgaaggtattcgccgcgcaaaaattaccacattatctgataatggtgagtatttccaagctaaagcggaatatctagacacgcccgttgttgatgagcgtgaacaagaggtactaaatcgcacggcgatcaatcagtttgaaggttatatcaagctgaataaaaaaattccgccagaggtattagcctcattgcatgcgattgaagaatctgcgaagttagctgataccattgcttcgcatatgcctttgaaattaaaagataagcaagctgtgcttgaaatgtctgatgtaacagaacgcctagagtatttaatggcgatgatggaatcagaaatcgatctgctacaagttgaaaaacgcattcgtaaccgcgttaaaaagcagatggaaaaaagccagcgtgagtactacctcaatgagcagatgaaagcgatccaaaaagaattaggtgagatggatgatgcacctgatgaaatggagtcgttaaaacgcaaaattgaagcggcgaaaatgcccaaagaggcgagagaaaagacagaagctgaacttcagaaattaaaaatgatgtcgccaatgtctgctgaggcaacagtagtccgtagctatattgattggatggtacaagttccttggaatagccgtagcaaagtgaaaaaagacttagtgaaagcgcaggaagtacttgatacggatcattatggcttagaacgtgtgaaagagcgtattcttgaatatctcgcggttcagtctcgtgtcagcaaaattaaagggccaatcctgtgtttggtagggcctcctggggtaggtaaaacgtcgctaggtcaatctatcgcgaaagcgacagggcgtaaatatgtgcgtatggcattaggtggggtacgtgatgaagctgaaatccgtggtcaccgtcgtacttacattgggtcgatgcctggtaagttaatccaaaaaatggccaaagttggcgttaaaaacccgctatttttattagatgaaatcgacaagatgtcatcagatatgcgcggtgatccagcttcagcactattagaggtgttagatccagaacaaaatatcgcctttaatgaccactatcttgaagtggactacgacttatccgatgttatgtttgtggcgacatctaactccatgaacattccggcgccattactcgatcgtatggaagtgatccgcttatcgggttataccgaagatgaaaagctcaacattgcaaaacagcatctgttaccaaaacagattgaacgtaatgcactgaaagagaatgagctaacaatccacgatagcgcgattatgggcattattcgctattatacgcgtgaagcgggtgtacgtagcttagagcgtgaaatttctaaattatgtcgtaaagcggttaaacaactgctgatggatagtactatcaagcatattgaaatcgatgaaaataatctgaaagattatttaggtgtacgtaaagtcgattatggtcgtgctgatacagaaaatcgtattggtatggttacagggcttgcttggacagaagttggtggtgacctactgacgattgaaacggcaagtgtaccgggtaaaggtaaactgaccttcactggctcgttaggtgaagttatgcaagagtcgattcaagcagcgatgactgtggttcgtgctcgagctgacaaactgggcattaatggcgacttctatgaaaaacgtgatattcatgtacacgtaccagaaggcgcgacgccaaaagatggtccaagtgcgggtattgcaatgtgtaccgcgttggtttccagtttaacgggtaatccagttcgttcagatgttgcaatgacgggagaaattaccttacgtggtcaagtattgccaatcggtggattaaaagaaaagttacttgcggcacatcgtggcggaattaagacagttcttatccctgatgaaaataaacgtgatttagaagaaattcctgaaaacattgttgctgatctggatattcacccagtgaaaacaattgaggaagttttaacgttagccctagagaaatcgccatttggcatcgaagtagtgactaacaaa

SEQ ID NO: 32440 - DNA, 1269 bp, Proteus mirabilis
atgacagataagcgcaaagatagctctgggaagcttctgtattgctctttctgcggtaaaagccagcatgaagtaaagaaattaatcgctggcccgtcggtttatatttgtgatgaatgtgtcgacctttgtgttgatattattcgtgaagaaataaaagaattagcacctcatcatgaacgcagtgaattgccaacgccacatgaaatccgtaaacatcttgatgattatgttatcggtcaggagctggcgaaaaaagtattggcagttgccgtttataatcactataaacgtctgcgtaatggcgataaagccgatggtgttgagctagggaaaagtaatatcctgctgattggcccgacaggtagtggtaaaacattattagcagaaacgttagcacgttatcttgatgtaccttttaccatggccgatgcgacaacgctaacagaagcgggctatgtaggggaagatgttgaaaacatcattcaaaaactactacaaaaatgcgattacgatgtgcaaaaagcacaacgtggtattgtttatattgatgaaattgacaagatcactcgtaaatctgaaaacccatcaattacacgtgatgtttctggcgaaggtgtacagcaagcattattgaaattagttgaagggacagtagcttccgtacctcctcaaggcggacgtaaacatccacagcaagaattcttacaagtagatacttcgaagatcctctttatttgtggtggtgcttttgccggactggataaagtagttgcgcaacgtctaaatacccattcaggtattggttttggtgcagaagtgaaaagccaaaatgagaaagcgagtgaaggggagttattagcgcaagttgaaccagaagatctgattaaatttggtctgatccctgaatttattggtcgtttgcctgttgttgcaacattaggtgagctcaatgaagatgcgttaattcaaattctgcaagagcctaaaaatgccctgactaaacagtatcaagcattgtttaaattagaaggtgtagatttagagttccgtaaagatgcgttaaccgcgattgctaaaaaagcgatgtcgcgtaagacaggggcgcgtggtttacgttccattgtagaagctgcattacttgatacaatgtacgatcttccttcatttgaaaatgcagagaaagtggtcattgatgaaaatgtaatcaatgggaaatctgaaccgctgattatatatagtcaacctgaaaatcaggcatcgggtgaa

SEQ ID NO: 32441 - DNA, 3801 bp, Proteus mirabilis
atgaagcggctgtctaaatctttattattgataacccttttttgcctgattattttcgccgtagtattaagtggatttcgttattttctgcctcgtttagataattatcgccctgaaattgaaacctatttatctaaacagttcaatagcccagtcaccatgacacaggtgaaaggagaatggcaaaactttggccctgatatccaaattactgggctgtatattgataataacagtgttgaagtgagtgctgaacagatcactttctcttttgatgtttggcgttcactacttcattttcaactctattttcgtgaattaacctttgaacaattagcagtaaattacaaaaagcctatttttactgggcaaaatggtgatattactttcactgaacccgatgatatctcttccattttcttaaaacagtttgatcgatttaaattggttgatagccgtttcgtgtttttatcaccttctggtgacactagcacgctccatattcccgaattaatgtggctcaatcagaaaaaccgccatcgtgcgcaaggggaagttactttagataccccaataaatcactatggtggactaaaagtacgtcttgatctctatacgaaaaagcagggggcactcgataaaggacaggtgtttgtcaccgctgatgaggttgatatttccccttggttaagccaatgggttaaaagtaacagtggccttggtgaagcgaaagccagcctatctaattggatagagatcagcaatgggcggatcacgggtagccagttacaaatccatcaaggtgaaatggattggcgtaatgaagggcgcacacatgtattaaaggtagaagatttaattctacgtatgagacgccaagaaaatggctggcttgctgatatcccttatacccgaaaaataacgatggatggcgatgaatggccagatggttatttagcggtactttatcaacctaaagaaaaacaacaggatgaagcttggcgtatccgtgctaaaaatattgaattagaacggttatctgcgttattgcctttgttctcctttttaacgcctgatgtcgtgcgccaatggcagtatcgtcaattttctggcatggtcgactcatttgctcttgatttagcccccgatgattttaaacgtagtgccattgatatcagttggcaaaatgttgcttggaaacgctggcaagaaatcccttctgtggcacattttaatggtcatttaaagggcacattacagcaaggagcgcttaattttgcgcttaataacagtgaaattgatactgctgggctttttaaagcgccacttaatatagaaaaaggcactggtacggtttactggcagcatcagggagattctctgtcgttatggagtcaagggattgatataaaagccacctccgcttgggttgccggtgattttcgttatcaaaaacaaggagagcatcaacaactgtctattctttcgggagtgaatgtgaccgatgccggtgagacatggcgttatttacctgaaaaatatgtcggtaaagatttaacacaatatctctctgacgcgattattgccggaaacgttaaaaacggtacgtttatttttcatggtgatccgcgggatttcccttttgaacaacataatggttggtttcaagtctatgccccagtaaaacaggcgaccttcaaatatgatagtgaatggccggcactgtttgatcttaatgttaatcttaattttaagaataacggcttatggatgtcctctgataatgttcaggttggtaaagccaccgctaaaaacttgacggcgattattgaggactataacaaagacaaaattgttattgatgcagatattgaagccacgggtgatgatttaaaagagtattttctagcttcgcaaatggcaacgattggtcatacacttgaaatactaaaagtggctggaaaaattaacgggagtttgcatctcgacattccttttgatggcgagcaggtggtcgcttctggtcaggtaaacttaaacaataacgatgtcacattagcctttatggataccaccctagaaggtgttacaggacaatttcgttaccataatgataaattagagagcgatactttaaccgcgaattggtttggtcaacctctgacattttcttttgctggtggtgatcaacgggatgcttatcaagttggtgttgatctaaaaggacaatgggatatcgcgaaaattaagggattacctaatgatatacaacataaattaagcggttttttaccttggcatggcgcggtgagtgttaatattccagaaacagcggatgttaattatcaagtggatctgaccggacaagtgaatgcgctacaaagtcagttagctgcgccaagtaccgatgattttaaaaacacttcccccattgtgatttcagcaaaagggaatagtgaaaaacttaacgttagtgccgatgcacaagatcagtggtcattaaatagtgaatgggcgttaggtgaaccattacgtctattacaaggtaatttagtctcttcctcgctcacactacctcaattaaatgatcaatcacgattgactattgctttgcagggattgcaaggcgataaatggctacctactttaatggctttttcatcattagccccttctgaaaacgcgatacgtttccctaccaatattcatattagtttgcctgaacttaattttgctggtcagcaatggattgcgccacaaacagaaattatgcgtgctgatgatagcgtaaaattatccttctcagggagtgagttacgaggtgacttatttgtacccaatacggcacaaccttggcaggtgaatattacctatctctattttaatggcgctagcccaacagaagaaaataaatccttaaaaatggcaaatgtgcctgatgccaaaaaagcagttcaattttcacttaaagatattcctgctatcaatttcgcctgccaagagtgttgggtgaatggattattactagggaatattgaaggtgcaatacagcctcgtgacggagcattattgttaactgcaggtaagcttaaaaatagcagtggcgagctatctgttagtggtgtgtggtcagaagatagtttaggcaacagtatcactaagttggcaggtaaactaacggcaccggaagtcgatgaaatggcggcttactttggttatatcattccgattgttcagtcaccacttacggcagatttctcactgcagtggcacaataccccttggaattttgatctaaaaacactcaatggtgaagtgaatgcttctcttggaaaagggcgtattgaaaaggtggatgttgggcaagcgggaaaattattacgtctagtcagttttgatgccctgttacgtaagttgcaattcgactttagagatacttttagtgataattttgagtatgattccattaaaggtgatttgacgattaaacaaggtgttttaaacgcgaaaagtgttgctgtagatggtgttattgccgatattgctataaaaggtcaagtggatctgttggcgcgtaaaatggacttacaagtagtggtaacccctgaaatatcagctacagtaggcgttgctaccgcatttgctattaaccccatcgctggtgccgctgtatttgcagcttcaaaagtactggggccactttggagtaagatttcagttatacgttatcatgttaccggaacggtagaacaacccaagattgacgaagtactgcgtcaacttaaggaggatcaggcgtta

SEQ ID NO: 32442 - DNA, 1701 bp, Proteus mirabilis
atgagccaacgcattactattgatcctattacccgtattgaagggcatttacgcgtcgactgtgaaatcgataacggaaaagtcgttaaagcttggtcttccggtactatgtggcgtggaatggaggagatcctaaaaggaagcgatcctcgtgatgcatggattattgtgcaacgcatttgtggtgtttgtacaacggttcacgcaatagcctcagtacgtgctgtagaagatgccttagggatggatattccggttaatgctcagtatatccgtaacttaattctggcttctcacattattcatgaccatatcgtccatttctatcagttgtctgcgatggattgggttgatattacggcagcattacaggcagatcctgaaaaagcctcagcgatgcttaaaggggtttctcaatggcaattgaactctgctgaagagttcagaaaagtgcagaagaaaattcaagatttggttgatagcggtcagttaggtattttcgctaatggttactggggtcactcagccatgaaattacctcctgaagttaacttgattgcggtagcccactatctacaagcattggaatgccagcgcgatgcaaaccgcattgttgccgtgttagggggtaaaacaccgcatattcaaaacttagcggtgggcggtgttgctaacccaattaaccttgatgcaccgaatgttctcaatttagaacgtttaatgtatgtaaaacactttattgataacttgggtgattttattgaacaagtttataaagtggatactgctatttttgctgcttattatccagagtggttaaaaatcggtaaaggggctaattactacttatctgtgcctgaattgcctattaatggcaataatactgagtttttactctcaggtggctatatgaaaggcgttgatttttctacttatcgtccaattaaagattggaaagatcaaaacctgaaagacggcatcgaagagagtggtaaacacgcatggtatgaagatgatgaaccattaaaaccatgggaaggtttaactcgtcctaaatacaccggttgggatgaaaataataaatactcatgggttaagtcacccacattttacggtaaacctgtagaagtaggtactttagcatggttagtgtgtggtttagcgggtaaacatgaaggcacagtaaaacactataacgaagttaatcagatctacaccaaattaaccggtcaaaccttggtgacagagcagttagagtcaacttggggacgcattattggtcgtaccgttcatgcttgtgtattacaagattcgcttaacttcttatggcaatcactggttgataatattggccgtggagatactgcttcctttattaaacctgagtttgagccgggtaaagagtatcgtggcgtcggttttgaagaggcttcgcgcggtatgctatctcactggatagtctttaaagatggcaaaatcacaaactatcaggctgttgttccttcaacatggaatgcgggtcctcgtaactttaatgatgaaccgggtccttatgagttatcactagtgggaacgccggtggctgatcctaacaaacctctggaagtggtaagaaccattcactctttcgacccatgtatggcttgtgctgtgcatatggttgatttaacaggtaaagaattaagtaaggtgaaggtattg

SEQ ID NO: 32443 - DNA, 1338 bp, Proteus mirabilis
atgaatagatctggctcattatcttcgtttttagaagaggtagaaaaatataacgctcatcaacctgaataccatcaggcggtacgtgaagtttttaccactctgtggccttttttagagaaaaatccacaatatcgtgaacaatcattacttgagcgcttagttgagcctgaacgtattattcagtttcgcgtctgttggttagatgataaaggacaagttcaagttaatcgcgcatggcgagtacaatttaactctgctattggtccctacaaaggtggaatgcgttttcatccatcagtaaacctctctattttaaaatttttaggttttgaacaaacctttaaaaatgcactgacaacactgccgatgggaggcgctaaagggggatctgattttaatcccaaggggagaagccacgcagaggtaatgcgtttttgtcaggcgttaatgactgagctctatcgtcatttaggggctgatactgatgtccccgcgggagatattggtgtgggagcaagggaagttggctttatggccggaatgatgaaaaagctctcgaatagcaatgaatgtgtctttacgggtaaaggtttatcatttggtggcagtttgatccgcccagaagccacagggtacggtttagtctattttactaacgcaatgcttaaacgtcacggcatgtcccttgacggaatgcgtgtagccgtttctggtgctggcaatgtggcacaatttaccattgaaaaatgccttgagctgggggcgaaagtggtcaccgcttcagattctggcggaaccgtggtggatgaagctggatttacaaccgaaaaactggctcgcttaactgaaattaaaaataattatggtcgtattgaagagtacgccaaagagtttggtttaacttatcttgaagggcaacagccttgggctgtcgctgttgatattgcactaccttgtgctacacaaaatgaattagatttagacgccgcaaaagtgttaattaaaaacggtgttaaagctgttgccgaaggcgcaaatatgccaacgaccattgcggcaaccgatgcttttattgaggcgggagtcttgtttgcaccgggtaaagccgctaacgctggaggggtagcaacttcgggattagaaatggcgcaaaacgcagcacgcttgagttggaaagctgagaaagttgatgctcgcttacatcatattatgctggatattcatcacgcttgtgtaaactatggcggtgaaggtaaacaaactaattatattcaaggggccaatattgcaggttttgttaaagttgctgatgcaatgttagcgcaaggcgtgctg

SEQ ID NO: 32444 - DNA, 1533 bp, Proteus mirabilis
atgaatttacttaaatcactggctgcagtgagttcgatgacgatgttttcacgagtactgggctttattcgtgatgcgattattgcgcgtatttttggcgcaggtatggcaaccgatgctttttttgttgcatttaaactaccaaatctattgcgacgcatttttgccgaaggcgcattttcacaggcatttgttcctattttagcggagtataaaagtcaacagggagaagaggcaactcgtacctttattgcttatgtatcgggaatgctgacgttgatcttagcgattgtcacagtaatagggatagttgccgcaccgtgggttatttatattacggcacccggttttgcggattcagcggataaattccaactcacaacggatttattgaaaatcacctttccctatattttattaatttcattagcatcattaacagggtctattttaaatacttggaatcgcttttctgttccagcttttgcacctacgttgttaaacgtgagtatgatcttttttgctctcgttgttgctccttattgtgatccacctattatggcgcttgcttgggctgttttagcaggaggaattttacagttggggtatcaacttccgcatctgaaaaaaatagggatgttggtattaccgcggatctcgtttaaaaatagcggagtgtggcgtgttattaaattgatgggtcccgctattttaggggtttctgtcagccaaatttcgctgatcatcaatactatttttgcctcattcttggtgtctggctcagtctcttggatgtattacgccgatcgcctaatggagcttcctactggtgtgttaggggtggcattaggaacaattctattaccttcattatctaaaagttttgccagtggcaacacacaagaatatcagaaattaatggattggggattaaaactttgttttttattggctttaccttgtaccttgggtttagctttattatcaggccctttaaccatttcgttatttcaatatggtaattttaatgggcacgatgcgctaatgactcaacaagcattagtggcgtattgcattgggttaatggggttaattattataaaaatattagcaccgggcttttattctcgccaagatattaaaaccccggttaaaattgccattgcaacgcttattttgactcaattaatgaaccttgcttttgttgggagtttaaagcatgtgggactggctctttcgattggattagccgcttgttttaatgcaggaatgctattttggcaaatccgtaaacaagatatttatcaaccattagcgggttggcctatctttttattaaaacttgctattgcgttagctgtgatgagtgctgtattagtcggcatgctatgggtgatgcctgattggcaacaagggaatatgctaatgcgtattttacgtttattacttgttgttgtagctggtgccgcaagttattttgtcactttatatgctgttggatttagaccgaagcatttttctctacgcgcatta

SEQ ID NO: 32445 - DNA, 1941 bp, Proteus mirabilis
atgtttcaagacaatccgctgcttgctcagctaaaacagcaactccatgcccaaacaccgcgcgtggaaggccttgtaaaagggacagataaaggctttggcttccttgaagttgatggtcagaaaagctattttatccctcctcctcaaatgaaaaaagtgatgcacggtgatcgcattattgctgccgtacatactaataatgataaagagtccgctgagcctgaagagctggtagaaccctttttgactcgctttgtcggccgtgttcagaaaaaagaaggtgataatcgtctatggattattcctgatcaccctctactcaaagatgccattccttgtcgtcctgtaaaaagcttaacgcatccatttgccgatcaagattgggcagtggcggaaatgcgccgacatcctcttaaaggtgataaacatttccaagctgaattaactgattttattaccgataaagatgaccattttgcaccttggtgggtgacattaatgcgccatcaattagagcgaaatgcacctgaagtagacagtgaaacattaaccttacatgatgatctaccacgtgaagatttaaccgcgctctcctttgtgaccatcgatagtgcttcaaccgaagatatggacgatgcgttatatattcgtaaagaagaaaatggtcaactttcactgtatatcgctattgccgatccaacggcttatattcagcctaatagtgaattagataccattgcggcacaacgagcgctaacaaactatctaccgggctttaatatcccgatgttacctcgtgagctatcagataatctctgctcattgcgccctaatgaaaaacgtcctgcgttagtctgccaagtgggtatcatggaggatggtgcattaaccgatgagatccacttctactcagcatgggtagaatcaaaagcaaaactggtttatgacaatatttctgattggctagaaggtgaagaaacacagtgggcacctgaaaatgagattgttcatgaacaagtcatgctattaaaagagatgagcgagaaacgtcatgtatggcgtgaacaacatgctctcgtctttaaagagcgtcctgactatcgttttattcttgatgacagtggcaacgtattagatatcgtggcggaaaaacgtcgtactgccaaccgtattgtggaagaagcgatgatcaccgccaatatttgtgcggcaaaggtacttagtcgcaatctcggttttggtatttataacgttcatactggttttgatccgctctatattgatcaagtctcacaaaccttaaaagagcacggtattgaaaccaacgcagatgagttattaacccttgaaggtttctgtcgcttacgtcgtgaactggataatcagccaaaccaattccttgatagtcgtattcgtcgtttccaaaacttcgctgaaataaaaacagagccaggccctcattttggtttaggccttgaagcttatgcgacatggacatcaccgatccgtaaatacagtgatattttaaatcaccgtttattaaaagcgattatcagcaaaagtgcggcagaaaaaccgcaagatgaagattgtgttcgtattgccgaacgtcgtcgtgctaaccgtatggccgagcgcgatgtcggtgattggttatatgcgcgcttcttaaaaccttttgctggcactgagagtacctttaatgccgaaattattgatattactcgtggtggtattcgggtacgtttagttgaaaatggggctattgcctttattcctgcaccatttttacatgcggtacgtgacgaaattcaatgcagtcaagaaactggctctgtcattattaaaggcgaaacagcctataagctcaatgacattattccggtacgtattgaagatgtgaaactagaaacgcgtaatattgttgctcgtccgatt

SEQ ID NO: 32446 - DNA, 645 bp, Proteus mirabilis
atgaacagatcctctaattcggcttttgccccaaccgaaaaaaagttggggctttaccctgttgtcgattctattgaatgggttgagcgcctgttgaaaataggtgtaacaacgatccaattacgcatcaaagataaacagcccaaagatgttgaacaagatataatcactgcaatcaaattaggtcgtaagtataacgcaagattatttatcaatgattattgggaactcgccattaaacatcacgcttatggtgttcatcttggacaagaagatctcgacattgccgatcttgatgctattaaacagtcaggtttatgccttggtatttccacccataatgacactgaactacaaagagcaaaaaggctacttccctcttatattgctttagggcatatatttccaacgacgacgaaagatatgccatcaaagccacaaggtttaagagcactcaaacatcaagtagaacaaactcatgattttccaaccgttgctattggcgggatctctctagaaaaagtctctgatgtcgtagcaactggcgttggtggagttgctttagtgagtgcaataacaaaggcatcagactggcaacaggtaacacttaaattattagaattagtagagggaaaaccatcatgc

SEQ ID NO: 32447 - DNA, 747 bp, Proteus mirabilis
atgctaaatgataatgattttatgcgttatagccgacaagtgatgttagaagatataggcttagaagggcaaaccaaaatacagcaagccagagtattaattattggcttaggtgggttaggctctccagcatcactttatctagcaggggctggagtgggtgaacttattttagtcgatgatgataatttgcatgtctcgaatttacagcgtcaaattctctatcgcactcaagatatcccagatgcaaaatcagacatcgccaaacaggctctacttgccttaaatcctgacattaaaatcaccacctataaacaacgtgttaatgatgattttctctctacgttgcttcaaaacatcgatttagttttagattgcactgataacatgagtactcgccaagcaatcaatcgtatctgtgttaaacaacaaataccgcttattagtggcagtgccgttggatttagtggtcagctgatcgtgtttgagcccccttttattcatggttgttaccactgtctctatcctgataacaaagagccacaacgcaattgccaaacagctggaattctaggccccgttgtaggggtcattggtactctgcaggcacttgaagcaattaagttacttgcaggtttaccaagtacgttaagtggaaaactacgtctgttcgatggtagaaaacaaaattggagcaccttgcgcttaacaccatcaaaaaactgtcctgtttgtcgagggttagca

SEQ ID NO: 32448 - DNA, 453 bp, Proteus mirabilis
atgcaagaagggcaaaagcgtaaaacatcgtccatgagcattctcgctattgctggcgttgagccatatcaggaaaaaccgggcgaagagtacatgaacgaagcccaattagcgcattttaagctaatacttgaatcttggcgcaatcagctcagggatgaagtcaaccgtaccgtcactcatatgcaagatgaggcggccaacttcccagatcctgttgaccgtgctgcacaagaagaagaattcagtcttgagctgcgtaaccgtgatcgtgaacgtaaactcataaagaaaattgagaaaacactgaagaaagttgaagatgatgacttcggcttttgtgagtcttgcggtgttgaaatcggcatccgccgtttagaagctcgtccaacagccgatctctgtatcgactgtaaaacattagctgaaatccgtgaaaaacagatggctggc

SEQ ID NO: 32449 - DNA, 2427 bp, Proteus mirabilis
gtgcatctattgccaatttttgaggtagcaggatctgttgttactgcattaaaacaatgtccccaagtcttacttcacgcccccacaggggcgggaaaatcaaccgcactgccgctgtatttgcttcaacaaaatatatttgatggcaaaattattttattagagccaaggcgtattgcggcaaaaagcatcgcttatcgtttagcaagtcaactcaatgaagaggtgggtaaaacggtggggtatcgcatgcgtgctgaaagtaaagtgagtcagcagacgcgccttgaagtgatcaccgaaggggtgttgacacgtatgttacagcaagatcctgaactggcaggtgtaagtttagtgatacttgatgaatttcatgagcggagtttgcaagcagatttagcattagcactgctattagatgtgcaatcaggattacgtgatgatttacgccttttggtgatgtctgcaacattagataatcaaaaattaacttcactattgccggatgcgccgatgattagctctgaagggcgtagttatcctgtttcacggcactattatcctattcaatcacacctgccttttgaacaagaagttgccacgatggcgcgacgtttgcttacacaagagacgggctctttacttgtttttttgcccggtagtgcagaaattattagagtcgcgcaattattagctgacaaagtggataaacataccttaatttttccactttatggggcactttcattagcacaacagcaacaggccatagagcctgtagaaaagggatatcgcaaagttgtattagcaacaaatattgcagaaaccagtttaacaatcgaaggtattcgcttggtgctcgacagtaccattgaaaaacgtgcccagtttgatttaaaaagtggtgtaacaagcttattgcgccaacgaataagtcaagcttcacaaacgcaaagagcggggcgggcaggacgtcttgaagccggaatttgttggcacttaatcagtcaggaacaagctgagcgcggggcaactcaccaagtacctgaaattttatctagtgatctctcttcgttatggctttcaatattgcaatggggatgtcgtgatataaaccaactctcttggttagatacacctacaccagcagcaataaacgcagctaaaacattattgcaacgattaggtgccattgataatcaagggggattaacctcgcggggagtacgtatggcacagtggggcatcgatccccgattggcggcaatattagattatgctagtgaaaaaagtgagcatcatcttgctaccgcagcaaggctgtgtgccattttagaacagccaccaagagacagagagattaatcttgaatggctgatccaacagaaaaatcatcaatggtcacagcgtgaaaaacagctattacagcaatgcaaagggcaatgtcgcccagaattattagcatcactattgagtgtcggatttgcagatagaatagccaaaaaccgtgataatcaaggtcgatttcgtctcgctaatggacaaggcgcaatgatggataatactcaaccaatgagccaatcgccgtggattttagcaccattgttgttgcaaaatgcacattatgcggatgtgcgaattttattagccttacctattgatattaatgaagtatcctctatctttccggaattgatacaagataataccaccgttgaatgggatgaaaagcgcggtacacttcttgcgtggcaacagcgccaattaggtcagttaaccgttagccaaatgccattagataaacctaataaagcgcaaatgcaaacggcattattaaattggttacgtaaacaaggattaagtgctctacccttaagtgaagagagtaagcaactgtttattcgccttgctttagcgcaaaagtggtgccctgaggccaatttacctgtattgaatgaagccgttttattagactcattagaattgtggttacaacctgaattaggcgatacccaatcacttaaggcactgctacaaatggatattaatgggataattaaaaatcagttaacttggcatgagcaacaattattgcaagagctgttcccaacacactatattgctccaacgggcactaaagtgatgattaaatatgatttagataatccgccgattattgctatcaggatccaagaggtttatggtgaaaaacaaagtcctattgtggcaaaagggcaattacctgtagtgatggagttactttctccggctatgcgacctatccaaaaaacacaagatctcgctactttttgggccggaagctatacacaagtacaaaaagagatgaaggggcgatatcccaaacatttgtggccagattcacccgcaacaacggcccccactcgacgtgtaaaaaaatggagt

SEQ ID NO: 32450 - DNA, 2252 bp, Proteus mirabilis
tggttatttgttaaaatcgccattgtggttgcggttttagtcggcatctatggtgtttatttatattcccaaattaaagagcgccttgacggtaatgtatgggaattgcctgctgccgtttatggacgtactgtcaatttagaacctggcatgaactatagccaaaaagagatggtaagcttactggaaggtatgcagtatcgccatgtcaataaaatcacccgtcctggggaatttgtggttaaaaatggcactatagagatgttacgtcgaccgtttgattttccagatggtcgcgaagagcaaattttagcgaaattgacctttgaacaaaactcattggtgagtatcaccaatatgaataaccagcgtcaatttggtttcttccgcctcgatcctaagcttatcactatgatgcaatcggctaatggtgaacagcgtctattcttagcaagagataaatttcctcaactattagtcgatacattaattgctacggaagatcgccgtttttatgagcatgatggcatcagtatttattctattggtcgtgcggtgttagcgaactttaccgcaggtagagcggtacaagggggaagtactttaacgcagcaattagtaaagaacttattcctaaccaatgaaagaacgctaaaaagaaagcttaatgaagcctatatggcgattattatggatgcgagctatagcaaagatcgtattttagagctgtatcttaatgaggtgttcttagggcaaagtggtgatgagcaaattcgtggttttccactggctagcctttactattttggtcgacctgttgatgaactaagtcttgatcaacaagcattattggttggaatggtgaaaggggcttctgcatacaatccatggcgcaatcctaaggctgcattagagcgccgtaatgtggtactaaaattattacagacccaacaaattatcgatcaagagctttatgatgtattaagcgcacgtcctttaggagtaaaacctcgtagcgaagcgtaacgccacaaccggcatttatgcagttagttcgtcaagagctacaaactaaattaggtgatcaggttaaagatttatcggggactaaaatttttacaacgcttgatcctgtttcacaagatgcagcggaaaaagcggtagaaacgggagttgctgatttacgtaaaacacgcaaaatcaacgatctcgaaggcgcaatggttgttgtagatcgcctcagtggtgaggttagggcgttagtgggcggttcacaaccacaatatgccggttttaatcgtgccatgtccgcacgccgttcaattggctcattagcaaaaccggcaacttatttaaccgcattaagtgagcctgagcgttttcgtttaaatacctggttggcggatgaacctatttcagtgcctattccgggaggaaaaccatggcaaccacgtaactacgatcgtggttataaagggcgattaatgttggtggatgctcttgctacatcacgtaatgtaccaacggttaatcttggtttagaagtcgggttagaccaagtgatcaaaacgtggatcaaactaggtgcctcagcagaaaatttagaaaaagtaccagcgatgttacttggcgcactaaacttaaccccaatggaagtggcgcaaactttccaaacaatcggaagtttaggtaatcgcgctaaattatcggcattgcgctctgttatcaaccaagatggtacggtgctttatcaaagctacccgcaagcagaaacaacggtttctccacaagcagcatatatgacactgtttggtatgcaacaggtggttaattcaggtacagcagcacgagcattaaaacctaaatttggtcaatataaccttgcaggtaaaaccggaaccaccaacgacttacgtgatagctggtttgcgggtattgatggtaaagaagttactattgcatggatgggacgtgataataatggcccaactaacttaacaggatcgacaggggcattgatcctttatcgtcattatttagaaaatcaaacaccattaacattaaatccacctgtaccagaagatatagcacagatgtcgattaatgctgaaggtaactttgtttgttatggtggcggcgtgcgtacattacctgtgtggacagcagatcctgatagcctctgtacaccgttatcacaagagagcgacggcgacgatagtgcggcacctaaatggttacgcgatctgttttct

SEQ ID NO: 32451 - DNA, 1758 bp, Proteus mirabilis
atgccgcattcaacccccctcattaccaccattgttggtggattagcacttgcttacatcttaggcatgattgctcaacggctaaaaatctcacctttagtaggatatcttgctgcgggtgtgctcgctggcccatttacccccggcttcgttgctgatacctctttggcgcctgagcttgctgaaatcggtgttatcttactgatgtttggcgtaggtttacatttttctttaaaagatctaatggctgtaaaagctatcgcgatccccggtgccatagcacaaattaccgttgccaccttattagggttagggttatccactttctttggctggggtctatttagtggcattgtctttggattatgcctttcaacggcaagtactgtggtattgctacgcgcactcgaagaaagaggtttaattgatagccaacgcggtcaaatcgctattggttggttaattgtcgaagatctcgctatggtattagccttagtattactaccagctattgccaatatgcttgaaagtagtgaccaaacaagtatttcacagttattaattaacttaggtatcactattggtaaagtagttgcctttattttaattatgatgattgtcggtcgtaagcttattccgtggatcttagctaaaacggctgccactggctctcgtgagctttttaccctatgtgtgttagcactagctttaggtatcgcttacgcagcagtgacgctatttgatgcttctttcgcattaggcgctttctttgccggtatggtacttaatgagtctgacctcagccaccgagcagcacaagatactttacctctacgtgatgccttcgccgttctgttctttgtctctgtcggcatgctatttgatcctatggtattaattgagcatcctctaggcattttagccacacttgcgatcattattataggtaaatccttagcagccctagtgctcgttcgtatgtttgggcattcacgcagaaccgcattaaccatttcagccagtcttgcgcaaattggtgaatttgcctttattttagctggaatgggggttgcactaaatgttttagagccagatgcacgtaacttggttcttgcgggcgccttagtctctattatgcttaatcctgttctcttctctttgttagaccgttatctagcaaaaacagaaaccaaagaagagcaagagcaacttcaacaagaagagatggaagaagagatgcctgtgcctgtcgatatttgtgggcatgccattatcgtcggttatggtcgtgcaggtagtatgctagctgaaaagctacaaccacaagctatcccattggtcattattgaaaatagccgtaataaatttgctgagttaaaagaaaaaggcttaaacgccgtactcggtaatgctatgaccaaagaatcgctggcattagcgcgtgttgattgtgctaaatcgctactactaactattcctaacggttatgaagcagcagatatcgcagaaacagcaagaaaaatgaaccctgatcttaatattatcgttcgtgctcattttgacgatattattgttcgtgctaactatgatgaagaagcttcctttattcttgagaaaggggcaaatcatgtgataatcgatgaagatcagaccgcttcagcaatggctgagatgctaatacaagaagtcgagttcggttgcgccattgatgacacacctgaagagggtcaacaaattattgcgcccaatgcagcgcaa

SEQ ID NO: 32452 - DNA, 1254 bp, Proteus mirabilis
atggactttttccgctttctaatgagcgatgtgctttcagagcctgctatattggtgggtttaatcgcattgattggtttaattgctcagaaaaaacctgcgacagaatgtattaagggcaccgttaaaaccattatgggttttgttattttaggtgcaggggcaggtttagtcattaactcgcttggtgatttctcaacgattttccaacatgcatttggcattcaaggtgttgtacctaataacgaagccatagtctctattgcacaaaaaagctttggtaaagagatggcactgattatgttctttgccatgttaatcaatatattaattgcacgcttaacaccgtggaaatatattttcttaacgggtcaccacactttatttatgtcgatgatggtcgcggtgattttggcaacagcgggtttagaaggggcggtattagttgcagtaggttcattagttgttggggtatcaatggtatttttcccagccattgcacatccttatatgaaaaagatcaccggctctgatgatgtcgcattaggccatttctctactatttcctatgttgtatctggttttattggtagtaaatttggcaataaagcgcattcaacggaagagatgaatgtacctaagagtttactctttttgcgtgatacgccagttgcgatcgctttcaccatgggcataatttttattattacgtgtttatttgccggtgacacttttgttcgtgaagttagtggtggtaaaaactggtttatgttctccttaatgcaatccatcacctttgcggcaggtgtttatattatcctacaaggtgtacgtatggtgattgcagagattgttcctgcatttaaaggcatttctgataagttagtccccaatgcaaaacctgcgcttgattgtcccgtggtatttccttatgcacctaatgccgttttagtcggttttctgagtagttttgcagcgggtgtcattggcatgtttattctttatgctttagattggactgtcattatacctggggtggtacctcatttctttgtgggggcaactgcaggcgtatttggtaacgccacagggggacgccgaggtgctattttaggtgcttttgctcaaggtttattgattactttcttacccgtatttttattacctgtacttggtgatattggtattgccaataccacatttagtgatgcagacttcggtgtgattggtattctattagggattattgttcgt

SEQ ID NO: 32453 - DNA, 441 bp, Proteus mirabilis
atgcttaaaacattattaacaccggatgtggtacaagtgatcccacaagtcaaagattggcgtgaagcaattaaaatcgcctgtcagccattaattgacaaaggttgtattgagcctcgttatgttgatgcgatttataaatcacacgagcaaataggcccttactatgtattaggaccaggtattgctatgcctcatgcacgtcctgaagaaggggttaatcagctctctttagcattaactatcatcgaaaaaggggtggaatttggtgctgatgaaaatgatccggtgaaacttttaattgttttagccgcaacagataacgatagccatattaatgccattgtgaaattagctgaactttttgataaccaagatgatatagacactttgttgcaagcaaaaagtaaggcagaagtattggctgttattaatcactat

SEQ ID NO: 32454 - DNA, 903 bp, Proteus mirabilis
atgaatatacttatcacaggtggaaccggattaattggcagagcacttatctgccaactcgcattagataaacataatattaccgtactttcccgttcgccacagaaagtctactctcatttctgtaatgaaatggcgtgttggacgcatttagatgataaagaaaacttaaaccaatttgatgcagtgattaatcttgctggagaaccaattgcagacaaacgctggacaccggagcaaaaacaaacgttagttaatagtcgatgcaaattaacccaaaagctggtggatttaataaaagccagcgactctcctcctagtgttttaatttctggctctgcggtgggtttttatggtgatcaaggtgaaaataatgtcactgaagagacgccacctaaggatgaatttactcatcaactctgtgccaaatgggaaaatattgcactcgatgcacaaacgccattaacacgggtgtgtttgctacgtactggtattgtactctctacaaaaggaggggcattacctaaaatgagcccgccttttaaattaggtttaggtggaaaattaggtaatggtaagcaatatatgccatggatacatattgatgatatggtcaatgccatcgtatttttacttaataataacaatacccaaggcgcctttaatctgacagcccctcatccagtacaaaataaagcatttaccacgactttagctcacgtactgaaacgccctgcatttatgacggttcctgccacagtattaaaattaatgatgggagaaagtgccacattagttttaggtgggcaacaagcgtttcctaagaaactgctcgatgcaggattcagctttcgttacccacaactggaaggcgctttagaagatattattcgccataaaaaa

SEQ ID NO: 32455 - DNA, 895 bp, Proteus mirabilis
cactggttttttcggttatttgattggcacggttcagtgctatcaaaaataatctttcgcttatgtcttaatattgcaatgtctattatcgctattttgggtttatcaatggtatgagttattagtgattcatttaactgttgccccatttagtttattaggtattgctatcgcaatatttcttggttttagaaataatgcaagttatagccgacttgtggaggcaaggacattatggggaaatatgttaattacccatcgcaacatattaagaaatataaaagccttattaccggaagataaacaatttaatcgtgacttttctaatctacttattgcttttagttggagtctaaaacatgagctaagaaaaacaaacccaatggtcgatctctatcgcctcttaccccgacctttatttgatgagataatgaatagcccttaccccactaatcggattttattgcatattggcctaaaaattggcgaattgcgagataacaaagtaataagtgatgttatctttcaatcaattaataaagatattaataacttatctgatgtattgggtggctgtgaacgtatttcaaatactcctgtaccttttgcctatacgctcatattgcaacgtacggtatatctattctgtgctctgctaccttttgcattggttgccgatctccactatatgacgccatttgtttccgtatttatctcttatacttttttatcttgggactcattagctgaagagttagaagatccattcggtgtttctgccaatgacttaccattaaatgcaatatgtaacaccatagaaaggaatttattagagatgcaagatatcaccccactccccatcaaagttaaacccgaccaatattataatttattg

SEQ ID NO: 32456 - DNA, 900 bp, Proteus mirabilis
gtgttagacccccttgtgagagatctactgacggcgattaatcattacgatctctgtatcacggaatttattcgcgttgttgattcattattaccgccaaaagcattttatcgtttatgccctgaattacacacccaaagccgcacgcaaagtggcactttggtgcgggtacaattattagggcaaaatccacaatggttggcagaaaacgcttttcgagccgtctctttaggttcatggggggttgatctcaattgtggttgtccttctaaaaccgtcaatggtaatggcggtggtgcctcgttattaaaacaaccagaaacgatttatcaagcaactaaagcgatgcgtggtgctgtacctgcggatttacctgtttctgtaaaggtacgattagggtgggattgttcatcttattgccatgaaattgccgatgcggtagaacaaggtggcgcgacagaaattactatccacggtagaacaaaagaagatggttatcgtgctgataagataaactggcaagcgattggtgaaattcgccaaaaattgactattcccgttatcgctaacggtgagatttggtgtcgagaagatgctatctcttgtttaaagataaccggctgtgatgcgattatgataggtcgcggggcgatgcatacgcccaatttaagtaatgtgataaaaggtattgaagaaaaaatgccttggtcacaagtgatccaattacttaaacgctatattcgtctagaaaagcaaggggataccacttattaccatgcttcccgtataaaacagtggttgggatatttaagaaaagagtatcaagatgctgatgcactttttagccaaattagaacgctaaaaacctcacctgaaatagccaaaataatagaagcgtta

SEQ ID NO: 32457 - DNA, 3225 bp, Proteus mirabilis
atggctaaaagaacagatattaaaacaatcctgattttaggtgcaggcccgattgtgattggtcaagcgtgtgaatttgattattcaggcgcacaagcgtgtaaggcactgcgcgaagagggatatcgtgttgttttggtaaattcaaatcctgctaccattatgacagatcctgaaatggcagatgccacttatattgagcctattcattggcaagtggtcagaaagattattgagaaagagcgccctgatgccatattaccgacaatgggcggacaaacggcattaaactgtgccttagaattagagcgtcaaggggtgttagctgaatttggcgtaacaatgataggtgcaacggctgatgctattgataaagcggaagatagacaacgctttgataaagcgatgaaaaaaattggtctggatacggctcgttcaggcatcgctcatactatggacgaagcatttgcagtggctgagcaagtgggtttcccttgtattattcgcccttcatttactatggggggaacgggaggcgggatcgcctataatcgtgaagaatttgaagaaatttgtactcgaggtttagatttatcaccgacaaatgaactattaattgatgaatcattaattggctggaaagagtatgaaatggaagtggtgcgcgataaaaatgataactgcattatcgtttgctccattgaaaactttgatgcgatggggatccataccggtgactctatcacggttgctccagcgcaaacgctaacagacaaagaatatcaaattatgcgtaatgcctcgatggcagtattacgcgagattggggttgaaaccggtggctccaatgtgcaatttgccgttgatcctaaaacagggcgtttaattgttattgaaatgaaccctcgtgtttctcgctcatcagcattagcgtcaaaagcaacaggtttcccaattgcaaaagtcgcggcaaaacttgcagtaggttataccctcgatgagttgatgaatgatatcactggaggaagaaccccagcctcttttgaaccttctattgattatgtagtgactaaaatccctcgctttaactttgaaaaatttgccggtaccaatgaccgtttaaccacgcaaatgaaatctgttggtgaggtgatggctattgggcgtactcaacaagagtcaatgcaaaaagcattacgcggactagaggttggtgcaactgggtttgatcctaaagtaaacctcgacgatcccgaagcgctcaccaaaattcgtcgtgaattaaaagaagccggatcggatcgcatttggtatatcgcggatgctttccgcgctggaatgtcggttgatggggtgtttaatctcaccaatatcgatcgttggttcttagtgcgaatagaagagattgttcgcctagaagagcaagtggcacaacttggtttagctggtctaaatgctgatttcttgcgtcaattaaaacgtaaaggttttgctgatgcacgcctagctaatatcttgaatgtgaaagagcaagtcattcgccaactacgggaacaatatcaattacacccagtttataaacgggttgatacttgtgcggcagaatttgctacggatactgcttatatgtactccacttatgaagaagagtgtgagtcggatccaaatcaagacaaacctaaagtgatggtcttaggtggtggtccaaatcgtattggtcaggggatagagtttgattattgttgtgttcatgccgctctagcattacgggaagatgggtatgaaaccattatggtcaattgtaatccagaaacggtttcaacggattatgatacctccgatagactttattttgagccagtcacccttgaagatgtattagaaatagtacggatcgaaaaaccacaaggcgtgattgtgcaatatggtggtcaaacgccattaaaattagcaagagctttagaagctgaaggggtgcctgttatcggtaccagtcctgatgcaatcgataaagcagaagacagagaacgtttccaaaaggccgtggataagttagggttaaaacaaccagaaaatgccacagtgacgacattagaagaagcggtagataaggcaaaatctattggttacccgctggtggtacgtccatcttatgtccttggtggacgagcaatggaaattgtttacgatgaaattgatttacgtcgttatttccaaacggcggtcagtgtttctaatgatgctcccgtactgttagaccgattcctagatgatgccattgaagtggatgttgatgcgatttgtgacggtcaacaagtggtgataggcggtattatggagcatatcgaacaagcgggtgttcactctggagactcagcttgctctctacctgcttatactttaagccaagatattcaagatataatgcgcaagcaagtacgtgaactcgcttttgaattaggcgttaaagggttgatgaacgtacagtttgcggtgaaaggtaatgatgtttatcttatcgaagtgaatcctcgcgccgcacgtacagtgccttttgtctctaaagcaaccggtgtgccattagcaaaagttgctgctcgagtgatgataggacaaagtcttgaacagcaaggcgttaccaaagaggtgatccctccttactactcggttaaagaggtggtacttccctttaataaattctcaggtgtcgaccctattttagggcctgaaatgcgatctaccggtgaagtgatgggggttggtgctacttttgcacaagcttttgctaaagcgatgttaggtagcaattccaccatgaagaaaaaaggaagagcgctactttcggttcgtgaaggtgataaaaaacgtgtcgttgatttagcaactaagctattgaaaaatggttttgagttagatgcaacacatggtactgccattgtcttgggggaagccggtatcaatcctcgcctagtgaataaagtgcatgaagggcgacctcatattcaagatagaattaaaaatggtgagtatgactatattgtcaatacgactgccggtcgccaagctattgaggattcaaaattgatccgccgtagtgcattacaatataaagttcactatgacaccacattaaatggcggatttgcgacaacactgtcattgagtgctgatcctactattgatgttatttcagtccaagagatgcatgcaaagataaaaaaatct

SEQ ID NO: 32458 - DNA, 1161 bp, Proteus mirabilis
ttgattaaatcagctatactggttctagaagatgggaccgaattccacggcaggtcgataggcgcagaaggcgctgctatcggtgaagtcgtttttaatacttccatgaccggttaccaagaaatattaaccgacccttcttactcccaacaaattgttactctcacctatcctcatattggcaataccggcgttaattcctcagatgaagaatcagcaactatccatgctcaagggttaattattcgcgatttacccctagtgatgagtaattatcgtgccgaagagagcttagccgattaccttaaacgtcatcagattgtggcgatagctgatattgatacacgtaaattgacgcgattattgagagaaaaaggcgcacaaaacggttgtattatcgcaggcactcatcttgatgctaaacaagcgcttgaaaaagcaaaagcgtttccaggattaaaaggaatggatttggcgaaaacggtgacagtgaaacaaccttatcaatggacacaaggcagttggacattaaaaggggagttgcccgccactcaatcaccacaagatctccctttacatgtggtggcctatgattttggtgtgaaacgtaatattttacgtatgttggtggatagaggctgtcgagtgacagtggttccagcacaaacctcagcccaagaagtgttagcgctctcacctgatggcatttttctctctaatggtccgggggatccagagccctgtgattatgcaattgacgccatccaaactttcttaactaccgatattccagtatttggtatctgcttagggcatcaattattagccttggcgagtggtgcaaaaaccgtaaaaatgaaatttggtcatcatggtggcaatcatcccgttaaagatttagataataacagtgtgatgatcaccgcccaaaaccacggctttgctgttgatgaagtatcattacctgattgtttaagggtgacacataaatcactatttgatggttcgctacaaggtattcatcgcacagataaagctgcatttagtttccaaggtcacccagaagcgagcccagggcctcatgatgcggcgccgctttttgatcactttattgaacttattgagcaatatcgtcaaaacctgcaatcagtgacaaacaaa

SEQ ID NO: 32459 - DNA, 819 bp, Proteus mirabilis
atgtctgcaacagaacttcgtcttgccgtagtgggggctggagggcgtatggggcgccagctgatccaagcgattaatcagcaacaaggtgtggtattaggtgctgcttttgaacgtactaattcttcattgataggggctgatgcaggagagttagcgggaattggtcatatcggtatcactgttactgataatttattagctcaagtagggcaatttgatattttaatcgattttacgcgtccagagggtacgttgtcccatctggcattttgtgttgagcatcataaaggcatgattattggaactaccggttttgatgaagaaggtaaaaaagccattaattgtgcagcacaaactattcctattgtctttgctgctaactttagtgttggcgttaatttagtgcttaaattattagagaaggcagctaaagtgatgggatcttatagtgatattgaaattgtagaagctcaccatcgtcataaggttgatgcaccatctggtacggccttagcgatgggcgagtcgattgcagagactttaggtcgtgatctgaaagattgtgcggtttatcaacgagttggacatacaggagaacgtgatcctcgcagtattggctttgcgactattcgtgcaggggatattgtgggtgagcacactgctatttttgcggatattggtgagcgagtagagattagccataaggcatcaagtcgaatgacctttgcaaatggcgcggttaagtcagctatttggttaagtgaaagaaagtctggtctttataatatgaaagatgtgctttctttagaagaatta

SEQ ID NO: 32460 - DNA, 2808 bp, Proteus mirabilis
atgagtgactataaaaataccctgaacttaccagaaacagggttccctatgcgcggggatttagcaaagcgcgaaccagaaatgttatcacgttggtacaaagaaggtttgtatcaagctattcgtcaagctaaaagtggtaagaaaacatttattttgcatgatggccctccttatgccaacggcaatattcatattggtcactcagtaaacaaaattctcaaagatattattattaaatccaaagggctgtcaggctttgattctccgtacattccaggatgggattgtcacggattacctattgaattaaaagttgaacaaattgtaggtaaaccaggagaaaaagtctctgcagctcaattccgcgaggagtgccgtaaatatgcttatgagcaaatagaggcgcagaaaaaagattttattcgtttaggtgtgctaggagattgggacaaaccttatctcactatggactacaaaacggaagccaatactattcgtgcattagcgcgtattatcgctaatggtcacctattaaaaggggcaaaacctgttcactggtgtacggcttgtggttcatcgctagctgaagcggaagtggaatattacgataaaacctctccttctatcgatgtgcgtttccgtgcggttgattcaaacgctgtagcggctaaatttggtgtcgtcactgataaacctatttctttagttatttggactaccacaccatggacattacctgctaaccgtgcaattgcattaaatggcgaatttaattacgcattagtttcatttgatgatgagtgcgtcattttagcggcagacttagttgaacacgttatgaaacgtatcggtgtcacagactgggctgttttaggtgaatgtaaaggtagtgatttagaattattgcgcttcaatcacccatttatgggctttgatgtgccagccattttaggcgatcacgttacattagatgccggtacgggggctgttcataccgcaccgggtcatggtcctgatgactttgttattggtcaaaaatatggtttagaagtggctaatccggttggacctaatggttgttatcttcctaatacgtatccgaccttagatggtgtgtttgtttttaaagctaatgatgtgattgttgagttactaaaagaaaagggtgctctattacatcatgaagcaatgcaacatagttatccttgctgttggcgacataaaacaccggttatcttccgtgccactccacaatggtttatcggtatggataaaaatggattacgtcaacaatccttaaaagagatcaaaggtgttaaatggatccctgattggggccaagcacgtattgagtcaatggtggaaaaccgtcctgactggtgtatttctcgtcagcgtacttggggaacaccaatgtcgctgtttgtgcataaagaaacacaagagcctcatcctcgtactctagagttaatggaagaagtcgctaagcgtgtagaagtgagtggtattcaagcttggtgggacttagatatccgcgaactgctgggtgatgaagctgatgactacatgaaaacacctgacacacttgatgtttggtttgattcaggatcaacacactcaaccgtagttgatgctcgccctgaattccatggcaattcagctgatctctatttagaaggttcagaccaacatcgtggttggtttatgtcttctcttatgatttcaacagcaattaaaggcaaagcgccttatcgtgaagtattaacacacggttttaccgtagatggacaaggccgtaaaatgtcgaaatccattggtaatactgttagccctcaagatgtaatgaacaaactgggtgcggatattttacgtttatgggttgcctccaccgattatacgggtgaaattgcggtttccgatgagatcttaaaacgttctgctgatacttatcgtcgtattcgtaatacagcgcgtttcttcttagcgaacttaaatggctttgatccggctaaacatcaagttaaacctgaagagatggtaatacttgatcgttgggcggtcggtcgtgcgaaagcggcacaggaagatatcctcaaacactatgaaaactacgatttccataatgttattcagcgtcttatgcagttctgctcagtagaaatgggatctttctatctagatatcattaaagacagacaatacactgcgaaaagcgacagtgttgctcgccgtagttgtcaaactgcgctataccatattatcgaagcattagtacgttggatggcaccaattatgtcgttcaccgcagatgagatttgggcacagttaccgggtgagcgtgcgaaatttgtgttcactcaagaatggtacacagatttatttggtttagaggcatctgaaaccttaaatgatgagtactgggcggagttattagccgttcgtagtgaagtcaataaggtgttagagcaagctcgtaccgataagcaactacgtggttctttagaagcggcagtaacactgtatgcggataaagccttagcggaaaaactgaatgcattaggaaacgaattgcgttttgttttacttacctctcaagcgaccgttgctgatattcatgatgcgccagaaaacgcgttagcatctgatatggcggggctgaaaattgtcttgagtaaagcgcaaggtgaaaaatgtccacgttgctggcactatgcaactgacattggtcaagtggcggaacacgctgatttatgtggtcgctgtgttactaacgtagccggtaacggtgaagaacgtaagtttgct

SEQ ID NO: 32461 - DNA, 528 bp, Proteus mirabilis
atgactacaatcgtaagtgttcgccgtaatggccaagtcgtaatcggtggtgatggacaggcgacgatgggtaataccgtcatgaaaggcaatgttcgcaaagtacgccgtctttataacgacaaagtgattgcgggatttgccggcggcactgctgatgctttcacgctttttgaactttttgagcgtaaattagagctccatcaaggccatttaactaaagccgctgttgaacttgcgaaagattggcgtacagacagaatgttacgcaaactagaagcattactggctgtggcagacgaaacaacatctttgattatcactggtaacggtgatgttgtgcagccagaaaacgatctgattgctattggttctggtggcccttatgcacaagcagcggcgagagcgatgttagaaaacaccgatctaagtgcacgcgaaattgcggaaaaagcactgaatattgccggtgatatctgcatctacaccaaccataatgtcaactttgaagaaatctcttcaaaagag

SEQ ID NO: 32462 - DNA, 2289 bp, Proteus mirabilis
atgaatcacagcctgctcgtcacaaaacgtgatggtcataaagaacgcattgacttagacaaaattcaccgtgttattacttgggccgctgaaggtctagaaaatgtctctgtttctcaagttgagttacgttctcagattcagttttatgatggtatcaaaactgccgatatccatgaaacactggttaaagctgctgcagacttaatatctggtgaaacacctgattatcagtatcttgctgctcgtcttgctgtctttaatttacgtaaaaaagcctatggtcaatttgagccaccggcattgtatgatcacgttaaacatttagttgaactcggtaaatatgaccgtcatcttctcgaagattacaccaaagaagagttcgaacagatggataagtttattgttcatcaacgtgatatgaatttctcttatgcagcagtgaaacagctagaaggtaaatattttgttcaaaaccgtattaccggtgatatttacgaaagtgcacaatttctctatgtgttagttgccgcttgcctattttcgcgttatccaaaagagacgcgtatggattatattgaacgcttttataacgcggtatccacatttaaaatttcactcccaacacctattatggcgggtgtaagaactccgacacgtcaatttagctcctgtgttctgattgagtgtgatgatagccttgattctatcaatgcgacctcaagtgctattgttaaatatgtatctcaacgtgcaggtattgggattaatgccggtcgtattcgtgcattaggtagtgctattcgtaatggtgaagcatttcacacgggttgtatcccattctataagcacttccaaacggcggtaaaatcttgttcacaaggtggggtacgtggtggtgcagcaacgctattttatcctttatggcatttagaagttgaaagcctactggtattaaaaaataaccgtggtgttgaagataaccgtgtacgccatctcgattatggtgtgcagttaaacaaattaatgtatgaacgtttaatcaaaggtcaggatattacattatttagcccgtctgatgtgccgggtctctatgatgcattctttgctgatcaagacgaatttgaacgtttatatgtacaatatgagaaagataagagtattcgccaaaaacaagttaaagcggttgaattattctcactcatgatgcaagagcgtgcctctacaggtcgtatctatattcaaaacgttgaccactgtaatacacacagtccgtttgatccggcgattgcacctatccgtcaatcaaacttatgtttagaaatagcactaccaaccaaaccattaaatgatattaaagatccaaatggtgaaattgccctgtgtacactttcggcctttaatcttggggcaattgaaaatctagacgatttagaagagctagcacgtttagccgttcgcgcgttagatgctttgttagattaccaagattatccaattttagcagctaaacaaggtgctatgggtcgtcgtacactgggtattggtgtgatcaactttgcttattatctggctaaacacggtgttcgctactcagatggcagtgcaaacaacttaacacaccgtgcctttgaagctattcaatactatttattaaaagcatcaaatgaattagcaaaagagcaaggggcatgcccatggtttaatgaaaccacctatgcagaaggtatcttacctattgatacttataaaaaatcattagatgtactgactaatgaacctctgcattatgactgggaaagcttacgcaaagagatcaaacaatacggtttacgtaactcaacgctctctgcattgatgccatcagaaacatcatcacaaatatcaaatgcaaccaatggtatcgagccacctcgtggttatatcagtattaaagcttctaaagatggcatcttacgtcaagtggttccagaatatgagcgcctaaaaggggcttatgaattactgtggcaaatgccaagtatcgaaggttatttgcagttagtcggtattatgcaaaagtttgtcgaccaagcgatttctgccaacactaactacgatcctactcgtttccctagtggtaaggttcctatgaaccagctgctaaaagatttgctgctcgcctataaatatggtgtgaaaacactctattatcacaatacccgtgatggtgcagaagatgtacaaggtgatctggaagaagtcgttgaaacggcagattcagattgtgaaggcggcgcgtgtaaaatt

SEQ ID NO: 32463 - DNA, 2631 bp, Proteus mirabilis
atgagcgacattgccagagaaatcacaccagttaatatcgaagaagagctgaaaagctcatatttggattatgcgatgtccgttattgtaggacgcgcattacccgatgttcgagacggactgaagccagtacaccgccgagtgctatttgcgatgaatgtactgggaaacgattggaataaaccttataaaaaatcagcccgtgttgttggggatgtaatcggtaaatatcacccgcacggtgacagtgctgtctatgaaacgattgttcgtttagcacagcctttttctatgcgctacatgttggttgacggtcagggtaacttcgggtcagttgatggtgactccgcggcggctatgcgttataccgaagttcgtatggcgaagatcgcccatgaactgctggcggatttggaaaaagagacggtcgactttgttcctaactatgatggaacagaaaatataccggctgttatgccaacccgtattccaaacttgttagttaatggctcttcaggtattgccgttgggatggcaacgaatatccctccgcataacctcggtgaagttatcgacggttgtcttgcctatgttgataatgaagacatcaccatagaagaattaatggaatatattaccgggcctgattttccgactgctgcgattattaatggtcgcagaggaatattagatgcttatcgtacagggcgtggaaagatttatatccgtgctcaggctgatattgaaactgatgagaaaacgggtcgcgaaaccattatcgtgacagaaattccttatcaggtgaataaagcccgtttaattgaaaaaattgcggagcttgtaaaagataaacgtattgaaggtatcagcggattacgtgacgagtctgataaagacggtatgcgtattgttgttgagatcaaacgtgatgcagtcggtgaagtagtattaaatcacctcttttcacaaactcaaatgcaagtctcttttggtattaatatggttgcgcttcatcaaggccaaccaaaattattgaacctaaaagaaattatcgcagcctttattcgccatcgtcgtgaagtggtgactcgtcgtaccatttttgaattacgtaaagcgcgtgatcgtgctcatatcttagaagcacttgcggtcgctttggccaatatcgatcctgtgattgaattaattcgtcaagcaccaaccccagcagaagcgaaagcagcattaattgcccaaccttgggatctcggtagcgtgtctgcgatgttagagcgtgctggtgatagcaatgttgctcgccctgagtggttagagccacaatttggtgtgcatgacggtaaatactatctaacagaacaacaagcacaagccattttagatctgcgtttgcagaaactgaccggacttgagcatgaaaaactgctagatgaatatcgtgaattactgctacaaattgctgagttattgcatattttgagaagccctgagcgtttaatggacgttattcgtgaagagctaacagcaattaaaacacaatataacgatcctcgtcgtactgaaatcactgaaaataccgctgatattaatatcgaagatctgattaatgaagaaaatgtggttgtgacactgtctcaccaaggttacgttaaatatcagccattgactgattatgaagcgcaacgtcgtggaggaaaaggtaagtcagccgcaaggatcaaagaagaagactttatcgatcgcctactggtggctaatacacacgatactattttgtgtttctcaagtcgtggtcgcctgtactggatgaaagtttatcagttaccagaagcgagccgcggtgctcgtggtcgcccaattatcaatttattacctctagagcaagatgagcggatcaccgctattcttccagtaagagagtatgaagaaggtaaatttgtctttatggcaacggcgagcggtacggttaaaaagacaccattacaagacttcagtcgtcctcgtagtgctggtattatcgcggttaatttaaatgatggcgatgagcttatcggtgttgatttaaccgacggtagtaatgaagccatgctgttctcagcagatggtaaagtggttcgtttcgcagaagagtgtgttcgcccaatgggtcgtacagcgacaggtgttcgtggtatgaaactggttgatgatgataaagtggtttcactgatcattcctcgtggcgaaggtgatatcttaacagtgactgaaaacggttatggtaaacgtaccgttcaaagtgaatacccaaccaaaaaccgtgcaacacaaggcgttatctcgattaaagtgagtgagcgtaatggtaaagtggtaggcgctattcaagttgaagaaactgaccagattatgatgatcaccaatgccggaacgttagtgcgtacccgagtatcagaagtcagcattgtgggacgtaatacacaaggtgttaccttgatccgtactacagaagacgagctagtcgttggcttacaacgtgttgaagatgaagatgatgcattagatgatgatgaagttgatgaaatgatcagcgacaatatctctgatgttccagagtctgaaccaacagatgatgcggatagtgaagaagaa

SEQ ID NO: 32464 - DNA, 996 bp, Proteus mirabilis
atgagtaatgacttaactggaaccgaaaaaagcgccgttatgttactgacattgggtgaagatcgcgcagcagaagtatttaaacatctaacgacacgtgaagtgcaacaactgagtattgcgatgtcttctatgcgtcagatctccaatcaacaactcattgatgtgatggcaagcttcgaagaagatgctgttcagtatgcagcattaaatgtgaatgctaatgattatttacgctctgtacttgttaaagccttaggtgaagagcgtgctaataatctgctcgatgagatctcagaaacccgtgaaaccacaacaggtattgagacacttaactttatggagccacaaatggctgccgatattatccgtgatgaacatccacagattatcgccaccattttagttcacttaaaacgtggtcaagccgctgatattcttgctctgtttgatgagaaattacgtaatgacgttatgttacgtatcgcaacatttggtggtgttcagccatcagccttagctgaattaacggaagtactgaacaatttacttgatggtcaaaatctcaaacgtagcaaaatgggtggtgttcgtactgcagctgaaattatcaacttgatgaaaagtcagcaagaagaaaatgttatcaccgcagtacgcgactacgacggcgaattggcacagaaaattatcgacgaaatgttcctgttcgaaaaccttatcgatatcgacaaccgttcaattcagcgcattctacaggaagtggaatccgaatccttggttgtggcattaaaaggttgcgatcaagaactacgcgatcatttcctcaacaatatgtcgcagcgtgctgctgaaattatgcgtgatgacttggcgtctcgtggacctgttcgcatgtctcaagtggaagctgagcaaaaagcaattctgcttattgtacgtcgcttagctgagagcggtgaagttgttcttcatggaggagacgatacctatgtc

SEQ ID NO: 32465 - DNA, 1146 bp, Proteus mirabilis
gtggctgaagatagcgatctcgaaaagacagaagaacccactccccataaacgggaaaaagcgaaaaaggatgggcaaattgttcgttccaaagagctttcgtccgtattaatgattttagggggcgtcagtctactgtggatgagtgggcgttttatcactcgtgagctttatgccatgttaacggaaggttttacttttaatcaccacataatcggcaacgagaatttattgatcccccgttttgccagtttaatgaaacaggctgtatttgcgttatcgccagtgtttctaggcttggtcttagtagcaattggtggttcagccgtattgggggggattaattttagtagcaagtctatcaagtttgatccgaaaaaatggaaccctatttctggcttaaaacgtattttttcaatgaatgcgttagctgaattatttaaagcgattttaaaatcactctttgtcggcttagccgcaacggttttcttatggcacaactggaacgatattcttcatttgatcacgcttcctcctttaagtgctttagctaatgcgatgcaactgcttatttttgcggtctatattgcggtttttatgcttatcccgatggtggcattcgatattatttttcaaattcgtagccatttgaaaaagttacgcatgacacgccaagaaatcaaagacgaatttaaacaacaagaaggtgatccgcaattaaaggcgcgtattcgccaacaacaacacgagatgtcgcgtcgacgaatgatggcagatgtgccaaaagcagatgtcattgtcactaacccaacgcattacgcggttgctttgcaatataacgacaaaatggttgccccaaaagtacttgctaaaggggcgggtgccattgccttaaaaattaaagaaattggtgctgaacatcgaattccgcttctagaagcgccaccgcttgctagggcgttatatcgtcacagtgagataggacaggctattcctgcaacactctatgccgctgttgcagaagttttagcttgggtctatcaactgagacgatggaaaaccgaaggtggtttaaaacctaaacaacctatgaacttgccagtgcctcccgcactggactttgctggagaagataatcgtcatggc

SEQ ID NO: 32466 - DNA, 654 bp, Proteus mirabilis
atgagtggggatccaattatgccgaaagataatgtcgaaataacgtcagatattatcagtcggatcggacaattgacgcgtatgttacgcgacagtttgcgagaattaggattggataaagcaatagcagaagcagcagaagccattcctgatgcaagggaaagattggactatgttgctcaaatgaccgctcaggcagctgagcgtacattaaattgtgtggaagctgcgcaaccaaaacaggatgagttaagtagtcatgcaactaagttaactgaacgctgggatcaatggtttgagcatcctgaagatctcaaagatgtacgctctcttgtaacggatacccgcaattatttgcgggatatccctgaaagtgcggcttttacaaatagccaattacttgaaattatgatggcgcaagatttccaagatttaacaggccaagtgattaaacgtatgatgagtgtggttcaagaaattgaaaaacaacttgttatggtattaatggaaaatctgccaccagagcaacttgaaaaatccaatgcgaaaaaagagactgattcattattaaatggcccacaagtcaataaaaacaatgctggtgtgattaagaatcaagatcaggttgatgatttactggaaagtttaggtttc

SEQ ID NO: 32467 - DNA, 387 bp, Proteus mirabilis
atggcaagtaaggatctgagatttttagtggttgatgatttttcaacaatgcgccgcatcgttcgtaatttactaaaggagttaggatttatgaacgtagaagaagcagaagatggtgctgacgcgttagccaagttacagagttcggcatatgattttgttatcaccgattggaatatgcccaatatggatgggttagagttgctgaagaatattcgtagtgacgcagggcttgcaacgcttcccgttctgatggtgaccgccgaagcgaaaaaagaaaatattattgctgctgcgcaatcaggagcaagtggatatgttgttaaaccttttactgcagccattcttgaagaaaaactcaataaaatttttgaaaaactgggcatc

SEQ ID NO: 32468 - DNA, 498 bp, Proteus mirabilis
atggctgcggaacatttcgagaaattatccggtgaaactgttggacaaggatttctaatttttacgttgggcaacgaagaatatggcattgatattctaaaagtacaagaaattcggggctatgaccaagtcactcgtattgcgaatgcacctagttttattaaaggtgttactaacttacgaggggttattgtacctatcgttgatctacgaattaagttttcacaagaaaatgttacctataatgacaacacagtggtgatcgtggttaatttactcaaccgtattgtcggcattgttgttgatggtgtttctgatgtattaactttaaaacctgaacaaatctgtcctgctcctgaatttgcggtaacaatgtcaacagaatatttaacaggattgggtactttagatgaaagaatgttaattctggttgatattgaaaaattactcaatagcgaagaaatggaattagttgatagcgcaacaattatggctaaa

SEQ ID NO: 32469 - DNA, 1362 bp, Proteus mirabilis
atgacagcaatttcaggagcaaaaccgattattcgtagcgcagaaacgcatccgctaacgtggcgcttacgtgatgatcgtcagccagtatggctggatgaataccgtgcaaaaaacggttataaagcggcagaaaaagcattaaaaagcatggcacctgatgaggtgacctctgaagttaaagatgcaggcttaaaaggacgtggtggtgctggattctcaacaggcttgaaatggagcctgatgccaaaagatgaaagtatgaatatccgttacatcctttgtaatgcagatgaaatggagccgggaacctataaagaccgcctgttaatggaagaactgccacatctgttaatcgaagggatgattatcggtgcgcatgcactgaaagcttatcgtggttatattttcctacgtggtgaatatattgaagcggctaagcacctgcgtcatgctattgaagaagccaaagcagcgggttttttaggcaaaaatatcttcggctctggtatcgattttgagctatttgttcacacaggagcaggtcgttatatctgtggtgaagaaacagcactgatcaactcactggaaggtcgtcgtgctaaccctcgctcgaaaccgccattcccagcaacctccggtgcttggggaaaacctacctgcgtgaataacgttgaaacgctgtgtaacgtacccgcgattattgagcatggcaaagattggtatatcggtttaagcgccggtaaaagcccagatgcaggtactaaattaatgggattctctggtcgcgtgaaatatccaggcttatgggaattaccttttggtactacagctcgtgaaatcttagaagattatgcgggggggatgcgtgatgggctgaaattaaaagcttggcaacccggtggtgcaggaacggatttcttaacagaagatcatctcgatctccctatggattttggcacgatcgccaaagctggtagccgtttaggtactgcgttggcgatggcggtagataatgaaattaacatggtttcattaacccgtaacttggaagagttctttgcgcgtgaatcttgtggctggtgtacaccttgtcgtgatggtttgccatggagtgtcgaaatcttacgcgcgatagaaaaaggtcaaggtcgtcctggtgatattgagactcttgagcacctctgccgctctttaagcccagggcacacattctgtgctcacgcaccaggggcagtagagcctttacaaagcgcaatcaaatatttccgtgaagaatttgaggctggcattattcaagaagactataccaatgccaatcttatccgtggtattcagcctaatttgctgaaaagccgctgg

SEQ ID NO: 32470 - DNA, 1182 bp, Proteus mirabilis
atgttctcaaaaaaatctcgttctacaactgcactactcttttcatcacttattctgactataggaagaggtgcaacactgccttttatggcgatatacttatcacgacaatataaattgcctgttgatgatattggtatcgcaatgtctatttcactgactacggggatagtattcagccttgcctttggtatgctggcagataaatttgaaaaaaaacgttatatggttttttctattattacctttattatcgcattttctgctatcccaatggtcaatagtactattttagtggttatctttttctcaattattaactgttcctatttagtcttttctacggtattgaaagcttatttttctgaaactttatcaatatcagcaaagcctaaaatattttcactaaactatacttttattaatatcgggtggacggttggcccacctattggcacattattattaatgtatggtactcaattacctttttggttagctgcaatatccgccagtattcctttatttatgatccaatgttttgtgcaacgttcagtggtagaccattccacagaagaaaatagtgtaaagtgggatccgaaaataatgctaaaagataaagcattaggctggtttgtgctttcaactttttttggcacattaacttttggtacatttgcttcgtgtatttcgcaataccttttagttgtttatgatgctaaattggctgaatctgctattgcggtgatcctccccgtcaatgcggccattgtcgtctcattacaatatatcgtcggtaaacaagtggttgctgaaagactacgtaaattaatgaccttaggcacactcttttttatcttaggattagcgggctttatgctggcgggtgataatttaattttctgggcaatggcgatagcaatatttacctttggtgaactgatttatgcacctggtgagtatatgatgatcgataatattgcgccgttaggaatgaaagcaagttatttctctgcacaatctctaggttggttaggtgctgcattaaatccacttgctagtggttatatcctgacaaccttgccccctatttcgttattcgctattttaatggggatcgcagtactagcttggctttgtatgctgcaaggtatgaactacagtgaaaaaagaatagctgct

SEQ ID NO: 32471 - DNA, 2619 bp, Proteus mirabilis
atgtcattttcaacaggtataaatagcttaagcggcataaaaataaataacgtaaaattatttatttttatacttgcgctactattttcagttgactcaaagtctgaggaggagttttattataacccctatttcttatcagataacccggagtctgtcgctgatctatcttcttttgagaaagggttagaagtacctgaaggtaattatctggttgatatttacttaaatgacatattcttaaaaacccaatatatcaattttattgagaataaagggcagctatcaccatgtatcacaaaagcagagctaaaaagttggaatgttaatttaaatctcataacggatgaacaaaataaagataaaaataatgttgaacagaaaaatgagctcgatgaacattgtcagtcacttacttcattaattgctcaagccacagcaaattttgatgttggttcacaaaagctcaatctcactatacctcaagtatatttagtcaatcagtctcgaggctttattccaccagagttatgggatgatggtattgtggctggatttattacctatattttaaatggtagtaaaacgcgcaatgatggtagtccagatactcattttactcatctcaatttacaaagtgggatcaatcttgggccatggcgtcttcgcgataactctatttattcttatgattctattaataaatcaagttggaaacatctgaatacttatatagaacgtggtattaataaattatattctcgtcttattattggtgatagctacacacaaagtgaagttttcgacagcatcaactttagaggctttcaactgtcatctgatgaagttatgttaccggatagccaaagaggttttgctccgattattcgaggtgtcgcccggactaatgccgaggttactatacagcaaaatggttatgtgatttaccgtaactcttttccaccgggtccttttgttattgatgatctctattcaacaagtaacagtggcgatttagaggtaaccattactgagtctgatggttcaacacaaacctttactgtgccatattcatcagtccctttattacaaagggaaggacataccaaatattcagtgactgtaggtagttaccgttcgggtaatgatgagcaggagcggccttattttttacaaggatcagtgatccacggcttacctgcgggttggaccatttatggaggaacccagttatccaaaaattaccaagcggcaagtattggggtaggtaaaaatattgggcgttttggggctttatcatttgatattaccgaagcgagatcaatactacccgatgactctacacaccgtgggcaatcgatacgtattctttataataaatctatcaatgaattaggcacaagggtgcaacttgccggttataaatatgcgacgagtggtttttatactttagcagagactacttataaaaaaatgagaggaaattatatacaaacggaggatggtgttgttgaagttagtggattgccacaaagttactacgatcttatttataataaaaggcaaaggatacaactcaatattactcaaaaaataggtgatcaatctacgttatatattattggtactaatcagcgttattggaattctaaaaaacaagataatcaattacagataggccttaatactattattaaaggtattaatttaggcctaaattatagcttatctaaaacatcatggaatgatagtaaagatcagatgttagtatttaatactagtattccttttagtaactttatgcgttctgataatgattctatatggcaaaatgcgagtttaagtactaactcctcgcataacatgaagaaacgttttaacaatactattggattaaacggtacattattggaagataaaaacttaagttacaatattcaaacaggttattctcatgaagaagaatcggactcaacaggatatgcctcattaagttataacggttcttatatgaatagcaatataggttataactataccgatacatcacatcaaataaattatggtatgagtggcagtattttagctcactcaggtggtataacacttagtcagcctatatatcaaacagcggtgttagttaaagtacctgaagttaaaaatataaaattagaaaacaatagtggcatcacgacagacagtaatggttatgcggttttaccttatgtttctgaatataaagaaaaccgtattgcattggataccaattcattctctaacaatattgaaatagataatgcggtgaaaagcgtagttcctactcgtggggccattagtgcgatcacatttgagcctagtgttgggataaaagcaattacgacattaacccataaagggaaaccagtacctttcggggctatcgttgattcaggtaataatactgggattgtggcagatgaaggaaaagtttatttaacagggttatcaccttcagggcaattaaaagtgaattggggtagtaagaaagagcaacaatgcttagtaaattacacattaccaccacaagatccagataaactttatgttgaatatagtgcagagtgccaccctattaaggaa

SEQ ID NO: 32472 - DNA, 696 bp, Proteus mirabilis
atgaatagtattctaactttttctaaaataaagcttctttttttaatgctcttaactctatgtgtcattaaccaagcatatgctgctgtatcattaggggcaactagagtcatttattttgcaggtgaaaagcaagtaaaattaccagtaattaataatgatgaaaaacgttatttaatacagtcttggatagaaaatagcgaaggaaagaaagataactcttttgttattacgcctcctctattttctatgcagggtaaaaaagagaatactttaagaattatagatgcaactaacaataaattaccgaaagatagagaaactttattttggttgagtgtaaaatctatccccgctgtagaaaaatcacttgctaatgagaatatgttacaacttgcgattattagtaaaataaaattcttttatagaccaaaagatctcaccatatctccagatgaaaattataaaaaactacaatttaaacgtaataatgacacacttattataaaaaatccgacaccttattttattacgatgactgaattagaacttggtggtaaaaaattagagaacactatggttccaccttttgaagataagtctatctctattccaacatcagcttatgggaaactctcgtttcaaactattaatgattatggtgccatcacaccaaaaacaatcgtcgacgttaga

SEQ ID NO: 32473 - DNA, 564 bp, Proteus mirabilis
atgaaacttaattatttgaaactttttgtgatctctgcattatctgtaggttctgtttttgctgtttcagctgaagatcctgtaggaaatggacctgtaaccgtgaatggtggcgaaatattttttaaaggtgaattagtaaatgcagcatgtgctgttgactcttcatctgatggccaaatagttaaattaggtcaagtgagaactgcaaaattagcgaaagctggtgattttagcgaaaatactaattttactatccaattaaatgattgtgactctaaagtagctagtactgcaaaagttgcttttacaggggtttctgctgcaggacaagatgacgtattagcagtatcttcttcttctgctggtggtgctaaaaatgtcggtattcaaattttagatagtaagagtgcaccaatgtcttttgacggcgctggattcggtaatgcaactaaattacatgatggaaaaaatattattccattccaagcaagatattatgctttaggtgcaactgaacctggtatcgcaaacgcgaacgcaacctttgctgtccaatacgaa

SEQ ID NO: 32474 - DNA, 1575 bp, Proteus mirabilis
gtgaaacctctatttacagttattcctacactattattaacattggcgtgcgtatttcctgcttttgccaatcaaagtaataatatattggattatgccagtacaaaagatatccgtgatattaacccccatctttattccggtgaaatggctgcacaaaacatggtatttgaacccttggttttaaataccgataagggtgttgcaccttatttagcacaacgctgggaaatttctccggatggtaaaagttatacctttttcttgcgccaagacgttacatttagtgatggcgaaccttttaatgcgcaagcggtaaaacttaatattgaggctgtattagataattatcagcgtcatgcatggctagaattggtacgtcaaatcgacagtgtcgaggttatcgatcagtatactgttaagctaaatttaaaaaatccctattatccaaccttaactgaacttggcttaactcgcccatttcgttttatttcacctaaatcatttattaacggtaaaactaaaacaggggtgagtcattatattggtacggggccttgggtgctcacggaacataagaaagatcaatatgctgaatttaaggttaaccctcattattgggggcaaaaaccagcattaactggggtgatgtggcgagtgatccccgatagacagacaatgctattatccttacaaaaaggagatattcagctaatttttggtgcagatggcgacatgttagatatggactcttttgacgcattaatggcatctgataaatttaaaacacaaatgagtgcacctattgcttctcgtgctattgtgctcaacagtagtcgccctattacttcaagccaaaaagtacgccaagcattagagtatgccgttgataaagaagggattgctcaaggtattttagcgggaagtgaaaaagtcgctgatacattaatggcaagaagtgtaccttattgcgattttgattcaccaacttatatttatcaaccggaaaaagctgcctcgttattagaagaggaaggctggctattacctgcgggtaaaacagtgcgtgaaaaacagggaaaaccgttgcagttattgctctcttataatgtgaataatgcggttgaaaaagagatagccgaactattgcaagatgattttaagaaaattggcgttgcactgacggtattaggggaagagaaacaggcctttttagatagacagaaaagtggtgatttcgatttacagtattctctttcgtggggaacaccttacgatcccgcctcttttgtctcatcctttagaattccagctcatgctgattaccagggacagaaagggttagccaataaagcacaattagatgcgatgattggcgagttgttgattacgccagatgaacatcgccgtcaggcattatatcaacgcttatttacctcattagcggagcaagccgtctatataccattaacctattcgcgtactaaagcgatttaccgtagtgaattggaaaacgttggttttaatccatctcaatatgaaataccttttgaaaagatgcgttttaaagccgaa

SEQ ID NO: 32475 - DNA, 861 bp, Proteus mirabilis
ttgcttaagtatcgtgtcattactgcattaatactaatccctattgttattgctgctttatttcttcttcctcccgcaggatttggattagttattattgccatttcaggcttagcgggttgggaatgggctcaatttatcggctggcattctcaaggcaaacgtattgctactggtgttggatttgctgcactcttagttcttatgcaagcctcgttaccggattttgatcatctgcttgatacagcaatgattaagaatagcttatgggctgggctcttttggtgggtagcggcgattttattagttgtcagttatccgaattcagccaatatgtggaaaaattctgttcttcttaagttattgttcggtatattgacgattgttcctttttattgtggcatgatggcgctacgtatgttgggatatagcacaaactcatatacaggagcttggtggttactgtatgtcatgttattggtttgggctgcggactcaggggcttatgcatttggccgtttaatgggtaaacataaaatggcaccgaaagtatcaccgggtaaaaccttggaaggtctggtgggcgggttaatcactgcaggtgttgtttcatggctatttacgcgtttcgcaccaattactgaagtgcctaaccatctattactgatttcgggcatcgtggtgattgtttccgtattcggcgatctggctgagagtatgtttaaacgtgtttctggcataaaagacagtagtcagcttatccctgggcatggtggtgtgctagatcgtattgatagtttgaccgcggcgatccctgttttcgctggattggtgtttttagtttcttctggctttcaaatg

SEQ ID NO: 32476 - DNA, 555 bp, Proteus mirabilis
gtgattaatgaaatcaaaaaagatgctcaagaacgcatggacaaaagcgttgaagcactaaaaagccaaattaataaagttcgtactggccgtgcgtctccaaacctattagatggtattgttgtagaatactacggcgcaccaactccattaaatcaagttgctaacgttgtggcagaagatggccgcacattggcaattacggtgttcgatcgtactttagcacctgctgttgaaaaagcgattatggcatcagatttaggcttaaatccttcatctgcaggcgcgatcatccgtgttccactgcctccgttaactgaagaacgtcgtaaagacttaatcaaagttgtgcgtggagatgcagaacaaggtcgtgtctctattcgtaatatccgtcgtgatgctaatgataaaatcaaagcattactgaaagataaagaaattagtgaagatgatgaacgccgttcacaagatgaaattcagaaattaactgatatgttcattaaaaaaattgatgaagcattaacgctgaaagaagctgagttaatggaattc

SEQ ID NO: 32477 - DNA, 1275 bp, Proteus mirabilis
atgacacccgatgatattgcttttgatttacgccatatttggcacccttatacctcgatgagtaacccattaccggcttatccaatcgtaagtgcaaaaggggttgaactcactttagcgaatggcaaacaattaattgatggtatgtcttcatggtgggctgcgatccacggctataaccaccctgaactcaatacggcggtaacagaacaactagcagcaatgtcccatgtgatgtttggcggtatcacccatcccccagcggttgctctatgtcgaaaactattggctatcactcccgcaccactagagtgtattttcctcgctgattcaggctctgtagcgattgaagtggcgataaaaatggcattgcaatattggcaggcaaaaggtgaaaaacgccagcgcattgtggcattaaaacgcggttatcatggtgatacttttggcgcgatgtcggtgtgtgatcctgacaattcgatgcatagtctctacaaaggctacctgccgaatcatctgtttgtcgaagcgccaaaaaccggattttatcaaccgtgggacgctactgatatagacgctttacgcaccacattagcgcaacatcatcaacatattgccgctgtgatgctagagccaatcgtccaaggagctggtggtatgcgcatataccacccagagtatttaacacaagctcgagcgttatgtgatgaatttaatgtgttattaattgccgatgaaatcgccactggatttggcagaaccggtaaattatttgcttgtgaacacgcggggatctcccccgatattatgtgtgtaggtaaagcattaacaggtggctatatgacgctatccgccacgttaactacacgccatattgccgatactatcagccaaggtgatgcaggttgctttatgcatggccctacctatatggggaatcctcttgcctgtgcggtggcgaatgctagtttatcactattagagcaaggtcactgggttaatcaagtcgcccaaattgaagatcaacttaaaaccgaattgttacccttaaagcaagcaaaaagcgttaaagatgtgcgggtacttggtgctattggtgtcgtagaaatggttgagccagtcaatatggctaaactacagaaatactttgtcgatgaaggggtttggatacgaccttttggtcaactgatttatattatgcctccttatattatatcacctgaaaagctcactaaactcactcaagcaattgagaaagcggttaatcttaccaat

SEQ ID NO: 32478 - DNA, 1374 bp, Proteus mirabilis
atgaaaattattatcttaggcgcaggtcaagtgggtggcactctcgctgaaaatcttgtcggtgagaataacgatattactgttgtcgatactgatgctacccgtttacgtcaacttcaagataaatttgatttaagagttgtaaatggtcatggatctcatccgagagtcttaagagaagcgggggctgaagatgcggatatgctagttgccgtcacaaattctgacgaaacaaatatgatagcatgccaagtcgcttatactttatttaatactcccaataaagttgctcgtatccgagcctctgaatttgttcgtgaagcagataaactttttttaccagaagcaattcctattgattacctcatctccccggaacacctcgttatagattatatctataaactaattcaataccccggtgccctacaggtagtaaactttgctgaaggtcaagtcagtatcgtggcagtaaaagcctactatggtggatcacttgtgggtaatgcactatccactctacgtgatcatatgccacatattgatactcgtgttgcggctatctttcgccaagatagacctattcgccctcaaggatcgaccattattgaagcgggtgatgaggtctttttcgtagtggcatcacaacatattcgcgcagtaatgagtgagctacaacgattagaaaaaccttataaacgcattatgattgttggtggcggaaacgttggagcaggattagcggcaagattagaaaaagattatagcgttaagctgattgagcataatcaacaacgtgctaccgagttagcagagctcctccatgatactatcgtgttttatggtgatgcatctgatcaagagctactcgctgaagagcatattgagcaaatcgatgtctttattgcactcactaatgatgatgaagcaaatatcatgtccgcaatgctcgcaaaacgtatgggagcaaaaaaagccatggtacttattcaacgcagtgcttatgttgatttagtccaaggtggagtcattgatattgccatctctccgcaacaagccactatttcagcactattaggtcatgttcgcaaagcagatattgtcagtgtctcctcattacgtcgcggtgttgctgaagctattgaagccattgcacatggtgatgaaaatacctcaaaagttgtcggtagacgtattcaagatatcaaacttccgccaggcacaattatcggcgccattgtccgcaatgaagatgtcattattgccaatgcaagtcactcaatagaacaaggtgaccatgtgatcatgtttattacagataaaaaatatgttcctgaagtagaaaaactgttccaacctagtccatttttctta

SEQ ID NO: 32479 - DNA, 384 bp, Proteus mirabilis
atgcgccatcgtaagagtggtcgtcaattgaaccgcaacagcagccatcgtcaggctatgtttcgcaacatggcaggttctttagttcgtcatgaaatcatcaagacaactttgcctaaagcgaaagaactgcgtcgcgtcgttgagccgctgattactcttgccaagaccgacagcgtagctaatcgtcgtctggcattcgcccgtactcgtgacaacgaagtcgtggcaaaactgtttacagtattaggtccgcgttttgcgagccgtgcaggtggttacactcgtattctgaagtgtggcttccgtgcaggtgacaatgctccaatggcttacattgagcttgttgaccgtgctgattctgaaacagaagcagctgctgaa

SEQ ID NO: 32480 - DNA, 987 bp, Proteus mirabilis
atgcagggttctgtgacagagtttctaaaaccgcgcctggttgatatcgagcaagtgagttcgacgcacgccaaggtgacccttgagccattagagcgaggcttcggccacactctaggtaacgcactgcgccgtattctgctttcgtctatgccgggttgtgcggtaacagaggttgagattgatggtgtactgcatgagtacagcaccaaagaaggtgttcaggaagatatcctagaaatactgctcaaccttaaggggttggcggtaaaagttcatggtaaagatgaagtaattcttactttgagcaaatctggcattggccctgttattgcagccgatatcatccatgacggtgatgtcgaaatcgtcaagccgcagcacgttatctgccaccttacagacgaaaacgcatctattaatatgcgtatcaaagttcagcgtggtcgtggttatgtgccggcttctgcccgaattcattcggaagaagatgagcgccctatcggtcgtttactagtagatgcgtgttatagcccagttgagcgaatcgcttatactgtggaagcagcgcgtgttgaacaacgtaccgacttggataagctggtaatcgagatggagactaacggtactatcgatccagaagaatcgattcgccgtgcagcgactatcctggctgaacagcttgaagcttttgttgacttacgtgatgttcgtcagcctgaagttaaagaagagaagccagagttcgatccgatcctgctgcgcccagttgacgatcttgaattgactgtccgctctgctaactgtctgaaggcagaagcaatccactacatcggtgatctggtacagcgtactgaagttgaattacttaagacgcctaaccttggtaagaaatctcttactgagattaaagacgtactggcgtcgcgtggtttatctctgggcatgcgccttgagaattggccacctgcaagtatcgctgatgaa

SEQ ID NO: 32481 - DNA, 1413 bp, Proteus mirabilis
atgactcgatatgaacagcttgcggcacagatacgccaacaaattgaagataatatttggcaatcaggcgatcgtttaccctcattacgggatacggttaaacaatcaggtttaagtttaatgaccgttttacaatcttatcaactgttagaaagtcaagggtggatcaccgctcgtccgcaatcaggttattatgttgcacatcgcaatacaggttttgctcaagtaactgccagcaaagggctacatatgagtgaaaatgttgagataagcgcctctatattcaatgttcttcaagcctgtaaagatcccaatatcattccgttcggttccgcctttccagatcccagtttattcattcaacctaaattaagccgagcattagcctctgccgctagacatttagcccctcaaagttcagtgattaatttacctcctggtaatgaaaaactacgtcgtaatatagcccaacgctatgcactgcaaggtattcatgtatcgcctgacgatattgtgatcaccgcaggtgcgatggaatcattaagttttagtttacaagctgttactgagccaggagattgggttgtcatagaatctcctgctttttatggcgcattacaggcgatagagcgtttacgattaaaagcgattgccatcaaaaccgatccggtgacaggcatttgtttagatgagttagagaaggtggtagaacaatacgacattaaagcgtgttggttgatgagtcattgccaaaatccattaggtggcactatgcctgatgaaaataaaatcagactagtagaaattttagcggcaaaacagataaccttaattgaagatgatgtctatggtgaactgtataatagtccaaaagcgccaatgcctgtgaaaggctttgataaatccaatagcgtattgcactgcgcttctttttctaaatgtttagcgccaggatttcgagtcgggtgggtcgcagccggaaaacatgcgactaaaatacagcagttacaaatgatgagtactgtatcagcgagtatgccaacacaacaagctatcgctgactatttatcacaaggggggtatgacgggcacctacgtcgcttaagattattattagagcagagacgttatcgtatgttacaggccatacaaacgcatttacctaaagatgttaaagtgaatattcctgtcggaggctatttcctatggttagaattcgagccaagctttgatgctaattcattgtaccattttgctctcgaaagaggggtgagtattgcaccaggtgctatgttttcgaccagttcacagtttaatcatgcttttcgtttaaactcttcttttcaatggaatggtcagactgaaaaaggaatgcaaattattggtgaagggtgtcgaaaattacgtcgtaaa

SEQ ID NO: 32482 - DNA, 975 bp, Proteus mirabilis
ttgagaaaaatattacactatattgttttagcgttaggtttatttattattacgctaaatgtatctgcacaggcaccggaaaatttcactaaagcaaaacagctagccagagaacacatttattatgatcaaaatcaaaacaaccaaggtacgctgtattgtggttgtcattgggagtgggtaggaaaatcggggggacgtgttaatttagccagttgtggttatcaagtgagggcacaagccacccgagcttcacgcattgaatgggaacatatcgtccctgcttgggtttttggtcatcaacgtcaatgctggcaaaatggtgggcgagctaactgtgttaaaaacgatcctatttttggcaaaattgaggctgatttacataatctagcgccttcgattggagaggtgaatggtgatcgcagtaattttagctttggtcaattatcatctcaagcgccttatcaatatggccagtgtcgcagtcgggtcgattttgcttctcgcacctttgagcctcgtaatgaggtgaaaggccaagttgcacgtgtctatttctacttacatgatcgttataacctctcaatgtcacgtcaacaacaacagctttttatggcatgggataaagcttacccaccaacaccgtgggaaagagagcgagataatcgaattgctaacattgttgggcatcataatccctttgttacgggacaaatgaagtggcagttaggacataaaaatagtggtgcaggattaactgcaacatatcgtcctacaactgacaaaataggaatgcctaaagcgcccacagtctcccaagatgagcagatcaaaggtaatctaaatagtaaaatttatcatttttcacactgtactggttatagaaccatgtcagataaaaatgcggtatattttaaaaccgaaaatgaagcaactaaagcgggttaccgattagcaaataactgtaaagcgctt

SEQ ID NO: 32483 - DNA, 1188 bp, Proteus mirabilis
atgagaaaacttaatccctactttggtgagtttggtggtcaatatgtaccagaaatattgatccctgcattagatcaacttgaacaagcctttattgacgcacaaaacgatccgtcatttcagcaagagtttcaagatctactcaaaaattatgcaggtagaccaacggcactgacactctgtcgcaatttgacccaaggtactcgtacccgtttatatctaaaacgtgaagatttattgcatggcggtgctcataaaacaaaccaagtattaggccaagcactgctagcaaaacggatgggaaaaacagaaattattgcagaaacgggcgctgggcaacatggtgttgccactgcgttagcttgtgctctgttaaatatgaagtgccgtatctatatgggggcaaaagatgttgaacgtcaatcacccaatgtatttcgtatgcgtttaatgggtgccgaagttattccggtacatagtggttcatcaacattaaaagatgcgtgtaatgaagcgttacgtgactggtctggttgctacgagcgtgctcactacttattaggcactgcagcaggcccgcatccttatcccactattgttcgcgaattccagcgcatgattggggatgaagctaaggcgcaaattttagcccgtgaaggtcgtctccctgatgccgttatcgcctgtattggcggtggctctaacgccattggcttattcgcctcatttataccagaaacctcagtacaattaattggtgttgagccggcaggtaaagggatcgaaacaggagagcacggagcaccattaaaacatggcaagttaggcatttatttcggtatgaaatcaccgattatgcaaaccgaagaaggccaaattgaagagtcctattctatttctgcaggattagatttcccatccgtaggcccgcaacatgcgcatttaaacagcattggccgtgcagattatgtttctgtaacagatgatgaagctattgaggcttttaaaacgctatcacgccgtgaagggatcatccccgcattagaatcgtcacatgcactggcctatgcgttgaaactgattgcccaaaatccagataaagaacaactcttaattgtcaatttatccggacgaggtgacaaagatatttttactgttaacgatattttagctgcacgaggagaaatt

SEQ ID NO: 32484 - DNA, 1371 bp, Proteus mirabilis
atgactgtattaaatgccattgttaaagataaagccgaatatttagttgcacgtaaagcacagcaacctttatcaacctttatagataagattgcgccatcgacacgctcattttatcaagcattaacgcgatcacacccagtgtttattttagagtgtaaaaaagcatcgccctcaaaagggattattcgctctgattttgatcccgttgccattgcgaaaatttatcaaccctatgcagccgctatttcggtactgactgatgaaaaatattttcaaggcagttttgattatttacgtcaagttagtgatgccgttcatcaacctgttttatgtaaagattttattatcgatgaataccaaatttatttagctcgtttttaccaagctgatgccattttattaatgctttctgttcttaatgatgaacagtatcgtgcgcttagtgccgttgctcaccaattaaatatgggagtattaacagaagtgagcaccgaagaagagcgtcagcgagccattgagcttaaagcaaaagtgatcgggattaataatcgtaatttacgtgatctctctattgatttatcccgtaccgaacaacttagccaaggtttaccgcaagaggctattgttatcagcgaatctggaattcatacccatcaacaagttaaaacactaagtcaatatgctaatggctttttagtgggtagtgccttgatgtcacaagagaatattgcccaagcggtaagagcacttattttgggaaagcataaagtgtgcggcttaacccgcacacaagatgttaaagcggcctatcaagtgggtgcctattatggaggattaatttttgctgagaaatcaccacgaagagtgacactgtcacaagcgcaattattgataacacaagcgccattagcttttgtgggcgtttttcaaaaccaatctattgagctgatttgtgactatgctaaacaacttaatttatctgcggttcagttacatggcgctgaagatgcacaatttattgcccaactaagggaaaaaatcgctccacaatacgaaatttggcaagcgcttaatatggcttatcaccatgatattcagcacattgcgcaagttaacaaatatgtattagataatggtacgggtggtacaggtagaacctttgattggcaaactattccgcctactttacgccataaagcattacttgcaggtggcctaaacagtgataactgtttagacgctctaaacaccggttgcttaggacttgattttaattcaggggtggaatcttcagcaggtatcaaagatccacaacgtctatcgcaagtctttacacaattacaacaaagcaaattttcacaaaatttc

SEQ ID NO: 32485 - DNA, 996 bp, Proteus mirabilis
atggatactatcttcaataaattatttgcaggacaacaattaagcttagaagagagccaaacactgtttagtgcgattattcgtggtgaattaacagaatcacagttagcagcggtattgattagtatgaaaatgcgtggtgagcaccctcaagagattgccggagcggctcgtgccctattggataatgcctctccttttccacgcccagattatctgttttgcgatattgtgggtactggcggcgatggagccaatagcatcaatatttcaacagccagtgcgtttgtcgcggcagaaattggtctaaaagtggctaaacatggtaatcgtagcgtgtctagtcgctcaggatcatcagatttattagcggcatttggtattccgctagataaaagtgccaacgatgcccgccaattgttagatgaaattggactatgctttttatttgcgccgctttatcacagtggttttcgctttgccgcccctgtgcgccaacagctaagaacacgcacgctctttaatgtgttaggcccattaattaatccagcgcgtccgcctttagcattaattggtgtttatagtcctgaattattaatgcctattgcagataccttaaatgtcttgggctacaaacgtgcggcagtggtccatagtggtggaatggatgaagtgtcattacatgctcccacacaagtggctgaattacacaatggggaaatcactcgttatcaattaaccccaagtgattttggtctgcgtccttgtgcgataagtgatcttgaaggcggtacacctgaggttaatcgccaattattggctaatttactgcaaggacaaggtaaacgcgcacacactgaatccgtcgctgccaatgtcgccttattaatgcgtttacacggacaagaagatttgaaagctaataccgaagttgctatgcacgcaatctatagcggtaaaaccattaatcgcgttaatgcgctagccgcaagagga

SEQ ID NO: 32486 - DNA, 858 bp, Proteus mirabilis
atgactgaattgctatctgatttacgcgtgatttatgatctgcatagccatactactgcatcagatggcgagctctcacctgatgaattaatcgatagagccattgaaaaacaaattacggtattagcgataaccgatcacgatactactgctgctatccaacctgccaaaaattatattgcagaaaaaagtttacctttaactttgatatcaggtgtcgagatatcgactttgtgggagaatatagaaatccatattgttggattacagattgatatcgaacaccaagctatgacgacatgcctagcaaaacagagtcaatgccgtgaaactcgcgctaaaatgatcggcgaacgtttagctaaagcgggtattgctggggcatgggaaggggcaagtgccctagcgaaaggcgggcaagtgacacgaggacactttgcgcgttttttggttaatgaagggcatgtggcatcggtcaataaagtatttaaacgctatctagcgaaaggaaaaacaggttatgtaccgccacaatggtgctcaattggtgacgctgtcacggctattcatcaagcgggtggagttgcggtattggcacatcctggtcgctatggtctatcctctaaatggttaaagcgattagtgctttattttaaacaacaaggtggtgatgctatagaagtggcacaatgccaacaaccaccacaagagcgagaacaacacgcagctttagcacaagcttatgatcttaaagcttcgttaggttctgattttcatcgcccttgctcgtggatagagctaggacgtaatttatggttacccgctaatgttgaacctgtatggacattatggcaggga

SEQ ID NO: 32487 - DNA, 2025 bp, Proteus mirabilis
atgtctcacgtcgcgaataaattattggtaacctgcgcgttaccttatgctaacggttcaattcatctcggtcatatccttgaacacattcaggctgatatctgggtccgttaccaacgaatgcgcggcaaagaagttcatttcatctgcgctgatgatgctcacggcacgcctattatgctgaaagctcaacaattgggtattaccccagaagccatgattgaagagatgagcaaagagcatcaacaggattttgccggttttaatatcagctacgataactatcactccacacacagtgaagaaaatcgtcaattatcgacgaaaatttatctagccctgaaaaaaaatggtcatattaaaagtaaaacgatttctcaactttatgatgaagaaaaaggcatgttcttgcctgatcgttttgttaaagggacttgccctaagtgtaaagcgcccgatcaatatggtgataactgtgaagtatgtgggtcaacttatagcccaacagaattaattaatcctcgctctgtggtatcgggctcaacgccggtaatgcgtgaaaccgaacactatttctttgatctcccagcctttagcaatatgttgcaagagtggatccgctccggtgcattgcaagagcaagtagccaataagatgcaagagtggtttgacagcggtctgcaacagtgggatatcacccgtgacgccccttatttcggttttgaaatccctgatgcgccgggtaaatatttctatgtttggttagacgcccctattggttatatgggctcattcttaaacctatgtgaaaaacgtggtgatttaagctttgatgagttctggaacaaagagagcaaaactgacttataccattttatcggtaaagatatcgtttatttccacagcttattctggccggcagtgttagaaggtagtgaataccgtaaaccaaccaacctatttgtgcatggctatgtcaccgtcaatggtgcgaagatgtcaaaatctcgcggtacctttattacggcacgtgcctatcttgatcactttgatgctgattgcctacgctattactatgcagcaaaactttcatcacgtattgatgatattgacctaaacttagaagactttgtacagcgtgtaaacagcgatatcgtcaacaaggtggttaacctcgcgtcccgtactgcgggttttatcagtaaacgctttgatggcaaattagcggcaagccttgatgatgcgaagttatatcaacatttcgtcgatatgcaagaaagcatcgcacaatgttttgaaaaccgtgaatttggtaaagccattcgtgaaattatggcattagcagacgaagctaaccgctatattgatgaaaaagcgccttgggtggttgctaaacaagaaggtaaagaggctgagttgcaagctatttgtactatgggaattaacttattccgtgtactgatgacttatttaaaaccaattctaccttctttaacagaacgttcagaagccttcttacaaactgaattaacttggaatgctctgtcgcaaccgctgttaaaccatgaaattactaaatttaaagcattgtttaatcgtattgaaatggataaagccaatgcaatggtagaagcttcaaaaagtaccattgcgccagtcaaagaaatcacgggtccattagcagacgcgcctattcaagaaaccattaaatttgatgattttgccaaaattgatatgcgcattgctgaaattaaacaggctgatttcgttgacggctcagataagttgctaaaattaatactggacttagggggagaaacacgccaagtattctccggcattcgttctgcataccctgatccgaaagtattagaaggtcgcttaactgttatggttgcaaacctagcacctcgcaaaatgcgttttggaatttcagaaggtatggtgatggccgcaggccctggtggtgaagatattttcttacttagcccagatagtggggctaaaccgggtcaccaagtgaaa

SEQ ID NO: 32488 - DNA, 1929 bp, Proteus mirabilis
atgaaaaggtttttgacaacactcgccattttgcttgtagtgattttggcaggcttaacgacattagttttgctcattaaccctaatgattttcgtggttatcttgttgaacgcgttgaaaaacaaagtggctataaattaaccttacaagatgatatgcgttggcacgtctggccaaaactcagcattattagtggtaaaatgtcattaacagcccccggtgctgagcaaccattgatcactgctgataatatgcgtcttgatgtggaattatggccattactttcccaccagttggaagtaaaagaagtgatgctaaaaggtgccgtggttagacaaacgcctgagagtaaagcaatacctaaaataaccccgccttctgttgccaatgaagacagtactcgtccgattattgagccaaaaacaaatcgttggcaattaaatattgctaaggtgaggatctccgatagtttgattatttggcaaaccaaagggggagagcaacttaatttacgcgatatcaatttattattaaaaacggacgacaaaaaacaaattaaccttgagatgagcaccaaaattaatcgtgatcgtcgcgagttaatgttaaatgttgttgctaatgctgatatgagtggctacccatatcaaatcagtggcaatatcgctcaattagattatgcattatcgggaataggacttccggctcaagggatctccggaaatttaacctcagatttcaatattaaaaatgatagtataaatgttattgccttaaataatttaaatatgacggcaaatgagagtcagttacaaggtagcatcacggctgaattggctaaaaagaaccgctatcaagtggaattaactggggacactttaaatttaaataccctattacctgagttagcacagcctaattcatctgaaacggcatcgttaaccttggcaaataccccgtcgagatcattctcattctttagccatgctcaggctgcaccatcacctaatgcaactattatggctcgtccggttattacctccgcgacaattgaaaacaaagcgtatgatttaacccactggggtgatattgaatttagcttaaacttagcgctcaataagttattgtataaagaattagaaataaacaatgttaaattaaccgcattaaataaccccaaatcattaaatattgataggttagaagggcagatcctaaacggagatttttcactgcctacggtgatttctaccagcattgtgccagcgcatattagtatgaatgtcacaatgaataatatccctttgcaacctttactccgtgtctttgatcagccagaaaatttcagcggtttaatttctgctaaagggcatctagaaggtgccggatataatcgcaacgcgtttcttaatagttggcagggtacactggatacgtcattaagcgaatttaaaatgctaggattaaatattccacaagtgatccagcaatctattgcacaaacaaccgatcaagtggtttaccctgaagatattgagaactataccaaagcagatagtgtgattgccctgtttaaactagcacctaaaggccgagtgacgttaaatcagttagatgctcaagcaagtgcttatcagatcagcgggcaaggtcaattagatctacaacgtcataatctagatgtgatgctgatggttaatatcaaaaaaggttggggcaaagagaatgaatttattcgccaactggccaaaatagatattccattaagattgtatggtaattggaatgctatccaatatgagtttaacgttgaaaaattactacgtgatcaattacagcaaaaagcaaaacaggccatagataattggttaaataagcaagatgatagccctgaagttaaagcgcttaatcaattattgaaaaaaata

SEQ ID NO: 32489 - DNA, 924 bp, Proteus mirabilis
atgacaaagcaagctgattatatttggtttaacggtgaaatggttccatgggctgaggcaaaagtacatgtcatgtctcacgcactacattatggaacgtctgtatttgaaggagtacgttgctacgattcccataaagggcctgtcgtttttcgccatcgtgagcatatgcaacgattgcatgattctgccaaaatttatcgtatgcctgtcgcgcaaagtgttgatgagttaatggaagcttgtcgcgaaacattgcgcaaaaaccagttagtcagcgcttatattcgtcctttagtttttattggtgatgtcggaatgggggttaatccaccagaaggttataaaaccgatatcattattgctgcattcccatggggggcatatttaggtgaagaggcgttagataaagggattgatgcgatggtctcttcttggcatcgagcagcacctaatactatcccgacggcggccaaagcaggaggtaattatctctcttcattgttagtgggcagtgaagctcgtcgccatggttatcaagaagggattgcattagatgttcatggttatctttctgaaggggctggtgagaacttatttgaagtaaaagatggcgttatttttactcctccatttacctcatctgcgctaccggggatcactcgcgacgcaattattaaattagcgaaagatctcggttatgaaattcgtgaacaagtactgtctcgagaatctctctatcttgctgatgaagtgtttatgtctggtaccgctgcagaaattacaccagttcgtagcgttgatggtattcaagttggtattggtcgctgtggtccagtaacaaaagctattcagaaagctttctttggtttgtttacgggtgaaaccgaagacaaatacggctggttagatcctgtcaatcca

SEQ ID NO: 32490 - DNA, 1485 bp, Proteus mirabilis
atgttcactattccacaaattggagaagatgtgatggaaaagaaaaagctcacaacggcggctggtgcaccagttgtagataataataatgtaataacagcaggacctcgtggcccaatgttactacaagatgtctggtttttagaaaaacttgcccattttgatcgtgaagttattcctgaaagacgtatgcacgcaaaaggctccggtgcctttggtacatttacggtcactcacgatattacgaaatatactcgagctaaaattttctctgaagtgggtaaaaaaacagaaatgtttgctcgtttttcaacagtggcgggtgaacgtggtgcagctgatgctgagcgcgatattcgtggatttgccttaaaattttatacagaagaaggtaactgggatatggtgggtaataatactcctgtattctatctacgtgatccccttaaattccctgaccttaaccatatcgtaaaacgtgaccctcgcactaatatgcgtaatatggcttataaatgggatttcttttctcatttaccagaatctctacaccaattaactatcgatatgagcgatcgtggtttacctttaagctatcgctttgtgcatggttttggtagccacacttatagctttatcaataaagataatgaacgtttctgggttaaattccatttccgttgccaacaaggcatcaagaacttaatggatgatgaagcggaagctctagtaggtaaagatagagaaagctctcagcgtgatctttttgaagccattgaacgtggtgattatccgcgttggaagttacaaattcagatcatgccagaaaaagaggcatcaaccgtgccttataacccatttgatttaaccaaagtttggccacatgctgattatccactcatggatgtcggttactttgagttaaaccgtaatccagataactacttctctgatgttgaacaagctgcatttagccctgcgaatattgttccaggtattagtttctcaccagataagatgttacaaggtcgtctattctcttatggtgatgcacatcgttaccgtttaggcgttaaccatcatcaaatccctgttaatgccccaaaatgcccattccataattatcatcgtgatggtgctatgcgtgttgatggtaatagtggtaatggtattacttatgagccaaatagtggcggtgtgttccaagagcaacctgactttaaagagccaccactttctattgaaggtgcagccgatcactggaaccatcgtgaagatgaagattatttcagccaacctcgtgcactgtatgagctattaagcgatgacgagcatcaacgtatgtttgcgcgtattgcgggcgaattatcacaagcaagtaaagaaacacaacaacgtcaaatcgacttatttaccaaagttcatcctgaatatggcgctggcgttgaaaaagcgattaaagtgttagaagggaaagacgctaaa

SEQ ID NO: 32491 - DNA, 1671 bp, Proteus mirabilis
atgtatttagaaagagtggaaatagcaggatttcgggggcttaatcgcctttctctcccccttgatatgaatacggttttggttggcgaaaatgcatggggtaaaacttcattacttgatgcgttaaccttgagtttggggatcgaaacttatcaatatgcttttacagcagaagattttcatcgtttacctaatgagccagaaaacagtaaaaaaaacctacaaattattctgacttttaccgaatcacgtcctggtcgtcatcgctcgtatcgttttcgtaaattagcacccgtatggatagctaatggggacgctcgtaagcatatttattaccgtattagtgcagaattagatgagcagcaaaatgtcaaaacctttcgttattttctggataaagaaggtaaacagatccgtttagcgaatggacagaccaaagcgattattgctgaaattgtgcgcctttatccagtattgcgcttacaggatgcgcgttttatacctaatttaacaacagaagttattgactctcataatgagcctcatcgtgaagcatttaataataagatgagtgaattaacgaaagcattaattaataacccagacaatttatcagatgaagatttacgtgaagggttagatgcaatgcaacagttattaggacactattttgctgatcacggtgcgctactgtttaaatctcatttgaaacatcgcaaagtcagtgagccacatattcgaggatggcatgcactagaaaatattaataagattttagcgaaacctaatcagcgcaatattcgtttaattatcttaggtatgttctcttctattttacagtcacgaggcagtgtcgaacttgatccttacgcaagaccgatagtgattgtagaaaaccctgaaactcgcttacaccctattatgctttctgtggcatggggattattaaatctcttttctttgcaacgcattacgacaaccaattcaggggagttactctccttagcaccactacaaagtgtttgtcgattagtacgtgatacagataaagttgccgcttatcgacttggcgacaaacaacttcatgcagaagaagagcgtcgtatctcttttcatattcgttataaccgaccttctgcactctttgctcgttgttggttattggtcgaaggggaaacggaaatctggctaatgaacgaattagccagacaatgtaactacttctttgaatctgaagggatcaaagtcattgagtttgcgcagtgcggacttaagccactgttaaagtatgctacctatatgggtatagaatggcatacgttggttgatggcgatgaggcgggtaaaaaatacgccgccaccgttaaagaatttgccgcaaaaagaaatgatgcggagcgtgaccgattaacacggttgccagcattagatatggaacactatttatataaagaaggttttcgcaatgtctatcatgaggttgcgggtgttcctgataatgaaaaatggccagtaagacgtgtgatcataaaagcgatacaacgttcatcaaagcctgatcttgccttaacggttgctaataatgctgcacaacgaggtattgatgctattcctactttattaaaggtgatgttttctcgggtagcatggcttgcgagaggaaaagccaat

SEQ ID NO: 32492 - DNA, 216 bp, Proteus mirabilis
atggccaaagaagacaacattgaaatgcaaggcactgtactggatactctgccaaacacgatgttccgtgtagaattagaaaacggacacgtcgttaccgctcatatttcaggaaaaatgcgtaaaaactatattcgtatcctgacaggcgacaaggttaccgttgagctgaccccatatgacctgagcaaaggccgtatcatcttccgtagccgt

SEQ ID NO: 32493 - DNA, 735 bp, Proteus mirabilis
atggatgttaatttttatgtaacatgcattggtgacgccttaaagtctcagatggcaagagatagtgtattgctgttagaaaaactaggctgtcaagttcattttctcgaaaaacagggctgttgtggtcaacctgctattaatagtggatatattaaagatgccattccagcgatgaaaaacttgattaaaacctttgaagttaatgactatcctattatttctcctgctggatcatgttcttttgctattaaaagttatgctaaatatctggtaaatgaacctgactgggctattcgtgcagaaaaaatagctaatcgcatgtttgatctcacctcctttatcgttaatcaattaaatattgttgatgtaggtgcaagccttaaaggaaaagctgtttatcacccgtcttgcagcttatttcgtaaaatgggagtgaaagaagagccactcacactattacgtcatgtaaaagggctagaattattaccttttgacaatatggaaacctgttgtggttttggggggacgttttcggtaaaaatggctgaaatttcaggtgaaatggtcaaagaaaaagttcaccacattatggatgttcatcctgactatttaattggtgcggatgtcagttgcttattaaatataggtggtcgtttagagagagaaggtcgtccagttaaagtgatgcatattgcgcaagtattgatgagcaatgaggaggaattatgtcat

SEQ ID NO: 32494 - DNA, 2190 bp, Proteus mirabilis
atgcttagcaaagatccgaaatcaacgcccattgacccggtatccgttttaaaagatgaagccatcaatcaagtgaaaaatagggtgcaatccaaagtgaacgaaacgctatcgacacccacgcaaaaggtggccgggatggcctcagcagaggcctcgctcacgcaatcagccagcgcatcggccaatcgcgtgactgctcatcccctgatccacggtggcggttttaccggtggacaaacattcgctgaaaaccaagcactccaagcggcccatggggcgttacttgatgcattaggcatggacagcctcgaaagtggtttggtgttcacttgcaccattggtggattgcctgacgacacctttcaaatcaccgaatttaatcttaccgaaggattatcctcgctattttcgctgtctatcagtgcggtcagtgccttaccctttatcgattttcagcgccatcttggcttagcctcatcattaacggtcaaacgcgacggggtgttgatccgcaaagtcaacggtatcttagccggggcagtacaaggcaataccgacggagtgaaaacgtggtatcacttcgatatccgccctgaaatgtgggtgatgaccctcaatcaagacagccgtatttttcaacatcaatcggtgccgaccatcttaaaaaccttattggatgaggcccatgttaaagcggattgccaattctaccgtgaagatctacaccctgaacgtctctacaccacccaaaaacgcgaatccgcatttgatttttggtgtcgactggcgtttgaagagggcattaacttctggtttgaagaagaacaactgttttacagcgatgaacatatggggatgacggcgggtattcacctcacctataacccgcaggccgataccgatatcagcgatagcactgccatgacttggcaatatggcgaatatttgtgtgtggatgaaactatccataaagacaacaactttgtgcgtccttcttatccgttgtctcatgaaaacaaaattgagcaggggggacagcacagtgtgtttgaaagttatggtcgttttcaattagacgatgaaggtcgacctctgacacaggtgcgctttgagcaattacgtaacggcagcaaagtggggcaagcgacaacaaactgttttgcactgatgcccggcaaaatctttaccttatctcagcatccccatcagccgatgaatgatcgctggcaagtgatcagcgtcagccatcatggtgtacagccactggcggacaatagcgggggcgaaggcacacaactgtcgaatagcgtctcctttattccgggcacgcaagagtggcgccccccttatcgttataaaccgactgccgacggcgatgaagtggcgacggtggtggggccaccaggggaagaaatctacgtcaatgaatatggcgccgtgaaagtgcattttcattgggatcgtcggggaagtgccgatcacagtgcctcctgctgggtacgggttgccatgggttggagtggaaatggctatggtttttctgcggtaccgcgcatcggcacgcaagtgctggtcagctaccttaatggggatatcgacaggcccatcgtgacgggatgtacttatgatggtcgtaacgcaccaccgattaagttcccagagaataagacacaaaccactttccgtagccaaacccacaaaggggaaggttttaatgaattgcgttttgaagatgcgggcggtaagcaagaggtgtttcttcatgcgcagaaggatatgaataccgtagtccaaaacgataaaggaactacggtaggcgccaatcatactgaaaccgttatgcaaaaccaaaagatctcagtacatggtacgcaaactacggcggttcaagcggatcaaaaaaatatcgtgtttggtaagcagcattcaatcgtggatggtgaagtgttgatcgcatcagcccaaggtattcgtttaattagtggcaactcggcacttcaattaaaccctgacgggactatcaccttagtgtgtaacaactttgatttttacggtcacggtagcggtcggattggtactggtgagttattagatctgaatatggacggggcaggtcccggaaaccttaagatggaaccagataccagcactatcgctcaagcgaaagatcagtttttccctaaaaag

SEQ ID NO: 32495 - DNA, 1530 bp, Proteus mirabilis
atgacaacagaaacaaacaaatcgaatagtgaaaaaaaatatatcgttgctctggatcagggaacaaccagttcacgcgctgtcgtaatcgatcatgacgccaacattgttagcatctcacaacgcgaatttacccaaatttatcctaagcccggctgggttgagcacgatccaatggaaatctgggcaactcaaagcgcaacgctaattgaagtattggccaaagaagacatcccttctgatcatgttgccggtatcggtattaccaaccaacgtgaaacgactatcgtctgggaaaaagagaccggtaaacctatctataatgctattgtgtggcaatgtcgccgtactgcagacttttgtactcgcttaaaagatcaagaaggggttgaagagtacattcgtcaaaatactgggcttatggttgacccctatttttcaggcaccaaattaaaatggatcctcgataatgttgaaggcgctcgtgaacgagcagaaaaaggagagttactctttggtactgttgatacttggttagtctggaaaatgacacaaggtcgtgttcacgtaacagattataccaacgcttcacgtactatgttgtttaatattcactctttagattgggatcaaaaaatcctcgatctgctgaatattccccgcaatatgctacctaaagtggtgccttcttctgaagtttatggtcaaaccaacattggtggtaaaggtggtacacgtattcctatcgccggtatggctggtgaccaacaagcagcactctatggtcagctctgtgtacaaagcggtatggcaaaaaacacctacggaacaggctgcttcttgctgatgaatacaggtaaagaagccgtgcgctctaaccacggtctattaaccactatctgctgtggcccacgtggtgaagtaaactatgccttagaaggtgcggtcttcgtcggtggtgcttccattcagtggctacgtgatgagctaaaattaattgatgaagcaactgactcagaatactttgccactaaagttaatgacaccaacggtgtttatgtcgtacctgcatttactggcttaggtgcaccttattgggatccgtatgcccgtggcgctatcttcggtttaacccgtggcgctaaccgtaatcatattattcgagctactttagaatctatcgcttatcaaacccgcgatgtccttgatgcgatgcaagcagactccggagcacgcttacaagcactacgtgtagatggtggtgccgttgccaataacttcttaatgcagttccaatctgacatcttaggtacccgtgttgaacgtcctgtggtacgtgaaagtactgcgttaggggctgcgttccttgcaggccttgcggtaggtttctggtctgatctggaagaggtaaaaaataaagccgagattgataaagaattccgcccaggtattgaaaccacagagcgtaattatcgttataacggctggaaaaaagcggttgcccgtgcacaagaatgggaagatcgcggt

SEQ ID NO: 32496 - DNA, 1032 bp, Proteus mirabilis
atgcacgaaaatacaccaaccgataaaacattaaaaaacaagcaaacacagggtattcaaggcaattacccacttaataggttttctgttgcgccgatgctcgattggactgatcgccattgccgttatttctttcgccagcttaccaaaaatactttgctgtatactgaaatggtcacaacaggtgccattattcatggcaaaggtgattatttaaaatatagcaacgaagagcacccgatctcattacagcttggcggcagtgatccacaagcgttagcgcaatgtgcaaaattggcacaagagcgtggctatgatgaaattaatttaaatgtaggttgcccttctgatcgggtacaaaatggacgctttggtgcttgtttaatgggtgaagcacaactcgttgcagattgcgtgaaagctatgcgtgatgtggtcgatattcctgtgacggtaaaaacacgtattggcatcgacaaccaagatagttatcaatttctatgtgattttattgataccgtcagccgtgataataactgcgatacctttattattcatgctcgcaaagcttggttatcgggattaagccccaaagaaaaccgcgaagtgcctcctttagattatcctcgtgtttatcaattaaaacgtgatttctcgcatctcactatggcaattaatgggggaattaagtcactagaagaggcgcaggagcacttaaaatatatggatggtgttatggtaggtcgcgaagcttatcaaaatccatcaatattggctcatgtggatcacgtgctttttgataatcagttacctgttactaatgccgtcgctgccgtaaaagccatgtatccttatattgaaaaagagctctcacaaggcacttatttaggtcatatcacccgccatatgttgggaattttccaaggtattcccggggcaagacaatggcgtcgtcatttaagtgaaaatgcccacaaacaaggtgctgatttaaccgtgctagagaatgcgctcaagtttgtgaccgaaaaa

SEQ ID NO: 32497 - DNA, 981 bp, Proteus mirabilis
atggctaaacgcattcagtttgcagctcatggtaatgccgatgtactcgagctaacttcatttacccccgcccctctaggcgataacgaagtacaggttgccaataaagccattggcattaattatattgatacttatgtgcgtagcggattatatccagtagagcatttcccaagtggcttaggaactgaagctgccggtgttgtgattaaaacaggcgctcatgttacttcacttaaagaaggggatagagttgtatatgcacaatctccattaggcgcctacagcgatacgcataatgtaccagaaaataaagtagctcgcctgcctgataatatctcttttgaacaagccgccgcctcttttttgaaaggattaacggtttattatctattcaatgaaacatacaaattacgtgcaggggaaacctttttattccatgcagcggctggtggcgtcggactaattgccagccaatgggcgaaagcgattggcgctaaaatgattggtaccgcaggcagtgatgagaaagtggctaaagctaaggccgcaggtgcatggaaagtgattaactatcaaactgaatctattgttgaacgtgtccttgcgctcaccaataaccaaaaagtacccgttgtgtatgattctgttggcaaagcaacttggttggattcgttgcactgtttgcaacgccgaggcttaatggtcagttttggtaacgcttctggtgcggtaacaggggttgatttaggtattcttaataaattgggttcactttatgttactcgtccttctatttccggctacattacgacgcgcgaagagttagatgcagcaagtgaagcactatttacgttaattggtcgtggtaaaattgatgtcagtgtgccagataatcagaaatttgcattagctgatgctaaagccgcacaccgttatcttgaaagtcgtcaatctcaaggttcaagtctattgatccca

SEQ ID NO: 32498 - DNA, 1353 bp, Proteus mirabilis
atggaagggttgaagcttcccccccattcgctagaagccgaacaatcggtgttaggcggtctaatgatagataacgagcgttgggataatgtctccgagcgtgtcactgccgatgatttttatagccgacctcatcgcactatttttgcgcaaatgcagcgtttacttgagctgggtaaacctattgatctgataaccttatcagaagcactagaacaaaacgcagaattagaaagcgttggaggctttgcttatttagcagaactatccaaaaatacgccaagtgcagccaatattaacgcttatgccgacattgttcgtgagcgtgctgtcgttcgcgatatgatcaaagtcgccaatgaaattgctgatgctggatttgatccccaaggacgcaccagcgaagatctgctcgattttgctgaatctcgcgtctttcaaattgccgaaacccgcgccaataaagatgaagggccaaaagcaattgatgccattttagaagaaaccgttgaaaaaatagagcaactctaccaaaaacctcatgatggtgtgacgggggtatccagtggctatcaagatctggataaaaaaaccgccggactgcaaaaatcagatttaattattgtcgcagcacgtccttctatgggtaaaactaccttcgcgatgaacttatgcgaaaatgcggcaatgacggaagaaaaacctgtacttatctttagcttagagatgccaggtaaccaaatcatgatgcgtatgctcgcttcattgtctcgcgtggatcaaacccgtattcgtactgggcaacttgacgatgaagattgggcgcgtatttcaagtaccatgggtattttgcttgaaaaacgtaatatgtatattgatgattcctctggtttaacccccaccgaggtgcgctctcgtgcccgaagaatttatcgtgaacatggcggtttaagcctaatcatgattgactacttgcagttaatgagagtaccttcattatctgagaaccgaactttagaaattgctgaaatttcacgctctttgaaagcattagctaaagaattacaggttcctgttgtcgctctgtcacagttaaaccgtagtttggaacaacgtgctgataagcgcccagttaactctgacttacgtgaatcgggctctattgagcaagatgccgacttgattatgtttatctatcgtgacgaagtttatcacgaaaatagcgacctaaaaggggtggcagaaattatcattggtaaacagcgtaatggccctatcggtacggtaagactaacctttaatggtcaatggtctcgctttgataactacgcaggccctgcttacgacgacgaa

SEQ ID NO: 32499 - DNA, 1089 bp, Proteus mirabilis
atgaaagcggcaaccgcagtaatagatcgccgcgctctgcgtcacaattttcagcatgtaagagactatgcaccacatagccacctgatagctgtcgtgaaagcaaacgcttatggtcatgggttattagaaacagcatatactttaatggatgatgctgattgttttggcgtagcacgtatcggtgaagccttaacattacgtagtggggggattgtgaaacccatcctactacttgaaggcttctttgatgctgttgatttacccattttggtggttaaccatattgagactgttgttcatagtgaagagcaactcgaagcgttagaaaatgccgatttagaagaacccgtaaaagtctggatgaagctcgatactggaatgcatcgtttaggcgtccgtcctgaagaagctgaggctttttatcaacgactttgtgcttgtaaaaatgtccaacaacccgtcaatttggtcagtcattttagtcgcgcggatgagcctgatattcctgaagtcacacaaaatcaaattcagctatttcaaacctttatccaagataaagcgggtgataaatctatcgctgcttctgcgggaattttattttggccacaagtccattatcaatgggttcgccctgggatcatcacatacggtatctcaccaacgggtgataacagaacaggtaaagactttggtttaaccccggcaatgacactaaaaacgagccttattgcggttcgtaaacataaagcaggtgaacccgttggttatggtggtacatgggtaagtgaaaaagatacttatctgggtgttattgctatcggttatggtgatggttacccacgtagtgcaccttctggtactcctgtttggatcaacggtcgaaaagtgccgattgttggacgcgtttccatggatatgatcagcgtcgatttgggatctgagctaattgatcgtgtcggtgatgaagctattttatggggagatgtgctacccgtagaagaaatagccaaatatagtggtattagcgcgtacgaattaattaccaaattaacttcgcgcgtcattatggaatacctagacgaacaa

SEQ ID NO: 32500 - DNA, 780 bp, Proteus mirabilis
atgacaaaatttgattttcatgtgtttaacattaaaataaactcattatctttttacaaagtgcagaccatgaacgaacaaaattttttagcaaattacaatcgccgtgattttctatcgccgcttattactgttgattcagtactattcacttaccatgaagggcagttaaaagtgctcttggtggaaagagctaatcatcctgaaaaaggaaaatggggattacctggtggctttgttgatgaaacacaagacaactgcctagaagatactgtgctcagaaaattaaaagagaaaacaggggtgatcccgccgtatattgaacaactctgctcagtgggaaataatcagcgcgatgtaagaggttggtctgttactgtatgttacacggcgttaattgctcaccaagcatgtaaagcgcatattgatagtgtggatcatgtgatgtggttacctattgatgaagtagcacagaaaaatctggcatttgatcataatgaactgattgcgcaagcgagagagcgattaaagcaaaaatcgctttattctattgtgccgggatttgcgttacctgaagtgtttactttgcctgaattacagcatgtgcatgagatattgataggtaaagagatccagaaaaaatcttttagacgacggattgaacaagccgacttattaattgataccggagaaaaacgtgctgagaagggacgccctgctagtctctatcgacttaagaagtcgtctgcggattatcgttttattcgtaatcttgaattt

SEQ ID NO: 32501 - DNA, 1023 bp, Proteus mirabilis
atggtatccacacatattggttttccgacagaaactgtcattgtttttgttgtacttgcgataggcgctatttttatcgatttatttatgcatcgtgcagataagccgataacgttaaagaatgctgttttttggtcaatattctgggtagtcgttgccatggcattcgcgggttttttatacgtccaccatggtgcagaagttgcaagcttattcgtgacgggttatgcattagagaaagtactgtctgtcgataacctatttgtcatgatggcgattttctcttggtttgcggttcctgatcgtttccgtcaccgcattctgtattgggggatcattggtgccattgtattccgtgcgatctttgttgctattggtaccggcttattaagtttagggccttacgttgagatagtctttgctctgattgttgcttggacagccgtaatgatgctgagaagtgggaatgatagtgaagaaattgaagactattcacagcatcttgcttatcgcttagtaaaacgatttttccctatatggccaaaaattactggacatgccttcttattaacacaaaaagaggttgatgcagagttagcaaaaccggaaaacaaagacataactatcgggcgaggtacaaaagctgcgttatatgcgacaccgcttatgttgtgtgtggcggtggtagagctttctgatgtgatgtttgctttcgattcggtgcctgcaatcattgccgttagtcgtgagccactgattgtttatagtgcaatgatgttcgctattttgggcttacgtactctctactttgtgttagaggcattaaaacagtatctgattcaccttgaaaaagcggttattgcattgctgttctttattgctgtaaagctggggcttaatgcaacagatcatatttggcagcatggatatagcatttccgcgacaaccagcctattcgtagtgcttggtgttcttgctctgggtattctggcaagttttgtattcccagaaaaaaagaataaa

SEQ ID NO: 32502 - DNA, 2514 bp, Proteus mirabilis
atgaataggaaaaaaattgtttcttttaaaattaatttattagttttctctgtattatcaacgttaaatatggcgactgtagtacaggcggatccgtctgctcatattgttgtgcaacaacagcaaaaaaatagtagtgttgatattcttaatattgccgcagcgattaatggctattccagtaattcattaaccagttttgatgtttctgaagcagggttaatattaaataatagtcctgatggcgctgatactcaattatcggggcatattgacggtaatagtaatttatctagcggtgcggcaaaagagattactcttgaggttaacgctaaaaaagccattacgttaaatggtcctgttgaggtggccggaacaaaagcacgggttattttatctaatcctgctggaattatttgtagtagctgtaactttcttagtgctgaccgtgttgtgttgactactgggaaagtgaatacacaaaatgataccgttgatagttataaagtggaaaaagggaatattactgttaaaggtaatgccacttttgataaaagtgcgcaacagattgatttaattgcccgcaatgtttctattgaatcgcctcttgatgcatctggtattaatgtgaatgtgataactggcgctaatgaagttaaagcacaagataatacggtggttgcacaaaagccaacaggcgttgctagtaaatatagtttgcagatagtcaagaatgcaggagtgagaagctcatcgctaaaatttataggtactgaagctaactcaccactgaaaaataatggtaatgttgaaactgctgggggagggatcgagcttattcatagcggtgcacttgataataataaaggtaacttcttatctgagggggatatctattttgctttcgataaaggtgttacaaatagtactggtgaaatacaaagtactaaaactatctcaatagaaacaaaagaagcgaaagttgataatatctctggtggtaatatttctgctgatggaaatgtaatcatcaatagtggtgaatttaaaaacaatgcctcctatattgcaagtaaagataaattagatattcagacaaacggtaaaccaataacgaatactgcaacggtcggtgaaggcgtcggtatttctgctactaatggtattaaaattaatagtggcttatttaataataaagagggtcaaattaattctaaaagtgtcattgatattaatactaacctaaaagatttcaataatattgatgcttatattgatgcgtcaggggatattagtattaatagtggcgcaatgaataatacccatagtcgcctacgctcagttactcgtgttgaaattgatactaatggtaaggcactgaaaaataccggcatgacggcagatactgctagcgatgattcattaggtattcttagtggtctggatggtatgacagttaatattgctggactgaataatgaccaagggattattgccaccgatggcgatatgaacttcactaacaaaggcgacattaccaataaatggggacatataaaatcagggggatacttgacatttagtagtgataagatcaaaaacctctatggtggcttagcatctaaaactggtgctaatgtgactttctcccagacattagataataactttggtgttttttacttagaaggcgatagtgtcactatcagtgcgccttatataaataataataaaggtgttattaaaggagacgctatttattttaaaacagataaatttaataacacatcaggatttgtgatcactgaacagaaattagagattgatacaccagaactgacgaataacagcagtttagatttcaaaacagaaatgggcttttatctggggcaacctgatcagaaagggggattaattagtaaaggagaaatgaaattaagcggtaataaattagtgagtaataaaggacgtattgtaacagaaaatggggatatggagcttaaattcacctctgttgataataccagtggtactattgcatcacataaaaatgcctctgtagtgacaagcacctttaccaattcacaaggcacattgtttggccaggataaattaacactgcaaaccgatacactgaaaaataacagtacaggttcggttgaaagtaataccttaaaaggtgttattgcgtcgagtggtgatactgaagtgacggttaatcgtgattttgaaaacaatggcgtcatttctggtgtagaacatttacgtgtaaatataaatggtaaatataccaatgccagcaatagtattatgtcaggtaaaaatagtttcgaattaggtgtgacaggaaatattattaatcgcggcattcttaattcaataaaagacacgactatttctggtgagaatattactaatgaaaaatcaggtattattgttggtagagaaagtattactatcgataataaaggcacttttactaataaaggtaaagttgtcgggccgttaaataaa

SEQ ID NO: 32503 - DNA, 480 bp, Proteus mirabilis
atgagaattggacacggttatgatgtacataaatttggcggagaaggcccaattattattggtggtgtgagaattccttatgaacaaggtctcctagcccattcagatggtgatgtggtactacatgcggtgacagatgccattttaggtgctgttgcgatgggcgatattggtacattatttcctgatacagatccggcttataaaggtgcggatagccgagtattattgcgcgaagctttttcaagagtgatggctaaaggttaccgtattggtaatcttgatgtcactattattgctcaggcacctaaaatgctacctcatactccacaaatgcgtgtcaatattgctgaagatctccattgtcatgtcgatgatatcaatgttaaagcgaccactactgagaaattaggttttgtaggacgcaaagaaggtatcgcttgtgaagcggtggtgttattaatcaaagagtctttatct

SEQ ID NO: 32504 - DNA, 1665 bp, Proteus mirabilis
gtggctcaatacgtttatagtatgttgcgtgtcgggaaagttgttccccctaagcgacatatccttaaaaacatctcactcagcttctttccgggcgcgaaaattggtgtgcttggtctaaatggtgccggtaaatcaaccttactgcgtatcatggccggtatcgataccgatatcgaaggtaaagcacgtccacaaccgggtctaaaaattggctacttgccacaagagccaaaattaaacccacaacaaacggttcgtgaagccgttgaagaagcggtaagcgaagtcaaaaatgcactcaatcgtcttgatgaagtgtatgccgcttatgctgatcctgatgctgattttgaccaactggcaaaagagcaaggtcagctagaagcgattattcaatctcacgatggtcataatcttgataaccaattagagcgtgcagcagaagcactacgtttaccagattgggatgccaaaattgaacatctttctggtggtgaacgtcgccgtgtggctatctgtcgtttactgttagaaaagccagatatgctgttgttagatgaaccgactaaccacttggatgctgagtctgttgcttggttagaacgcttcttacatgattatgaaggcactgttgtggcgattacccacgaccgttacttcctagataatgtcgcaggatggatcttagaacttgaccgtggagaaggtattccgtgggaaggtaactactcctcttggttagagcaaaaagatgcgcgtcttgaacaagaagcagccactgaagccgctcgccataaatcaattcaaaaagaacttgagtggatccgccaaaatcctaaaggtcgtcaggctaaaggtaaagctcgtcttgctcgctttgaagaactcaatagcgttgattaccaaaaacgtaatgaaaccagtgagctatttattccacctggacctcgtttaggggataaagtgctagaagtgagtcacctcactaaatcttatggtgatcgcgttctgattgatgatttaagtttctccattcctaaaggcgctatcgtcggtattatcggtccaaatggtgccggtaaatcaacgctgttccgtatgatctcaggtcaagaacaacccgattcaggaaccgtgactttaggggagaccgtgaaactggcctctgttgatcagttccgcgatagtatggatgacagcaaaacggtttgggaagaagtttctggtggtcaagatattatgcgcattggtaactttgaaatcccaagtcgcgcttatgtgggccgctttaactttaaaggcgttgaccaaggtaaacgcgttggcgaactgtccggaggtgagcgtggacgtttacaccttgcgaaacttctccaagtcggcggtaatatgttgctgctcgatgaaccgaccaatgatctggatgttgaaacgctacgcgccttagaaaatgcgctattagaattcccaggttgtgctatggtcatttcccatgaccgttggttcctagaccgtatcgccactcatatcatcgattatcaagatgaaggtaaagtcgaattctttgaaggtaactttactgaatatgaagagtataaaaaacggacattaggtaacgaagctatccaacctcgtcgcatgaaatataaacgcatcactaag

SEQ ID NO: 32505 - DNA, 1398 bp, Proteus mirabilis
atgatcgttgcgcctgtagtcgacgtactgcaaggccgtatcgcggttggcgaagacgtcaccgttcgcggttgggtacgtacaagaagagattcaaaagctggtatctcattccttaccgtctatgacggttcctgctttaatccagtacaggccatcattaataataatttaccgaattatcaagatgaagtgctgcacttaaccacaggttgctctgtggaagtcaccggtaaaattgttgaatctccgggtcaaggtcagaactttgaaattcatgcgaccaaagttgtggtagtaggaatggttgatgatccggaaacttatccgatggccgctaaacgtcacagcgttgagtatctgcgtgaagttgctcatcttcgtccacgcacaaacttaattggtgctgttgcacgtgttcgccataccttggcacaagcactacatcgtttcttcgatgagcaaggctttttctgggtttctacgccattaattacggcggcggataccgaaggtgcgggtgaaatgttccgtgtctctaccttagatatgaacaacctgccacgtactgataaaggtgaagttgattttagcgaagacttttttggtcgcgaagctttcttaaccgtatcaggacaattaaacggcgaaacttatgcctctgcattaagtaaagtctatactttcggcccaactttccgcgctgagaattcaaatactagtcgtcacttagctgaattctggatggttgaacctgaagtggcttttgctgatctgaatgatatcgccggattagcagaaaaaatgctgaaatatgccttttctgccgtgttagctgagcgcagagatgatatggagttttttgctcaacgcgttgataaagaagccattacacgtttagagcactttatcgcttctgatttcgcacaaattgactacacagatgcgattactgtgttagaaaattgcggccagaaatttgaaaacccagtttattggggtgttgacctctcctccgagcatgagcgctatcttgctgagaaacactttaaagcccctgtggttgtgaagaactacccgaaagatatcaaagcattctatatgcgtatgaatgaagacggtaaaacagttgcggcaatggatgtgttagcaccaggtatcggtgaaatcattggtggttctcaacgtgaagaacgtttagagatgtttgataaacgtttagctgagatgggtatgaataaagaagactactggtggtatcgtgatttacgccgttatggcacagtaccacactctggttttggtctcggctttgaacgcttagttgcttatgtgactggtgtcacaaatattcgtgaagtgatcccattcccacgtacaccaagaaatgtcgatttc

SEQ ID NO: 32506 - DNA, 1212 bp, Proteus mirabilis
atgattttagacgctacaccgattattacatcactgttggataccgatgcatacaagctccacatgcaacaggcggtttaccatcattatagtgatattcctgtcgttgctgaattccgctgccggagtgatgaacgtctaggtgaatatgcaacaaccttacgccatcaagtggatatgatggcagacttgtcattaactaatgaagagtttggctatcttcaaagcctgcctttctttaaaaatgactatctgcaatggtttaaacattttcgctttaaacccgagcaagtgcatatcgcgaccactgctgacaatcaattgacaattaagataactggcccttggcgtgaagttattttatgggaagttcctttgttagcattggtgagtgaaattgtccaccgtgctcgttcgccacaaatcaccgctgatgacgccgttattcaattacgcaaacttatcgatattttctatcgtgatgcggctgaacaacagattgatttagcggatttcaaattgatggattttggtactcgtcgtcgcttttcttatgatgtgcaacgtgccattgtcgatgaattaaaaaatcatttcccttatcttatcggcaccagtaactatcattttgctgaacgtatgcaactggcccccgtaggcacacaagcccatgaatggttccaagcacatcagcaaattagtcctgagcttgccaatagtcaacgggctgcattgcaatcatggctagatgaatacccagatcaactcggtattgcactcactgattgtatcactatggatgcattcttacgtgactttgatatgccattcgccagccgttatcaagggttacgtcatgactcaggtgatccgattgaatggggtgaaaaagccattgctcattatgaaaagctcggcatcgatccgatgagtaaagtattggtattctctgatagcctcgactttcagaaagccttagtactttataagcatttccataagcgtatccgcttaatttttggtatcggcaccagattgacttgtaatattccgaatattacacctcttaatattgtgattaagctggtggagtgtaatggtaaacctgttgctaaattatcagatagtccaggtaaaaccatttgtgaagatgatgagtttgtcgacaagctacgtaaagcctttgatgttcctcttgttaggcaagcttgt

SEQ ID NO: 32507 - DNA, 2613 bp, Proteus mirabilis
atgacacaacaaagaattgctaaatatcgtaaagattaccgcgccccagattacaccatcactgatttgcatcttgattttatcttagataaagaaaaaacacaggttactgctattagccaatgcaagcgcttagagacaacggtaacgtcgttggtgttagatggggaagatttaacattaaaatctatttttgttaatgatgttgcttggacacactataaagaagaaaacggcaaactcatcattgaccaattgcctgaacaatttacgttaaaaattgttaatgagattaacccatcagctaatactgctttagaagggttatatgtttctggcgatgcgctatgtacacagtgtgaagcggaaggtttccgtcatattacttattatttagatagaccggatgttttagcgcgctataccaccacgatcactgcagataaaaaacagtatccttatctattatctaatggtaaccgtgttgcacaaggtgatcttgaagatggtcgtcattgggtgacttgggaagatccgcatcctaaaccaagttatctctttgcattagtggcgggagactttgatgtattacgcgatacatttaacactaaaagtggtcgtgaagttgctttagagttatttgtcgataaaggtagtcttgatcgtgctgattgggcgatgacatcactaaaaaatgccatgaaatgggatgagtcacgctttaatttagaatacgatctcgatatctatatgatagtcgccgttgatttctttaatatgggagcaatggagaataaagggcttaatgtatttaactctaaatatgttcttgctaaaagcgaaacagcaacagacaaagattatttagggattgaatctgttattggccatgaatatttccataactggacaggtaaccgtattacttgccgtgactggttccaattaagcttaaaagagggactaacggttttccgtgatcaagaatttagctctgatttaggctctcgctcagttaatcgtatcaataacgtgcgtgttatgcgtacagcacagtttgccgaagatgcaagcccaatggctcatccaattcgtccagatagtgtgattgaaatgaataacttctataccttaacggtatatgaaaaaggggcggaagtgatccgtatgatccacacgctactcggtgaagagaaattccaagcgggtatgcagatgtatattcatcgtcacgatggtagtgctgcgacctgtgatgattttgtacaagcgatggaagatgcctctaatgttgacctgactttattccgtcgttggtatagccaatcaggtacaccggtattgactgtacgtgatagctatgacgcacaaaaacagcaatatacattaaccgtcagtcaaatgacgccaccaacggcagatcaggcggaaaaacaagttctacatattccgttagatattgaattatataatcaacaaggggaggttatccctttacgctcacaaggtcagccggtttctaatgtattaaatgtggtgagagaagagcagcagtttatttttgatgatgtcgctcaacagccaattccttcattattgcgagaattctctgcgccagtaaaacttgattatccttttacggatgagcaactctcattcttaatgaaacatgcacgtaatgctttttctcgttgggatgcggcgcaatctttattagggcgttatattaaagaaaacgtttcgcgtgttcaaaaagggcagccattaattttacctgaaatggtgattgatgctttccgtgctgtattgcttgataaagatatcgatcctgccttggcggcacttattctgacattacctaccgatgttgaagcgggtgaagcttttgctattatcgatcctattgctattcatcaggccttaggttttattcgtaaaactttagccactgaaatggctgatgagttctctgcggtttatcactcaatgcatatcggtgcttaccgtgtcgatcatggtgatattgctaaacgtgatttacgcaatgtctgcttgggttatttagccgttgaaaaccagcaaacgggtaatcaattggttgaagcgcaatatcacaatagcgacaatatgaccgatgcactcgcggccttaaatgccgcagtaatggcacaattaccttgtaaagaggcactattacaagagtttgatgataaatggcatcaagatggcttggtaatggataagtggtttagcttacaagcaatgagtccggcaactgatgtattacaaacagtacgcagtttgctatcacatcgctcttttactttagctaacccaaatcgtactcgtgctttaatcggtgcgtttgtgaataataaccctgtagctttccatgcagaagatggctcaggttatttattattgacagaaattctgactgacttaaatagccgaaatccacaggttgcatctcgtcttattgagccgtttattcgtttgaaacgctatgatgctaatcgccaagagaaaatgcgtgccgagttattaaagctaaaagcccttgataacttatctggtgatttatatgagaaaatcactaaagcattagcggat

SEQ ID NO: 32508 - DNA, 1929 bp, Proteus mirabilis
atgccgttaattagtttgactggggcttatttagcgtttagtgatgcccctttattagataatacagacttgtttattgatgaaaatgaacgcgtttgtttagtcggtcgcaatggtgccggaaaatcgaccctattaagagtgttagccaaagagcagcccttagatgatgggcaagtggtgtatgaacaagatctggtgactgcacgtttacaacaagatccccccagagatatcgaaggcactatttttgattttgtcgcgcaaggcgttgcagaagatgcgcaatatattaccgaatatcatcgtgtttcaaaggtaatagaaacggacccttctgaaaaaaatcttaatcgattagctcagttacaagaagtgctcgataaccgtaatctctggttattagatagccgtattgctgaagtactggaaaaattagggttaaatggcgaagctgagctttcctcactttctggaggatggttaagaaaagccgcattagggcgcgcattagtgagcgcaccgaaagtgctctttttggatgagcccaccaaccatctagatatagaaactatcttatggttagagaaattcttaaaggatttccaaggtagcattgtctttatttcccatgaccgatcatttattcgtaatatggcaacccgcattattgatttagatcgcggaaaactatcctcatggccgggaaattacgataaatatctggaaagtaaagaagaggcattgcgtgttgaagagcaacaaaatgctgagtttgaccggaaattagcgcaagaagaagcatggatacgtcaagggatcaaagctcgccggactcgtaatgaaggtcgtgtacgggcattaaaagcattgcgagttgaacgaagtgaacgtcgtgaagtattaggcagtgctcgtatgcaggtcgaagaagcaacgcgctcaggtaaaattgtgtttgaattagaagatgttaattatagcatcggtacgcgtaggctcgttcgtgacttctctgcaaaagtgcaacgaggagataaaattgccttagttggccctaatggttgtggtaaaaccacactactcaaattgatgttaggggatttaaaagcagatagtggtcgtattcattgcggcactaaattagaagttgcttattttgatcaacaccgtgccacacttgatcctgataaaacagtgatggataaccttgcagaaggtaagcaagaggtgatggtaaatggtcgtcctcgtcatgttttaggttatttgcaagatttcttatttccaccaaaacgtgccatgacacctgttagagcactttcggggggcgaaagaaatcgtctattgcttgctcgtttgttcttaaaaccaagcaatttacttattcttgatgaaccaactaatgatcttgatgttgaaacattagaactattagaagagctggtggatgcttatcaaggcactgtgttgttggttagccatgatcgtgaatttgttgataatagtgttacggagtgttggatctttgaaggtgatggcgtaatcaatagctatgttggtggctattatgatgcgcagcagcagcgggcacagtctgtttctcttaaaaatgaagcgaataagtcacgtaatgcaccagaaaaaactgaaaaagagactaaaccaaaacagaacgccaaaaaggctacacgaagtaacaataagttaagctatcatttgatccgcgagcttgaacaactgcccgctaaactggaacgtttagaagaggaattaggttgtttacaagaagaagtggctgcagctgatttctttacacgtcctcatgaagagacagaaaaagtgctaaaagcattagctgataaggaaaatgaacttgaaacagcttttgatagatggcaagagttggagatgatgcaaaacggtgaa

SEQ ID NO: 32509 - DNA, 921 bp, Proteus mirabilis
ttgagtaacgcaactttatgtacggatgcgttccgtcaaaaattacattctgcacatcagcgtgttgatgaagcactcaaccaagcgctacaaacgttgcctttttctgatatgccactcagccaagcaatgcgctacggagcactcttgggggggaaacgtttacgcccatttctcgtttatgcggtaggagaaatgtttaacgtacctgttgctaatcttgatgtgccagcagccgctattgagtgcattcatgcatattcactgatccatgacgacttaccggcaatggacaatgatgatttacgtcgaggaaaacccacttgtcatattgagtttggcgaagccaatgccattttagcgggtgatgcattacaaaccttggcctttgaaattttagccaaaaatgcgatgcctgatgtcgccattgccgatcgcgtagccatgattgctgaattagccacagccagtggtttagcgggtatgtgtggtggacaggcacttgatcttgatgccgaagataaatcaattgatcttgtcgctcttgagaaaattcatttacataaaacaggtgcattaattcgtgcagcggttcgcctaggggcacttagcgcagggcaaaaagggcacgatgtgttacctgcactggataaatatgcccactctataggcttggctttccaagttcaggatgacattttagatgttattgggagcactgaagagactggaaagcgacagggaagtgatcaagaagctggaaaaagtacttatccggctctacttggtttagcacaagcacaaaagaaagcacaggaattgtataacgaagcattggatgccttagcgtttcttgaacaatacgagtacgatacctctacgctaaaacaattagcgaattttatcgtagaacggaaaaac

SEQ ID NO: 32510 - DNA, 1461 bp, Proteus mirabilis
atgtctcaatcagctatcaataatgatactgcggctgccatcaatccatattcacaaaaagtggcacacctgcgtcagcaaattctgaacatctttcttgaagatgaccgttttgttgaaacagtgttaggtgaagcaagtgaaagtgataggctgagccaccatgaacttcatgaaaaaatcaccactgttagagaattactacaagatctacacgcggcagatattgcagatattcttgaagcccttccctatgatgaacgtttagccctatggcatttggttgataataatgagcgtggtgcggttttagtcgaagcctctgtcgccgtttgggacagcctaattaaagatatgacggatcgtgaattattacgctcagtcgcttctttgcatgtggatgaacaggcctatattgcggagcatttaccccgtgataccatgcgtcgtcttttgacctatttagaaccaagtctgcgtaataggatcagagaagtcctgcaatatccgaaggatagtgttggacagatgatggattttgagtttgtcaccgtgcgtggcaacgtaacattaaaaacggttcaacgttatttacgccaacgtggctctattcctgaagctacggataaaattttcgttattgataatgccaatcatctgttaggtgaattacccttaaccacagtattaacccagtcgccggataaacgggtctctgatgtcatgaaaaccgatactgtcagctttatgcccgaagagaaaggcgaagatgcagcgggtgcattcgaacgttatgacttaatttcggctgcagttgttgatagtaatggcctgttaatgggacgtttaaccgttgaagatatcgtcgataatatgcatgaagagagcgataccaacattcgtcgtatgggggggttaagcccagaagaggatgtattcgcccctgtcgggcaagcggttaaaacacgttggacatggcttgctatcaacttatgtactgcttttgtcgcttctcgtgttatcggtgtgtttgagcataccatttcccaattagtcgccttagcaactttaatgcccattgttgcaggtattgggggaaataccggtaaccaaaccattactatgattgtgcgtgcattagcactacatcaaattcagactggtagtttctcgttcttaattttaagagagttaggtgttgcccttatcaacggtattgtttgggggggaataatgggagttgtaacttacttcctttatggtgatgttgcgatgggcgccgtaatgacaatggccatggtactcaacctattaatggctgccttgatgggagtattaataccgatgaccatgataaaactgggtaaagatccggccattggctcaagtgtgatgatcaccgcgatcaccgataccggtggcttctttattttcttaggcctagccactattttcttagtt

SEQ ID NO: 32511 - DNA, 321 bp, Proteus mirabilis
atgacacaacgagttcaacctgatttattggaagccatgaaattagcggctaatgaagcctctagtatgctgaaaacgctaggcaatggtgatcgactactcttattgtgccaattaagtcagggcgaaaaaagtgtcagtgaattggaagaaagtttagggatccgccagcctacgctttctcaacaacttactgtgttaagaaatgaagggcttgtgaatactcgtcgtgatggaaaacgtattttttattctattgctgatgaaaaagtattggtgctattaaatacactttatcagctatattgtcctatagcaggt

SEQ ID NO: 32512 - DNA, 2701 bp, Proteus mirabilis
cagcaatatcatcttaccccagcattatctaccgcatcggcgggctctgtctcctataacacactatctattcgcgcattaaaacagcaattacgccagcagcctgataatgcagacataataggaacattagggcgtgcgctattcgcgcgcaaatcaacgggcacccgcgatttattatctttctcaagcactcacattgtcccccaaacacgatgatagtgatttgtggcgtacgctgttgcaatcaaatcaatattggcatttacttgccaaggctgatgaagcgttattaaatcaagagtactctgccgctaagcactattttacccaagtacgtcaactcagcccctataaaagtgaagcttatattggtttaggggatatcgagttggcgcaacatcaattagaacaagctgaacgttattatcaacaagcgctacaatatcagcctaatgatgcggcgactttgcatagtctgaccaagctctatcgtcaacaatctcatcaaaaagccgcccaatttatggctaacttgacatcacagcaatacaaaaatttagcccaagactatgggtatatcatttcaggtatacaacaagacttagctgctgatgatgaacagcaacaacactatctcagtgcgattgagaaacgtaaggctatcgctaaagcgtatcccgatgaagtctggaatatttatcgtctggcggatgatttacttatcactcaacaaccccaacttgctgaggattactttaatcaacttaatcaacgacgacctaatgatccctctcgacgatatgcctatgcgttatatctcaataaaacagggcgagcacaacaagcacttaacaccttaaagacgatccctttatcgcagcgcagtgaaagtatgaacgccttagatagccaattacgttttggtcaaattatggcgcatgcacaatcactaagagaacataaccaacaacagcaagctgtcgaatatcttttcacccatattcctcctgagcaaaaaatagaaagctatctgttattagcgcaatgggccgaagaagatgaccaactcaatcaagcattaaattattatcatacagtattaaatttagcgcctaataatgaaacagcactattaggtgcaacagagatatctttagcgcaacatcaaatagatcaagctcgttattacttagctcagatagaacaattatctcctgaaaaatttaaccactattcactaagacgtttagcaaacgctgaaaaaacgacgggaaatattgataaagccaaacactattttatctatttagctcgccaagttgacaaggagccagatagtgctgatggattaattttacgtgatattggtcgtttttatcgtgatagccaacaagttcaatccgctcatcactattatcaacaagcgatgctaaaagagggtatcacgcatacactgccaaaaaacaatattgaatacaccacacttatgcgtaacaacccaaatgataattggctatcacgtagtgtacgtgatgatgcaagtaccctttatcgtcaacaagagtggcgttttaccctagagcatgattattggggatcaaatggcagtgagggatactctaaattacgcgctcataccaccatgttacaactggatcatcctatttatcatggacgtttcttttggcgtactgattttgtgcacttaaatagtggcacattaggtacagcgccatacgatgctaaatttggtagttgttatcgcacaggttgtttccctctaaagcaaaaagcctttggtgttagtcctgctatcggttgggaaaatgagcaatggcaatgggatttaggtaccacgccactcggttttaatgtaactgattgggtaggtaaaattgcttataacgatagtttttatcatctcggttggagtgtagatcttcaccgtcgcccggtaaatagctcattacttgcctttgcaggccaacgtgatagttggaccaatcaagtttggggaggagtaagaaaaacggggcttcgtttaagtggcagttatgatctgggaggcaaggatgggtattggggagaaatatcgtttgatagattaacaggaaaaaatgttaaaaataacagcagtgtaaaagccatgggtggttattactataagttaatcaatgaaaatgatcgccgcatttctgttggcttaaatagcatgctttggcattacaataaagatcttagtggctacaccttggggcaagggggttattatagcccacaacaatatctctcattctcactgcccgttaattaccgtcaacgtactgaaaattggtcatgggaagtatctggctctctctcttggtcttattcaaaaaccgatgatagcagacgttatccattacaaaatctcgtttcaagcgataaatttaattctgatcccataaaagaaatatttaagcatgagagaaatatcattgataagggggattcgggtcatggttttggttatacagcaagagcattaattgaacatcgaataacaccacattggtttataggtgccgctatcgatattcagcaagcgaaaaactatacgccaagccatgcactaatgtatttacgctattcatttgatggatggaatggtgatttagatcttccgcctaacccgcttattccttacgcagattttaaa

SEQ ID NO: 32513 - DNA, 258 bp, Proteus mirabilis
ttggctaatatcaaatcagctaagaaacgtgcggttcagtctgaaaagcgtcgtcagcacaacgcaagccgtcgttcaatgatgcgtacttacatcaaaaaagtatacgcagcagttgcttctggtgataaagaagcagcacaaaaagcatttaatgacatgcaaccaattgttgaccgtcaggcaactaaaggcttaattcataagaataaagcagcacgtcataaagctaatctgcaagcacaaatcaaagcaatg

SEQ ID NO: 32514 - DNA, 888 bp, Proteus mirabilis
atgttgtcagccagacactcagctaaattacaggtgttctaccctgtgcttcttttgcttctttctatgctatcaatacaaagtggcgcatcattggcaaaaagcctgtttcctgttattggcgcccccgcagtcacagcattacgcctttttttaggtactctgatcctgttttttatttttaaaccatggcgtctaagcttttctcgtagtgccataatgccactatttttatatggtttatcattaggggcaatgaactacttattctacttggctcttgaaactattccattaggtattgcagtagcacttgagtttacgggaccgcttgcggtagcgatgttttcttcacgcagagcaatcgattttttatggataatcttagtgattgctggattagggttattactgccgattggggataatattcacggactcgatcccctaggcattttatatgcattaggtgcgggtgtcggttgggcactgtatattgttttcggacaacgtgcaggaaaaggctatggcgcacgaccagtttctattggctcacttattgccgcctttatctttttccctattggtatgctacaaagtagccctgagctagtttttagttggtctatattacctattggattagctattgcgattttatctaccgcttttccttatactttggaaatgattgcacttacccgtttaccggcaaaaacctttgggacattgatgagtttagagccttgtatgggggcttttattggtattattttcttacatgaacatttaacgttaatacaatgggttgcgttggcatttattgtgttagcgtcaattggttccactgcaaccatgaaaagaaaaaccaaaattgaaaaagtagaa

SEQ ID NO: 32515 - DNA, 576 bp, Proteus mirabilis
atgaataaaataaagtctattgccgtgtattgtggttcaagtttaggtgcttcaccaatttataaacaacaagcgattctttttgctaaagagctggttaaacgtaatatcactttagtttatggtggtgccagtgtaggaattatgggcacgctcgcggataccgttttacaggaagggggtaaagttattggtgtgatcccaacgctattagaagggcgtgaaatttcacataaaaatctgacagagctccatgtcgttgaaactatgcaccaacgtaaaagtaaaatgattgaactcgcggacggctttgtggcactgccggggggttttggcacattagaagagttcagtgaagtgtttacttggagccaaattggccttcatcaaaagccattaggtatatttaatattaatgatttttatcagccattactggctatgatagataaaatggtagatgaaaaattcttacatgaaaaatatcgtcatatggcgattgttgagcaatcacctatccagttattagataaatttgaaagttatattgccccttcgattaaaacctacgataaa

SEQ ID NO: 32516 - DNA, 1239 bp, Proteus mirabilis
atgagtcaatgtcaggttagcggtttgttatcccttgatgaggcgctagaaaaattacttgaaaaaccggtggcaatcacagatacccttagtatccctttgcataaggcagcaggttatatcttaagtgagcacatcacttcaccactcaatgtacctcctttcgataattctgccatggatggttacggtgtacgttatacggatctaaacactcaatctcctttacctattgcaggcaaagcgtttgctggagtcccttttgaaggtgaattaccacaaggacaatgtgttcgtatcatgaccggagccatgatacccgcaggtgtcgataccgttattatgcaagaagaaacacaagtgactgacaacggtattctttttccacatccggccaagcttggacaaaatattcgtcgtattggtgaggatataaaacaaaacgatatcgtcttagccgcaggaacaaaactttctacagcacagttacctcttattgcttcactcggtattgccaatattaatgtttaccgcaaattaaaagtggccgtattttcaacgggtgatgagttgcaaactattggccaaccattaaaagcggggcaaatctatgatactaaccgctttgccgtacgcttaatgttggaaaaattagattgtgatgtgcttgatttaggcgttattccagattcgccagaaaaactgcgagaaacttttaaaaccgctgatgcacaagcggatttagtgattagcagtggcggagtttctgtgggtgaagcggactatactaaacaaattttagatgaaataggcgaaattggtttttggaaattagccattaagccaggtaaaccttttgcttttggtcgcttacataatgcttggttctgcggattaccgggtaatcctgtctcagcaacagtgacattctaccaattagtacagcctttaattgcccgtttatctggttttagtcagtggcgatcaccacagcgtttccatgctaaaacctgttcaccattaaaaaaatctgccggtcgtctggatttccaacgcggtatcgccagtattaatgaaaatggtgaatggcaagtaacaacatcgggacatcaaggctctcacgtatatagctcctttagtgtggcaaactgttttatcgtcttagagcgagagcgtggtaaagttgcagcgggtgaaaccgtcactattgagctatttaatcctctgctaaaaagcgaa

SEQ ID NO: 32517 - DNA, 1149 bp, Proteus mirabilis
atggaacaaagttcacgtcaacgcatcgacgctttagatgcgttgagaggaatagcgatccttggcatcttattactcaatatctcaggttttgccttattaagagttgcctcatttaatcctatgcattcaggagaggcgacttttgcggacaaacttacttggatggggctaaatttatttacccaaggaaagtttctgtttatttttgcgctgttatttggcggaacactttatttattatcacaacgctctgttgcttggaacgtctctcgcctaattattctggcattaatcggtattattcataccctattactatgggaaggggatatcttatttccttatagtatttgcggattatttgttctcttttttattaaagcattacctattaagcggcaatttatccttgggctggtgctctatttatttggcgcgattattttagcttttttattttattactatcgtgattttgttgaaatagtttggtatagctctgactattccgccatgatagagactaattggaaaaccggaagctatataaatagtatctactggcgattagatgaactgagtgattttatttttaatttagttcgtcaatatagttggtttttaattggcgccatgttaatgggggcggcgttaatggcatccggttggttacaacgacgctattcacagtctcattatggtttgatagcggtttgttttttagtcataagtttacttttccaagggacgcttgttattaccgattattatttagattggcattatatgtggtctgcggtagtggctcagcctatcaccatggtgatccaaattattcaaagcttaggttatattgctttactctattgggcatggccttatattcaacacagttttatcgcctatgctttacgttgtgtggggaaaatggcgcttaccacctatttactacagagtattattggcacgacgcttttccagcggatggggttatttaaccaatttaccttattgcagcttatgctatttgtgatggctatttgggtgataaatattatctttgccgtaacgtggttacgctatttttctcaaggaccaatcgagtggctgtggcgccactcgtcaacagggttagcaaaacgcttt

SEQ ID NO: 32518 - DNA, 447 bp, Proteus mirabilis
atgcaaattattctgcttgataaagtagcgaatctgggtagcctgggtgatcaggttaacgtaaaatcgggctatgctcgtaactatttaatcccacagggtaaagctgtttctgcgactaagaaaaacatcgagtttttcgaagcgcgtcgtgctgagttagaagctaaattagctgaaactttagcagcagctgaagctcgtgcagcgaaaatcactgcgctgggttctgtcactatcagctctaaagcgggtgacgaaggtaaactgtttggttcaattggtacacgtgacatcgctgatgcagtaactgcagctggcgttgaaatttgtaagagcgaagttcgcctgccaaacggcgttctgcgtacaactggtgaccacgaagttcacttccaagttcacagtgacgtattcgctgaactgaatgtaatcatcgttgctgaa

SEQ ID NO: 32519 - DNA, 225 bp, Proteus mirabilis
atggcacgttatttccgtcgtcgtaagttctgccgtttcacagcggaaggcgtacaagagattgattataaagacatcgctacgctgaaaaactatatcactgaaagtggtaaaattgtaccaagccgtatcaccggtactcgtgcaaaataccagcgtcagctggctcgtgctatcaagcgcgcgcgctacctgtctttattaccttatactgatcgtcatcag

SEQ ID NO: 32520 - DNA, 870 bp, Proteus mirabilis
atgtctattttaatcgataaaaacactaaagttatttgccaaggtttcactggaagccaaggaactttccactccgaacaagctattgcttacggtactcaaatggtgggtggtgttacaccgggtaaaggtggtacaacacatttaggcttaccagtatttaatactgtacgtgaagcagtggaagcaacgggggcgacggcgacggttatttatgtaccagcaccattttgcaaagactctattttagaagctattgatgcaggtattaaactaattattacaattacagaaggtattcctacgctggatatgctgactgtaaaagtaaaattagatgaagctggtgttcgcatgattggccctaactgtccgggtgttattactccaggtgagtgcaaaattggtattatgcctggtcacattcacttacctggcaaagtaggtattgtctctcgttcaggtactttaacttatgaagcagtaaaacaaactactgacgttggtttaggtcaatcaacctgtgttggtatcggtggtgacccaattccgggatcgaactttattgatattctgaagctattccaagaagatccgcaaacagaagcaattgttatgattggtgaaattggtggtacagcggaagaagaagcagctgcttatatcaaagatcacgttaccaaacctgttgtaggctatattgctggtgttacagcacctaaaggtaagcgtatggggcatgctggcgccattattgcgggtggtaaaggtactgctgacgagaaatttgccgcattagaagccgctggcgttaaaacagtacgtagtttagctgatatcggtgatgctgttaaatcgctattaaataag

SEQ ID NO: 32521 - DNA, 1281 bp, Proteus mirabilis
atggctgataacaaagctaagttaacgattggtgaaacttctgtggacttggacgttctctcccctacactcggttccaaagtcattgatattcgtactctcggctccaaaggttattacacctatgatccaggctttacctcaacggcatcttgtgaatcgaaaattacctatatcgacggtaataacggtattttactgcaccgcggtttcccaattgggcaattggctactgagtcaacctacttagaagtatgttatatcctgctttatggcgaagcaccgacccaagagcaatacgataaatttaaaacaaccgtcactcgccataccatgatccatgagcaaatcacccgcctgttccatggtttccgtcgtgactcacacccgatggctgtactttgtggtgtgacaggagctttagctgccttttaccatgatgcgcttgatgtctctaatccagttcaccgtgatatcacagcatatcgtttactgtctaagatgcctactgtagccgcaatgtgttacaagtactccataggacaaccttttgtttatccaagaaacgatctgtcttatgcaggtaacttcctacatatgatgtttgccacaccttgtgaagagtatgtggttaacccagttcttgaacgtgcgatggataggatctttattcttcatgccgaccatgaacaaaatgcttcaacatctactgtacgtactgcaggctcttcaggtgcaaatccatttgcctgtattgctgcgggtattgcttcactatggggacctgctcatggtggtgctaacgaagcttgtttacgtatgttggaagagatcaaaaccgttgaacatattcctgaatttattaaacgcgcaaaagacaagaatgactctttccgtttaatgggctttggtcaccgtgtatataaaaactacgatccgcgtgcaacagtcatgcgcgaaacttgtcacgaagtgttaaaagaactgaatctcaatgacagtttacttgaagtggcaatggaattagaacgcatcgccttaaatgacccgtattttattgagaaaaaactctatcctaacgtcgatttctattcaggtattattctaaaagcgctaggtattccatcaaatatgtttacggtcattttcgctattgcacgtactatcggttggattgctcactggaatgaaatgcatgaagatggactgaaaattgcacgtcctcgtcagttatatactggctataacgagcgtaaattccatagtgaacttaaaaataaa

SEQ ID NO: 32522 - DNA, 1764 bp, Proteus mirabilis
atgaatctgccagttagagaatttgacgcagttgtaattggtgctggtggtgcaggtatgcgcgccgctttacagatttctcaaatgggtctgtcatgtgcactaatctcaaaagtttttcctactcgttctcatactgtttccgctcaaggtggtattacagttgctttaggcaatacccatgaggataactgggaatggcatatgtacgatactgttaaaggttccgactatatcggtgaccaagatgctatcgaatatatgtgtaaaaccggtccagaagctattttagagctggaacatatgggacttcctttctctcgtcttgatgatggacggatataccaacgcccatttggtggtcagtcgaaaaattttggtggtgaacaagctgcccgtactgctgccgctgctgaccgtacaggccatgcactattacatactttgtatcaacaaaatttaaaaaatcataccactatcttttctgaatggtattcgctggatttagttaaaaaccaagacggtgatgttgttggttgtaccgctatttgcattgaaacaggtgaagttgtttattttaaagctaatgccaccattttagcgacaggtggtgcggggcgtatttaccaatcaacaaccaatgcgcatatcaatacgggtgatggtgttggtatggcagttcgtgcgggtgtgcctttacaagatatggaaatgtggcaattccacccaacaggtatcgcaggggctggggtgttagtgacggaaggttgccgtggtgaaggtggctatttactgaataaagacggtgaacgctttatggaacgttatgcaccaaatgctaaagacttagcaggtcgtgacgtagttgcacgttctattatgattgaaatccgtgaaggccgtggttgcgatggaccatggggacctcatgccaaactgaaactcgaccacttaggtaaagaagttctggaatctcgtctgccgggtatccttgatctctctcgtacctttgctcatgttgacccagttaaagaacctattccggttattcctacttgtcactatatgatgggggggatcccaactaaagttaccggacaagctattcgcatgaatgagaaaggcgaagatgaagtgatcccaggattatttgctgtgggtgaaattgcttgtgtatctgtccatggtgctaaccgattaggtggtaactcactgcttgaccttgtggtatttggtcgttctgcgggtgttcacttaaaagagtctttgatggagcagggcacgatgcgtgatgccagcgattctgatgttgaagctgcattaacacgcttacatcgttgggaaaataatcgttcaggcgaagatccggttgagatccgtaaagcattacaatcttgtatgcaacataacttctcggtcttccgtgaaggggatgcaatggcgaagggcttagaagagctgaaagtgatccgtgaacgcctgcaaaatgcccgactcgatgataattcaagtgaatttaatacacagcgtattgagtgcttagagttagataacttgatggaaacagcttatgccacagcggtatctgctaatttccgtacggaaagtcgtggtgcacatagccgtttcgatttccctgatcgtgatgatgaaaactggttatgccatacattatatcaaccgcaaaccgaaacaatgacacgacgtaaagtcaatatgcagccgaaactgcgtgaggctttccctccaaaagtgcgtacatat

SEQ ID NO: 32523 - DNA, 2802 bp, Proteus mirabilis
atgcagaacggcgcaatgaaggactggctagattccacatttctagcaggagagaatcagtcttacatagaagaaatctatgaagattacctaactgacccaaactctgttgacgaaagttggagagaaatctttcaacaactacccgtaagtcaaggcgcagaacagtcgcattctcaaacccgcgactacttcagacgcctcgcaaaagaatccactcgatatcatacctcggtaagcgatcctgcaatggactcaaaacaagttaaagttttgcagctcattaatgcgtttcgttttcgtggtcaccaaaatgctaatctcgatccgcttggtttatggaaaagagaatctgttccagatttagatcctgctttccataatctcaccaaagaagattttgaagaaacctttaatgttggttcttttgctatcggcaaagaaaccatgaaactcggtgatatctatgaagcactgaaacgtatttactgcggttctatcggtgctgaatatatgcatattaccaatacagaagaaaaacgttggatccaacaacgtttagaatctgtcaatgttgcagaccaatttactaaagaagaaaaaattcgctttttagcagaactgactgcagctgaagggttagaacgttacttaggggctaaattcccaggagcaaaacgtttctctttagaaggtggggatgctctgatcccaatgttaaaagacttaattcgtcatgcagggaaacaagatacccgtgaagtggtacttggcatggctcaccgcggacgtttaaacgttctggttaatattttagggaaaaaaccggcagatttatttgatgaatttgcgggtatacacaaagagcatttgggaactggtgacgttaaatatcaccaaggcttttcatctgattttgcaacagaaggtgctcaagttcaccttgctttagcctttaacccatctcacttagaaattgtgagtccggttgttatcggttctgtccgtgctcgtcgtgaccgcttagatgaagcgcgcagtaatatggttcttccgatcaccattcatggtgacgcagcagtgacagggcaaggtgttgttcaagaaacactgaacatgtcacaagctcgcggttatgaagttggtggtacggttcgtatcgttattaataaccaagttggttttaccacatcaaatcctaaagatgcccgttcaacagaatactgcactgatattgtgaaaatggttcaagcacctattttccatgtaaatgcagatgatcctgaagcggtagctttcgtcacccgtttagcgttggatttccgtaatacctttaagcgtgatgtgatgattgaccttgtttgttatcgtcgtcatggacataacgaggcggatgagccaaatgcaactcagccattgatgtatcaaaaaatcaaaaaacatccaacacctcgtaagatctatgctgataagttagtagagcaaggtttaatcgaagctaatgatgttactgagttagttaatctctatcgtgatgctctcgatcgtggtgattgtgtcgttgaagagtatcgtcctatggggctacattcttatacatgggaaccttacttaaaccatgaatggaatgaagagtatccgcataaagtcgaaaaatcacgcttacaagatttagcgcgtcgtgtcagcacagtaccttctgaaatcgcaatgcaatctcgcgtcgagaaaatttatgccgatcgtgctgttatggctgaaggcgaaaaattactcgattggggggcggctgaaaccttagcgtatgccactttagtggatcaaggtattactattcgcctctctggtgaagatgcaggtcgtggcacattcttccatcgtcacgcggttattcacaatcaaaccaatggttcagtttatgtaccattagccaatattcataacgcccaaggtcaatttaatgtttgggattctgtcttaacagaagaagcggtattagcatttgaatatggttatgccactactgagcctcgcgggctgactatttgggaagcgcaatttggtgactttgctaacgtagcacaagtggttatcgaccaatttattagctctggtgagcaaaaatggggtcgtatgtgtggcttagtcatgctgttacctcatggttatgaaggtcaaggtccagagcactcatctgcacgtttggaacgctatctgcaattatgtgcagagcaaaacatgcaagtttgtgtgccctccacaccagcgcaggtttaccatatgttacgtcgccaagcgttacgtggcatgcgtcgcccattaatcgttatgtcacctaaatcactgttacgtcatccattagcggtatcaagcttagatgaattagcggatggtaaattcttacctgtaattggtgagttagatgaattaaatccagcggatgtgaaacgtgtcgtgatgtgttcagggaaagtttactacgatttattagaacaacgtcgtgctaatgggcaaacagatgttgcgattattcgtattgaacagctatatccattccctcatgatgatatggcacagattttggcaccttatgctcatgtgaaagattttatttggtgtcaagaagaaccgctaaatcagggcgcttggtattgtagtcagcataacttccgtgatgctattcctactggcgcaacattacgttatgcaggtcgtcctgcatcagcttctccagctgttggttatacctctgttcatcaggagcaacaaaaagctctggttgaagatgcactgaaagttgaa

SEQ ID NO: 32524 - DNA, 1071 bp, Proteus mirabilis
atgcgtgtatccgattttagatttgacctgcctgagtccttaattgctcattatcctcacccccaacgtagtgggtgccgattattatccctagaggggaaaacgggcaatttatctcacggtgtctttacggatgtattagataaactcaatgccggtgatttacttgtatttaataatactagagtgatccccgcgcgtatttatggtcgtaaagcctccggtggcaagatagaagtattagtggagcgtatgctagatgaacatcgtgtgttagcccatgttcgtgcatcaaaatcacccaaagagggcgcatcactgattttaggggaagacgaaagtgtacaagcaaccatgattgcacgccatgatacactatttgaaatccgttttgatgatgaaagagatgtgctgactattttaaatagtatcggtcatatgcctcttcctccttatattgatcgtccagatgaaagatccgataaagagctttatcaaacggtctataatgagcgtcccggtgcagtagctgcacccacagccggattgcattttgatgagccgttattagaagcgttacgtaacaaaggcgttgagatggcctttgtcactttgcatgttggtgctggtactttccagcctgttcgtgtggataatatcgaagaacacactatgcattccgagtatgctgaagtccctcaagaggtggtagatgccgtgctcgcttgtaaggcacgaggtaatcgggtgattgccgtgggtacaacgtctgttcgctctttagagagtgcggctaaagcagccaaagatgcattaattgctcctttttttgatgatacgcaaatttttatttatccaggttaccaatatcaaattattgatgctttgataactaacttccatttgccagaatcaaccttaattatgctggtttctgcatttgctggttataaaaataccatgaatgcttataacgtagcggttgaacagaagtatcgttttttcagttatggtgatgcgatgtttattacgcgtaatcctttagctatcaatgaaaaagtgggtgaagag

SEQ ID NO: 32525 - DNA, 1758 bp, Proteus mirabilis
atgattactataaaaaaaacgcacctgctgttacttaccacacttttttcacctgcactctatgccgcctatgagccagcggttgaagcacaacaaggtatggtggtctcttcacaacatttagcctcacaagtaggaaaagatattttgcaaaaaggagggaatgccattgatgcagctgttgctgttggctatgcacaagctgtggtaaatgcttgttgtggaaatattggcggtggtggctttatgaccatacaccttgctgatggcaccaatacctttattaattttcgagaaacggcgcctacggcagcgtctaaaaatatgtatttagataaagacggtaacttgattaaagaggcaagcctatacggctatcttgcctcaggggtgccgggtacagtgaaaggacttgatgcagcattagaaaaatatggcactctttcacgccaagaagtgatggctcccgctattaaactagccagagaaggctatattttaacccgtgctgatactgacgtattagacaccaccacagagcgatttaaacaagatcctgaatcagcaaaaattttcttaaagcctgatggaacaccatggcagcctggcgatcgcctcattcaaacagacttagccaatacacttgaacttatcgccaaccaaggtgctgatgctttctatcaaggggaaatccctaaaaaagtagaacaagcttcaaaacagcataatgggttattaaccaaagaagattttgcgaacttcactattaccgaaacacctcccattacctgtacttatcgaggttatgaatttatctctgctcctcctcccagttcagggggcgtcactatttgccaaacactgaatattttagaaggctacaatctgaaatcgatgggttttaactctgccgaatatgttcacacgctcacagaagctatgcgtcatgcttatatggatagaaacacctttcttggcgatccgcaatttataaacaatccaacagaaaagttattaagtaaagcctacgccgcagagcttcgccaacaaattacaccgaataaagccaccccatcagaaaaggtacaacccggtattgcacctcatgaaagccctgaaaccacacattattcggtgattgataaagatggtaatgccgtttcaaccacttacaccatcaatggtcgttttggtgctgtcgttatcgccccggggactggctttttcctcaataatgagatggatgattttacaactaaagttggcgagaaaaatctttatggcttagtacaaggtgaacgaaatagtattgccccattaaaacgtccactatcctcaatgagtccaaccattgtgactaaagatggcaaaccctttcttgtattaggctcaccgggaggctctcgtattatctcaatcaccttacaaacggcacttaatattattgagtttggtatgtccccccaagaagccgtcaatagccctcgaattcatcatcaatggctacctgatgaggtttattatgaacaacgaggattatcaaaagataccttagaaaaactttctgccatgggatataaaatggtcgaacaaacgccatggggcgcggctgaattgattatggtcggccttccaggagaacaaggagtgatccctgcttcgtcaggtaatgattctgctgtttcaggggcgatacgcgaaggttatctttatggttcaaatgatgttcgacgtccagcaggtaaagccgtgggctac

SEQ ID NO: 32526 - DNA, 1389 bp, Proteus mirabilis
atggcactttctcaacacccagaaaaaatgaaaaaaggggtgatcgaaaattggcatcctgaagataaagctttttgggaaaaaactggtcaaaaaatcgcatcgcgtaatttatggatttctgttccttgtctactgctatccttctgtgtctggatgctatttagtgcagtcgctgtcaatttaaataaggttggctttaattttaccactgatcagctctttatgctgactgctctaccttctgtttcaggtgcgctactacgtgtcccttactcttttgttattcctatttttggtggtcgtcgttggacggctattagtacggtatttctgattattccttgtctctggctagggtttgccgtgcaagatctcacgacatcttattccacttttatcgttatctctctgctgtgtggttttgctggtgcaaacttcgcatcgagtatggcaaatatcagcttcttttttcctaaagcacaccaaggcggtgcattaggattaaatggcggattgggtaacttaggtgtcagcgtgatgcaattaatcgcgcctttggttgtcagtgtgggcgtttttgctatgtttagtggccccggtgtcgttcaacctgatggctcacgtttatggctagagaatgcggcgtggatttgggtacctttcttgcttatctttacctttgcggcttggtttggcatgaatgatctggctgctaataaagcttctttaagtcaacagctacctgttttaaaacgtggtcatctttggttactcagtatcctctatctgtgctcttttggttcttttatcggcttttctgccgggtttgcaatgttatcgaaaacccagttccccgatattgtcattttacattatgccttctttggtcctttacttggagcattagctcgccctgtgggaggtgcgctatctgataaatttggtggcattaaagtgacgcttatcaactttatcattatggctattttctcagtgctcctgttcttaaccctaccggaaaatggtgctggtggatcgtttattgctttctatggcgtgtttatggtgctgtttttaactgcagggctaggcagtggttcaacattccaaatgattgccgtggtatttagaaaaatcactattgatcgcatgaaggcacaaggggcttcagatgaagctgcgcaaaaagaagccgtaacagaaagtgcagctgcattgggttttatctctgcaatcggtgcgattggtggcttctttattcctaaagcctttggtacatcccttgcgatgacgggttcacctgctggggcaatgaaaatcttcgttctgttctatatcgcctgcgttctgatcacttggttggtctatggacgtaaacacaataaa

SEQ ID NO: 32527 - DNA, 1827 bp, Proteus mirabilis
atgaaaatgcacaacattcaatggcattatcgcttttcaattattaatcaaatcgctattttaatgttgcttttcacactatttggtgtggtaggtatggctatttctaaccacattattttaagcgtacaaggcaatgcccacgccattaataaatccggctcactgcgcatgcaaagctatcgtttactctcagccttaccccttgatgataagcaccgtgattatctacaagaattagaaaatgatttagatagtaaagagttacgtcaagtattaagcacctcatcactgcaatcacaatatgtacaactgactcattactggaaagagacattaaaaccgactttgtcagcagccaaacagcctaatgatgcgaaacaagaagttatcttttttgtttctcaactcgatacattagtatcaagtattgaccaacttactgaacaaaaaatccgcctagtcgcttatactcaacttatctttaccgctcttaccttattactgctgtttggttctgtttggcattttcgtcgtcgcttattactgccttggcaacaattgatgtccatggctaattctattggacatggtgatttttcaactcgttttcggcctcgtcctcaccatgatgaaattgccacactaggaattgcacttaacaccatgtcagaagagctatcgacgctctacagtgaattagaacaacgagtcattgaaaagacccatgatttacaacagaaaaataaggttctctcttatctttatcactcaagtcaacaactgcattcccaagcgccactttgcgctcgcttaaggcagatccttgcagagctacagcatattattcctgatagctatttgcagatccgtctatatgaagataatcaacatacattatttaatgagataagcttagccccttcctcacgccctgaatattgtccaacgccagactgtgagcgttgcaatgaagatgccaacatcactacaccgttaaataatcgcttattacattgggaattgaccgatcagatccatcgctacggtttattcgtaatgcagttaccggaaaatagtgtacttactgacgaacagaataatttaatgctcttattgactaagcaaatttccgcaatgcttgccatggagcaacaaaatgaacagcaacaacagctattattaatggatgagcgttcagcgattgcacgtgaattacatgattcgattgctcaatcgctatcatgtttaaaaatgcaggtcagttatctacaaatgcaatcggaaaccttgccagataactgtcaaaaactactaaaagagatgcgagaagagctaaatgtggcttatcgtcagttaagagaattactgaccacatttcgcttgaaattgacagagcctggcttattagccgcattagaaaatacaataaatgaatttaatcaacgtttagggtttgctatccattttgattatcagttacctgcaaaatgtgttaattcacatcaaagtattcatgtggtgcaaattgtccgtgaagcattaaataatattctgcaacatgcgaatgcaaactgggctgaagtcgcattaacacttaataatggcatcgttgaactgcaaattaatgataatggtgaaggtattacgcctaatcccgaaaagataaatcactacggactgattattatgcgtgaacgcgcgaatagtctgaatggctcttatagtataagggttcgcaaagaaggtggaacgcaagtatttgtcacatttccgttaatcactacccataaagatcctatcgaaaagggagcaaatcataatgaa

SEQ ID NO: 32528 - DNA, 763 bp, Proteus mirabilis
ataaaagcggtagatttaaatagtgatttaggtgaaagctttggtcaatggcgtatgggcaatgatgctgcagtgcttgaaattgtcagcagtgccaatattgcttgtggttttcatgccggttcaccagaaggcattttaaaaacattaaaagcagcgaaacagcatcaagtcgcgataggtgctcatgttgcttatcctgacttagtgggttttgggcgacgcaatatggatattgccagtgcatgaattaaccgctgatgtcatttatcaaattggcgctttgcaaggtttagcgaaagccgtcggtatgaaggtaacttatgttaaacctcatggtgcgctttataacaccattgctcatgataaacgccaagcattagcagttattgaagctattttagctattgatccacaacttatattagtagctttagcgggatcaccgttgatcacacttgcgaaagagaaagggttacgtgttgttgccgaagcttttgctgatagagcttatcatgctgatggcacacttgtttcgcgcaaacaagagggggctgtattacacgatcctcaattggtggctcagcgtatgttaaagctagtacaaaaagggggcgttgaatcgatagagggtacttttactgctatacaggcggattctatttgtgttcatggtgatagtcctgatgcggttaatctcgcaaaaagtgtcaaagagatcttaataacacacggtattgcgataaaacctttcacatctgca

SEQ ID NO: 32529 - DNA, 1263 bp, Proteus mirabilis
gtgaaaaataaaactctgtttaaatcacttctcacaatccccgttaacctccataaacgtacaacgttaaaatggttaggcggtagtttactgcttgccagtatgggcgcaaatgccatcgaaaaaagcaagtgttcaccaacacttcgttatcaacgtgctattaactacttaggaaaacatcaagctggggttatcacgccagaacaaaagcatgcttcatttattgcacttgatttaacagtaacaacccctgaggaagtagaaaaaattttccgaaccttaacacagcggattgcttttttaacacaatatcatgaacttaaagaaagtcataatcctcaccttccccccgcaggatccggtattctaggtagccaattataccctgatgaattaaccatcacagtggcgttaggggatagtttttttgataatcggtttggttttcaagctcataaacccaaacgccttgaagcaatgaaacccttccccaacgatcgcttagatcctaaatggtgtggcggtgatctgttacttcagctttgtgccaatagtcaagaaagtatcatttatgcattaagagatattttaaaatatctttctgggcaagtgcatgcacgatggaaaatagatggttttctacctgctcgtgatattgataatcaacaaacgccaattaatttatttggttttaaagatggcacaggtaatgcccctgccactgacactcatttaatggatgatttagtgtggatcaccgataaacaaaatgaaccgcagtggtgcttaggaggtagctatcaagcagtgagacttattcgttttgccttggaattttgggatagaacacctcttgaagatcaggagaataactttggtcgtcatcgtgcaacaggcgcgccgataggaatgaagcaagaaatggactcacctgaatttgcacaagatcctcatggcgacaggatactctttgattcccatatgagacgagctgaacccagaacccccgaacgttatagcgccaaactgcgtcgtcgcagttatagctactcattagggctaacaccgtcagggcaattagatatggggcttgtctttgtctcatttcagaataaccttaaaaaaggctttattgatacgcaaaagcgtttaaatggtgaaccgttagagcgctatataaaaccttttggtgggggttattacttcgtattacccggcgtcacacaagcaagcgatatattagctaaaggactatttact

SEQ ID NO: 32530 - DNA, 1146 bp, Proteus mirabilis
atgaggcgctttgcaggggcttgtcgttttgttttcaatcgggcattagcacgtcagaatgaaaatcacgaagcagggaataaatacattccctatacaaaaatggcttcatggctcattgagtggaaatctgacacagagacacaatggttgaaggaagccccatcacaaccgttacaacagtcacttaaagatttggaacgggcttacaagaattttttccagcagcgtaccgcttttcctcgattcaagaaacgcggtaaaaatgacgcttttcgctacccgcagggcgtgaagctggatcaatccaatagtcgtatatcattgccaaagttgggatggatgcgctaccgcaacagtcgtgaagtcgtcggagaagtgagaaacgtcacggtcagtcagtcatgcggtaaatggtacgtcagcattcagactgagtatgaagcgacagaaccacaacatggatcaacctcaatagtagggcttgatgcaggggttacaaaactggccacgctttcagacggtacggtatacccgcccgtcagcagttttaaagtaaaccagcgaaagctggcaaggcttcaacggaaattaagccgtaaaatcaaattcagtgccaactggcaaaaacaaaagcgcaaaattcaacgtctgcattctcatattgccaatatcaggaaagactcccttcacaaagtcaccagcgaaatcagcaaaaaccacgcaatgattgtcattgaggacttaaaggtcagtaacatgtctaaatcggcaaaaggtacgacagaacggcctggacggaacgtaaaagctaaatctggtttaaaccgcgcaatactggagcaaggctggtatgaaatgcgccgtcagtttgagtacaagcagctctggcgaggtggtcaggtactggcaataccaccggcctacaccagtcagaagtgcgcttgctgtggtcatacagcaaaggaaaaccgccagtcacaaagtcaattcgagtgccttgaatgtggatatacagcgaatgctgatatcaacggggcacgtaacattttagcggcaggacatgccgtgcttgcctgtggagggagggtgcagtcagaccgcccgtcgaagcaggaacccgccgaggtgattcagacatcagtc

SEQ ID NO: 32531 - DNA, 1227 bp, Proteus mirabilis
atggcagtggcaagcgaaacagcaaaagaaccaacggtactttctcgtcgtaaattgttatgtattgccggaatggggtggactttcgatgcaatggatgtggggcttctcgcctttttattaacggcgttaaaagaagattggggattaacagcagcgcaattaggttggattggcagtattaattctatcggtatggccgtaggcgcttttgtctttggcattatggccgatagaaaaggtcgtaaaccggtatttatcttaacgttgctgctatttagccttggttgcggtttaactgcattagcaagttccttaatggtggtattaattttacgcttttttattggtatgggattaggtggagaattacctgttgcttccacattggtgagtgaaagtgttaaagcccatgagcgtggtcgtattgttgttttattagagagtttttgggcggtagggtggttaattgccgcgttaatagcgtattttattattcctgattatggctggcgtatggctatgttattgagcgcactacccgcagtttatgcactctatttgcgttcaaagttaccagaacccagttccacacagtcattattacaaaatcgtttatctcttcgccaatcaatggcattgatttggtcacctcaatatcgccgttcaacactgatgttgtgggtattatggttttgtgtggtgttctcttattatggcatttttttatggctaccgagtgtcgcaatgttaaaaggctttagtttaattaaaagctttcaatatgtgttgatcatgacactcgctcagttaccgggctattttaccgcagcatggtttattgaacgttatggtcgtaagtttgtgttaatcacctatttagcaggcaccgcgattagcgcttactattttagcgtagccgattccacaaccacactattagtatttggtatgttgttatcattttttaatttaggtgcatggggggcattatatgcctataccccagaacaatatcctgatggtatacgagctacaggcgctggaacggcgacggcaataggccgtattggcggaatattagggccactgatggtaggctatttagtgcaatatcaatttgacataagcactatttttcttatttttagcctttccattgtgatagcgatactagcggttatgttattaggtaaagaaaccaaaaatagaccacttaattctatt

SEQ ID NO: 32532 - DNA, 822 bp, Proteus mirabilis
gtgccagaattaccagaagttgaaaccagtcgccgaggtattgagcctcatttagtgggcaatatcttgcactacgcgatagtgcgtaacagtaaattacgttggcctgtttctgaaaaaatcaaaaccttgctggatgaaccgattttaagtgttaaacggcgcgctaaatatctgttaattgaattaaatcaagggtggatcattgttcatttaggcatgtccggcagtgtacgtatcttgccagaagagcagcctgaagagaaacacgatcatattgatttagtgtttcgtgatggcaaggtactacgctataccgatccgcgtcgtttcggtgcatggctatggtgtgaagatttagccaccagctccgtattagcccatttagggccagagccgctttcggcgcaatttaacgcgcaatatttatatcaacagagcaaaaataaaaaaatcgccatcaaaccatggctaatggataacaagctggtggtgggtgttggcaatatttatgcgaacgaagcactcttttcatcagggatcatgccagatagaaaagccagtagcttaaccgagcaagagtgtgacgtattggttaatgccattaaaacggtattaactcgctcgatagagcaagggggaaccaccttaaaagattttctacaatctgatggtaaaccaggttattttgcccaagagctatttgtctacgggcgcaaagataaagcgtgcttaatttgtggtcatactattgaaagtattaagcaggggcaacgtagcactttcttttgccgacattgccaacatggtgagataaccgat

SEQ ID NO: 32533 - DNA, 1176 bp, Proteus mirabilis
atgatgaaaatcgcctatcttgatccttatcccgttcccgatttgcgtgtggcttcattgcaaatattgcaaaacgttgatgcgtttgcccgtgccggtgcacaagtgacgctagtcacccctaaaggacagtatcgagatagcgatattctcgggcgtgatattcataacaatgcgcggttaattgcgctaagagatatcagacgtaaatggtattttccctttaattcgcaaaagctattttcattacaaattgcacgttggttaaaacaacaccctgttgatgcactatttacgcgtaatttaaaactggcctgctatctggctgagaaccatgcagatattccgctttttttcgaaagccatgagatttttgcgcaatcttttgcagagtcgcactcttttgaaacgaaaaaaaatcgcctgaaataccataaactgctaaaaatggagaagttggtatacagtcgcgcaacggcagtatttgtgctgacctcgctgttaagggacgatattatttcgcaatatcaagtaaccacgcctattactattgtacccgatggggtggatttatatgccgcagatagcaacaaagatagccatagagatataaccgctacgaccaataatgtaacagaggtactttatctaggtagtttgcataaatggaaagggatccccaccatgatgcgagcgatgaaatatctggataacgctagactgaatattgctggtggaacggctgagcaaattaaagggctgcaattgcttgctaaggagatggatgtaaaagagaaagttaactttcttggttttatcgatcctaaacaacgctttcaggcgattgctcaacatgatatttgtgtgctgcctttaaccttaaccagtatcggtagtcgctacacctctccgttaaaactgtttgaatatatggcgatgagaaaaccggtggttatttcagattttccatcaattcgtgatgtggtggatgaaaaagcggtgagttttgctgatagtggtgatgcgcagagttttgcccaacaaattaaattactaagagaagagccacaacgtaccagtgagaaaatcaatcacgcccgctcattagttgaaaattattacaactgggataaacgggcagagacgattttacataccatcaataaactgattagc

SEQ ID NO: 32534 - DNA, 798 bp, Proteus mirabilis
gtgggtatttctgcctcaatgaatgaacctactgataataccattatcggggaagcgccttcatcctaccacactaaaaaaggggggagtgatgatattaaaggtaatttcctgacgttgcttatcacgcagatgcaaaaccaagatcccaccaatccaatgcagaataatgagttaacgtcacagttagcacagatttctacggttgaagggatagagacgctaaataaaacagtcaataccattgttgggcaaattgaccaaagtcaggcattacgtgcgacctcattggttaatcatatggtgatgattgccggtaatgaaatcagcgttgataagattaataatggtgaaaacgctggatctgatacagatacagataaagatacagatacaacacctgatactaaattaggtaagttacgtgcatctactgatgcgacagataatgaaaatatcttctccagcgcttttggttttgaatcctttagtccaatagatacgcttacagtcaatattactgatagtagtggggctaaagttcgcacgatcgaaatgaattcaaaaattctgccggatgtttatcacttcttttgggattgcactgatgatgatggtaataaagttcctactggaaaatatcaatttacagtaaatgccacatttaatgatgctcaagttccagtaaaaacacttaaaagtgcgatagtcaattccgtttctatgaaagagggaaaacctcatcttgatgttggcctcggtgtcatcgtttcattggacgaaattcgtaaagttttt

SEQ ID NO: 32535 - DNA, 921 bp, Proteus mirabilis
atgagccaattagaaaccgaactcaaacttagtgcgatacctgccgctattcctcagattattcagcgcattctgactttgccataccagcatacaccaccgcataaattgactaatctttactttgaaacctccgataatcagatgcgtaattgggacatggggctacgtatccgtggcattgactctcattatgaaatgacaattaaaacagcgggtaaagtagttgcggggttacatcaacgcccagaatataatgtgacattaaatgagccaaccctcgatttaacccgtttcccagcagaaatttggccggataagaccgatttaacggcattacaagcacaattaaaggttctttttcataccgattttcatcgtgaaatttggctggtggattatttagagagtcaaattgaagtggtgctagataaaggcactattcgtacagcgcaatatgaattacctattgaagagtttgaactggagctaaaaaaaggccaagtggcggatgtgattgctttggcgacttttttaggtgaacaagggggattacgacttgcttcacgcagtaaagctgcccgtggttattatcttgctaaagataagcccgcattatcgttaagtgtggtcaatcttgcacctaatgacacaatagcggaacaactgactaagtggttagcggctattcaagcgttagaagaagctatttttgctaatccgacgccaccaacacttaccatgcccgctatgctagcactgttttctgattggtgtaaaaagcagcctcagttacctgaatcaatgcagcaagcactcgataatctttcgttgttatcctttacccgcgcaacggattattatcatgtgttatggctgaattttaaattatctgcaatggcgtggttgctggctatcgct

SEQ ID NO: 32536 - DNA, 1422 bp, Proteus mirabilis
atgaaagtaacgctgccggattttaataaagccaatgtgctggttgtcggtgacgtcatgttagaccgttattggtatggtcctacaagtcggatctcaccagaagcacctgtgcctgtggtaaaagtagataccatagaagagcgtccgggtggtgcagctaacgttgcaatgaatattgcttctttaggggctaattctcgtttggtggggttaaccggcatcgatgaagcggcaaaagcattaagcaatacattaagtcaggttaatgtgcgttgtgatttcgtctctattgcgacacatccaactattactaaattacgtgtcctatcacgtaaccaacaacttatccgccttgattttgaagagggatttagcaatgtctctccagagccaatttatgagcgtattcaacaagcattaccctcaatgggtgccttaattttatcggattatgctaaaggtgcactttctcacgtacagcaaatgatccaattagctaaaaaagcaggtgtgccggtactaatcgatcctaaaggcagtgattttgaacgctaccgtggtgctacactattaacaccgaatatgtcagagtttgagcaagtggtgggcgtttgtcatacagatgatgagctagtagaaaagggcactcaactagtaaaagatttagcacttgatgcactattgatcactcgttcagagcggggcatgagtttattacaagccaatgaagcgccattgcatttacccactcaagcacaagaagtttatgatgtgacaggggcgggagatacggttatcggtgtgcttgccactgcgttagctgcaggcaaaccattagcggaagcgtgctttcttgccaacgctgcggctggtgtggttgtggggaaactgggaacgtcaacggtttctcctattgagcttgaaaatgctattcgcgggcgtgctgataacggctttggtattatggaagagtcacaactcaaacaagcggttgctttagcgcgtcaacgtggtgagcgcatagtgatgacaaatggttgttttgatattcttcatgctggacatgttagttatttagctaatgcacgtaaattgggtgatcgcctgattgttgcggtaaatagtgatgcatcaactaaacgattaaaaggtgaaagtcgcccagtcaacccattagagcaacgaatgaccgtattaggcgcgttaggggcagttgattgggttgtcgcgtttgaagaagataccccacagcgtttaattgcatcagtattgcctgatattttagtaaaaggtggcgattataaacccgaagacattgctggcagtaaagaggtgtgggctgcgggtggtgaagtgaaagtacttaattttgaagatggtatttccacaactaatattattaatgccattaaaaagaaa

SEQ ID NO: 32537 - DNA, 651 bp, Proteus mirabilis
atgaatcagacgctactttccgaatttggctctccattagagcgtgttgagcgtgcgcttgaagcccttcgtgccggtaaaggtgtgatggtgcttgatgatgagaaccgtgaaaatgaaggcgatatggtatttgtcgcagaaaccatgaccacagaacaaatggcgatgtctattcgtcatggcagtggtattgtgtgtgtctgtattaccgaagagcgccgtcaacaactcgatttacctatgatggtagaaaataacaccagtcattttcataccgcatttacggtaactattgaagcagcccaaggggtgactacgggagtttcagcagcagaccgtttaacgacagtacatgcagctgctgctgataatgcaaaaccaagtgatttaaatcgtccaggtcacgtattcccattacgagcgcaacctggtggtgtattaacacgtggtggacatactgaagcttctattgatttagcaacgttagcgggttttaaacctgttgccgtgttatgtgaattaaccaatgacgatggcaccatggccagagcgccagaagttgtcacttttgctaaacagcatgatatgccagtgttaacgattgaagatttagtggcttatcgtcttcgcgaggagaagaaagcgggc

SEQ ID NO: 32538 - DNA, 615 bp, Proteus mirabilis
atgcaagaatataatcaaccactgcgtattggtgttggtggccctgttggttcaggaaaaacagcactattagaagttctttgtaaagctatgcgcgatagttaccaaatcgccgttgttaccaatgatatatatacacaagaagatgcaaaaattttaactcgtgcgcaggctcttgatgcggatcggatcattggtgttgaaacaggaggatgtcctcatacggctattcgtgaagatgcttcaatgaatttggctgccgtagaagagttggcgatgcgccataaaaacttagatattgtttttgtcgaaagtggcggagataacttaagtgcgacctttagccctgaattggctgatcttactatttatgttattgatgttgcagaaggtgagaagatccctcgcaagggggggccggggatcacacattctgatctgctggtgatcaacaagatcgatcttgcgccttatgtgggagcgtcattagaagtgatggaagcggatacagcaaaaatgcgtcctgtgaaaccttatgtttttactaacttaaaagagaaagtaggtttagagacgattatcgattttattattgataaaggtatgttgagacgt

SEQ ID NO: 32539 - DNA, 1105 bp, Proteus mirabilis
atgaaattgatcattgaacgagaacagctgctaaagccgctgcaacaagtcagcggccctttaggcggtcgctccaactgtacctattttaggcaacgtgttgctaaaggtgacggagaataccttatcgctaacaggtacagaccttgagatggagatgatggcaagagtgagtcttagccaatctcatgaaatcggtgcaacgactgttcctgcgcgtaagttttttgatatttggcgcggattacctgagggagcagaaatcagcgtagaattagacggtgatcgcttactcgttcgttcaggaagaagtcgtttttctttatcgacactccctgcgtctgatttcccgaatttagacgattggcaaagtgaggttgaatttactttgccacaagccactctaaaacgtttgattgaatccacacagttttcaatggcgcatcaagatgtgcgttactacctcaacggtatgttatttgaaacggaaaacacggaattgcgcacggttgctactgatggtcaccgtttagcggtctgtgccatggatattggacaatctttacccggacattctgttattgtgccacgtaaaggtgttattgaactgatgcgtttacttgatggcagtggtgagagtttattacagttacaaattggcagtaataatttacgcgctcatgtaggcgactttatttttacctcgaaactggttgatggtcgtttccctgactatcgccgcgtattaccgaaaaatccgactaaaacagttatcgcaggttgtgatatcctcaaacaagcgttctctcgtgcggcgattttatcgaatgaaaaattccgtggggtgcgtattaacctcactaatggacaattaaaaattaccgctaacaaccctgaacaagaagaagcagaagaaattgtcgatgttcagtatcagggggaagagatggagatcggttttaatgtgagctaccttcttgatgtgttaaatacactcaagtgtgaagaggtaaaattattactgactgatgctgtttcaagtgtacaggttgagaatgtggcaagtgcagctgcagcttatgttgttatgccgatgcgcttgtaa

SEQ ID NO: 32540 - DNA, 2412 bp, Proteus mirabilis
atgtcgaatacatatgactcctcaagtatcaaagtattaaaagggctggatgcggtgcgtaagcgcccggggatgtatatcggagatacagatgatggaaccggtctgcatcacatggtcttcgaggtggtcgacaacgctatcgacgaagccctcgcgggttactgtgatgagattattgtcactatccattcagataactcagtctctgttcgcgatgatggccgtggtattccaacgggtattcatgaagaagagggcgtttctgcagcagaagtgattatgacggttctgcatgcgggtggtaaattcgatgataactcctataaagtctctggtgggctgcatggtgtaggggtttccgttgttaatgcgttgtctgaaaaacttgaactgactatccatcgtgatggtaaaattcatcaacaaatttaccgttcaggtgtacctgacgatcgcttaaaagtgattggtgaaacagataagtcaggaacctttgttcgtttctggccaagtcttgatacctttaaaggtgagactgaattccaatatgatattttagcgaaacgtctgcgtgagctctccttcttaaactcaggagtctctattcgtttaattgataaacgtgataaccgcgaagatcatttccactatgaaggtggtatcaaagcattcgttgaatacttaagccgtaataaaacccctattcaccaaaacgtattctatttttctacagagaaagatggcattggtgttgaagtggcgatgctgtggaatgatggtttccaagaaaacgtttattgctttaccaataatattccacaacgtgatggtggtactcacttagttggtttccgtaccgcgatgacccgtacgctaaacaactatatggataaagaaggctttaataagaaatcgaaaatcagtgcaacgggggatgatgctcgtgaaggcctgattgcggttatttctgttaaagtacctgatccgaaattctcatcacaaacgaaagataaactggtttcttctgaagttaaaacagcggtagaaacgctgatgaatgagaagctggtggaatatctattagaaaatccgactgacgcaaaaattgttgttggtaaaattattgatgccgctcgtgcccgtgaagctgcgcgtaaagcacgtgagatgacgcgtcgtaaaggcgcactcgatttaggtggtttaccgggtaaattagcggactgctctgagcgtgatcctgctttttctgaactctacttagtggaaggggactctgcgggtggctcggcaaaacaagggcgtaaccgtaaaacgcaagcgattttaccgttaaaaggtaagatcttaaacgttgagaaagcgcgttttgataagatgctggcatctcaagaagtggcaacgcttatcacggcattaggttgtggtattggccgtgatgaatataacccagataaactgcgttatcacagcattattatcatgacggatgcggacgtcgatggttctcacattcgtacattattactgacgttcttctatcgccaaatgccagaaattatcgaacgtggtcatatctttattgctcagccacctctctataaagtgaaaaaagggaaacaagagcaatacattaaagatgatgatgcgatggatgaatatctgatgtctattgcgcttgatggtgcagcgctttacgtcagtgaacatgccccagctatgcatggtgcacaattagaaaaactggttgtcgactatcatgctgcgcataaaattattcgtcgtatggagcgtctctatccactgagtatgttaaatagcttggtctatcactcaacgctgacagaagatgatctctctgataaagcgaaagtggaagagtggatgagtggcttggtgaaccgtttaaataacgcggaagagcaaagcagtacttacagctataccatcacacaaaacgaagaaaatcgtttatttgagccagtattacgcattcgtacttacggtatcgatacagactataaattggattacgattttattcatagtagtgaatatcaacgtattactaatttgggcgatattattggtaacctgattgaagaaggggcctatattgagcgtggagaacgtcgtcaggcgatttcaagctttgaagaagccctagaatggttaaccaaagaatcacgtcgtggtcttgctgtacagcgttataaaggtcttggtgaaatgaacccagaacaattatgggaaaccaccatgaacccagatacacgtcgtatgatgcaagtcactgtgaaagatgcgattgcgaccgatgagttattcacaaccttaatgggtgatgctgttgaacctcgtcgtgcatttatcgaagagaatgcactaaaagcagaaaatatcgatatc

SEQ ID NO: 32541 - DNA, 897 bp, Proteus mirabilis
atgttagataaagcaagattacgaattgccatgcaaaaatcaggtcgtttaagtgatgattcacgagcacttttagcgcgttgtggcattaaaataaacttaaaccaacaacgccttatcgcttatgcggaaaatatgcctatcgatattttacgtgtcagagatgatgatatccccggtttagtgatggacggagtggttgatttaggcattattggtgaaaacgtattagaagaagaattactaaaacgccgagcacaaggagaaaatccaagttatatcacactgcgtcgtcttgactttggtgcttgccgtttatctcttgctacaccggttgattttgattatcaaggggttgaatgcctcaataatacccgtattgccacctcttaccctaatctattaaaacgttatttagaccaaaaagggatcacctttaaatcttgcttattaaatggctccgtggaagtcgcacctcgagccggtctggccgattctatttgtgatttagtttctactggcgccacattagaagccaatggattaaaagaagtagaagttatttatcgttctaaagcttgtttaattcaacgtgacggtgaaatggacgcaacaaaacaagcccttatcgatcgcttaatgacgcgtattcaaggagttattcaagcgcgcgaatcaaaatacattatgttacacgcgccaagtgattgccttgaagatgttatcgccctattaccgggtgctgagcgcccgaccatccttcctttagcgggtgatcaaaatcgagtagcaatgcacatggtcagcagtgaaaccctcttttgggaaacgatggaaaaactaaaagcattaggggcaagttcaattcttgttttaccaatagaaaaaatgatggaa

SEQ ID NO: 32542 - DNA, 819 bp, Proteus mirabilis
atgaaacggatcacgatagtcggattaggttggttaggattaccacttgccaatgccttgcgtgaagcggggtatcaagtaaaaggaacaaaaaccacagaagatggtgtagaagcagcacgaatgagtggtgttgattgttgtctaatgaatttaacaccggctattgattgtgatagagatgattttgattacttaatggaaactgacgtactgattattacattacctcccagtgcggcggggggaggatatgattatgttgaagggatacaaacattagtggatagcgccatgtctcggcatgtgacaagagtgatttatattagctctacttcagtatatggcaatcaaagtggtgttattacagaagaagttgatattaggccagaaacgcaatccgctaagatgatagcggaagttgaaaattggttacatcgcttaccacttacgaccgtcgatattttacgtttggcggggttagttgggccaggtcgtcatgcaggacgctttttatccggtaaaaaacaggtcaaaggtgcacatcagagtgtcaatttagtgcatttagacgatgttatttttgcgatagagcaactgcttgctcaaaatgaaggaggccgtttatataatttatgcgcgcctattcatcctaaaaagaaagatttttacagccgtgttgctgcacagttagatcttactccccctgaatttgctctagaagataaaccaccagcacgagagatcgacggtcaggagatttgccgagatctcggatttcattatcactatcctgatcccgacaaaatgccaatgagt

SEQ ID NO: 32543 - DNA, 744 bp, Proteus mirabilis
atgttagatattaaaaatttacatgtcagtgttgaaggcaatgaaattcttaaaggattagatttgcaagtacgtgccggcgaagtgcacgctatcatggggccaaacggttcaggtaaaagtacattatccgcaaccttagcaggtcgcgaagagtatgaagttgatgaaggtagtgtgacttttaaaaacaaagatctactggaattagagcctgaagagcgagcgggtgaaggtatctttatggcgtttcaatatccggtagagatccccggtgtcagtaaccagtttttcttacaatcctcagtcaatgcggtaagagaatatcgaggccaagagccgttagatcgctttgattttgaagattttattgaagataaaatcaaactattggatatgcctcaagatttgttaactcgttctgttaacgtaggtttttctggtggtgagaaaaaacgtaacgatattttgcaaatggctgcccttgaacctgaactgtgtatcttagatgaaaccgactcaggacttgatatcgatgcgttaaaaattgtcgctaatggtgtcaatagcttacgtgatggtaaacgcgcctttatcgtggtgactcactatcaacgtatccttgattatattaaacctgattatgtgcatgtgctttaccaaggaaaaatcattaaatcaggtgatttttcattagcacaaaaattggaggaacaaggttatggctggcttattgaccctcaa

SEQ ID NO: 32544 - DNA, 1110 bp, Proteus mirabilis
atggaaaaaccgcagatccatacagatatacccaaaattttattcaccgttctttttatttctttttttattatcggtagtttttggatcctgaatccttttatcgttggttttatttgggctggcatgatagtggttgccacttggcctttactcattattttagaaaaacgagtaaaatatcgctggctatcaaccatgatcatgatgattttaatattactgattttcgtcattccgattattttgttaattagtagtgttattgacaacagtgctccattgattgaactagcaaaatcaccttcagatattcaaccaccacaactactatggttaaaagagatccccatggttggtaatacgctctatgaaacttggcactctattctcgtttctggtggtaatgccttaatggcgaagatccaaccctatattggacaagcagcaaattggttctttgcacaagccttaaatattggccgttttgcgcttcacttagttgtcatgttacttttttcaggattactctttttacaaggtgaaaatgttgttgcttggttacgccattttgctgtgcgtcttgccggacaacggggtgatgcagccattttattagcctccatgtcaattcgcgcagtggcgctgggtgtggtgttaactgcgctgatccaagccgttattggtggtattggcttaggtatttcgggtgtgccttatgccacagtgttaacggtattgatgtttatttgctgccttgcgcaattaggacctttgttcgttctggttccttctattctatggctattttggaccggtgatactacatggggtatcgtcatgatcatttggggtgggattgtggcgacgatggatggtgtactacgtccattcctcatcaaaatgggagctgacctacctatggtactgattttgaccggtgttatcggtggtattttaacactcggtatgattggtctgtttattggccctgttgtattagccgtagcacacagtttattgaatgcgtggatcaatgaagttcctaaacccgatccagatttaacagaaactgtagaatttatgaataaaaactttatagaaaaagag

SEQ ID NO: 32545 - DNA, 864 bp, Proteus mirabilis
atgatattaagtttgaattcaattaactgtgataataatgaacttgttgatagaactgttttttttatctctgacggcaccgctattaccgcagaagtcttaggccatgcggtactctcacaattcccattaaaaatgaaaagctataccttaccttttgtatcttctgtagaaagagcggaagaaataaaaaataagattaatgaaatttataaaaaaagtggcgccaagcctctggttttctactctattattagtcctgacgtaaaacgaataataaatagtagtgaaggattctgtcaggatattgtgcagtcattagttctccccttagaaaaagaaattggcgttcaagcgctacctcaattaaataaaacgcacggtttaacagaaaaaaatctcagcaaatatgatgctcgaattgctgctattgaatacactttatctcatgatgatgggatctctttacgcaatctcgaccaggcgcaagtgatcttaatcggtgtctcacgctgcggtaaaacccctaccagtttatatttagcgatgcaatttggcattcaagcggctaattacccttttactgctgatgatatggattttttaaaattgcctcctgaattaaaagagtatcaacataaattgtttggcttaaccattgccccagaacgccttgctgctatccgtagcgaacgtcgtgaaaacagtcgttatgcatctattcgtcaatgtcgtattgaattagcggaagttgaagcgctatttaggaaaaataacattccttacctaaatacgacaaactactctgttgaagaaatttccactaaggtaattgattctatgggattagccagaagaatgttc

SEQ ID NO: 32546 - DNA, 459 bp, Proteus mirabilis
atgaaatacgggaaactctatgccgtcattgcgatggtaggcattattgtgggaggctattgggtgattaattggcaagctaacagaattaatctattagtagaaacaaacaaagaactaacggaggctctcgaagagcagaagtctattaatactgactatcaagcacgcataatgcgattaaatcagttggatattcaatatacgcaggagttggcgaatgctaagaatgaaattagtcgcttgcgtgatattagcgagcgtcatcctgagcgggtgtatatcaaagcagagtgcccaaaaagcaaaaccactccctccaccagcttggcttatgcaaccatcgcccgacctactgacaccgctctccgaaattattggttactcagagagcgaattgcagagtcagagcaaatgattttggggttacaggattatattagagtggagtgtgtgaac

SEQ ID NO: 32547 - DNA, 1365 bp, Proteus mirabilis
atgcaaaaagagaataaactttcacgaggactatcagggcggcatattcgtttcatggcgctaggctctgctattgggacagggcttttttatggttcagccgcggcgattgaaaaagcaggccccgctgtacttcttgcttatcttattggtggtgccgcagtatttatggttatgcgcgcattaggggaaatggcagtccatcatccagtggcgggttctttttcacaatatgctagccattatatgggaccattagccggatttttaactggctggaactacgtttttgaaatgcttatcgtttgtcttgcagacgtaaccgcatttggtttttatatgaaactttggtttcccgatgtcgaccaatggatatgggtattaggcatagtctgttttattggtgccttaaatttatgtcatgtgaagatatttggtgaaatggaattttggctctctatcgttaaagtgactgcgattattgccatgattatcggtggtgtagccataatgatctacggctttggtcagcaaacagaacatccaattggtatttctaacctatgggagtttggtggctttatgccaaatggtatagaaggcattattgcctcactcgccattgtgatgtttgcctttggtggtattgaggttattggtattaccgccagtgaagctaaagatccagaaaaaacgatccctaaagctatcaatgcggtgccatttcgtatcttactattctatgtactgaccatttttattttaatgtgcatcttcccatggcaacaaattggccataacggtagtccatttgtacaaattttttccaatctgggtatcaattcagccgctaacattcttaatcttgtggtgatcaccgccgctatctctgcgataaacagtgatattttcggtgctggtcgcatgatgtacggcatggcacaagaagggcaagcacctaaatcctttatgaaactgacgcgtaacggtgtgccttggatgaccgtattagtgatgtcagtggtgctattattaggggttgtgcttaactatcttattccagaaaaaatcttcgtacttattgcctctatcgcgacatttgccactgtatgggtctggttgatgatcttactttctcaagtggctatgcgtcgccaaatgagtgctgaagaggcgaaaaaactaaaatttcctgtaccattttggccaatagcacccgccattaccattatttttatggcatttgtgatagcaattttaggctactttgaatcaacccgaatggcattaatcgttgggttagtatgggtggctattttaactgttggttactatattggtatcaaaccaagaataacgcagaaa

SEQ ID NO: 32548 - DNA, 363 bp, Proteus mirabilis
ttgatgataaccaccatctttaaagattttcagtttgaagctgcgcaccacttaccccatgttcccaaaggccataaatgtggacgtttacatgggcattcatttttagtgagattagaaatcactggtgaagtagatgcgcagtcaggttggctaattgattttgctgatgtgaaagccgcatttaaaccgactcttgataggctcgaccactattatcttaatgacattgaaggtttagaaaatccaaccagcgaagtactggcaaaatggatttggcaacaagttaaaccatcactccccctgttatccgccgtgatggttaaagagacatgtaccgcaggatgtatttatcgtggtgag

SEQ ID NO: 32549 - DNA, 1725 bp, Proteus mirabilis
atgatttcaggaattttagcttcaccgggtatcgcatttggtcaagctcttctacttaaagaagaacctattattattagccaacgtaaaatccaaagtgacgaagttgacacccaaatcgaacgttttaaagatggtcgtaataaatcagcgcaacaactagaaatcattaaagcccgtgctgaaaaaaatcttggtgccgataaagctgagatttttgaaggccatattatgttattagaagatgaggaactcgaacaagagatcatatccctcatcaaaagtgacaagaaaaccgcagaagcagcggttcaatctgttattgaagatcaggcaaccgcattagaagccttagatgatgagtacttaaaagagcgtgcggctgacgttcgtgatattggtaagcgcttaatgcgtaatatcttagagatgccaattatcgatttaagtgctatttctgaaaaagtgattttagttgctacagatttaacgccatcagaaacagcgcagcttagcttagacaatgtgttaggctttatcactgacttagggggcagaacatcgcacacctctatcatggcacgctctttagagatcccagcgattgttggcacatctaatgcaacagaaaccattaaaaaagaagattatctggttcttgatgcgattaacaataaaatcattattaatccttctgatgaagagctcgaagcattaaaggctatcaaagaagagtacctacatgaaaaagaagagctggcaaaactaaaagatttaccagcaattacccttgatgggcatcaagttgaagtttgcgctaatataggtactgtacgtgatgtcgcaggtgctgagcgtaatggtgcggaaggtgttggactctatcgtactgaattcctatttatggatagagattccttaccaacagaagaagagcaattccaagcttataaagctgtggctgaagcggtaggcagtcctgcggtcattatccgtactatggatattggtggcgataaagacttaccttacatgaatttaccgaaagaagagaatccattcttaggttggcgtgcaattcgtatttgtcttgaccgcaaagagatccttcatccacaattacgtgctatcttaagagcgtctgcttttggtaaactacgtattatgtttccaatgattatctctgttgaagagatccgagcattgaaagcggaacttgaaatactgaaaagccagcttcgtgaagaaaataagccttttgatgaatctatcgaagtcggtgttatggttgaaacgccagcagcggctgttatggctcgccatatggcaaaagaagttgactttttcagtattgggactaacgatctaacacaatatactctggctgtagaccgtggaaatgagctgatatctcatctatataatccaatgtcacctgctgtacttaatctgattaaacaggtgattgatgcatcacacgctgaaggtaaatggactggaatgtgtggtgagcttgccggggatgaacgggcaacaatgttgcttctgggcatgggattagatgagtttagtatgagtgctatatcaattcctcgcatcaaaaaaattattcgtaacgccaattttgatgatgcaaaagcactggcagagcaagcacttgctcagccgactgcaaaggaattaatggacttagtagaaacttttactaaagaaaaaacactgtgc

SEQ ID NO: 32550 - DNA, 255 bp, Proteus mirabilis
atgtaccagcaagaagttactattacagcaccaaacggcttacatactcgtcctgcagcacagttagtaaaagaggctaaaactttctcttctgatattagtcttatttctggtggtaaatcagctagcgcgaagagcttattcaaattacaaactttaggattaacccaaggtactgtagtcactatttctgctgaaggcgaagatgaaaaacaagcagtagaacatttagttaagttaatggctgagttagag

SEQ ID NO: 32551 - DNA, 951 bp, Proteus mirabilis
atgagcaaaattttcgaagataactcgcaaactattggccatacccccctagttcgtttaaaacatttcggtaatggcaatatcttagctaaagtagaatctcgtaatccaagctttagtgtaaaatgccgtatcggtgcaaatatgatttgggatgcagaaaaaaaaggtatcctgaaacccggcgtagagctggttgagccaaccagtggtaatactgggattgccttggcttatgtagctgctgcacgtggctataagctgacactgactatgcctgataccatgagtattgagcgccgtaaattattaaaagcattaggtgctaaccttgtgttaactgagggcgctaaaggtatgaagggagcgattgataaagcgaacgaaattcgtgatagcgatcctagccgttaccttctactacaacaatttagtaatccagcaaacccagaaattcatgagaaaaccacaggccctgaaatttggaatgacactgatggcaaagttgatgtagttatcgcaggtgtcggaacgggtggtactatcacgggtattggtcgctatttgaaaaatacccaaggtaaagctgtcaccatggttgcggtagaacctaaagattctcctgttattagccaagcattagcaggtgaagaaattaagcctggtccacataaaatccaaggtattggtgcaggttttatccctgaaaacttagagttatcactattagatcgcgtgatccaaattactaacgaagaagcatttgaaacagctcgtgacgttatgaccaaagaaggtattttagcgggtatttcatccggtgcggcaattgcggctgcagtgaaattagctaaagagccagaatttgctaataaagaaatcgtagtgattttaccttcttcaggtgaacgttatctcagcaccccactttttgctgatatctctgacagc

SEQ ID NO: 32552 - DNA, 1050 bp, Proteus mirabilis
atgcagcaaaatttgcgtctgatattaatcgttgttggtgcgattttaatcatagctttgttattacacggcttatggattggtcgaaaagagcgttctaagcttttccgtaatcgcccagtaaaacgtcagaaacagaattatcagtcagatgagaacgatgatgaaccccagtatactgaggcaaatcatcagatgtcgtctttaacttcaacgcaggaggctcaaagtgtgccaccgattaaatcggagccaacacttgcgccacaatcctcagttgcagataaagatccacttatgtctggaacaccagcacagggacattctaacgatacttcattacaacgagagcctagtcttggtgtttttgatgttattgaacaaaataatgactctgcgcctcagcaaaaacaaccgatacccgaggtagaggtaaaccatgctgatgtaaaagaaggtgatattagtgagacaaaacttgccgatgtagagccgataccagaatcgtcgaactctgttgctagtgatgaaatacataccactgatacagataggccattggatgctgaaacctcatcggatgtgaaacaagctgagcaagctttatccggatcagaagagccaaaagcagaggaagagctggtattagtattaaatgtcagcgctcatcatggtcaaatgcttgacggtgaggtgttaatgcagagcattattcaagcgggtttccagtttggtgcgatgaatattttccatcgacatcttaacccgacgggtaatggccctgtattgtttagtcttgccaatatggtaaaaccgggtactttcaatattgatacgatggctgaattaaccacgcctggcgtatccatgtttatgatggtgccatcttatggtgatgctaatcaaaactttaaattgatgttgcaagcagctcagcgtattgcctctgatgtgggcggtgttgtgcttgatgaagagcgcaaactgttaacaccacaaaaaattgaactttataaatctagaattcgtagaacactagatttacatcaa

SEQ ID NO: 32553 - DNA, 2025 bp, Proteus mirabilis
atgaatcaaaatattcaacaacaaattgatgaacttcgcgttacactacgtcaccatgaatatctctatcatgtcatggacgcacctgaaattcctgatgctgaatacgatcgcttaatgaataagttaaaagcattagaagccgaacatcctgaactcattaccccagattctcctactcaacgggtaggggcattacctttaacggcttttgagcaagttaggcatgaaattccaatgctctctttagataatgcttttgatgaaacaacctatttagcatttgataaacgtttacgtgaacgtctgaaaaataatgaagagatcactttttgttgtgaattaaaattagatggacttgcggtaagtctactgtatgaaaatggtcgcttagtacaagctgcaacccgtggtgatggtaccactggagaaaatattactgagaatgtcagaaccattaaagccattcctttgcgtttatatggcgataatatccccgcacgaattgaaattcgtggagaagtctttatgactgaaaaagggtttgagcatttaaatgaagaagctcgacgcacgggaggaaaagtatttgctaatcctcgtaatgcagcagcgggttcattacgtcagttagatcctcgtattacagccaagcgccctttgactttcttctgttatggtgttggcgtgcttgaaggcggtgaattaccgacaagccattatgcacgtttacagcaatttaaaaaatggggattacctgttagtgatgctattaaattatgtaccggaactaaagctgtacttgatttttaccatcatgtagcagaaattcgccctaatctaggctttgatattgatggtgtggttatcaaagtagatgatatagctctacaagaagagttgggatttgtgtctcgtgctccccgttgggcgattgcttacaaattccaagcccaagagcagatgacggtgattaaagatgttgaatttcaagtggggcgtacaggggcgattacacctgtcgctcgtttagatcccgtacaagtggcaggggtaatagtcagtaatgccacacttcataatgctgatgaaattgaacgtttaggattacgtattggtgatacggtggttattcgccgtgcaggcgatgttattcctcaggttgtgagtgtgattgaagaaaaacgccctgagaatgcacaagaaattgtttttccaacccaatgccctatttgtcaatctgatattgagcgtatagaaggtgaggctgttgcccgctgcacggggggattaatttgtgcagcgcaacgtaaagaggcgcttaaacatttcgtttctcgtcgtgcgatggatgttgacggcatgggagataaaattatcgaccaattggttgaaaaagagtatgtcaaaacaccggctgatttattccgtttagatgaaaagatcttatctggtttagaacgtatgggggagaaatcagccaaaaaactgcttaatgcattagaaaaagcaaaatcaaccacttttgcccgttttatctatgcccttggtattcgtgaagtaggagaagcaacggccaatggattaaccgctcattttgtttcattagaggcattacgtgaagcaaatattgaagccttaaaggcagttcctgatgtgggtgatattgttgcaaagcatgtggttaattttttccaagaagaacataataaaaatgtgattgatcaacttgttaatgacattggcattacttggccggcaccggttgtggctactcatgaagcaggtgataatccttttgctggtaaaacagtcgtgctgacaggctctctttctcaattaacgcgagatgaagcaaaagatagattagttgcacttggtgcaaaagtgagtggtagtgtttcgaaaaagacagatatggtcattgctggtgaagcggcgggttctaaattagccaaagcaaatgaattaggtattactgttattgatgaagacgaaatgatccgcttgcttgatcaatctaaa

SEQ ID NO: 32554 - DNA, 1863 bp, Proteus mirabilis
atgtctattgaaattaaagtccctgatatcggtgcagatgaagttgaagtcaccgaagtgatggtgaaagtcggtgatcgtattgaggaagaacaatccttgatcaccgtagaaggcgataaagcgtctatggaagtgccatcaccacaagcgggtattgttaaagagatcaaaattgccgtgggcgacaaagtcgaaactggctctcttatcatgatctttgatactgaagagggtgctcaggcacccgctcaagaagccgctcctgcgccttctgctgccgcacctgctgcgagcgaactgaaagaagttcatgtaccagatatcggtggtgatgaagttgaagtcaccgaggtgatggtcaatgtaggtgataccatttcagaagagcaatctctgatcacggttgaaggtgacaaggcttcaatggaagtcccagcaccttttgctggcgtagtaaaagagatcaaaattgctgtcggtgataaagtgagcacaggctctcttatcatggtatttgaagtagcaggtagcgcgccagcaccttctgcatcagctccggctcctgcagcatcagcaccagcagcctctgcaattaaagatgttaatgtaccagatatcggtggtgatgaagttgaagtcaccgaagtgatggtgaaagtgggtgatactattgctgaagagcaatctctgatcacggttgaaggtgataaagcttctatggaagttccagcaccttttgccggtgtagtaaaagagatcaaaattgctgtcggtgataaagtgaaaacaggctcactgatcatgacctttgaagttgccggtgccgcaccagcagcacaagcgccagcagcgcctgcagcatctacatcagcagcaccttctgctccagcaaaagcgcctgcttctgcaccagcagcaaaagaagaatttgttgaaaacgaagcttatgtccatgcaacacctgttatccgccgtttagcacgtgaattcggtgtgaacttagcgaaagttaaaggaaccggtcgtaaaggacgtatcttacgtgaagacgttcagtcttatgtgaaagagttaattaaacgtgctgaatctgcacctgctaatgctggtggtggattaccaggtatgttgccttggccgaaagttgacttcagtaaatttggtgaaattgaagaagttgaactaagccgtatccagaaaatctctggcgctaacttaagccgtaactgggtaatgatccctcatgttaatctgtttgatgaagcagatatcactgaggttgaagaattccgtaaacagcaaaataaagaagctgagaagaaaaaactggatgttaagatcacgccattagtctttgtgatgaaagcagcggctaaagcactggctgatatgcctcgctttaacagctcaatttcagaagatggacagaaactgatcctgaaaaaatacatcaatatcggtatcgccgtagatacacctaacggtttagttgtacctgtctttaaagatgtaaacaaaaaaggcatcttagaactctcttatgaattagcagaagtttctaagaaagctcgtgcaggtaaactgactgcatctgatatgcaaggcggatgcttcactatttctagccttggtggtatcggtactaccggttttgcaccaatcgttaatgcgccagaagttgcgattatgggactgtctcgttcttcgatgaaaccagtctggaacggtaaagagttcgtaccacgcttaatgttaccaatgtcattatctttcgatcaccgtgtgattgatggtgctgacggtgctcgattcatcactctgattaatcagtacatgagcgatttacgtcgtttggtaatg

SEQ ID NO: 32555 - DNA, 1425 bp, Proteus mirabilis
atgagtactgaaattaaagcacaggtagtggttctcggtgcaggccctgcgggttattccgcggcgttccgttgcgctgacttaggtttagatacagttttagttgaacgtcactctacattaggtggtgtttgtctgaacgtggggtgtatcccttctaaagcgttactccacgttgctaaagtaatcgaagaagcgaaagcattatctgaacacggtgtcgtttttgatgcaccgaaaacagatatcgacaaaattcgcatctggaaagacaaagttatttctcagttaaccggtggcttagctggcatggctaaaggccgtaaagtaaatgttgttaacggcgaagctcgattcacaggctcacatacattgtctgttgaaggtagtgaaggtacaacaacaatcactttcgaaaatgctatcgttgccgcaggctctcgtccaatcgaattaccttttattccacatgaagatccacgtgtgtgggattcaacagatgcactacaactgaaaacagtaccagagcgtttactggtcatgggtggtgggatcatcggtttggaaatgggtactgtttatcatgcgttgggttcacaaattgacgtggttgaaatgttcgaccaagttatcccagcggcagataaagacgtagttaaagtctttactaaacgtatcagcaaaaaattcaatctgatgctagaaaccaaagtgaccgccgttgaagcaaaagaagatggtatctatgtcacaatggaaggcaaaaaagcaccagctgagcctcaacgttatgatgctgtattagttgctatcggtcgtgtaccaaatggtaaattattagacgcaggtaaagccggtattgaagttgatgatcgtggctttatccatgttgataaacaaatgcgtactaatgtacctcacatctttgctattggtgatattgttggtcaaccaatgctggcacacaaaggtgttcatgaaggtcacgttgctgctgaagttatctctggtaagaagcattactttgatcctaaagttattccatcaatcgcttatactgagccagaagttgcatgggttggtatgactgaaaaagaagcgaaagagaaaggtgttagctatgaagtagcaactttcccttgggcagcatctggtcgtgcaattgcatcagactgtgcagatggtatgactaaactgatttttgacaaagaaaccaaccgtgttatcggtggggcaattgtcggctctaacggtggtgaactgttaggtgaaattggtttagctattgaaatgggttgtgatgctgaagatatcgcattaaccatccacgctcacccaacgctatacgaatcaatcggtatggctgcggaagtatttgaaggtagcatcactgacctgccaaatccaaaagcgaaaaagaaaaaa

SEQ ID NO: 32556 - DNA, 204 bp, Proteus mirabilis
atgtttggtaatttagggcaagctggaaaatatctaggacaagccgctcgtatgttaataggtattcctgattatgataactatgtgcagcacatgaaggacaaccatcctgataaaccagtgatgacctataacgagtttttccgtgaacgtcaggaagcccgttatggtggcggtgatggtaaaggtggtttccgctgttgc

SEQ ID NO: 32557 - DNA, 1220 bp, Proteus mirabilis
agtctaatcatgaacattgttgatcggtttatttcttacaccaaggtgaatactacaacaaatagagaaaatggcgcagcggggattatgccttcatcggaaggtcagcgagtcctcgctttacaattagtcgaagagttaaaggcgttaggtgttgaagatatcaaaattcgcgataccgccattgttaccgcgacactaccttctaaccttgattatgaggttcctaccgtagctttctttggtcacttagataccagtgcagaacaaactaatgatactaaagcacaaattttaccttataaaggtggcgacctttgcttaaacaaagaacttgagatttttttacgtcaaagtgaattccctgaattagaaaactatattggtgacgatatcatcgtaacagatggtactagcttattaggcgctgacgacaaagcggctatcgcctctattatggatatgttgcaatattttaaacaacatccagaagtcaaacacggtacagttaaaattggttttgtacccgatgaagagcaaggtttacgtggtgcaaaagcctttgatgtaacagaattcggcgcagactttgcttataccttagattgttgtggtattggtgaacttgtatatgaaaattggaatgccggtgatgttgaaataacctttatcggaacctcagcacaccctatgtcagttaaaggtaaattaaaaaattcactgttaatggctcataaatttattgcgatgttaccgggcggtgaagcaccggaatataccgaagtcgtgaaggttattattgggtaaaacaactggcgggtaatagcgcacgtactgtattaaaaatggatgtgcgtgatttcacagaagcatgctacgcccatcgtatggcatttttaaaacaactttcagaacaatgtgaagcgttatggggtgaagggactgttgtttgtaagcaagccgatcgttatgcaaatgtctttaatagtctacaaggtgaaaatcgatatcctatcgatattgctattgatgcttataaagccaatggtattacccctcgtccaattcctatgcggggtggctatgatggagcagcattatcgcaaaaaggattaccttgccctaatatttttaccggagcgcacaatttccactctatttatgaataccttcctgttaaatcgctttatgctgccagcgatgtattgaaatctgtcgtt

SEQ ID NO: 32558 - DNA, 1251 bp, Proteus mirabilis
atgagtcattcagaacataatcaaacacgtcgtcgtcttattaaaggaattggcgcgttattgttattaagtgttagtcctgttggcttagcggcaacatcatcagtggttgccgtcagggtatggcctgcatcgacttatacacgtgtgactatcgaatcaagtagacccttgaaatatcgccagtttgcgttatcagcaccagatagaattgtggttgatcttgaaggtatccaactgaatagcgttctgaaaggtatggctagtcaagtgcaaacaaacgatccttacttaaaacttattcgtgtcggtcaaaataccccaactacggttcgtttagtgtttgaaattaaaacccccgttcagccacaaatgtttactttaaaacccgttgctgaatttaaaaatcgcttagtgctcgatttctatccaagtcatgcggcgacaagtgaagatgatccgctattagcgctattgcgtgaatataacgaaggggatttacaacaagctgtgcctgaacaaacagatacgcgtaagcccggaagagcaggacgagataggccgattattatcatgattgaccccggccatggtggtgaagatccgggagcgatggggaaatataaaactcgtgagaaagatgttgtactacaaattgcccgtcgcttaagagcattgattgataaagatgccaaaatgaaagcgtatatgacgcgtaatgaggatgtgtttatccccttaaaagtgcgagtagcgaaagcgcggaaaatgcaggctgatctctttgtctctattcatgcagatgcatttaccaatcgctcggctagaggctcttcggttttcgcgctatccaaaacaggcgcaacaagtaataccgcacgttacctagctcaaacccaaaatgaagcggatttaattggtggggtgagtcgaagtggtgatcgctatgttgatcacgcaatgcttgatttagtacagaccgcgacaattaatgacagcctaaaatttggtagtgaggtattaaaattattaggtggcgtgaataagctacataaaaataaggtcgatcaagccggatttgcggttttaaaagcccctgagatcccttctattttagtagagacggcttttattagtaatattgaagaagagcgaaagtcaaaacggctaaattccaggcacaagttgctgaatctattttcaagggattaaagcctattttgcaatggtggtgacctggcattagctgat

SEQ ID NO: 32559 - DNA, 1914 bp, Proteus mirabilis
atgattaaattattagaacaagcaattgcacaaaacctattgcgcccattagatttacgttttgctcaaatgctggtggcagatgaaaatcctatcctactgtttatttttgcctatctcagtgctcaaacaggggcgggccatgtttgcttaccgttaaatatcatacaacaagataaattgtttgatggacgacacaccgagctttcacaagccatttggcagaaaatggcgcaaccatcagcgaaagaaatactggcagagcttaatcagagcgagtgtgttaatcaaggccatagtgacttaccttcacctattattctcgataacggattactttatctacaaagaatgtggcgttatgaagagcaaattgcgcaattttttcgccaagagcaacgagtggttgatatcgatgaaaatcaattaacaaacgtattaaatcaacttttcccaagcgttaaaacccatgctgaaactaactggcaaaaagtcgccgcagcggttgctattacaagccctatttcgattatttcgggtggcccaggaacagggaaaaccacgacagtagcaaagattttagctgcttttgttatgctaacggcgaatgaaaaacccattattcaactagccgcacccacgggaaaagcggcagctagattgaccgaatcattaggtaaagcattagcgcaattggcactaagtgaagaagagttaaaatggatgcccgatcaagcgcaaaccattcatcgcttattaggtgcccaaccggaaagtcagcaagttcgttatcatcgcgataatccgctacaacttgatatcttggttatagatgaagcttctatggtggatttaccgatgatggcgcgtttaattgaggccttaccggaacattgccatgttatttttctgggagataaagatcagctcgcttcggtagaggcaggagccgttttaggggatatttgtcgttttgcggatcaggggtttagccaacgccgttttgagcagattgatcgcttaacacaaggtgaattacagaaagatcccgcttctatgacgacttctactaagccagtttcggtggtcagtgattcactatgtttattgcgtaaaagttatcgttttggctcacattcaggtattggtcaattagcttttgcggttaatcaaggacaagtgaggagtgctatgacgttactgaaaaaagcgacagtaacacaagagagcactgagcgagaaaaacataccgatccgcaggacatcgaatttatctcattagacaccgatgagagctatatgaagatgcttcaagatgttgctaaggcttatcatcactatctatcgttagtcgcgcaaaaagcagcaccagagactatccttcatagctttaatcaatatcgtttattgtgcgccttgcgagaagggccttttggtgtcacaggactaaatgaacgtattgagatgctgttacatcgccaacgcttgatacgacgacctataaatagttatcagcgggagtatattggacgaccaattatgatccagcgtaatgacagcacattggggctatttaatggtgatatcggcattatgcttaatagcgatgaaggagaaatgaaagctttctttcagttgcctgatggcacattgaaagctatccaacctagtcgtttaccgcaacatgagactgcttatgtgatgacagtgcataaatcacaaggttcggaatttacccatacggcattggtattgccgacacaattttctcctattgttagccgagaattactctatacggcgataacgcgagccaagcagaagctatcactttattcttctgaatatatggtgaaaatggcgatccagacacgtattcaacgccgcagtggattagttgaaaaactgcgttac

SEQ ID NO: 32560 - DNA, 3636 bp, Proteus mirabilis
gtgagtgaagtgatacaggcacaggtattagatccctatacacttcctttgtatcaaagacgcctcattgaggcgtctgcgggaacagggaaaacatacactatagggttattgtatttacgattactgcttggattagggggcgagtcagcatttcatcgccccttaagtgttgaagagatcttagtcgttacttttaccgaagcggcaacggatgaattacgcgcccgtattcgtcaaaatattcatcagttaaggctagcctgtatccgtcatcaagtagaaaatgacaataacgcttaccaaatattattagatcaaatcccgaataaaatggtggcggcgcaatggctactagaagctgagcgtcaaatggatgaagccgccatttatactattcatggtttttgtcagcgcatgttagccactaacgcctttgaatctggtgtattgtttgaacaggtgttgatccaagatgaatatgagttaaaaaaacgtgtctgcgctgatttttggcgcaggcactgttatcccctttcttatgatgttgcctatgcggtaagcgaaatttggtctggccctgagcaactgctgtatgaaattcaaccctatttacaaggtgaatgccccgaaattcaaggtattgatttcgacgctaaaaaagagactgttgaacagcgtcatcaagcagtcattgaggccattgataaagttaaagcactatggcgtcatcattgcaatgaaattgcagattggataacttcatctggtgttgataaacgcagttacagtagtcgtttcttacctaaatggatcgatgaaatcaccgcatgggccactccactcgaaaccaaaagttatcagttacctgactgtttaagtcgtttttcgcaagcaaccctacatgaaaaaactacaaagggtgctgcgcctgagcacgctttatttgcggaaatcgaactactttgccaacaaagtttaacgttacgtgatgtgatcattgccaatgccattcctgaaatacgccaagggatagaaaatgaaaaaatgcgtcgtggtgagttgggatttgatgatctgttaacgcgtctcgataaggcattgcaacgagaaggcggcgaagcattagcagatgctattcgccaacgttatcccgtcgcgatgattgacgaatttcaggataccgatcctcagcagtatcgtatttttgatactatctatggtgagcatacagagagtggtttgctatttattggtgatcccaaacaagccatttacgcatttcgtggtgcagatatctttacctatattcgggcacggcaacaaaccgatcaccactatacattgaatactaactggcgctcggctccgggtatggtaagtgcagttaataaactgtttttacgttctaaaaccccttttttgtttgatcatattccttttattgaggtcaattcggctgaaaaaaatcagcatatgaagtttatttaccagcaaaaaacggttgccccattaaacttttggttagctgaaggtgaaagcctttcaactggtaattatgaacaattaatggcctcgcaatgtgcgatgcaaattcgtgactggttatcagccagtgacaatcaacaagcttggttaatcgaacaagataataaaagcgctgttacatctgccgatattgtggtgctagtgcgtagtcgccgagaagcattattgatccgagatgcattagatctgttatctatccaatcagtatttttatccaatagagaaagtgtgtttgaaaccaatgaagccaaagatctactttggttactacaagcagtggtaacccctgaaaaagaacgggtgttaagagcgtctcttgccagtgcactgtttggatttaacgcacaacaaattgacgaacttaatcaagatgaacaacgttggaaccgctatgtggagcaattcgctgattattttgtcttgtggcaaaaacgtggtgtgttacctatgctacgtaaagtcatgatagaaaaccaaatcgctgagaacttactcgcaagccaagcaggagaacgacgtttaaccgatatcatgcatattggtgagttgctacaagaaacatcattacagcttgatagcgaacacgcccttattcgttggttagcccagcaaatttctcgaccagatgcacaagcggaaagtcagcaaatgcgtttggaaagtgataaaaatctggtgcaaatttgtaccattcacaaatctaaaggattggaatatcccattgtttgtctaccttttgcctgtaattatcaagaacaaaagggcgcgctttatcatgatagagatgaattttacgcaaaactagatatttttaatcaacctgatagcgtgcgtcttgctgatgaagagcgattggcagaggatttacgcttgttgtatgtggcattaactcgggcgaaattttgttgttatgttggtgttgcgcctttggttaaaggaaataaacgtaagtcaggattaactgatttgcataaaaatgcgctgggatatctgttgcagcatggggaagagggtaatagtgagctattacatcaatccattaatcaattgcttgatgacaatataaaagtgatcacgttaggtgatacctcaacgcatcgatatcaatctccacacacaacggatattgctttagatgccgccatatttaagcgaaaaattaatgataattggcgtatcaccagttattcgggattaacggcacaacactctgctcgtggatatctatttgatagtgctgatttggatgccttggtgcaatctatcgctccgggcttagataccgatgctaaaggtgagaaaacggcgcaacacagcgatgaactctctattcatcacttccctcgtggtgcagtcgcggggacatttttacatagtttgcttgaagagcttgatttttcacagcctattgatgaaagttggatgcaagagcaacttattgcccaaggttttgaggaaaaatggacgccattgttggtggcttggatggaaaccctttttcacaccccattaaatgcgcaaggcttatgtttagctgatattcctaaggagcatcaactcgatgagctacaattctatctgcctattgaaaaggagatgtcggcggcacagttaacagcattaacccgtcaatacgatcctttatctgcgcaatgtccagccctcaattttcagcaagtgcaaggcatgctaaaaggttttattgacttagtattttgttgggagggtaagtattatgtggttgactataaatctaactggcttggtgaatcgagtgaggattacacgcaagaggcgatgagcaatgcaatgcgcgatcatcgttatgatttacagtatcaactctatactttagcgctacatcgatttttacaacaacgcttacctgattatgattatcaacgtcattttggtgggatctgctatctcttcttacgtggtattgatgctgactacccgggcaatggcgtctatacctatctacctgaagaaaagtttgtagaagcattagatgcgctatttaaaggggaagcgcttgaggttaacggcagtaaagtgaacgcgctgggtgagaacaattcaaatgat

SEQ ID NO: 32561 - DNA, 915 bp, Proteus mirabilis
atgaagaaatggttaaccttattgggtgcatcgctgttagggatgagcagtcacttaacttatgcacatgaatacctgctacctacggatggctcacgtatcattggggaaaatgtttcttacaccgttcctgatgataaacgttctttagaaacgatcgctgcacaatatcaagtgggtttgctaaatatgatggaagccaacccaggtattgatcctctattacccgaagcgggcaaaacactacaaattcccttacagatgatcttacctgataccgtgcgtaaaggtattgtcattaatctggcagaattgcgcctctattactatcccaaagaagggggaaccgttgatgtctatcctatcggtattggccaattagggcgggaaacgcctgaaatggtgacatctgtttctcaattgattaaagatccgacttggacgccgacagccaatattcgtaaaaattatgcggctaaggggatcacattaccggcagtggtaccagcagggccagataatccaatgggtgcatatgcgttaagattagcgcacagtcgtggtgagtatcttattcatggtactaatgccgattttggtattggcttaagagtgagttctggctgtattagattacgtcctgatgatattgaaacactgtttaatgtggtacccaaaggcagtcgggttcaagtgatcaataaaccgattaaatttactgagactgcagatggtaagcaatttattgaagtgcaccaaccactctcacaaaatgaagatgacgatcctcagacgatgcccctaacgtttactaaacaatttacggcttggtatgaaagtggcaaagtggataaagcaaaagtggatgcagaaattattcgtcgttcaggtataccggtcgatgtaaccgcatat

SEQ ID NO: 32562 - DNA, 654 bp, Proteus mirabilis
atgtttacaggtattgttcagggaaaaggacgtgttattgccattgaagataaaggtgatttccgtacccatatcattgaattaccttccgagttagtcaataacttagaaacaggagcttcgatcgctaacaatggttgttgcctaaccgtcacaaaaatcgatggcaataaaattagtttcgatttagtgaaagagacgctgcgcttaactaatttgggcgagttaacggttggttcagaagttaatattgaacgagcggccaaatatggcgatgaaattggtggtcatgtgatgtctggtcatattgtcactacggctgaaattgcgaaaattattacttcagaaaataacttacagatctggtttcgtatttttgatcagacattgatgaagtatattttgcataaaggttttattggcattgatggtattagtttaactattggtgatgtggttaataatcgtttctgtgtccatctgatccctgagactcgcgatagaacgacgttaggtcgtaagcgtttgggggataaagttaatattgagttagatccacagactcaggcgattgttgataccgtagagcgtgttatggcgcaacaagcattaacggttaagcttcaagcaacacacgaagaagaaaacgaaaaa

SEQ ID NO: 32563 - DNA, 1410 bp, Proteus mirabilis
atgaaaaagacaaaaattgtttgcaccatcgggccaaaaaccgaatctgaagaaaaactgactcaattactggacgcaggcatgaacgtaatgcgtctaaacttctctcacggtgactatgaagagcatggcaaccgtatcaaaaacctgcgtaatgtctgcgcaaaaacaggcaaaaaagcagccattttattagatactaaaggacctgagatccgcaccattaaattagaaggtggtaacgatgtctctttagttgcaggtcagacttttacctttacaacagatacttctgttgttggtaataaagatcgcgttgcggtcacttatgacggtttcgcaagagacttaactgtcggcaataccgtattagtcgatgacggccttatcggtatgaaagtcattaaagtcactgatactgaagtggtatgtgaagtacttaacaacggtgatttaggcgaaaataaaggcgttaacttaccaggtgtttctatcggcttaccggcattagcagaaaaagataaacaagatcttatctttggttgcgaacaaggcgttgactttgttgccgcttcttttattcgtaaacgttcagatgttgaagagatgcgtgctcacttaaaagcacacggtggcgaaaacatcatgatcatctctaaaattgaaaaccaagaaggtttaaataactttgacgaaattttagaagcctctgacggtatcatggttgcacgtggtgacttaggtgttgagatccctgttgaagaagttatctttgcacaaaaaatgatgatcgaaaaatgtaacgctgcgcgtaaagtggttatcactgcaacacagatgttagattccatgatcaaaaatccacgccctactcgtgcagaagctggtgacgttgccaatgctattttagatggtactgatgctgttatgctatccggtgaaagtgcgaaaggtaaatatccagtagaagctgtgactattatggcgactatctgtgatcgtactgatcgcatcatgaaatcacgtttagagtcttaccaattaggtgctaaattacgtgtaacagaagctgtttgtcgtggtgctgtagaaatggcggagaaattagatgctcctcttatcgttgtagcaacttatggcggtaaatcagcgcgctctatccgtaaatatttcccaacagcgcctatcttagcattaacaaataatgaagagaccgcacgccaattactgttagtaaaaggtgtaacaacacaattagttaataaaattgcttctactgatgacttctaccgtatcggtaaagatgcagcattatcaagtggcttagcccatgcaggtgatcgtgttgttatggttacaggtgcactggttgatagtggaacgacaaatacttcatcagtacacgttctg

SEQ ID NO: 32564 - DNA, 1510 bp, Proteus mirabilis
agttctgcctcaaaacagctcacattattaggtttttttgccataactgcatccatggtgatggcggtctatgagtatccaacttttgcaacttccggctttagtctagtctttttcttattactaggcggtttgttgtggtttattcctgttgcattatgtgcagctgaaatggcaaccgttgaaggatggcaagaagggggcgtatttgcttgggtatctaatacgctaggggagcgctggggatttgcggcgatctcttttggttatttacaaatagcgattggttttattccaatgctttatttcgtattaggagcattatcttatattcttgattggcctgagttaaataccgatccgctcaccaaaacgattgccgcattagtgattttatggggattagctttaactcaatttggcggaactaaatacacggctactattgctaaattaggtttcttcgcggggatattattaccagcaatcattttagtgcttttagctattagttatctggtcagtggtgcgcctttagcaatagaaatcagcagcaaaacctttttccctgattttactcagattggtactttagtggtttttgtggcctttattttaagctatatgggcgttgaagcctcagccactcacgtcaacgaaatgaaaaatccgggccgtgattatccacttgccatgtttttattaatgattgtggcaatatgcttaagctctattggcggtttatctgttgcggcagtgatccctcataacgaaatcaacttatctgcgggtggtggttgaaacctttagtgttttagtcagccattttagtagcggattagcttgggcggttaaaattattgcggcactattattgcttggcgtcttggctgaaattgcgtcgtggatcgttgggccttcacggggaatgtttgtggctgcacaacaaggtattcttccgccaacactggctaaagtaaataaaaatggtgtaccggtagctttagtgatcactcagctaattattactactattgccatagtggtgctgactaacactggtggtgggggcaatatgtcatttcttattgctttagcgctgacggtggtgatttatctatgtagctactttatgctgtttattggctatatgcatttggtttgcaagcaagctgataaaaaacgtgcatttaatattcccggtggtaaaggtgttaaattattagtggccgttgtcggtctgattgtgtctattttagcttttgttgtttcattcttcccgcctagctctttaccgggtggcagtagtgatacaacgtatgtttcattgctagtggtgagttttattattatttttgctttaccttttattatttatgcgtgctctcgcaaaggcaataaagccaatgtatcgatgatccacattaagagtcataatgcaccgaaaggacacttttttatccatcctcgtgctcgttcaacgcattatttagtgccaatagataaaaca

SEQ ID NO: 32565 - DNA, 1050 bp, Proteus mirabilis
atgatagaaaataaccgacaccccttcgcttgcacaacacttgcgattactgacaagaaaaaacgtgtttatcatggtcggacaatggagttttcttctgatgagccaacgtctatcttagcttattatccacaaggtcatacttttcagcaaaatgcccctgatggaacccccggattaaagtacagcgttaaatatccttttatggctattaccgctcctattaacttatcgggtaccaaagatgtacttgaaggtgtaaatagtcagggactctcttttagcttaaatatgctacctaactctaagttagatgatctcgatccccaatattacgcaagctctgttcctattgctgctattggtgagtgggcattaggacaatatgcgacggttaaagagttaaaagagattatcccccaaacccatttttggtcacaaaagctattattgttacgtaacttaccaagccctttccattacgcattttatgataaaaccggtgattgtattgttgtcgaagtctctgatggtaaattacatatttatgataatcctacctattgcatgaccaatggccctattttcccgtggcatttaactaatttaaacaactacactcatctttctaatatcaacgtttccagtagcacattaggtcgtattaaaatcaaccaacctgatagtggtattgcattagcaacattacctagctcagatacttctgtagatagatttattcgtgcagtttattattcaacctattaccacaaagtttctgatcctgataaacagcttattgagcttgcccatatcatgaatcgcttcgatcgccctaaagatgcaaccattgatccactattaggtaatgatacgctaactaaacttcatactagtgaattttctgtctggacagcgctaactgatttagaacgggggatctttttcttcagaggctacaacaacttaaactttcaaaagttcacacttgagtcatttaaaaatgaaagtagcgcggtttttattaaggtcaatttggaagaggcattg

SEQ ID NO: 32566 - DNA, 3129 bp, Proteus mirabilis
atgagcgaaaaaatccccgctacaggtggtgggccatctcgtttatttattttacgtccagtggcaacaacgctgtttatggtcgcgattttattagcaggaattgtcggttatcgtatgctgccagtgtcggcattacctgaagttgattatccgaccattcaagtcgtcacactctatcctggggcaaaccccgaggtgatgacctctgcggtaacagcaccgttagagcgtcaatttggacagatgtcaggcttaaaacagatgtcctcacaaagttcaggtggggcatcagtcattacactgatgttccaactcacattaccgttagatgtcgcagagcaagaagtacaagcggccattaatgcagcaactaacttattacctactgatttaccttatccgcccatttacagcaaagtaaatccggctgatccgccagtgctaaccttagccgtcaccagttctgtattgccgatgacacagctacaggatatggtagaaacgcgaatatcgcagaaaatatcgcaagttaacggcgttggtttagtctctttagccggcggacaacgccctgctgtgcgcgtaaaattgaatgcccaagctgccgcctcttatgggttagatagtgaaacaatccgcgtggctattaataatgccaatgttaactctgccaaaggtagccttgatggccccactcgctcggtaacattatccgccaacgatcaaatgaaatcattagatgattatcgcaaactgattgttagctataaaaatggcgcccccatccgccttgccgatattgccaccattgaacaagccccagaaaataaccagcttggtgcttgggccaataatcaacaagccattattatcaatgtgcaacgccaaccgggtgttaatgttattgaaacaacggataatattcgtaatttattaccggatttagtgtctaatttgcctaagtcggtaaatgttgagatcttaaccgatagaaccacgactattcgggcatcagtgaaagatgtccagtttgaactgggcttggcgattgcacttgtggtcatggttatctatctatttttacgtaatggtgttgccactcttattcctagcattgccgtccccctctccttagtgggtacttttgcggtgatgtatttttgcggtttttctgtcaataacctcaccttaatggcacttaccattgcgacaggctttgtggttgatgacgccattgtggtgatagaaaatatctcccgttatctagagcgaggagataagccgttaaccgcagccttaaaaggggcgggagaaatcggctttactattatctcactgactttttctttaattgccgtactgatccctctgttatttatgggagatattgttggtcgtttatttagagagtttgccattaccttagccgtggcgattttaatttccgcggtagtctctttaaccttaacgccgatgatgtgcgcacgcttacttaaaccagaaagtcaaattaagcacaatcgttttgaaatggcttgtgagcgcttttttgaaaagatgatcgccgtgtatgcggtttggttaaaacgtgtattaaatcatcaatggataacattaggtgttgccctcagtacattagcattaacagttttgctctatctatttatccctaaaggctttttccctttacaagataatgggttactacaaggtacaatagaaacctcacaatccatttcttatcaagcgatggttgaaaaacagcaacaagtggttgagaaactgattgacgatccggctgttgaaaatattgcgagctttgtgggtatcgatggcagtaatgccaccctcaatacaggtcgcttgcaaattaccttaaaacccctcgatcaacgtgattcacgtattgatgaaattattcctcgtttacaagcacgagtcgcgtctattgcaggaattacactctatttacaacccacacaagacttaactattgatacacaagtttcccgtactcaatatcaatttaccttgcaagcaacctcgctcgatgagcttgcctattgggtgcctaaattatcacaggcactacaagagagtccggaacttaccgacatcagcagtgattggcaagctgatgggatgatggcctatatcaatgtagatagagattcagccagtcgcttagggatctcaatgagtgccattgataatgcgctgtataatgcctttggacagcgacttatttcaacgatttacacccaagcaaatcagtatcgtgttgtcttagaacagaatatgcacaatagtgaaggactacaggcactttctgcagttcatttaaccggcaaagagggtgctatggtgccactcttatctattgcctctgtggagcaacgtctcgcgcctttatctatcaatcaccaagagcaatttcctgctaccacattctcatttaatgtcgcgaaagacgcatctcttgaagctgctgttaatgccgttaagcaagcagaagagcaaattgcgatgccaaaagatattacgacacagtttcaaggggctacattagcttttgaaagcgccctttccagcacgctgtggcttatcattgcggccatcgttgctatgtatattgtattaggcgtgttatacgaaagttttattcacccaattactattttatctaccctacctactgcgggtgtcggtgctttattggcactgatggcagccggtaatgagctagatattattgcgattattggcatcattttgttgattggtattgttaagaaaaatgccatcatgatgatcgatttcgcactggccgctgaaagagaacaaggactatctccttacgaagcaatttatcaagcttgtctgctacgttttcgccctattttaatgaccactatggctgcgttattaggtgcattacctttaatgctaagcactggcgtaggggctgaattacgccaaccattaggtgtatgcatggtgggaggcttaattatgagtcaaatactcaccttatttaccacccctgttatctatttgctgtttgataagttatcactttaccttaatcgccataaacgcgttgaacatgataatggagcggtgtca

SEQ ID NO: 32567 - DNA, 3081 bp, Proteus mirabilis
atgaagctgtttgctctatttattcaacgacctgttgctactacactacttagcctagccatttctctttgtggtgcgttaggttttatgttgttacctgtcgcaccactgccacaagttgattatccggtcattaatatttatgcctcattaccgggggcatcacctgaaacgatggcttcttctgttgccactccccttgaacgctccttagggcgtattgcggggattgatgagatgacgtcaagtagtgctttaggtagtaccagtatcacattagtatttgacttaaataaagatattaataccgcagctagagatgtacaggctgcgttaaatgcctcacaaagcctattaccttcaggtatgccaagtcgcccgcgttattacaaatcaaatccttctgatgcaccgattatgatcttaacgctgacctcagagacacaaaataccggtgagctttatgatctcgcatcaacacgcttggcacaaaaaatttcgcaaattgaaggagtaagtgaagtttccgtagggggaggttcattgccggctgtgcgtgttgcactcaatcctgatgcgctatttaatcaaaatgtcagtcttgatgatgtacgcaaagccattagtcaatccaatgtcagaagaccacaaggctttattcataatgatgaaaatcgttggcagatacaaactaacgatgagttaagcaaagctcaagattatcgcccaattattgtgcattataatcaagatgctatcgtgcgtttaagtgatgttgcccaagtgacagactctgtacaaaacgcacgggcggcaggaatgagtggtggtgaaccggctattttactggttattcgccgtgaagcaggcgccaatatcatcgaaactgtcaaccgcattcgtgatgaactccccgaattacgtgagctactccctgccagtgtcaatttaaaggtagctcaagatagaacccccactattcgtgcctcgttagcagaagttgaacgcgcattagcgattgccgtggcactggttattttagtggtattcttatttctacgttcagggcgtgctaccttgatccccgctgttgccgtacccgtttcattaattggtactttttcagccatgtatttatgtggctttagcttaaacaatctatcattaatggcattaacggttgcaaccggctttgtcgtggatgatgcgattgtcgtactcgaaaatatctctcgccatatcgaaaatggcttaaaacctaaacaagccgccctaaaaggggttagcgaagtgggctttacggtactttcaatgagtatttcattggtggcggtatttattcctctcttgttgatggatggccttgtcggacgactttttaaagagtttgccattaccttaaccaccgcgattgggatctctttatttgtctccttaacattaaccccaatgatgtgtgcccatttattaaaaggcataaaacccaaagcacagtcacatttacgcggatttggtaagttaatttttcgcttacaacaaggttacagtgtcacactacaagcggcattacggcataaacgctggatcatggctatttttattaccaccttaggactgaatgcttatttatatatcagtgcgccgaaaaccttttttccagatcaagataccggtcgtttaatgggatttgtacgtgcagaccaaagtatttcattccaatcgatgaaagaaaaaatgacccgttttatgcaggagattaatgcagataaagatgttgatagcgtcacgggatttacggggggaggacgtattaatagtggatttatgtttatttcacttaatccgctctcagagcgcacagatagtgcaaatcaagtgatcaatcgccttcgtatcaaactggctaatgaacccggtgcaacactatttttaatgcctgtacaagatgtacgtgctggaggacgccaagctaatgccagttatcagtttactttactcgctgatgatttaagtgaattacgtaaatgggagccattaatacgtaaagcgttaggcgaattacctgagctggttgatgtcaactcagataaagaagataaaggtgccgaaatggcactcacttatgatcgcgatactatgtcgcaattaggcattaatgtcagtgatgccaataatttattgaataacgcctttgggcagcggcagatctctaccatttatgccccgctaaatcagtataaagtcgtgatggaagtgtctgaacaatatacgcaagatgtttctgcactggataaaatgtatgtgatgaatacacaaggtgaacgtattccattatctgcatttgccagttggtatcccgctaatgcacctttaagtgttaatcaccaagggttgtctgccgcctctaccatcgcttttaatgtgccagagggctataccttatctgatgccattaacgccattgagcgaaccatgacagagttaggtgtacctaacacggtacgaggcacctttgcgggtacagcgcaaatttttcaagaaaccattaagtcacagcttatcttgatcttagcggctattgtcaccgtctatatcgtccttggtgtgctttatgagagctatattcatccattgactattttatccacattgccttctgccggtgttggcgcattattagcactgcgcttgtttgataccccctttagcttaattgctcttattggcattatgctgttaattggtattgtgaagaaaaatgccattattatggtggattttgcgattacggctcaacgagaaggaaaactatccgctcaagaagcgattattcaagccagtttattgcgtttccgccctataattatgaccaccttagccgcgctctttggcgctttacctctgatgttaagtagcggtgatggggcggaattaaggcagccattaggcattaccattgtgggtggcttacttatgagccaattattaaccctatataccactccgattatctatctgttttttgatggtgttcgccaacgttggcaacagcgacgccataacaaaaaagaggcaaatgca

SEQ ID NO: 32568 - DNA, 1377 bp, Proteus mirabilis
atgtttacacccgaattgctctctcctgcaggctcattaaaaaatatgcgctatgcattcgcttatggcgcagacgcggtctatgcaggtcagcctcgctatagtttacgcgtacgtaataatgagtttaatcacgaaaaccttgctaaaggaatacaagaagcgcatgaattaggtaaacgcttctatgttgtggttaacatcgccccccataatgcaaaattaaaaacctttatccgtgacttaaaaccagttattgatatggggcctgatgcgctgattatgtctgatccgggtttgatcatgatggtgcgtgaagctttccctgatatggatatccacctttcagtacaagctaacgccgttaactgggctaccgtaaaattctggcgtcaaatgggcttaactcgcgttattctttctcgtgagctatctattgacgaaattgcagaaattcgtaaacaagtccctgatatggagcttgaagtcttcgttcacggggccttgtgtatggcttattcgggtcgttgcttattatcaggctatatcaataaacgtgatccaaaccaaggtacatgcacaaatgcctgccgttgggaatacaaagttgaagaaggcaaagaagatgaagtggggaatatcgtcgagaagtaccaacctatcccggtaaaaaatgttgagccaacgttaggtgtaggtgcccccactgataaagtgttcttaattgaagaagctaaacgtccgggtgaatatatgacggcgttcgaagatgaacacggtacttatattatgaactcaaaagatctgcgcgctatcgaacacgttgagcagttaactaagatgggtgtacattcactgaaaattgaaggtcgtactaaatctttctattattgcgcacgcacagcacagatgtatcgccgtgctattgatgatgctgttgcaggtaagcctttcgatccgacactgctgacaacgctagaaggtttggcacaccgcggttataccgaaggttttttacgtcgccatacccatgatgcctaccaaacctatgaatacggctattcggtatcagatacacaacagtttgtaggggaatttacaggtaaacgtgttaacggtttagctgaagtggatgttaaaaataaatttatcttaggtgatagcttagagctaatgacaccaacaggaaatattcaattcactttagatgcgttatttaataaaaaacaacagccgacagatgttgctccgggtaacggccatgtggtttatttaccagttcctgacgatgttgatttaaactttgcactgcttattcgtaatctgccaggaacgacaacccgtcaacctcataaaattgatgcggtagaagtgaag

SEQ ID NO: 32569 - DNA, 891 bp, Proteus mirabilis
atgggccaaatcagtttgctgattatcaatggaaaaaactcaggcaatgaggctctgcgacaagcggtttatcaacaacgcaaggaaggtaatgatatccaagtcagagtgacatgggaatcaagtgatattcaacgctttgtgcaagaagcactacatattcaagcgcaaaccattatcgccgcagggggtgatggtacgatcaacaatgtcgcctctgagctggttcgtttagccccctctttgccccccgcgttaggcattatccctttagggactgcaaatgattttgccaccagtgcacaaatcccattagagatggacaaagcgctcagtttagcgattaaaggtcgcgccgttcctgtcgatattattaatgtgaacaaaacacattactttatcaatatggcctcaggtggctttggcaccaagatcaccactgaaacccctgaagcactaaaatccgccttaggtggtgctgcatattttattaatggtttattgcgtattgataccttaaaagcggatcaatgcaccgttgaagctgaaaattttcattggaaaggtgaagctttaattatcggtattggtaatggacgccaagcgggaggtggacaacaactttgccccgaagcactgattaatgacaataaactcaatattacccttgttgaagcccgtgaattgcttccttctctattaaccagtctgttcgatcgtaagaaaaatgacaaaattattgagcgagaaagtgattgggtcactattagtgcggctcatgaaatggtatttaatttagatggtgaaccccttttaggggataaatttgaatttattgtactacctgaagcgatccactgccggttaccgccccaatgtgacttgttatct

SEQ ID NO: 32570 - DNA, 1047 bp, Proteus mirabilis
atgactgatatagtaagtttgttaggtgctgatgctaactcattattggaacatcgctgccaaaccatcccaagcgaaaatctctacctgccaggttctgactttgttgatcgtgtgatgattgataacaatcgccctaataccgtattgcgttctatgcaaaccctgtttaaccatggtcgtttagcaggaacgggttatctttctattttacctgtcgatcagggtgttgaacactctgccgctgcctcatttgccgcgaacccactctattttgatcccaaaaatattgttgagcttgccattgaagccggatgtaactgtgttgcttccacctatggtgttctggcttctgtttctcgtcgttatgcacacaaaatcccatttttggtaaaacttaatcataacgaaacattaagctatccaactcaatacgaccaaacgctgtatgccagtgttgaacaagcctttgaaatgggggctgttgctgtaggtgcgactatctattttggttctccagaaagccgccgccaaatcgaagagatctcgatggcatttgaacgtgcccatgaattaggcatggttaccgtattatgggcatatttacgtaatccagcctttaagaaagatggggttgattaccatgcaagtgctgatttaacaggtcaagctaaccatttagcatcaaccattggtgccgatattgttaaacagaaaatggctgaaaataacggtggctttaaagcgattggttttggtcatactgatgagcgtgtttacactaaactgacgagcgaaaaccccattgatttagtgcgttaccaattagctaactgctatatgggacgtgcaggattaattaactcaggtggagcatcgggtaataacgatcttgctgatgcagtacgtactgcagtcattaataaacgtgctgggggcatggggcttatcttaggtcgtaaagcctttaagaaatccatgaaagacggtgttgctctaattaatgccgtacaagatgtctatttagataaatctgtgactattgct

SEQ ID NO: 32571 - DNA, 279 bp, Proteus mirabilis
atgactatcgatatagaaaataaagcacgaataaattgggcatgtcgccgtggaatgcgtgaactagatatttctatcatgccttttttcgaaaacgagtacgacacactctctgatgacgacaaaaggctctttgttcgtttacttgaatgtgctgatcctgatttatttaattggttgatgaaccacggccgccctgatgatgaagatctttattacatggtaaagttaattcaagagcgtaatagaattcgtatggctgaaattgttaataagtat

SEQ ID NO: 32572 - DNA, 405 bp, Proteus mirabilis
gtgactttatggaaatcacatttaacagtttcttggtttacacagttattttcaactagtgtttacgttatttttgaaatagcattgctgttatatccttggccacctggctttatttatatctgggttcctttgttacttttacttatattaggttggtattttagccaaaaaaatatcaataaaaggaaaggggatttagtgctgcttaatggcaatcgtattcaatggaaatatcatgaatggcagattgcaaaacaaccgtggatcagccgatttggtgcaaaaataacgttagattctatcttaaataataagcaaatcacgctatgggttgcttttgatagtatgccggaaaatgagtggcgaaatttttcacaactgctgatgcaatacccagatatt

SEQ ID NO: 32573 - DNA, 939 bp, Proteus mirabilis
gtgacccagaccaagttatcgacacaaacgacaacagataataaccaagaagataatgacgttatcatagaacaatttctcgatagtatttggctagagcaagggttatctgcgaatacactcagcgcttatcgtttagatttacaggcgttaagccagtggctggtcacacaaaaactcaattggttatcggtgacgacgttagatttacacgcttttcttgccactcgtttggatgagggctataaagcaaccagtgcggcacgactgttaagtaccttacgtcggtttttccaatatctttatcgtgagaaattacgccaagatgatcccagcgctttgctttctacacctaaattacccaaacgtttacccaaagacctaagtgaacagcaagtagaaaatttacttagtgctccttgtattgatgagccaatagaattacgcgacaaagcgatgcttgaggttctttatgcctgtggattacgggtttctgagctagtaggattgtctttatctgatattagcttacggcaaggggtgttacgtgtgataggtaagggcgataaagaacgattagttcctttaggtgaagaagctatttactggttagaacaatatctgcaatatggtagaccagcccttatgcaagggaaaaccgatgatattgtgtttccaagcttaagaggccaaaaaatgacgcgacaaacattttggcatcgtataaaacattacgcggtgatcgccggaattgattcagagaaattatcaccccatgtgttgcggcatgcctttgcaacacatctattaaatcatggagcagacttgcgtgttgtacagatgttattggggcacagtgacctctctacaacacagatttatacccatgttgctacagagcgcttaaaagtgcttcatcagcaacatcacccaagggga

SEQ ID NO: 32574 - DNA, 705 bp, Proteus mirabilis
atgaaaaagaaattactctggttacccattttattcagtatggtgtcaatgccagtgtttgcagataacgctgctattaaagcgcaactggcaaaaatgcagataaaagcagagagcattcaaccgacaccgatagtgggtttaaatgcagtgctttctgataaaggcattttttatattactgatgatgggaaataccttacagcagggccgatttataatattaatggtgaggagcctgtcagtatcgctaatcaagtgatcatgaaaaaaattgattcacttaaaaatgaaatgattgtttataaggctgctaatgaaaaatatgtgatcactgtttttaccgatattagttgcccttattgccaaaaattgcatcaagaagtactagagctaaataaacaaggtgtcacggtacgttatttggcttttcctcgtaacggggtgaaaaataatgtggtcagtcaacagatgaatgccgtatggtgtagcggttttcctaaaaaatcactcgatagtgcgtttaaaggtgacaaaattattgcgattgatgactgtaaaaaaattaatatcaatgagcattttaaacttggcactatgatgggcattcaaggtacgcctgcgattgtattacctgatgcgagtatttatggcggatatatatcggcgactaatctacttgaattattaaataaaaaagagaag

SEQ ID NO: 32575 - DNA, 1233 bp, Proteus mirabilis
atgaaatcatttgatgttgttattgctggtggtggaatggtcgggcttgcattagcctgcggattacatggctgtggattacgtatagcgataatagaaaatcacccagtcaccacgcatttccatccgcaagatgattttgcattacgggtatctgcgattaatactgccagtgagttattactcaagaaattgggggtatgggaaaacttaacggcattacgtacagctccttatcaaggtatggaagtatgggatcaagatagttttggacgtattgcgttttcagcgcaacaagaagggttatctcatcttggcactattattgaaaatcatcttattcgtgaagtgctgtggcaaaaggtcaccagtcatagtgatattacctgttattcccctgctcaaattgaacgcattgtgtggggagaaaatgaagcctttatcagcttaaatgacggtgaaatgttaaccgctaggctggttgttggcgccgatggtgcgaattcttggttgcgtaaaaatgctgatattccactgactttttgggattatgaacatcacgctttagtcgcaaccatacgcacagaacaaccccatgataatgtggcgcgccaagtgtttcatggtgaggggattttagcctttttacctcttgcagatcctcatacttgttctattgtgtggtcgctacctagctcattggctgaagattataagagtgcagataaaacgcgatttgaacgtacgctaggtgttacttttgatatgtgcttaggccagtgtgaattagtcagtgaacgtatgacaattccattaacggggcgctatgcacgtcaatttgccgctccacggttagcgctattaggtgatgccgcgcataccatccaccctttagctggacaaggggttaatcttggctttatggatgttgctgaattaattggtgaaatccgtcgtttaaaagcagaaggtaaagattttggtgagtatctctatttaagacgttttgagcgccgccgtaaacatgccgctgcggtcatgttagcgactatgcaagggttccgcgaattatttgaaggtaataaccctattaaaaagtgggtgcgtgatatcggtctttcgttagcagatagtttaccaggagtaaaaccaaagttacttgaacaggcgatgggactttctgatttaccagaatggctaaagcataaaaattctgtttcagctgaaaaaatc

SEQ ID NO: 32576 - DNA, 1092 bp, Proteus mirabilis
atggcaaaacagactccgttatatgatgagcacgtcgcctgtggtgctcgtatggttgattttcatggttggatgatgccactgcattatggctctcaaattgatgaacaccataatgtgcgtcaagatgcaggtatgtttgatgtatctcacatgacgattgttgatttacatggcccgcaagttaaagactttctacgttatctattagcgaatgatgtcgctaaactcaccgaaaaaggcaaagcactttatactggtatgctaaatgcgtccggtggtgtgattgacgatctgattgtttactactttgatgagactttctatcgtctggtggttaactccgcaacccgcgaaaaagatttagcgtggatcactgagcatgccaaagattatgtcgtcgatattcaagtacgtgatgatttagcattaattgcagtacaaggccctcacgcacaagaaaaagtacagcgtttattaagtgaatcgcatcgccaaatagtggcagcgatgaagcctttctatggcgtacaacttgatgatctcttcgtcgcgacgacaggttataccggtgaagcaggttatgaaatcgccatgccaaaagagcaagctgttgattattggcaaaagttattagcagtgggggttaagcccgcggggttaggtgctcgagacactttacgtttagaagcgggtatggatctttatggtcaagagatggatgaaactattaatcctcttgaggctaatatgggatggacgattgcctggttacccgaagatcgtcaatttattggtagagaagcattagaaaaattacgcgcaacaggcacagataaactggttggtctggtgatgcgagaaaaaggggtgttacgtgcaggtagtgccgtgcactttaccgatgatttaggtgaattaagagaaggcgttattactagtggcacattttcaccgacattgggctttagtattgcattagccagagtacccgcaggtattaaagatagcgcaattgttttattgcgtaatcgtgaaataccggtagaggtggtaaaacctggttttgttcgttcaggtaaagcattggta

SEQ ID NO: 32577 - DNA, 984 bp, Proteus mirabilis
atgactcaaaattctactcagacaaaacgccctcatgccgcaatcaatttaccactcaccttgatctctttagatgattggtcattgataactgcaacaggggctgatagtgaaaaatacttacaaggccaactaacagcggatattgccgcattaccgactacagagcacactttagccgctcattgtgaagctaaagggaaaatgtggagtacattgcgcattttccatcaacaagcaggatttgcttatatattgcggaaaaatgttgctgaaaaacaacttactgagcttaaaaaatacgccgtattttcaaaagtgacttttactgaaaatacagatgcggtgttattaggacttgcggggcaaggcgcggcacaagccttagcggaattcttccctgagatcccccgtaaagccaatgaagtggttaatcaccaaaatagctacttactgcaactcccgttacctacagagcgctttttaattgttacagatgaagagactgccaaaaaactagccacgacattgcccgcagaaaccagtgatagtgaccagtggttagcccttgatatcgaggcgggttatcccattattgatacccctaatatcgaacaattcttaccacaagcgactaacttacaagcattaccattaagtatttgctttaaaaaaggttgctatacaggtcaagaaatggtgtctcgtgccaaattcagaggcgcaaataaacgtgctatgtatctgttatcaggtggcgcagcacaattgccggacattggcggtagcgttgagtggcaattaggtgaagataaatggcgcaaaacgggcacggtattaagtgcggttcgtatggccgataacacgattatcgccgaagtggtgatgaataatgatatggatgctgacagcgtatttcgtgtccaaggtgataccaccagccgcttaacgattaaacctttgccttactctttagaagatgag

SEQ ID NO: 32578 - DNA, 975 bp, Proteus mirabilis
gtgagcaacgaacaatccatccagcgattaagaagactacgccagtcagagaacctgcgcgcgctgtttcaagaaacgacactcagcaaaaatgatctagcactacctattttcgttgaagaaggcttagaggattatcagccgatcaaaagtatgccaggtgtggtacgtattcctgaaaaacgccttgcttatgaaattgagcgtatcgctaaagcgggtatcaaaacggtcatgacctttggtgtctcacaccatcttgatgaaacaggtagcgatgcttggaaaagcgacggtctagtttctcgcatgtctcgtatttgtaaagatgctgtaccagaaatgattgttatgtcagatacttgtttctgtgaatatacttcacacggacactgtggcgttttacatggtgaacatgtcgataatgatgaaactatccataatttaggtctacaggcggttgccgccgcacaagctggtgctgattttattgctccctctgccgcaatggatggtcaagttgccgctattcgtgctgccttagataaagcaggatttaccgataccggtattgtttcctactcaactaaatttgcttctgcattatatggtccattccgtgatgctgctggctctcgcttaattggtgatcgtaaaacatatcaaatgaatccgatgaatcgtcgggaagctatccgcgaatcattgattgatgagcaagaaggtgcggatatgttaatggttaagcctgctggtgcttatttagatattattcgtgatgttcgtgaacgtacactattaccgttagcagcctaccaaattagtggggagtatgcgcaaatcaaatttgctgcattagcgggtgctatcgatgaagatcgcgtggtaatggaaacactaggctccattaaacgcgcaggtgctgatttaattctctcttactttgcgcttgatttagcagaaagaaatctactt

SEQ ID NO: 32579 - DNA, 1665 bp, Proteus mirabilis
atggtctatgactacattattatcggtgctggttcagccggtaacgttcttgctacccgcttgacagaagatcctgatgttactgtgctgctccttgaagctggaggaccggactacaggttcgattttcgcacacaaatgccagcagcattagcttatccgttacagggtagacgctataattgggcttatgaaacagagcctgagccacatatgaataaccgccgcatggagtgcggtcgaggtaaaggattaggaggatcatcactcattaatggtatgtgttacattcgtggtaacgcgatggattttgatgagtgggccaaattacccggccttgaagattggaattatttaaattgcttaccctattttcgtaaagcagaaacccgagatattggggctaatgattatcatggtgatagtgggcctgttagtgtgactacaccgaaaaaggggaataatgttttattccatgcgatggtcgaagccggtgtacaagctggatatcctagaactgatgatctcaatggttatcagcaagaaggatttggccctatggatagaacggtaaccccccatgggcgtcgagccagtacggcacggggttatcttgaccaagctaaatcgcgcaaaaacttaactattgagacacatgctacaaccgatattattgaatttgagggtaaaaaagcaagtggtgtgcgctattttaaaggaacgaataccacgccacagcatgtgaaagcacgtaaagaaatactgctttgtgccggggcgattgcatcaccacaaatcttacaacgctcaggtgtcggccctgaagatgttctcaacgagtttgatatttcgccagtacatgttttaccgggcgtggggcagaatttgcaagatcatctagagatgtatctgcaatatgaatgcaaacaacccgtttcactttatccggcgttaaaatggtataaccaacctaaaattggtgccgagtggttatttaaaggaacgggtattggggcgagcaatcaatttgaagcagggggttttattcgctcaagtgaaaagtttgcttggccaaatattcagtttcactttttaccagtggcgattaattataatggcagtaatgcagtggaagtgcatggttttcaagctcatgtggggtcgatgcgttcacccagtcgcggacgtataaaaataacctcacgagatccacatcagcatccaagcatcttgtttaattacatgtcaacagagcaagattggcaagagtttagggctgctattcgtatcacgagagaaattatggcgcaacctgcattagatccctatcgcggtgaagaaattagtccggggaaagatattcaaacggatgaacagctggatgcttttgtacgtgaacgggcagaaacagcatttcacccttgtggtagttgtaaaatgggaaatgatgaaatggccgtcgtagatggtgccggacgcgttcatggtatagaaagcttaagagttattgatgcttccattatgcccaatataattactggcaatttaaatgcgacaaccattatgattgctgaaaaaatggcagacaaaattaaaggcattaaaccattgccagcaagccaagcagattactatgttgctggacattcacctgccagaagaaat

SEQ ID NO: 32580 - DNA, 1125 bp, Proteus mirabilis
atgtggcataccgtacaaaatatttttaatttaggaataaaagagttacgaagtttatcccgtgataaggcgatgctggcattaattgtgtttgcctttaccgtatcaatatactcatcggctactgtaacaccgggctcattacaccatgcgccgatagcggtggctgatcaggataaatctcaactttcggcccgtattgtcaatagcttttatatgccttactttttaccccctgcagatattacacccgagcagattgatggtttattagatagaggaacttatacttttgcgttagatattccgcctaattttcaacgcgatctactcgcaggacgtaagccagaaattcaagtcaatattgatgcaacacggatgagccaagctttcttaggaaatagctatattcaaaatatcgttatgggagaagcgaaaacttttcttgctaaagagcgcactaacgatccactgcctgtggatttagaagttagaatgagctttaacccaaacttaacacaatcttggtttggctctgttatggcgataatcaataacattaccatgctatctattgtattaaccggggcggcactaatacgagagcgagagcatggcactattgagcatttattagttatgcctgtcacaccatttgagatcatgctgtctaaaatatggtcaatgggattggttgtattgttagcgtcggccatgtctttagtgctagtggttaaatcactgctacatgtgccgatcgaaggctctgttttgttatttatgtgtggggtcgcgttaagtttatttgcaacgacatccattggtattttcttaggcacaatggcgcgctcaatgccacaatttggtttattgatgattatggtattgttgccattaaatatgttgtctggagggatgacctcaagagagagtatgcctcagtttgtacaagatgtgatgcaaactatgccaaccacacattttgtcagccttgcacaagcgatattatatagaggcgcagatttctcgattgtttggcctcaatttatcgttttaattattattggctcagtcttttttgcattggcactgttacgttttagaaaaacgatatctgcaatggct

SEQ ID NO: 32581 - DNA, 2700 bp, Proteus mirabilis
atggaacaagctccgcagtggcaacgcccttctcctgatgatttgctggcattaacgcgagcaccccatcgaggacgattaaagatcttttttggtgcctgtgccggcgtaggtaaaacctacgccatgttacaagaagctcaacgtttacatcagcaaggtattgatgtcttagctggggttgtagaaacccatcagcgccaagaaacggcacaacaacttgagggattaccgttattaccgccattaaaattacattatcgtggtagaaagctctctgcctttaatttagatgcggccttagcaagacatcctgcggtgatcttaatggatgaattggcttttagtaatccacataaatgtcgccatccaaaacgttggcaagatgttgaagagttacttgatgcgggcatcgatgttttaaccaccattaatgtacaacatattgaaagtcttaatgatattgttggtagtattactggcattcgcgttcaagagacgattcctgattatatctttgataatgctgatgaagtggttatggtcgacttaccaccagacgacctacaacagcgcttaaatgaaggcaaagtttatctggcaggacaagcagagcgtgcaatagagcatttttttcgtaaaggtaatttgattgcattacgagagcttgccctaagacggatggcagatcgcgttgattcccaagtaaaagaattccgtgatagccaaggtggtacgcctgtttggcatactactgatagtttaatggtttgtcttggtgctcatggaagaaatgataaattagtgcgtactgccgctcgttatgctgctgcttttggttgccaatggcatgctatttatgttgaaacaccaaaactacatcagataggtgagcataaacgccgtgctattttacattccctcaagttagcacaacacctaggggcaagaacggcgatcctttctgataatcaagcggaaaaagcggtgatccgctatgccagagagcataatttaggcaaggtgattatcggtcaacgcccctatcaaaagtggcaatggttaaaacgttgggtccgtatgcgtttcgcagaaaggttagcgcgttatgcacctgacttgcatgttatcagtgtcgctttaaatgaagaagagccgcgttataaaacaaaaacatttgtgccacaaaatgataaatggcgccaaaatcttaaaggctatctaacagctattggtttatgtctagctattacgctcttttcacgtacttttttgttagcgttagataaggcgaatttagttactctttatttattaggcgttgttcttatcgcgctattttttggtcgtcgcccttctatttttgccgctttaatcaatgtgataagctttgatttgttctttgtacaaccgcatttttcactggctgtattagatatgcagtatttagtgactttttccgtaatgctcattgttgggttagtggtgggtaatttaactgcgggaatgcgttatcaaacccgggttgctcgttatagagaacaacgcactcgtcatttatttgaaatgacccgagagctgagtcgggcactgactttagaagaagtggtacgtactagttatcattttttatcaagtgcttttgatgccaaagtttgtttattaatgcctaatcatcatggtgaattaacgccatacaatgctgaaggtatgggacaacttcccattgatagtggtattgcccgttggtgttgggataaagatcaaatcgcaggtgcaggaacggataccctacctagtgtcccttatcagttgcaccctattagcgcatctcaacaagtattagcgattttagcgattgagccaaataatctacgccaagtgcttattcctgaacaacagcaactcttacagacatttaatggcctaattgccaatgctcttgaacggttacagcaggcggaaatggccgaacaatctcgtattaatatagaacgagaacaattaagaaatgcgctcttagccgccctttctcatgatctaaaaacaccacttaccgtcctgtttggccagtctgaaattcttcttctagacttaagtgctgaaggctctgctcatactgaacaagtcagtcagatccgccaacaaattttgacgacctcccgcttagtcaacaatttactggatatggcacgtattcaatcaggtgggatccaagtcaacttgcagtggcatttactgcaagaaattgctggaagtgcagtacgttcactctcttatttacttgataaacacccattacaaattgatattccagctgatttattactctattgcgatagtctgttaattgagcgcgtgttaactaatttgttagaaaatgcagtcaaatataccgcatcacaaactaaattaggcataaaagctacggttgaagaggatcaaattcatgttgaagtttgggatgaaggcgcaggtattcccactgaacaattgcagcttatttttaataaattttcacgtgcagtaaaagagtccgccattccgggggttgggctgggtcttgctatttgcagtgctattatccacttacatgaaggtaaaatttgggctgaaaataataaaaaaggtggagccagttttcactttgttttacctttaaaatcactaccgaatattgatgagattgaaataaaacag

SEQ ID NO: 32582 - DNA, 2055 bp, Proteus mirabilis
atgaaaaaaacacctctttttaatagaaaaacaatgatgtcagctttcttggatgctatcaaaaaatgcacccctcaagcccaatggcataatccggtgatgtttattgtttatgttggtgcactactcactacgggtatttggtttgccgttttactggggtatctaccaccagataatcattttacttttcaagtcatgttttggttatggataaccctactatttgccaattttgctgaatctttagcagaaagtcgtagtaaagcacaggcggcaagcttacgaggtgcgaaacaacaatctaaagcggtgcgcttacagcatgctgatcttcacgctccccaagaaatcattgattcacttttattacataaaggcgatattgttttggtcaatgctggcgaggtaattccttgtgatggtgaagtgattgaaggtggcgcttctgttgatgaaagtgcgatcaccggtgaatcagctcccgttattcgtgagtcaggtggcgatttttcttctgttactggagggactcgtgtgttatctgactggttgattattcgttgtagtgctgaagcgggtaactctttcctcgatcgtatgattggtatggtggaaggggctaaacgcagaaaaacgccgaatgaaattgcattaactattttattaacggccctaacgctgatctttttattcgcttgtaccacactctatccttttagtgtgtttgccgtgcaattccaagagcatggtgaggttatttctgttgtaacgttaatcgcattattagtttgtctgatccctacaaccatcggcggactactctcttctattggtgtggcaggtatgagccggatgttagacgctaatgtgattgcgacgagtggacgtgcagtagaagccgcaggagacgttgatgttttattactcgataaaacagggacaattactttaggtaatcgccaagcttctcgttttattcctctatcaggaataactgaaaaacaattggcagatgcggcgcaattaagctctttagcagatgaaacacctgagggtcgtagcatcgttatattagccaaacagcgctttaatttacgtgaacgagatttaacttcgatgggagcctcttttgttccattctcagcgatgaccagaatgagtggcgtaaatattggcgagcgtattatacgtaaaggctcggttgatgctattcgtcgccatatcgaagttagtcatagtcattttcccgaagaagtcaacaccatagtcgagcaagtcgcaagagctggtgctacgccattagtcgtcgttgaaaatcaaaatatccttggtgtagttgaacttaaagatatcgtcaaagggggtatcaaagagcgctttgctcaacttcgccaaatgggcattaaaaccgtgatgatcaccggtgataaccatcttactgcggcggccattgctgccgagtccggtgtagatgattttcttgcgcaagccactccagaggctaaactggcgttgatccgtcaatatcaatcagaaggtcgacttgtcgctatgaccggagatggtactaatgatgcgccggctttagcgcaagccgatgttgctgtggccatgaattcaggaacgcaagccgctaaagaagcaggcaatatggttgatttggactcaaatcccaccaaattaattgaagtcgttcatattggtaaacaaatgcttatgacccgtggcgccctaaccacctttagtattgccaatgatatcgcaaaatattttgccattattcccgcagcttttgcggtgacatatccgcaattgaatatgctcaatattatgggattacactccccggcatccgcgatgttatcagccgttatttttaatgctttgatcatcgtctttttgatccctttagcgttgaaaggtgtgcattatcgtcctgtttctgctcattcattattacgccgtaatctctctttatacggaataagtgggttaattgttccttttttaggcattaaactcatcgatatgattttagctattattgggctt

SEQ ID NO: 32583 - DNA, 1722 bp, Proteus mirabilis
atgagtaagcaaacagttgcaacctatattgctaaagtgctccataatgcaggtgtgaaacgtatttggggggtgacgggcgattcattgaatggattaagtgatagcttgcgcaaaatgggtaccattgaatggatgggcacacgccatgaagaagtcgcggcttttgccgccggagcagaagcggctatcaatggtgaattagccgtttgtgccggctcctgtggaccaggtaacttacacttaattaatggactttttgattgtcatcgtaatcatgttcccgtattagcgattgccgctcatattccctctgctgaaattggtagtaattactttcaagaaactcatcctcaagagttatttcgtgaatgtagtcactattgtgaattagtctctaatcccgatcagatcccacaaattctggctatcgctatgcgcaccgctattttgaaaaagggtgttgcggtggtggtattacccggtgatgtagcgttaaaacccgctccagaagatgcccatgaaaattggtatccactacaatcaccactgattatgccgaatcgttttgaaatcgaaaaactgtctgaggcactgaataacgctaaaaatatcaccttaatgtgtggtgccggttgtgctcaagcacatgatgaagtggtgaaactagcacaaaccttaaaagcccctgttgtgcatgcactacgtggtaaagagtatcttgagtggaataatccatgtagcgtgggaatgacgggtcttatcggtttttcatcgggttatcacgcaatggagaatgccgatactttagtgctattaggtactcaattcccttatcgcgctttctatcctgctaaagctaatattattcaaattgaccttaatccaagtagtattggctcacattgccatgtggatatggcttttgttggggatgtcaaagcaacccttaatgcattacaaccgcgattaaaagagaaaacagataccgcacatcttgatgcctcgttaaaacattatgctaaagcgcgcaaagatttagatgcattggctcaacctagtgagcgtgagttgatccaccctcagtatttagcacgtcgattaagtgaattagccaacgatgatgcggtatttacctgtgatgttggcacgccaacagtttgggcagcacgttacgtgaaaatgaatggtaaacgtcgtttaattggttcatttaaccatggctcaatggcgaatgcgatggcgcaagctattggtattcaagcactggacagaaaacgtcaagttgtggcgatgtgcggtgacggtggttttaccatgttaatgggtgatttcatctcattggctcaaatgaacttaccggtgaaagtggtgatttttaataacagcgtattaggttttgtggcgatggaaatgaaagcggggggctatttgactgatggcaccgatttacataatcctgattttgccgctattgccaatgcggcgggaattaaaggtattcgcgttgagaaaggcgaagatcttgatgaagcattaaaaacagcctttgaacatgatggccctgttattgtggatgtggtaaccgcaaaacaagagctttccatgcctccggaaattaaatttgagcaggccaaaggttttagcttgtatatgatgaaagcgattattaatggtcgtggcgatgaaatagtgcaattagcgaaaaccaactggttgcgc

SEQ ID NO: 32584 - DNA, 1380 bp, Proteus mirabilis
atggcactttggggtggacgttttagtcagcaagctgatcaacggtttaaacaattcaatgattcactgcggtttgactatcgactcgcacaacaagatatctttggttcagtagcttggtctaaagcgttagtcacagtaggtgtcttatcgcaggatgaacaagctcaacttgaacaggcactttatgagctgtctgaggaagtaacagctaatccccattctattttacaaagtgatgcggaagatattcatagttgggtagagagtaaactgattgccaaagtgggtgatttaggtaagaagttgcacactggacgtagccgtaatgatcaggtcgcgacagatttaaaattgtggtgtaaagaagaagtcgcccacttacgtcaggctattattgaattacaaaaggcgttagtggtaaccgctgagcaaaatcaacatgctgtgatgcccggttatactcatttacaacgtgctcaacccgtcacttttgcgcattggtgtttagcttataaagagatgttagcaagagatgagagtcgtttagcggatgcattaacgcgtttagatgtaagtccactgggtagtggcgctttggcgggtaccgcttatgatattgatcgtgaacaattagctcaatggttgggttttgccagtgcaacaaacaatagtttagatagcgtatcagatagagatcatgtgttagagctattatctgcggccgctattggtatggtgcatctttctcgttttgctgaagatttgattttctttaatagtggggaagcaggttttattgagctttcagataaagtcacttctggctcttcattaatgccacagaagaaaaatcctgatgcattagaacttattcgtggtaagtgcgggcgtgtacaaggggcattaaccgcaatgatgatgactctaaaagggttgcctcttgcttataataaagatatgcaagaagacaaagaagggctgtttgatgccgttgatacttggtctgattgtttgcatatggcaacattagtgcttgatgggttgcaggttcgccgccctcgttgtgaagaggccgcaaaacaaggttatgccaatgcgacagagcttgctgattatttagtcgcaaaaggggtgccatttcgccaagctcaccatattgtcggtgaagttgttgttagtgcaattgagcaaggtaaagcgcttgaagagttggcgctatctgaattacagaagtttagtagcaaaattaccgttgaagtttacgagatcctttcattgcaatcttgtttagataaacgattagcaaaaggtggggtatctcaacagcaggtttcttatgccattactgaggccaaaaaacagcttaatatggatgag

SEQ ID NO: 32585 - DNA, 2748 bp, Proteus mirabilis
atgacagatgaaacagtaaaatcacttgcagaagagattcagacaccggttgaacgtttggtacagcagtttgctgatgccggtattaagaaaaccgtctctgattctgtctcccaaaaagagaaagaaaccttgctggcttggttgaaccgtgataaagagtcaaccagccaaccagaaaaattaacgttacagcgcaaagtgcgtagtacgttaagtgttcctggtacaggtggcaaaaataaatcagtagccatcgaagtccgcaaaaaacgcacttatgtgaaccgtgatgcagttgaaaaagcacaagcggcagagcaagctcagcgtgaagcggaagaaaaggcgcgtcgcgaagcagaagaaaaagcacagcgcgaagcacaagagaaagcacagcgcgaagctgaagaaaaagcaaaacgtgaagctgaagaagccaagaaaaaggctgaagaaaaggcaaaacgtgaagctgaagaagcaaaacgtgaagcagcggaattagctaagcgcgaagcagcggaaaaagacaaagtgaaacaaaacgagaaaccaaaagctgataaggctgatcaggaaaaagcacgtcgcatagccgaacaggctgaactgaaacgtaaaacagaagaagctcagcgtcgtaaagctgaagaagaagctcgcattgcagcagaaaaagcgcgtcgcttagcggaagaaaatgctgaaaaatggacttcagatacgtcatctgaaacagaaggtactgactatcatgtgacgacatctcgctatgcgcgtgatgcagaagatgaaagtgatgctgaggttgaaggtggccgtggccgtggtcgtgcagcaaaagcccctcgtccaaagaaaaataaccgtcactctgaaaaagcagatcgtgaagaagctcgcgctgctggccgttctaacaagaaaggcaaaggacgtaaaaacagcacattacagcaaggcttcaataagccagcagctgctgtaaaccgcgatgttgtcattggtgagactatttcagttgctgatttagcaaacaaaatggcagtgaaaggttctgaagtcattaaaacaatgatgaaaatgggtgcaatggcaaccatcaatcaagttttagaccaagaaacggcacaactggttgcggaagaaatgggtcacaaagttatcttacgtcgtgaaaacgagttagaagaacaagtgatgaacgaccgtgatactagcgatgaaatggctgtatctcgtgcgcctgtggtgactattatgggtcacgttgaccatggtaaaacctctttactcgactacattcgttcaacgaaagtggcttcaggtgaagcaggtggtattactcagcatatcggtgcttatcacgttaaaaccgacaaaggtgaaattaccttcctagatactccaggtcacgccgcatttacttcaatgcgtgcccgtggtgctcaggtaacggatatcgttgttctggttgttgctgctgatgatggtgtgatgccacaaactatcgaagctatccaacacgccaaagcagcaaatgtgcctgttgttgttgccgtgaacaaaattgataaaccagaagctgatcctgatcgtgttaaaactgagctgtctcaatatggcattctgccagaagattggggtggtgagactcagtttatccatgtgtcagcaaaacaaggcttaggtattgacgagttgctggatgctatcttattacaagcggaagttcttgaactgaaagcagtaaaagagggtatggcaagcggtgttgttatcgaatcttacctcgataaaggccgtggtcctgttgcgactatccttgttcgtgaaggtaccttgaataaaggtgatatcgttctgtgtggctttgaatacggtcgtattcgtgcaatgcgtaacgaattaggtaaagaagtacaatctgccggcccatcaatgcctgttgagattttaggtctgtctaatgtaccttctgcgggtgatgaagcaaccgttgttcgtgatgagaaaaaagcgcgtgaagttgccttatatcgtcaaggtaaattccgtgaagtgaaactggctcgtcaacagaaatctaaactggaaaacatgtttgctaacatggaagaaggtaaagtttctgaactgaacatcgtactgaaaacggatgttcaaggaacttgtgaagccatcactgatgcattagttaaactttctacagatgaagttaaactgaaaattatcggttctggcgtgggtggtatcactgaaacagatgcgactttagcggctgcttctgatgctatcattcttggtttcaacgttcgtgctgatgcttctgctcgtcgtattatcgaacaagaaagtgttgatttacgttactactccgttatctatagcttgattgatgaaattaaatcagcaatgagcggtatgttagagcctgaatacaaacaagaaatcatgggtcttgctgaggttcgtgatgtgtttaaatcacctaaattcggcgctatcgcgggttgtatggtggttgaaggtaacattaaacgtaacaatcctattcgcgtattacgtgataacgtggttatttacgaaggtgagcttgaatcactgcgtcgctttaaagatgacgtcaacgaagtccgtaatggtatggaatgtggtatcggtgtgaaaaactacaacgatgtccgtgttggcgatatgattgaagtgttccaagttatcgaaattaaacgttctatcgat

SEQ ID NO: 32586 - DNA, 1245 bp, Proteus mirabilis
atgaataaatggggaaaattatgttttcttattttgggtggtgggactatattcaaactatccagcatgaaagatgtattttatgtgccaatgcaacaagattggggattatctaacacccaaattggttttggctttactatttatgccattattcaaacaatcggattattttcatcattgtatattgccgatcgcttctctaagaaaattttattaccagcgggcttaattggggtaggtttatgtggtgcttatttaagcacactgcctccttttacgggttatttaattgcatttggtgcaatggcatttttcggtgaggttgtttattggcctgttttactaaaatcggtacgtttattaggaaataaagaagaacaaggacgtatgtttggttttctagaagctgggcgaggggttgttgatgttctagtagcttcgggagctctttatatatttgttttatttggtgaaggtaaaacaggtatgcaagcaggattaatttattatacgcttgctacaataatagtaggtataattacatattttattgtggataatgacgataagaaggaaacctcctcagcaagtgaagctaatcgccaagttttggaagggattaaaaatgtcgtaaaatgtcctaacttatggttagcatcaatgagtatcttctttgtttattctgcttactgtgggttaacttattttattccttttttaaaagatatttacgcactaccaatagcccttatcggtgcctatggcattattaatcaatatgcactaaaaatgataggtggtccattaggcggatttttagctgacaaagttgcaaaatcgccaacaatatatctgaaatggacatttttattatctgcgattgcaatggctattttcattatgttgcctcatgactcaatgaatgtctatttaggtatgactgcaacattaggtttcggtgcaatcattttctcgcaaagagctattttctttgcaccaatggatgaaattggaacaccaagacaatatgcaggttcagcgatggcgtttgggtgtattattggttatatgccttccatgtttgcttatgctctctatgggtcattattagataattttgagggcattcaaggatataactatgtatttagtattatggtcacttttagtttgcttggttttatttgtgcaaccatattagctaagcgtattaaaatgataaataacactttaaatatagct

SEQ ID NO: 32587 - DNA, 1506 bp, Proteus mirabilis
atgaacaaagagattctggctgttgtggaagcggtctctaacgaaaaatctcttcctcgtgagaagattttcgaagcactggaaactgcattagcgacagcgactaagaaaaaatatgagcaagagattgatgtacgagtttgcattgatcgtaaaacgggggattttgatactttccgtcgttggcttgtggttgaagaagttactcagcctactcgtgaaatcacacttgaagcggctaaatacgaagagcctgaaattgaactaggcggcttcattgaagaccaaattgagtctgttactttcgaccgtattaccacccagaccgcaaaacaagtgatagtacaaaaagtacgtgaagctgaaagagcgatggttgttgatcaattccgcgaacaattaggcgaaattatcacgggcgttgtgaaaaaagtaaaccgcgataacatcaccctagatttaggaaataacgcagaagccgttatcttacgtgaagatatgctaccgcgtgaaaatttccgcccaggtgaccgtgtacgtggtgtcttatacgatgttcgtacagaaactcgtggtgcacaacttttcgtaacacgttctcgtcctgaaatgctgatcgaattattccgcattgaagtacctgaaattggcgaagagatcattgagattaaagctgcagcacgtgatccaggttctcgtgccaaaatcgctgtaaaaaccaacgataaacgcatcgaccctgtgggtgcttgtgttggtatgcgtggtgcacgtgtacaagccgtttccagtgaactgggcggtgaacgaattgatattgttctgtgggatgataatcctgcacaattcgtgattaatgcaatggctccggcagatgttgcttctattgttgtcgatgaagacaaatgtacaatggacgtcgctgttgaaagcagtaatcttgcccaagcgattggccgtaatggtcaaaatgttcgcttagcagcacaattactgaaaaaacatcgtggtgatgacaaatgggaactgaatgtcatgactgcagatgaactgaatgctaagcatcaggcagaagcaaacgcagccattgaaatatttactaagcatctcgacattgatgaagacttcgcaactgttttagttgaagaaggtttctctacccttgaagagttagtttatgtgccgattgacgaactgttagctatcgacggtcttgatgaagaaacagttgaagcattacgtgaaagagcaaaagcggcattaacaacgattgaactagctcaaaaagaaagcctaggcgataaccagccagctgaggacttattagctctcgaaggcatggaacgttctttagcatttgatctagctgcccgtggtatctgcacactggaagatcttgccgaacagggtatcgacgacctaactgatattgacggtttaaatagtgagcgcgcaggcgaactcattatggctgctcgtaatatctgctggtttgggaatgatgcg

SEQ ID NO: 32588 - DNA, 1833 bp, Proteus mirabilis
atgactactgaaaccgatatgacttttgctgatctaggtttatcagcacctattttgactgcactgaatgatttaggctacgagaagccttctccaattcagcaacaatgtattcctttccttttagatggcaatgatgttctaggtatggcacaaaccggtagtggtaaaaccgctgcgtttagcttaccgttattacacaatctagatgaatcattaaaagcaccacaaattttagtgttagcaccaacccgtgaacttgcggttcaggttgccgaagccattgaagatttttctaaacatttaccaaaagtgaatgtcgttgctctgtatggcggtcaacgctatgacgttcaactacgtgcattacgccaagggccacaagttgttgtgggtacaccgggtcgtttattagatcacttaaaccgtggcaccttagatttatctaaactaaaaggtttagtattagatgaagctgatgaaatgttacgtatgggctttattgaagatgttgagaatatcttaagtaagatcccagcagagcaccagaccgcattattctctgcgacgatgccggaagctatccgtcgtattacacgtcgctttatgaatgatccaaaagaagtacgtattcaaagcagtgtaactacacgcccagatattagccaaagctattggatgacttatggtgcacgtaaaaatgaagcattaatccgtttcttagaagcagaagatttcgatgcagctattattttcgttcgtacaaaaaatgcgaccttagaagtagcagaaaccttagagcgtaatggctataacagtgcggcattgaatggtgacatgaatcagtctctgcgtgagcaaacattagagcgtctgaaaaacggccgtttagatatccttatcgcaacggatgttgctgcgcgtggtctggatgttgaccgtatcagcttggttgtcaactatgatatccctatggattcagagtcttatgtacaccgtattggccgtactggccgtgctggtcgtgcgggtcgtgcaattctatttgttgataatcgtgagcgccgtttactgcgcaatatcgagcgcacgatgaagatgtctattcctgaagttgaattaccaaacgcagagctgattagtcagcgtcgtcaggaaaaatttgctcagcaaatcgctcaacagttagaaacaagtaaccttgaccaatatcgtgcattgttaccaaaattagcgccacaaggtgaagaagcgttagatatggaaacattggcggcagtattactgaaaatggctcaaggtgagcgtgcacttattctgccacctgatccagtacgtcgtcctcgtcgtgaatttaacgatcgtgacgatcgccgtaacgatcgcgaacgttctccacgtcgtgagcgccgtgatgcgggtgaaatggatctttatcgtattgaagtgggtcgtgatgatggggttgaggttcgtcatattgttggtgctattgccaacgaaggcgatatcagtagccgttatattggtaatatcaaattatatggttctcactcaaccattgagttaccaaaagggatgccaggcgatttattaagccacttcactcgtactcgcattatgaataaaccattgaatatgcagttagtgggtgatgcacaaccttaccgtgagcgccgtaatagcagccgtcgtgatggtcagccacaaggtggtcgtcgctttagtaaaggcgatcaaccaccacgccgtggtaatggcgagcgtggtaacttccgtggtcgcggtaataacgaaaacgcaccacgtcgccgtagtagctctcataatcaa

SEQ ID NO: 32589 - DNA, 2127 bp, Proteus mirabilis
ttgctgaatcctacagttcgtaaatttcaatacggtcaacataccgttacgttagaaacgggcatgatggctcgccaagcaacggctgctgtaatggttgacatggacggcactgctgtttttgttaccgttgttgctaagaaaaaagtgaaagaaggacaagacttcttcccactcaccgttaactatcaagagcgttcatacgcagctggccgtattccaggaagtttcttccgtcgtgaaggtcgtcctggcgaaggtgaaactttaatcgcgcgtcttatcgaccgccctttacgcccactattcccagaagggttcttaaacgaaatccaagtggttgcgactgtggtttctgttaacccacaagttaacccagatatcgttgctatgattggtgcttctgcagcactgtcattatcaggtgtacctttcaatggtcctatcggtggtgctcgtgttggctttattgatggtcaatatgtactgaacccaaccgttgatgaactgaaaattagtaaattagacttagtggttgcaggtactgcgggtgcggtactgatggttgaatcagaagctgatttattatcagaagaacaaatgttaggtgcagtggtatttggtcatgaacaacaacaagttgtgattgaaaatatcaatgcattagttgccgaagtcggtaaagaaaaatgggattgggcaccagagcctattaaccaatctttacatgatcgtattgctcaattagcacaaactcgtattggtgatgcgtatcgtattactgaaaaacaagagcgttatgagcaaatcgatgctattcgtgatgaagtgatcagcacattattagcagaagatgagtctttagacgaaggcgaaatcattgaaattttctctggtttagagaagaaaattgttcgtgctcgtgtattagcgggtgaacctcgtatcgatggtcgtgaaaaagacatggtacgtgctttagatattcgtacaggtttattaccacgtacacatggctctgcgctatttactcgtggcgaaactcaagcattagtaacagctactttaggtactgcacgtgatgcacaaaccattgatgacatcatgggtgagcataccgataccttcttactgcactacaacttccctccatattctgtcggtgaaacaggtatgatgggttcgccaaaacgtcgtgaaattggtcatggtcgtttagcaaaacgtggtgtattagccgttatgccaacgattgaagaattcccatacacagtacgtgtagtgtctgaaattacagaatccaatggttcatcttcaatggcatctgtttgtggtgcttctttagcactgatggatgcgggtgtaccaattaaagaatctgttgctggtattgcaatgggtctggtaaaagaaggtgaaaacttcgttgttctttctgatattttaggtgatgaagaccatttaggtgatatggactttaaagttgcgggtagccgtaacggagtcagtgcattacaaatggatatcaaaatcgaaggtatcactcgtgaaattatgcaagttgcgttaaatcaagcgaaaagcgcacgtctgcatattttaggggtaatggaaagtgcaattagccagccgcgtgcagaaatttctgagtttgcaccacgtattcacactatcaaaatcaatgctgataagatcaaagatgttatcggtaagggtggttcggttatccgtgcattaacggaagaaactgggaccactatcgaaatcgaagatgatggtacagtgaaaattgcagctactagtggcgaacaagcaaaacaagctatcgctcgtatcgaagagatcacggcagaagtcgaagttggccgtatctataacggtaaagtaacacgtatcgttgatttcggtgcatttgttgctatcggtggtggtaaagaaggtctggtgcatatttctcaaatcgcagacaaacgcgttgagaaagtaagtgattacctgactatgggtcaagaagttccagtgaaagtactggaaattgaccgccaaggccgtatccgcttaagcatgaaagaggctcaagcaacccagcaggaagcagctgaaacttcttctgaagatcctgcaaat

SEQ ID NO: 32590 - DNA, 267 bp, Proteus mirabilis
atgtctctaagtactgaagcgaaagcaaagatcgttgctgaattcggtcgtgatgctaacgatactggctcaagcgaagttcagatcgcactgctgactgcagaaatcaaccacctgcaaggtcacttttcagagcacaaaaaagatcaccacagccgtcgtggtctgctgcgtaaagtttccagccgtcgtaatctgctggactacctgaaacgtaaagatgtagctcgttatactgcactgattgaacgtttaggtctgcgtcgc

SEQ ID NO: 32591 - DNA, 954 bp, Proteus mirabilis
atggggcgtcgtcgtaaagggcgtgagattaacggcgtattattgcttgataagcctcaagatatttcatcgaatgacgctttgcaaaaagtacgccgcatgtttaatgcaagcaaagcggggcataccggcgctttagatcctttagcgacaggtatgcttcctatctgtttaggtgaagcgacaaagttttcacagtttttattggattcagataaacgctatcgagtgattgccaaattaggtgaaagaacagatacctctgatgctcatggacaagtgatccagcaacgacctgtacagtttaaccagcaagcgctcgatgctgcgttagagagttttcgtggtgaaacattgcaaattccttcaatgtattcagcccttaagcatcaaggtaaaccactttatgaatatgcaagacaaggtattgaagttgagcgagaagcaagacccattaccgtgtatgaattgcaatttattcgctgggaagacgatgaattagaactagaaattcattgttctaaaggtacctatattcgcactatcattgatgatctgggtgagaaattaaactgtggtgcccatgtgattttcttacgtcgtttagaagtcgcagattatccgaaagagcgtatggtgacgcttgagcaattgcgtgcaatcattgatgatgctcagcaacaagatgagtcaccatttcctgcgttagatgccttattattgcctatggatactgcggttgcacatttccctgtggtgcatttaaccgccattatggcgggttacttaaaactggggcaaccggttcgggtaaatcacaccttggatgaaggggaatgggtcagagtcaccgaaggcgatgagaaaaaatttattggccttgcgatcatcaaagatggtctagttgcaccgaaaagattagtcgtggattatcacgcactcaataaccctgaa

SEQ ID NO: 32592 - DNA, 3669 bp, Proteus mirabilis
atgataactcagcagcttacgcaagcattagccaaacggatcttagtccttgatggcgcaatgggaaccatgatccagcaatatcagctggcagaagaagattaccgaggtgaacgttttgcccattggcaatgtgatgttaaagggaataatgaccttttagtcttgacgcagccgcagatcattactgaaattcataatgcttattttgaagccggtgcagatatcgtggaaacaaacacctttaatgcaacctctattgccatggctgattatcagatggaagggttatgtgcagaattgaatgaagaggctgctaaacttgccagagcctgtgctgataaatggagtgcattaacgccagataaaccacgttatgttgcaggggtattagggccgaccaatagaacagcatccatttctcctgatgttaacgatcccgcgtttcgtaatatctcatttgatacattggtgatggcttatcgagaggcgatctgcggactcattaaaggaggggtggatttaattatggtggaaaccatttttgacaccctaaatgctaaagcggctatttttgcgattaaatgtgagtttgataatcttaatattgaattaccggtgatgatctcagggactatcactgatgcgtcaggtagaacattaacagggcaaaccacagaagccttttatcactcactacgtcatgccgacgcgttatcatttggtttaaattgtgcgctagggccaaaagaattacgccaatatattcaaactctctcccaaatatcagaaacttatgtcagtgctcaccctaatgctggcttacctaatgcctttggcggatatgatttagatgccaatgagatggcggaacaaatcaaggagtgggcgcaagctgggtttcttaatattgtcggtggttgttgtggcacaacccctgcccatattcaggctattgctcaagcggttgatggcatagcacctagaacattacctgtcattaaaaaagcctgtcgactctcaggtcttgagcctttggtcattgatgataattcgctgttcgtcaatgtgggggaacgaacgaatgtgacaggttcggctaaatttaaacgtttaataaaagaaggtaattaccaagaagcccttgatgttgctcgtcagcaagttgaaaacggtgctcaaatcatcgatatcaatatggatgaaggcatgttagatgcgatagaagcaatgacacgttttcttaatcttattgcgggtgaacccgatattgccaaagtcccgattatgattgactcgtcaaaatggcaagttattgaggaaggattgaaatgtattcagggtaaaggaatagtcaattcgatttcgatgaaagagggggaagccctttttattgagcatgcaaaattagttcgtaagtatggtgctgcagttgttgtgatggcatttgatgaaatagggcaagcagatactcgagagcgaaaaatagaaatttgtcggcgtgcgtatcatctattaactgaaaaagccggatttccaccagaagatattatttttgatcctaatatttttgctgtagcaacgggtattgctgaacataataattatgcggttgattttatagaagtttgtgcggatattaaatctcaactgccttatgctttaatttctggcggtgtttctaatgtgtcattctcttttcggggcaatgatcccgttcgggaagcgatccactccgtttttctctattacgctgtaaaaaatggtatggatatggggattgtcaatgctgggcaactcgctatttatgactcattaccggatgaactacgtaatgcggtagaggatgttattttaaatcgccatgcagaaagtactgataatttactggcactcgcagagcgttatcgtggtactaaaagtgaggaacagcactctacgcttgcgcaatggcggcaatgggaggtcgaaaagcgcctagagtacgcgttagtgaaagggatcaccgaatttatcattgaagataccgaagcgtgccgccaacaagcttcgagtcctatcgaagtgatagaagggccattaatgaatggcatgaacactgtgggcgatctgtttggtgaaggtaaaatgtttttaccccaagtagtaaaatcggcacgggtgatgaaacaggccgtagcttaccttgaaccttatattcaagcgacaaaaaaagcaggcagctcggcaggaaaagtgttactggcgacagtaaagggagatgttcacgacattggcaaaaatattgttggagtggtgttgcagtgtaataactatgaaattatcgatctgggagtcatggtaccttgcgataaaatcttgcaaacagccattgatgaacatgttgatattattggattgtctggattgatcaccccatcactggatgagatggtgaatgttgctaaagagatggaaagacgcggtttttctcttcctttaatgattggtggtgcgacaacatcgaaagcgcacacggcagtaaaaattgagcctaattacagccacccaaccgtttatgtgcagaatgcgtcaaggacggtcggggtggtcgctgcattattatcggccacacaaaaggctgattttgtcgctaaaacacgccgtgaatatgaagtggtacgtcagcagtatgcgagaaaaaaaccgcgtacgcctcccgtttccttagcgaaagctcgtgccaatgcattgcagcttgactggcaacactatacgccacctaagccgaaccaattaggggtacaacaagttacagccaatattgaaactttacgtgagtatatcgactggacgcctttctttatgacttggtcattggcggggaaatatccacgtatattagaagatgaggttgtcggagaagaggtaagacgcgtttttgcagatgcgaatgccatgttggataaactcagccgtgaaaaattactgacaccgaaaggtatcgttggtttattccctgctaatcgccttggtgatgacattattatttaccaagatgaaacgcgacagcatgagttattacgttgttgccatttacgccaacaaacagaaaaaaaagagtaccctaactattgcttagcagactttattgcccctgtggatagtggtcttgctgactattttggtgcttttgcagttaccggcggtctagaagaagatgcactcgctaatgggtatgataatgctcatgatgattacaataaaattatggtaaaagcgctatccgatcgtcttgcagaagcttttgccgaatatttgcatcaacaagtgagaaccaagatttggggttacagtcctgacgaagcgctctctaatgacgagttgattagagaaaaatatcaaggaacacgacctgcaccgggatatccggcttgcccagagcacacagaaaaagcaaaaatttggcaactgttaaatgtagaaaatcgcattggtatgaagcttactgatgcttacgcgatgtggccgggggcttcggtatcgggttggtattttagtcatcctgaaagtaaatattttgccgtcgctcaaattcaaaaagatcaggtagaagattacgccaaacgtcgtggtatgagtgtgagtgaagttgagcgttggttagcccctaatttaggttatgagcct

SEQ ID NO: 32593 - DNA, 834 bp, Proteus mirabilis
atgaccgtctcccctaccaataaaaaagctcgtaagccaaaaacacccgcaactcaaagtactgcacaaggtggccccgttcagtcattaagccgtggcttaacattattggaatatatttccgaatctccaggcggtattgctttaactgatttagcttttcaagcaggactacccaattccactactcaccgcttacttactactttgcaacaacatggttttgtacgccaagtaggtgatttaggtttatgggtagtaggcactcatgcctttattgtcggtagtagttttctgcaaacccgtaacctactggttatggtgcaccctatattgcgtcaattaatggaagattcaggtgaaaccgttaatttggctattcttgatcaagttgaatttgatgcggtgattgtcgaccaagtacaatgtaatgcattaatgagaatgtctgccccaattggcggcaagttgccaatgcatgcatctggtgcaggtaaagcatttctatccactttaccggaaaataagttactcccccttttacagaaaaaaggtctgatggcctataccccttataccaaaaccttaccttccgcattaaaagagaatttagaacaagctcgtaaacaaggcttctcttttgatgatgaagagcatgcattaggtttacgttgtattggcgcttgtatctatgatgaacaccaccagccttttgccgctatttcactctctggccccgtatctagaatgacagattcacgcattacggaattaggtgcactggtgataaaagcggctaagcagatcagccgtgaatatggtggtgtaaaaagt

SEQ ID NO: 32594 - DNA, 1305 bp, Proteus mirabilis
atgtctatgagtagatcagagcagattgcccaattagaaaaagagtgggaacaacctcgctggaaagggatcaaacgtccttatagcgcagaagatgtcattaaattacgaggttccgttaaccctgaacataccttagcaagacgtggtgcgcaacggctttggtcatcattaaatggtaagtcgaagaagggatatgtcaatgcattaggtgctttaacaggagggcaagcattacagcaagctaaagcgggattagaagccatttatctatctggttggcaagtggcggctgatgcgaatactgctgccagtatgtaccctgatcaatctttatacccggtggactctgtacccaatgttgttcagcgtattaataatacgtttagacgagctgatcaaattcagtggtcaaatggtatcggccctcagcataaagattatattgattttttccttcctattgttgctgatgcggaagcgggttttggtggtgtacttaacgcatttgaattaatgaaagcaatgattgaggcgggtgcagcaggcgttcactttgaagatcagttagccgcagtgaaaaaatgcggtcatatgggcggaaaagtcttagtacctacgcaagaggctgtgcaaaagctggtggcagcacgtttagcggcagatgtttctgatgttcctaccttattggttgccagaactgatgcggatgcggctgatctcttaacttcagattgcgatccttacgatagttcatttttaactggtgagcgtaccgctgaaggttttttctgtactcatgcaggaattgatcaagccattagtcgagggcttgcttatgccccttatgccgatttggtttggtgcgagacttccacccctgatctgaaaatggcggctaaatttgccgaagcgatccatgataaatatcccggtaaaatgttagcgtataactgctctccatcttttaactggaaaaagaatcttgacgatagcacgatcgcccatttccaagatgagctttctgcgatggggtataaattccagtttatcactttagcgggtattcatagtatgtggttcaatatgttcgatttagcgcatgattacgctaaaggtgaaggtatgaaacactatgttgaaaaggtacaagaaaaagaatttgctgcactatcgaaaggctacaccttctcatctcatcaacaagaagtgggcaccggctattttgataaagtgacgacgattattcaaggtggtatgtcatctgttacggcattaactggctctactgaagagcaacaattc

SEQ ID NO: 32595 - DNA, 1002 bp, Proteus mirabilis
atgacgatgccaacagctctttgtcctaatcgtatgcaagttcactctatccatcaggaaaccccggaagtgtggacactgaatttaattaaccatgatttttatcgctataaacccggccaatttgcactagtcagtattaataatagcgatgaaacgatgcgagcttatacgctctcgtcttctccgggattaagtccttttgtctctttaacggttcgtcgtatcgacaatggggtggggtcaacgtggttaacatctcaagttaagccgggtgattatctctggctatcagatgcacaaggggagttcacctgtgcagatagagaaggaacgcgttatttaatgctcgctgcggggtgcggtgtgacccctattatgtcgatgacgcgttggttgttaaataatcaacctaaagcggatatcacggtcatttttaatattcgcgaacagagccaatttatttttgaaaaagagtggttagagttggctaatgcttatccctataatctcaattttattatgatgcctaagttgccggatgataagggaatttttagtggacgtatttctcaagaaaaactagccgctttagtgcctgatattgccagtcgtactgttatgtgttgtgggcctaatagttatatggaagatactgcgcgttttgccaaaaatcttggtgtttgtgcagagaatatttttatggaacgttttggtgatgagccaatgtgtgttgatgaagcacaacaacttactatgactattcgtcatccgttaaagcaaattaacgtaccggtggggatgacattattaacagcgatggaagaaaacagtgttcctgttttggctgcttgtcgtgctggagtgtgtggtagctgtaaaacacgcattgtgaaaggtgattatgaggtcaccagcaccagtactttaactgctgatgagatagcacaaggttatgttttagcctgtagttgtcgattaacaggtgatgttgaactagcc

SEQ ID NO: 32596 - DNA, 1110 bp, Proteus mirabilis
atgtctttcttattgatcttgaatagtctttttattatttactcgatattactttctcgtggtgtttatcttgattgggaaatacacggttttgctgattggctaaaatcgttaggtatattgaaattacttgatattcctaaagtgatgttagcgagtgcacttattttgctctctttctttatgtatatgggggcgcggattgcgtggtgcgtttcattaatattattagtgacgatcgtttttttagatgtcgcggtttatcaccaagctggtactcaagcctatacttcattagcattagccattgtattggttatcagccggcgtgcttttcctcatcatagtttaaccagtgccggttttgttgcttttatctgtacgatttcgctactgtgtttctctatgttaggcagcctctatattggtgatgaatttaaaccacatatcacaacgttaatggatgctttttacttttccattgtctgtatgacaacactcggttttggcgatatcgttcctatctcaagtaatgcgagaatgtttaccctaacagtggttattttggggatcactgtttttacgacttctattgtttatgtgatgggatttttggctcgtggtactcgcgatattgtgaagaaaaggatcgctaaaatgcatgatcattttattattattggctcttcaatgttggcagcacaattagagaaagggcttagagagcaaggtaaaccggttattgcgatttgttcggataaaaagcaagccatgtatgataaagaagccaatattattgaaggtgatccaaccaatgtaaaaacattacaaacggcaaatattcgccaagcgagttgggtggcgacgttatctgaaagtgatgcggaaaatacctttattttattaactattcaagagtgcccagatcttcaagcgaaattaatcactatcattaataaagatgagaatagagaaaaaataagtcgattacgtccagatatgctgttgtctttagcttcgttaggcaaagaaattatgatgaaagtcctttgtggtgaatctattaattcgtctgatgttactgatttattaatcaataaatatttaaaa

SEQ ID NO: 32597 - DNA, 1371 bp, Proteus mirabilis
atgcttaatagtttactcattgtgcttttgctgtgtgccattagcgcctttttttcgctgtctgaaatatcactggcggcctcccgtcgtattaaactcaaacagttggttgacgaagggaatatcaacgccgctcgtgtattaaaaatgcaagaaacccccggtatgttttttaccgtggtacaaattggtcttaacgccgttgccattttggcgggtattgtcggtgaatctgctttttctcccgcattaaaagatctcttttcccgctttttagaagcacctctcgcgcaacaattaggatcggtctgttcatttattatcgtcacatcgatgtttattctgcttgccgatttaactcctaaacgtatcggcatgatcaagccagaagtcattgcactgaaaattgttaatcctatgcgtttttgtctcgccttattccgccctttagtttggttgtttaatggcatggcagatcttatctttaaactatttaaaatcccaatggtaagaaatgaagatattacatctgatgatatctttgcgattgtcgaagccggtgcagtagcgggggtattacgtaaacaagagcacgaattaattgaaaatgtgtttgaattagaatcacgtaccgtaccatcagccatgacaccacgtgaagatgttgtctactttgatcgcgaagagacagaagaagatattaagcataaaattgccactcagccccactctaaattcttagtttgtgaaggggatatagaccatattattggttatgtagattcaaaagagctactcaaccgtgtgatcaatgggcaaagtcttaacctcaaagaaggtgtgcatatccgtaaagcccttattattccggataccttaactttatctgacatgctagaaagctttaaaacctcaggggaagattttgccattattctcaatgaatatgcgatggtgatgggcgttatcaccttaaatgacgtgatgaccactttaatgggcgatctgattggcccaggtcaagaagagcaaatcgtcagtcgtgatgagcattcatggttggttgaaggtggaacacctattgatgatgttatgcgggcattagatattgatgatttcccggattctagcaattacgaaaccattgctgggtttatgatgttccgtttgcgtaagatccccaaacgtactgactatgtgaagttcgcaggttataaatttgaagtggtggatattgataactataaaattgatcaactgcttgtcactaaaattgatgatattccgccagtaaaaccggttttgcaagaagcaatacctgctcctcaaacaacggcagaagtgccttttgagcacgaagagcataaagcc

SEQ ID NO: 32598 - DNA, 3819 bp, Proteus mirabilis
atgatgaagtggttgaaaaggataacactaacgctacttatcatcattttactggttttaggtgctcttgcatggattttagggacgcaatcagggctacattttgccattaatagcgcagctcgttgggtgccaagtttaaccattaatagtgttaatggcggttggcaagatttacgtttaacgggtgttgagtatcaaatgccgggtgtagacgtcaatgtgggggagttatcactaggcttaaatttaagctgtttgaaggataaacaactgtgtgttgaggccttaggcacacgtgatgttatcgtcaatgtagataccagtgcactccctccagcacaagaaacacccccttctgagcctttaactgagcttaatgcccctttacctatctatttaaactctctctcattagccaatacgcgtgtacaaattgatgatatggccctatcactcaatgagtttactacggcagcacaatgggaagggcgtcaaattaccttaaaaccgacggtcattaatgatttgttggtggcgttaccgaaaacacccgaagacggtagtgttgccgccatggcgcaagatgtaaaagaagttgcagcaacgacgcctcaagcggagcctaaaacaccgcaagagcaagagcaggcactagctgacactattaagacaattttcgccaagcctttattagcgcagttacccgaaattattattcctgttgatatcaatgtggaggggatagaaggtaaacagttacaagttagtggtgatacgcctgtgactattaatcaactctcttttcaagccaatacgcaaggtcaacaggttaatctcactaggctcagtattgatgcgccagaaggcaaagttagtttaaacggtcaaattacactggataaacagtggccggttaatctagatatgcaagcgatgcttcgtgagatggcaggattggaagagtttaaagatcagcaagcgacactgtccttacaaggtgcgatacttgatgaattaaaactcgcactctctttaacaggaactgttaccgcaaaccttgatgcacaagctgagctcgctaaagcacatcttccactaaaattaaccttagagagccaaaaagtgcgctggcctttaacgggagatgtgcagtatcaacttaatgatactcgactacgtcttaatgggcagacggataattatgatctttcattacgttctaatattgaaggacaagagatcccgccagccaaattgaccctagacgctaaagggaatgaagagaaaatagcactcactcgtttgcgtttagctgcattacaaggtcatgcggatattaccggtgtggcagattggagtaaggcgattagctggaatgcattattgactatctctggtattaatacagctaaacaatatcccgatatgccagcgaaattagatggacgtattgccacaacgggtagcctgtatggaggaagttggcaactacgagtgcctgaaattaccttagatggtaatttaaaaaataatcttattaaggcgcgaggaaacgcttatggtaatgattcggggcaatggaatattcctcaattaaccttaattctaggtaaaaataatctcgatattgcggggcacttaggtgatcagtgggcgcttgatgcgaacatcaatgcaccggggttaaatggtttagtgccggggttagcgggcgttattaaagggaaagtgaatgttcgcggtgatattaataagccgaaaattattgctgatatcaatgcgcaagggatcaaatggcaagatcagctcagtgttgggtcagttgtcgttaaaggtgacattcagtcagatgacgtgatcagtggcaaactggcaattacggcacgtcagttaaaacaggctgatttgattattcgtcaattaacgctagatgcggccgggacagaaaaacagcataagcttaccttgaaaatggatggggaacccgtatcgggtggcctgacattagccggctcgtttgataaagaaaaacagcagtggcaaggcacacttaacaataccgcatttgatacgcctgtaggcgaatggcgtttaaataaagcgatggcgctaaatttattagcggaaaaacagcaagtgacgattggttcacattgctgggtaaatcctaatgcacaactgtgtgtacctaaagagatcactgtaggtgagagtggtagtgcggcaatcacgttaacacgctttgatttagccatgataaaaccattcttacctcctgaaactgcgctacgcggtgtctttacgggagatgcaacggcaacttggaatgcgaaaggcggattacctaaagcgtcagttaaccttaaaggtcagggcgttggtgtaaaacaaaatgtcgatggtacggtattacctattgattttgatgcagttacgttaaatgcgggcatcaataatggtaaagcgaccttgcaatggttaattagtattgccggtaatggtgactttaaaggccatgtcaatgttgctgatctagaaaaaacacgtcaattatcaggtacggttgatattgataatctgacattagatctgattaagcctttcttgggtaaaggtgaaatagcacaaggtagtgtaggggcacagctacgtttaggggggaatgcacaatcaccattgctatttgggcagtttggtattaaccagttaaaagtagttggtcactggatcccatttgacattaccaaagggaatgtcgatattcgctttaatggtgcgacttctgatttaagcggtagaatcgaaacaccggaaggttatttaaatctgacggggaatgcggactggcgcaaactagatgagtggcgtgccgtggtggctgcaaatggcaataaactgcgtgtgtcattaccaccaatggttcgtattgatgttaacccagacttagtttttgaagctaatccacatttgcttaaattagatggtcgtattgatatcccttgggctcgtatcgtggtgcaggaattacccgagtctgcggtgtcggcctcttctgatgaagtgatgttagacaaagaattacaacctatagcaccaaagcagacttctatacctattcaaagtaatttggcgattaatattggcgatgatgttacattagatgcctttgggttgaaagccagattaacaggggcattaaaagttgctcaaagtaagcaggggttgggattaaatggtcaagtggatattcctcgcggggaattcaaagcttatggacaagatttacaagtacgtaaagggcaaatcttgttctcagggccggttgatcagccatacttaaatattgaggcgatacgtaaccctgataatacggcagataatgtcattgctggggttaaagtcaccggacttgcggataagccgaaagtggaaatattctctgagccggccaaaacacaacaagaagcattatcctacttgttaagaggtgaaggattagcaagtggtgattctgattcagcacaaatgacagccatgctaataggattaggtgttggacaaagtggacaactcgtaggacgtattggcgaaacctttggtatttctgatttagcgttagatacacaaggtgtaggggatagttcacaagttgtcgtcagtggtaagataaccgatgatttacaagtgaagtatgggatgggtatatttgattcgctagcgacgttaacattacgttatcgcttgatgcccaggttgtatttacaagcagtgtctggtatgaatcaggcaatagatctgctttatcaatttgagttt

SEQ ID NO: 32599 - DNA, 1023 bp, Proteus mirabilis
atgaaagcattgtcaaaattaaaagcacaacccggtatctggatgaccgatgtacccgtacctgagcttggtcataacgatgtgatgatcaagatccgtaaaactgccatttgtggtacagatgttcatatttataactgggatgaatggtcacaaaaaaccataccggttcccatggtggttggccatgaatatattggtgagattgttgctattggccaagaggttaaaggttttaatattggtgatcgcgtctcgggggaagggcatattacttgcggtcattgtcgtaattgccgtggtgggcgtacacacttatgccgtaataccattggtgttggcgtaaatcgtcccggttgttttgctgaatatctggttattcccgcctttaatgcatttaaaattcctgacaatattccggatgaactggcggctatttttgatccctttggtaacgcagtacacacggcgttatcttttgatttagtgggggaagatgtactggtttcaggtgcgggacccattggtattatggcggctgcaatctgtaaacatgtgggggcacgccatgtggtgatcaccgatgttaatgaataccgccttgatctggctaaaaaaatgggtgtcacccgagcagtcaatgttagcaaagaaaatctaacagatgtgatgaaagaattaggtatgaccgaaggctttgatgttggattagaaatgtccggtgcgccaccggcttttcgcaccatgcttagtacgatgaatcatggtggtcgtattgctttactgggtattcctccttcagatatggctattgattggggacaagtcatttttaaaggattatttattaaaggtatttatggtcgtgagatgtttgaaacatggtataagatggcggcgctgatccagtcgggtcttgatctctcaccgattattactcatcaatttcctatcgatgaattccaaaaaggctttgatattatgtgttcaggtcaatcgggcaaagtaattttagattggcag

SEQ ID NO: 32600 - DNA, 1197 bp, Proteus mirabilis
atgtctactcactctttctatcaacaaattaatcaacaactcgaacaaacacgtcaagatggcttatttaaaaatgagcggatcatcacttcttcgcaaagtgccgatattgcggttgctgatggtagtcatgttattaacttttgtgccaataactacttaggtttagctaaccacccacaacttattgcagcggcgaaagcgggaatggatagccacggttttggtatggcgtcggtgcgttttatctgcggaacgcaagatctacataaaacattagaaaagaacatcgctgaatttttgggtatggaagatgccattttgtactcctcttgttttgatgccaatggtgggttatttgaaacactgatgggatctgaagatgcaattatttctgatgcgctaaatcacgcatcgattattgatggtgttcgtttatgtaaagccaagcgttatcgctatgccaataacgatatggtggcgttacgtgcccaacttgaacaggccaaagcagataatgcccgccatattatgattgccaccgatggggtgttctctatggatggggtgattgctgatctaaaaagtatctgtgatttggctgacgaatatggcgcattagtgatggtggatgactcgcatgcggtgggttttgtcggcgcacaagggcgcggtactcatgagtattgtgatgtattagatcgcgtcgatatcatcacaggaacattaggtaaagctttaggtggcgcatcgggtggttataccgcagctcgtaaagaagtggtggagtggttacgtcaacgctctcgtccttatctattctcaaattctttagcccctgcaattgtgagcgcctctattgcagttttagatatgctgaaatcaggggatgacctgcgcgctcgtttatggcgtaacgcagcactttttcgtgaaaaaatgacggcagcaggttttactttggcgggggctgatcacgcgattattcctgtgatgttaggagatgccaaattagcgcaacaatttgcagcacgtttacttgatgaaggtatttatgtcactggctttttctacccagtagtaccacaagggcaagcacgtattcgtacacaaatgtcagcggcacacaccccagaacaaattgaacgtgctgttgctgcatttattaaaatcggtaagcaacttaatgtgattgca

SEQ ID NO: 32601 - DNA, 1026 bp, Proteus mirabilis
gtgaagctcattattaggtcacagctagtaaactgtgctatttcatatcgcaacaatatgggaaagagaatgtttaaaaaatcattaagcccactgttcttattgctgtcttctctggttatcgcaggttgtgataacgcacaagatacctcaacaacgcaatccacagagaaacaaactctcactatcgaacatgctcaaggcaccactgagatccctgctcacccacaaaaagtggttgtgatgaacatggaaacacttgatattgttgatgctcttggcgtacctgttgttggcctaccacaaacaaacgtccacctacctaaatttctagagaaatacaccaacgaaaatgagtacatcaacgaaggtggcctgtttgaaccaaactacgaaaaactcagtactactgcccctgatctgattttaacgggtagtcgtgctcgcgatgcatatgccaaattaagtgaaatcgcaccatccatttctatggatatcgacagcacacgctttattgacagtctcactgagcgtacaacgactttaggtcaaatttttggtaaagaagaacaagctaaaaaattattagctgacttcaatagcaaaattgatacggtaaaagcaaaaaccccagatgcgggtaaagcaatggtcgtattagtcagtggcggtaaaatttccgcttatggcccaggctctcgctttggttttatctacgatgtattgggctttgaacctgcatatactttcgatagcccaggctctcacggtaatattgttaactcagaactactgctaaaacttaatccagactggatgtttgtcattgaccgtgatgcagcaattggtcgtgaagattcacaacctgcaaaacaagtgcttgataatgccctagttagaaaggttaatgcatggaataaagaccaaattatctatcttgatgccagctcgatttatatctcaggtgggatacaaacttactctcgcttaatggatacaattaatcaggcgttggatcaaaaaaaa

SEQ ID NO: 32602 - DNA, 960 bp, Proteus mirabilis
atgaaaacgttccatttatcattggggataggacttatcgctatcctctcaatgatcagtctatttatcggcgcaggagatatcactcctgcttcgctttttactgatcccgatatgcgcgatatcttctttattagtcgcgtaccaagaaccctgtcattattacttgctgggggcgcaattagtgttgctggtttaatcatgcaactgctcacgcaaaaccgctttgttgagccttctcttgcaggtacaacacaatcagccagtctcggtttattagtcgtgatgttgcttttccccgcggcaggcattttcaccaaaatgatggtagccactgtttttgcacttttaggcactgtgttatttatgttgttgctacagagaattgccttaaagaccgcattaatcgtgccacttgtcggtattatgctaagtgcagtgataggtgctctaaccatctttcttgccgtctattttgatttactacaatcactagatgcgtggactagcggagacttctccagtgtcttacaaggtcgttatgagctgctatggcttgtcggtgcccttgcattaatggcgtgttgggtcgcggatagctttaccgtggcaggtatgggacgtgaattttccatcaacgttggacttaactatcgtaaagtgatgattatcggtttatctattatcgctttaattagtggtgtggtggtgtctgttgttggtgctctacctttccttggtttgatcgtgccaaatttagttagcctagtgatgggagataatattcgcaaaaccatcccgtgggtatgcttaagcggtggagccattgttttactctgtgatgtgattggtcgcctgatccgttatccatttgagatccccgcaagtgtcattttaggggcggtaggtgctgtgatcttccttttcttactactgaagcagcaacgttatgcaaaaagt

SEQ ID NO: 32603 - DNA, 753 bp, Proteus mirabilis
atgattgaaatcagtaagatatcaaaacgttatcaagacacaacggtgctcgataatattacaacaaccattcaacgtggcggtattacttcaatcatcggacccaatggtgcgggtaaatccaccttactttctgtaataggccgtctactgatgccagaaagcggtatggtcagtgtaaatggcatggatgttgcggctacagagagtgatgtattagccaaaaacctttccatactacgccaagaaaatcagtttgtgagtcgcttaactgttgaagagttagtcggttttggtcgctacccttatagtaaaggacgcttaacgctagaagataagaaagtgattgatgaatcactcgattttcttaatttgactgaatttcgtcaccgttatcttgatgaattatccggagggcaacgccagcgtacttatgtcgcaatggtattatgtcaagatactgaatacgtgatgcttgatgaaccgcttaacaatcttgatatgaaacacgcggtcattatgatgaaattactgcgtaaagccgccgatgagctaggaaaaaccattatcatcgtcattcatgatatcaatttcgcctctgtgtattccgactatattttagccatgcgcaacgggcaactttactatcatggctcacctaaagagatcatgaaatccgatattatcgaagatattttcgatactcccgtcgacgttaaagagttggatgataagcttatcgcgatgtattac

SEQ ID NO: 32604 - DNA, 872 bp, Proteus mirabilis
acatcaaaaggaacactctatggcattgtggcgatattcctttggagtaccattgttgggttaattcgcaatatcagtgagtattttggtgcggtagggggtgctgcgctgatttacacaacgggaacgctatttttgattttgatcttaggggtgcctaagttatctctttttcctaagcgttaccttgcttggggggcacttttatttgttagctatgaaatctgtttatcgttagcgctaggatttgctagtgatagagcacaagctatagagcttggcatggttaactatttatggcccagctttacactggcattagcggtattcttaaataaacagcgattctctatcctattgatagtgggtttattatgctcattcagtgggcttgtttgggttgttagtggtgataatccactgacaatagaaagcttatggaaaatatttgtcgtaaccctctcagttatattttggcgtttatcggcgccgtgttatgggcattttacagtaatgtgactcgtcttatttcggggggacacaatggtattgtgcctttctttttcttaacagcattggcactttgggggcaatatattttttctgctccaatcgagtgggtggttaatgtaaaaagtatctcactgttacttattactggggctgcgatagggttagctaatgcagcgtggacggcaggaatgatcagcggtaatgtgacattattagcgacgctttcttattttactccggtaatttctacggctttttcatccctactactctctacagcactctctttttcattttggcaaggcgttatgatggtgacaggcggctctttaatttgttggttagcgactcgtcaaaaa

SEQ ID NO: 32605 - DNA, 789 bp, Proteus mirabilis
atgaagccggttacgctatctacgctcaatcgctataaacaagaaaagaaaaagtttgccactatcacggcttatgatgctagctttgctcgtctatttgccaatgaaggtattcctgccatgttaattggtgattcactcggtatgacactacaaggtcatgacagcacattacctgtcaccgttgagcaaattgcctatcatacccgttgtgtaagagcaggcgcccctaacgctttcttaattgctgatatgccttttatgtcttattccactccagagcaagcctgtcttaacgcagctattttaatgcaagcgggagcgaatatggtcaaaattgaaggaggaagctggcttattcctacagtcaaaatgctcactgaacgcgcagtgcctgtttgtattcacttaggcttaacccctcaatctgttaatgtgtttggtggctataaagtacaaggtcgagaagaagctgctgcagagcaacttaagcaagatgctatggcgcttgaagccgcaggagcacaactagctgtattagaatgcgtccccgtttccgtagcaaaaactattaccggatcactcaatattcccgttatcggcattggtgccggcaatgtcactgatggacaaattcttgtgatgcatgatttattaggtctaacacctaatgcccctaaattttctaaaaatttcttacaagaagctggctccttacccgaggctgtcagactgtatgttcaacaagttgaacaaaaactgttccctcaagaacaacactcatttaac

SEQ ID NO: 32606 - DNA, 495 bp, Proteus mirabilis
atgagtaagcaacaacagcgtgtgtatattattctgggcagtaatttaaactcaccagaacagcaagtaaaatcggcgataaaagcgattagtgaaatccctaatactacactgattgcccaatcaccttggtatcgcacacgccctatgggacctcaagatcaacccgattatctcaatatggctgtcgccgttgatactactttagccccagaagagttgctcgaccatacacaagcaattgaacttgcccatggtcgtgaaagaaaagcaggtaaccgttggggacctcgtacccttgatttagatatcatgttatttggtgatcaagttatacagaccgaacgtttaactgtgcctcattatggacttaaggtgcgtgaatttatgctttatccattggcggatttagcacctgagctttgcttccctgatgacggagaacgattagcagacagattagcgctcgtacctaaaaatggtatggaaaagtgg

SEQ ID NO: 32607 - DNA, 1338 bp, Proteus mirabilis
atgactgtgatcccaagagatcaacacccgatttcgcgtaaagacatcagtgataacgcactaaaagttctttatcgtctgaataattcaggctttcaggcttatttagtgggtggtggtgtacgcgatctattattagggaaaaaaccaaaagactttgatattgctaccaatgcaacgccagaagaagtccgtcgattatttcgtaatagccgcttagtaggtcgacgctttcgtctagcgcatattatgtttggccccgaagtgattgaagtcgctactttccgtggctctcatgaagatcatgaaacatccgatcgcaatcagtcacaacaagcacaaagcggtatgttgctgcgcgacaatatcttcggatcgattgaagaagatgccattcgtcgggattttaccttaaatagtctctattacggcgtcgatgattttgctgtacgtgattatgtggggggcttggctgatcttaaatcaggtactattcgtttaattggctctcctgaaactcgctatcgtgaagatccggttcggatgctaagagctatccgctttgccagtaaactggatatgcgtatcgcaccggaaactgcagagccaattagccaattagcaccactattacgtaatattccttcagcacgcctatttgaagaatcgctgaaattattacaaacaggacatggttataaaacctatcggttaatgcgccatttccaacttttagagcctctttttccattagttgcctcaaggatcactgagcagcaagataccccaatggaaagaatgatcgaacaggtgctaaagaataccgattatcgtattagtaaagaaatgcgcgtaaatccggcattcttatttgcagcaatgctatggtatcccttagtggagcatgccgaaaaactggctcaagaaagtggactgtcttattacgatgctttctcaatggcgatgaatgatattttagatgagcaatgtcgtactattgcgatccctaaacgtatcaccaccacgatgcgtgatatttggcaattacagcagcgtttacctaagcgtcaagggcgccgagccaataaactgcttgagcatcctaaattccgtgcagcatttgatctactggaattacgcgctaatgtacaaagaaatcctgatctggaagcattagccgcttggtgggctgattttcagatttcaaacaatacacaacaacgctctatggtctctgaattaggtccaggcccggtacgcaaaagaacacgtcctcgtaaacgtcctcgtcaccctaatgcaaaaaataatgcaccaagacaagagaacaaacatgag

SEQ ID NO: 32608 - DNA, 2004 bp, Proteus mirabilis
atggcatttatattaatgccttcatggagccttgattatggtctatttgattctaccgcagatgaattacttacctcttatggctggagtaacttaaatatcagtctgctctggtttttacttcccagcatactattaattcgtcctttacatcctgtagggcgagaaaatcgtattcgtcactattttgatgcaagttttgcctttttctgcgcctttatcactattgttaccgcaacgatggaaggtcgtggtctgggttattcggttatcgtgctatttatttcattaggaatgatagccaagcatgctttaacacgcttagagtggttagggggtgatagctttgtgattggctcattaatcacagttgtcgccttaatcggtgtttttattatctttccaagtgtcgctatctttattccgatgtttcaagatagtgctggcaattttgccccctttgaatttattaccattctcagccaagcccatattgttcaggtgatgatcaattcaatcttactgtctatcgcagttggtattggctgtactttttttggtttgatcctcgccatttatacatcacgtattgcagtaagatcagcgattattggtcgagtgttttctattttacctattgtcactcccccttttgttgtgggtttaggtgtgaccttgatgatgggacgttcaggttatatcactgaatttttggcaacttatgcaggtttagaaaataccaactggttatatggctttacgggaatttggcttgcacaagtacttgcctttacccctatgtcttttatgatcttagatggtgcaattaaaacaatccatccgtcattagaagaggcttcttatacccttagagctaatcgctaccaaacattctttcatgtttttatgccgttactaaaaccagcattagccaatgcctttttgatcgtcatagtgcaatcactggctgattttagtaacccattggtgctaggtggcaactttgacgtgattgccactcaaatttatttctatatcaccggctctcaacttgattaccaagcagcaagtacgttaggtgcttcactgttggtattctcattattagtgttctgcattcaatatatgtggattggcaaacgctcatatgtcacggtgtcaggtaaatcctatcgtggtgatgttcaaccattacccacctccttagtaacctttgtcactagcgtgttgggtatttgggttatctttaatatcttactctatggcagcattttctacggtagctttacggttaactggggagtggattacaccttaacctttgataactttattaaattatttggtcaagggatgagcgacggcgcatggccatcattacttgataccttactttatgcaggtatcgcagcacctattaccgctattttagggcttttgatcgcctatattgtcgtgcgccaagattttaaaggtaaaaagagtatcgaatttacgaccatgctctgttttgccgttcccggtactgttgcgggtgtctcttatatcttggcatttaatgattcgccgttttatttaacaggaacggcagccattgtgattatctcaatgaccatgcgtaacgtgccggtgggaatacgagcgggtattgcaggattggggcaaatcgataaatcgttggatgaggcgtcattaagtttaagagcaaattcaatgcgaactattttgtatgtgctattgcctttattacgccccgcgattttatccgctttaatttatagttttgtccgcgcgataaccaccgtcagtgcgattgtattcttagtcacccctgaaactcgcgttgctaccgcttatattttaaatcgtgttgaagatggtgaatacggcgtcgcaattgcctatggctcgattttaatcatcgtgatgttggctattattttcttatttgactatttgattggcgaagcccgtgtttcacgctctaaagccaaaaatgcacag

SEQ ID NO: 32609 - DNA, 1440 bp, Proteus mirabilis
atgtccagacggctcagaagaacaaaaattgttaccaccttaggcccagcaacagatcgtgataataacctagaaaaaatcattactgctggtgcaaatgttgttcgattaaatttctctcatggctctgcagaagatcatcttgctcgtgctaatcgcacccgtgaaatagcagctagacttggtcgccatgttgctattttaggcgatttgcagggtccgaaaatccgtgtttcgacatttaaagaaggcaaagtatttcttaatgtgggagacaaatttctccttgatgccaatttagaaaaaggcgaaggcgaccaaactaaagtcggtattgactataaagggttacctgctgatgttgttcctggcgatatcttgctacttgatgatggacgtgttcaattaaaagtccttaaagtcgaaggcctgaaagttttcactgaagtgactgtcggtggcccattatctaataataaagggatcaataaactcggtggtggtctttctgctgaagcattaactgaaaaagataaacaagatattattactgctgccaaaattggtgttgattatcttgctgtctccttcccaagaacaggcgaagatcttaattatgcacgtcgcttagcacgtgatgcaggctgcgagtgccaaattgtcgcgaaagttgaacgtgccgaagccgttgccaatgatgaaattatcgatgagatcattctcgcttctgatgttgtcatggttgcccgtggtgatttaggcgtagaaattggtgatcctgaattagtcggggtacagaaaaaactcatccgtcgtgctcgtcagctaaatcgtgttgttatcacagccactcaaatgatggaatcgatgataactaacccaatgccaactcgtgcagaagtcatggacgtcgccaatgcggtattagatggtacagatgccgttatgttatcggctgaaacagcagcaggacaatatcccgctgaaactgtagccgcaatggcacaagtctgtttaggcgcggaaaaaatgcctgcggccaatgtatcaaaacaccgtttagatatggtatttgataatgctgaagaagcgatagccatgtcaaccatgtatgcagctaaccatatgaaaggcgttaatgcgattatcgctatgactgagtccggtcgtactgcccgtatgatgtcacgaattagcaccggtttacctattttctctatgtcacgccatgagaaaacattaaaccaaactgcactttatcgaggtgttacgcctgtttattgcagtactcatactgacggtattgctgccgctaatgaagctattatgcgtttatgtgaaaaaggctttttagtttcaggtgatttagtcttagtcacacaaggtgaccagatgggcacgatcggaagtaccaatacttgtcgtatccttaccgtagaa

SEQ ID NO: 32610 - DNA, 1473 bp, Proteus mirabilis
atggcagcgatatcgactgctcaggcctgtgatctggttatcttcggtactaaaggggatcttgcccgtcgtaagttaattccatcactttatcaactggaaaaggcaggatatattcaccctgatacacgtatcatcggtgttggtcgtgctgattgggatgtagctgcttatacaaatgttgcccatgaagcattacaaacttttttaaaagaagagattaaccctgaaatttggcaacgtttaagtgctcgtctcgatttttgtaatcttgatgtcaatgaaactgaccactttattgagttagcaaaacatctaaaacaagacaaattaccggcgatttactattttgcaatgccaccaagtactttcagtgcgatgtgtaaaggtttgggacatgctaaattaaataaagagccaaaccgtgttgttatggaaaaaccactaggaacagatttagcgtcttcagtttctattaatgacagtgtggcgaaatactttaaagagagtcaaatttatcgtatcgaccactacttgggtaaagaaaccgttttaaacttattggctttacgttttgctaactccttatttgttaataattgggataacaaaacgatagatcatgtccaaatcacggtggcagaagaagttggtattgaaggacgttgggggtatttcgatcaagcgggtcaaatgcgtgatatggtgcaaaatcacctattacaaattttgacgatgatcgccatgtcaccacctgctgatttaacggctgatagtatccgccaagaaaaagtgaaagtactgcgctcattacgtcgtattgatatgactaatgtccgtgaaaaaacggttcgtgggcaatatacggctggttttgtacaaggtaaaaaagtaccgggctatctagacgaagagggtgcaaataaagccagtaatacagagacctttgttgcaattcgtgctgatattgataactggcgttgggcgggtgtacccttctatttaagaaccggtaagcgtatgccaagtaaatgctcggaagtggtggtctattttaaaaaaccagctctgaatattttcagtgaaacctatcaagagttaccacaaaataaactcactatccgtttacagcctgatgaaggtattgatattgaagtgctaaataaagcaccaggtcttgatcataaacaccgcttacaaaccactaaattagacttaagtttctccgaaacttttaatcaaactcatttagctgatgcttatgagcggttgttgcttgaggcaatgcggggtattcaagcgctatttgtccgtcgtgatgaagtagaagaagcatggaaatgggtcgattcaattattaatgcatgggaatgcgataatgaattacctaagccataccaagcaggaacatgggggccggttgcatctgttgcaatgatcactcgtgatggccgctcttggaatgaaattgag

SEQ ID NO: 32611 - DNA, 1954 bp, Proteus mirabilis
cgactaggtcagcggcgattactccttttagcggggagctatacatggcaaagggaacaacttcgagctatccaacagcagtgtaaaggcgattggctaatactctcttcagagatgtctgaggcgataaaaccagaacatgctcatcaactattaggccgtgaatatcttcacgctgtatttgacgctaaccatgcttttaatgctgatgcactagcgatgctaacgggaacgttgaaagcaggaagttggcttatcttatgtttacccgatattgttcagtggcaacattatattgataacgatagtcagcgctggaatgatgcgcaaggggttatatctactccccattttatggcttggttagcaaaaattacactagcagataaacaggtcattatttggcaagcatcgcagccccttgttctacctgaaataaaaaatacaggccaacagtggggcgttgcctcaagggatgccaaccatacaacagcaacagttattagcgcatcttttacaggcaaaatctggcgtatggagtatcacggcaccacgaggcagaggaaaatcagcgttagcaggaatgttgatagagcagtggcctggctcagtgacggtttgtgcccctgcgagaaacagtattgaagtgctattatctcatacacataaaaccatcgagttctactcaccggataatttgttagccctttgtcatacagagcatttgtgtcgagattggttaattattgatgaagcggcgactatacccattgctcaactgatagctctttgtcagcacttccctcgagtgttaatgaccaccacggtacaaggctatgaaggaacagggcgcggctttattttaaaactgggtgatagtattccaacgttacaaaattatcaacttaccgtacctattcgctgggcgcaggacgatccactcgaaaattggcttaatcaactgttgttacttgatgaaccttcttttcatcatgctaaccaatctggtgaggtggtgatcacctcatgccagcatttcgatagtgaacaacgagccaatttttatcaacttttaaccagtgctcattatcgaaccacgcctttagatcttcgacgtttattcgatggacaaaaacagcactattggtctgcatttattcatcggcatcttgttggggcggtgtggtgtattgaagaagggggactagcgaaagccttagcacaagatgtttggcgaggtatacgtcgaccaagaggtaatcttgttgcccaatcgttagtcacttacggcttatccattgaggcaatgtgtttaacttcattacgcatcagccgaattgcggtattgccagcatatcgacgtcaaaaagtcgctgcaaaattagttgcggatattgctaagcagtgccagaaacagaatattgattacctttctgtcagttttggctataccgacgcattagccaatttttggcaacaatgtggtttttatctggtgagattaggcgttcataaagaagccagtagtggctgttatactgctatggctatttacccaatcagtgctcaggggcagcaattattacaagttgcacaacaagcactcgcattacaaagtgattatatcactcagcaaacaggtatctctcttgctactgcattgcctagcgccagtgaagcagatcactggctgatgatggcaggttttgctttcgcccatcgctctatattaacggtatatcaaagtgttggttattttctgcaaggtgatagatcacgctacccgttattagtggcattttttattgataagcaatctgtagaggcctgtgtaaaacaattttcgttatcgggcaagaaagcccttgtcacgacactacgtcggcaatgccaacaactgatggcagaaaaagatgagcaattagcacaggcttaccaacattggttaacgact

SEQ ID NO: 32612 - DNA, 1191 bp, Proteus mirabilis
atgagtttacaagataccagttttgaaagttgcattaaatgtacagtttgtacaacctattgtcctgtggcaaaggtcaatccactctatcctgggcctaaacaagcaggccctgatggtgagcgtttacgcttaaaagatcccatgctttatgatgaagcactgaaatactgtactaactgtaaacgttgtgaagtggcatgtccttcagatgtaaaaataggggatatcatttcccgtgctaaacttaactacaatcctaaaacacctaaaattcgtgatgctattttaagtcatactgatttaatgggaacgctctctacgccaatggcgccgattgttaacactattaccggattaaaaccagtacgtaaaatcttggataaagcgcttaaaatcgaccatcgtcgtgaattacccaaatactcttttggtacatttagaacatggatgaaaaaacaggttgaagagcaagcacgctttaaagatcaggttgcgtttttccacggttgctatgctaactacaatcaccctcaattagggaaagatttagttaaagtattcaataaaatggatattggtgttcaactattaaaacgtgaaaaatgttgtggtgttgcattaattgccaacggctttgtgaaacaagcgaaaaaacaagccaccgtaaaccttgaatctctgacagaaaaaattgtggagaacaatattccggttgttgctacatcttctacttgtactttcactattcgtgatgaatatgaacatattctagatattgatacctcaaaagtacgggaaaatatagaattagcaacacgttatatttatcggttattggaagaagggcgcgaattaccattaaaacataccccattaaaagtggtttatcataccccttgccatatggaaaaaatggggtgggcggcttactccattgatttaatcaaacgtattcctggggtagaagtgattgtattagattcacaatgttgtggtattgccggtacttatggttttaaatcggaaaactacgatgttgcgcaaggcattggggcgggattattccgtcaaattgaagagagtggttgtgatttagtcattacagattgcgaaacctgtaaatggcaaatagaaatgtcaacaaccaaaaaatgtgaacacccaattagcttattagctcgggcattg

SEQ ID NO: 32613 - DNA, 1617 bp, Proteus mirabilis
atgaacgttaaaggtcttacccctaaggatctcgagcagtacggtattcatgacattagtgaagtcatttataaccctagctatgacttattatttgaagaagaaactaagccaggattaacaggttatgagaaaggcacattaacctcgttaggcgctattgctgttgatacggggatttttactggacgttctccgaaagataaatacattgttcgtgatgatgttactcgtgatactgtgtggtgggctgatcagggcaaaggtaaaaatgataataaaccactctcaccgcaagtatgggctgatttaaaatcattagttactgagcagctatcaggcaaacgtttgtttgtcgttgatgccttttgtggtgctaatgcagatacgcgattaaaagtgcgttttatcaccgaagtggcttggcaggcgcattttgttaagaatatgtttattcgccctacgcaagaagagttagaaaattttacacctgactttattgtgatgaacggtgctaaatgtaccaatccaaattggaaagcgcagggattaaactctgaaaatttcgttgctttcaacttaactgaacgcattcagttaattggtggtacttggtatggcggagagatgaaaaaaggtatgttctctatgatgaactacttcctgccattaaagggtattgcttctatgcactgttcggcaaacgttggcgaaagtggtgatgtagccattttctttggtttgtcagggacaggtaaaacgacattatcaacagatcctaagcgtaaactgattggtgatgatgaacatggctgggatgatgatggtgtattcaactttgaaggaggttgttacgctaaaactatccatctatcaaaagaagctgagccagatatttacggtgccattaaacgtgatgccttattagaaaatgtcgtggtattagcagatggtagtgttgattttgatgacggctcaaaaacagaaaatacccgtgtatcttatccaatctatcatattgataatattgtcaaaccggtatcgaaagcgggtcatgctaaaaaagtcattttcttaaccgccgatgccttcggggtgctacctccggttgctcgtttaacacccgagcaaacacaatatcacttcttatcaggctttactgcgaaacttgctggcacagagcgtggtgtgacagagccaacaccgacattctctgcgtgttttggggcagcatttttatcactccatccaacacaatatgctcaagtgttagtaaaacgtatgcaggcttgtggagcacaagcttacttagtgaatacgggctggaatggtacgggcaaacgtatttcaattaaagatactcgagcgataattgatgccattttaaatggtgatattgataaagcggagactcaaactctgcctgtatttaatttggcgatcccaacagcgcttcctggcgttaatagcgaaattttagatcctcgagacacctatgcggataaagcacaatgggatgttaaagcggacgatcttgctgatcgctttgtgaaaaactttgataaatatactgatacgccagtagggcaagcgttaacaaaagtgggccctaaacgc

SEQ ID NO: 32614 - DNA, 882 bp, Proteus mirabilis
atgtctaaaaaagacgctttatcacgctttttatttgaaaaaagcgcggtacgtggtgaattagttaccgtaacggaaacctatcaatcaatacttgaaaatcatcattatcctgagccagttcaacacctgttaggtgatttattggtcgcgacaagtttgttaacagctacgctgaaatttgatggtgatattaccgttcaattacaaggtgatggcccagtacgattagtggttattaacggcaataatgaacaacagatgcgcggtgttgcacgttttagtgatgatgttaaagccggtagcagcttaaaagagatgatgggcaatggctttatggttattaccatcacacctaaaaaaggtgagcgttaccaaggtattgtagcgttggatggtgaaacgatagaagcttgtattgataactactttaatcaatcagagcagttacctacccgtgtctttatccgcacaggtctgcaagatggaaaagcggcgggtgcaggtatgttattacaagccttacctgcgagtgcagaacatagtgctgatgagacagcagaacactttgagctattaacacaacttacgcacaccattaaagctcaagagctgtttacacttgatactaaagagattttacatcgcttatatcatgaagaagatgtgacattatatgatccacaaccgatagcattccattgcacgtgctctcgtaaacgttgtgaagatacattagtaacattatctaaagaagatgtagctcatctgttacaagaacaaggtaaaattgatatggagtgtgaatattgcggtgctcattatatcttcactgaagaagatattaataatatcaataaattatctagctctaatttgcac

SEQ ID NO: 32615 - DNA, 2532 bp, Proteus mirabilis
gtgaagttcttaaaatattttttcatcttcgtttttgcttgcataattttgggagcagcctcgatatatggcatgtataaatatgtcgagcctcaactacccgatgtcgcgacattaaaagatgttcgtttacaaactcctatgcaggtctttagcgcagacggagagttaatggcgcaatatggcgaaaaacgtcgtttgcctcttaccttgcaggagatgcctccgcaattaattaatgcctttattgccactgaagatacgcgttttcgtgaacatcatggtattgaccctattggcatctctcgtgctgttgttgttgcgttaacatcggggcaagcatcgcaaggtgccagtaccatcacgcaacaattagcgcgtaatttcttcttaacacctgagaagaaattaatgcgtaaaatcaaagaagcctttttggctatccgtattgagaaagagcttactaaagatgagatcttggcactttatctcaataaaatttatctaggaaatcgcgcttatggtgtgggtgctgctgcatatgtttactttggtaaaagtgtgcatgatcttagcttaagtgagatggctgttattgcaggtttacctaaagccccttcgacactaaacccactttattcgtatgatcgtgccttaaaacgccgtaatttagtgttacaacgcatgttggaagagaactatattacccgcgaagagtatgacagtgctaaagctgagcctattgtggctaaatatcacgccccacaaattgatttttcagcgccttatttgactgaaatggtcagaatggagatgtatcagcgctatggcgaaaatgcctatacggatggttataaaatttacactacagttatccgcaaagatcaattagccgctgaacaagcgctacgtaataatgttattgattatgatatgcgccatggctatcgcggtgctcaagaggtgctgtggcatgcagggcaaactccttgggatgataaagccattaacgataagctaaagggtatacagacttatggcccattaatccccgcagtggtgttatccgctgatgctaaagaagctcaggtggtattaaaaaatggcgataaaataacactcgatttaaaagcggttcgttgggcgcgtaaatttatttctgatacggctcaaggggccacgccgagcaaagttgatgctgttgtacatgctggtgagcaaatttgggtacgacaaaatagtgaaaatgattggttattagcacagcttcctgaggttaatgcagcttttgtcgcattagatccacttaatggcggtattattgcgctggtgggaggttttgattttgaattgagtaagtttaatcgcgtatctcaatcgttacgtcaagttggttcaaatatcaaacctttcttatatgcggcagcattagataaagggttaacattatcgacattactaaatgacttacctattagtcgttgggatgcaggagctggaactgattggcgccctaaaaactcaccacctacttatgcagggcctattcgtttacgtcaaggtttaggtcaatctaaaaacgtagttatggtgcgcgctatgcgggcgatgggggttgattacgctgcagattatctattgcgttttggttttcctaatcaaaatatagatagaacagagtcattagctttaggctcaccttcatttacaccaatgcaaatggctcgaggttttgcggtaatggcaaatggtgggtatctcattgagccatattttattcagcgtattgaaaatgctgatggtgaagtgatctttactgctgagccgaaagtcgcttgtcctgaatgtaccgatatccccgtgatttatggtgatactacgcgctctattgcattatctgatgattatatggaaaacgtcgcacaatctcagcaagcgcaaccggcagaaacggcgcctgatattgagttagagcaagctcctcttgctgaaacagtcaaagaaagcccatatgctcctcatgtgataagtacgccactggcgtttctaatgcatgatgcgttaagaaccaatctcgttggtgagccgggatggtctggtacaggatggcgtgcattgcgagatttaaaacgtcaagatatcggtggtaagacaggaacgaccaatagctctaaagatgcttggttctctggatatggtgctaatattgtggcgactgcatggattggttttgatgatagtagtcgcaatttagggcgaactgccgcaacgggtggtgaagcgggtgccaaaacggcacaacctatttggaatgactttatgaaagttgctttagaaggtgttccggtacaaatgatgccgatgccaaaaggcgttgttgctgttcaaatcgatcgcaataccggtaagttggcgggagatggaccatcaatgaaagagtattttattgaaggcactcagccaacagaaaaagcaaaaagtgaagtgggtacacggatctttgaggataatggcgaatctaacgagctattt

SEQ ID NO: 32616 - DNA, 1371 bp, Proteus mirabilis
atgaccaacgctagtgaggctattttgagtaatttatcactcgacttttcacaaaatgaatttcaacctctggccgcgagaatgcggcctgaaacattagaacagtatattgggcagaagcatctactcgctgaaggtaaaccgctaccacgggcgataaaagcaggccaattgcattcaatgatcttatggggacctccgggtacaggaaaaaccacattagctgaaattatcgggcgctatgcccaagcggatatagaaagactttctgcggtgacgtcagggatcaaagagatcagggccgccattgacatagcgcaccaaaatagaaatgcggggcgtagaaccatcctatttgttgatgaagttcatcgttttaataaaagccaacaagacgcttttttgccacatattgaagatggcactatcacttttattggtgcaacaacggaaaacccttcttttgaattaaattcggcactgctatcacgtgcacgagtttacctgctacgctcattgacagaaacagacattgaacaggtattacagcaagcattagatgatactgaacgtggattaggtgggcgtaatattattttacctgataatacacgcaaaatgattgctgaattagtcaatggtgatgcgcgccgttcactcaacctgcttgaaatgatggctgatatggcagaagtcgatagccaaggcaaacgaacactaacagcggaattactaaaagaaattagtggtgaacgtagcgcccgttttgataataaaggtgatcgattttacgatcttatctctgctttgcataaatcagtacgtggctcggcacctgatgcagctctttattggtatgctcgtatcatcactgcggggggagatccactgtatgttgctcgtcgcttactggctattgcttcagaagatgtcggtaatgcagatcctcgagctatgcaagttgccatagctgcatgggattgctttacgcgggtaggccctgcagaaggtgaacgtgcaatagcacaagcgattgtttatcttgcttgtgcgccgaaaagtaatgctgtgtataccgcttataaagccgcactggcagatgcgaaaagtaaacctgattatgatgtacctgcacatttacgtaacgcgccaacgcaattaatgaaagagatgggcttaggtgcagagtatcgctatgctcatgatgaacctaatgcttatgcggcaggagaggtctattttccggctgaaatggcacaaacgcgttattatcaccctgttaatcgagggttagagatcaagcttgctgagaaattagactggctttctcagcaagatcaaaatagtgtgacaaaacgctatcgcaaattg

SEQ ID NO: 32617 - DNA, 1086 bp, Proteus mirabilis
atgagtcaggtatataactttagtgcaggtccggccatgttaccggcagaagttcttcgtcgtgcagaattagaattatgcaactggcacggattagggcgttctgttatggagatcagccaccgcagtaaagaatttctggaggttgcccatcaggcagagcaagatctacgggatctactcaatgtaccagaaaattataaaattctgttctgtcatggtggcgctcgtggtcattttgcggcattaccgcttaatttattaggtgagaaaaccaccgctgattatattgatggaggatattgggctaaaagtgctgccgatgaagcggaaaaatattgttcacctaatatcattaaaataaagacagaaattgacggtaaaatcgcggttaagccaatgaaagagtggcaattaagtgataatgcagcctatgtgcattattgcccaaatgagactatcgatgggattgctatccacgaagagccggattttgatgataaaaaaattgttattgccgactactcttccgctattttatctcagccacttgatgttagccgttttggtatgatttacgctggagcacaaaaaaatattggtcctgcggggttaacactggtaattattcgcgaagatttactgggtaaagcacgtaaagaaaccccttcagtgtttgattacacagtactggctgaaaatgactccatgtttaatacaccgccgacttttgcttggtacttatcaggcatggtgtttaaatggttaaaagagcaaggtggcttacaagagatagcaaaacgcaattatgagaaagcgacactgctttatagtgcgattgataacagtgatttctatattaaccgtattgccacagaaaaccgctctttgatgaacgtacctttccaaatgtcttctcctgctttagatgcggttttcttaaaagaagctgaagagcaaggattagttgcgctgaaagggcaccgtgtttcaggcggtatgcgtgcatctatttataacgcaatgccttttgctggtgtacaagcattagttgattttatggctgattttgagcgtcgccacgct

SEQ ID NO: 32618 - DNA, 1287 bp, Proteus mirabilis
atgctcgatccaaatctactgcgtaatgagctagacgcggtcgccgaaaaactggctcgcagggggtttaccctcgatgtggaaaaaattcgtcaacaagaagaacgccgtaaggtgttacaggttgaaacagaatccctgcaagcagaacgtaattcccgatcgaagtctattggtgctgctaaagcgcgtggtgaagatattgagccacttcgtcaggaagttaaccaattaggtgaaaaacttgaagcggcaaaagcggaattagataaactgcaagccgacattcgtgactatgcgttaactttaccgaatctgcctcatgactctgtgcctaatggtaaagatgacagcgagaacgttgaagtatttcgctggggtgaaccaaagacttatgactttgaattaaaagatcacgttactctaggtgaactcacagatggtttagatttcccatctgccgtgaaaatcaccggttcacgttttgttgtgatgaaaggtcaaattgcacgtttacatcgcgcgatcgcccagttcatgctgaacttgcatacagaacaacatggctatcaagaaatgtatgtgccttatttagttaaccatgccactttatatggcacaggacagttacctaaattcagtggtgatttattccataccaaaccacttgaagaagagtctgaaagccaatatgcgctgatcccaacagcagaagtacctgttaccaatatggttagagacgttattctcgaagaagacgaactaccattgcgaatgactgcacatacgccatgtttccgctcagaagcgggctcttatggtcgtgatacacgtggtctgatccgtatgcaccaatttgataaagtagagttagtacaaattgtacatcctgaaaaatcaatggatgcattagaagagctaactggccatgcagagaaagtgttgcaattgctcaatctgccttaccgtaaagtggtactttgtacaggtgatatgggctttggtgcacgtaaaacctatgacttagaagtgtgggtaccggcacaaaatacctaccgtgaaatttcttcatgctctaactgctgggatttccaagcacgccgtatgcaagcacgtttccgtgctaaaggtgacaagaaaactcaacttgtgcacactttaaatggttcaggtttagctgtagggcgtactttagtcgccattatggaaaactatcaaactgctgatggtcgtattgaaattccagaagttttacgtccttatatgaatggccttgagtatattggt

SEQ ID NO: 32619 - DNA, 1485 bp, Proteus mirabilis
gtggcagatcctaatttaagtgacctattaggggcactcgggatacaagcaccgtctttaacgcttaaagacatgacactcgatagccgaaaagccgcgagtggtgatctgtttgtggcaattaaaggccatgaaacggatggtagacgctatattcctcaggcaattgcacaaggtgtttgcgctgttttagcggaagctgaaggtattgctactcatggcgagattcgtgaaagtcatggtatacccgttatttatattgaaaacctaaattgtcaattatcaaaacttgcaggaattttttatcatcagccagcggataaattaaagctgattggtgttactggtactaacggaaaaacgacaacaacacaattgttagcacagtgggcgcaaggtttaggtgaagtcagtgccgttatgggaacggtaggcaatgggttattagatcatattgttccggcaatgaatacaaccggttcagcggttgatatccaattagaattacagcaattagttaatcaaggcgctacctttaccgcaatggaggtttcgtcacacggtttagttcaagggcgcgttagtgcgctaccttttgtcgccagcgtatttaccaacttaagtcgcgatcaccttgattatcatggtgatatggcaaattacgaacaggctaaatggctgttattttcgacccaccatagtggcgaaaaaatcattaatgctgatgatgcggtagggcataaatggttgacgcatctacccgatgcagtggcggtgactatggcggataaattgccggaaaattggcaaggacgctatgtgcaagcgacacaaatcaattaccatgatgcgggtgccactatccattttaattcaagttggggagaaggtgaaattgaaagcccattaatgggggcttttaatgtcagtaacttactctgtgctttagctacacttttggcacttgaataccctcttgatgcagtgattaaagcttccagtgcattaacgcccgtttgtggtcgtatggaagtatttagtgcggataatcgtcctacggtgatcgttgattatgcccacacgcctgatgccttagaaaaagcgttacaagcggcacgcttacactgtacaggcaaactgtggtgtatctttggttgtggtggtgatagagataaaggtaagcgcccactaatgggcgctgtagcagagcagtttgccgataaagtggttatcaccgatgacaatccacgtagtgaagagccacaagccattattcaagatatcctttctgggttaatggatcctggtcgtgcattagcgattgaaggtcgagcagaagccgtgacgaatgtagtaatgcaagcctctcccgctgatatgatcttagtggcaggaaaagggcacgaagattatcaaatcgttggcactcgccgtcttgattattctgaccgattaactgttgcacggttattgggggtgatcgca

SEQ ID NO: 32620 - DNA, 561 bp, Proteus mirabilis
atgtttgaacctatggaattaaccaacgatgcggtgatcaaagtcatcggcgttggtggcggcggcggtaatgcggttgagcacatggttcgtgaacgtattgaaggcgttgatttcttcgcggtcaatactgatgctcaagcattacgtaaaacagcagttggacaaactatccaaatcggtaatgccattacgaaaggcttaggtgcaggtgcaaaccctgaggtaggccgtaatgctgccgaagaagatcgtgaagcgttacgcgctgcactagaaggtgcggatatggtatttattgctgcgggtatgggcggtggtactggtaccggtgctgcgccagtcgttgctgaagttgcgaaagagttaggtattttaacggttgctgttgtgactaagccttttaattttgaaggcaaaaagcgtatggcatttgctgagcagggaattactgagttatctaagcatgttgactcattaatcactattccaaatgacaagctgctaaaagtactcggctgtggtatttcgtacttgacgcatttgggtcgggcaatgatg

SEQ ID NO: 32621 - DNA, 1794 bp, Proteus mirabilis
atgaaattttcacgttcggcaaaagcgaagacaaagacaaagtcaaatgccaaactccgtaaacctgaagaaaaaacaggatttgtgagttggcgttttgcgttgctttgcggtggtattggtattgctttagcggcgttattaatacgagttgcctatttacagattattaacccagatcccctgatccgcgaaggggatctgcgctctttacgtgtgcaaaaagtccccacagctcgtggcatgataagcgatcgtatgggaagaccattggcggtgagtgtccctgtatatgctatttgggctgatcctaaagttgtgttagaagctaaccctgatatgaccgattcacgctggttagcacttgctgatgcattaaaacttcccgttaatcaaatttctcaaaaaatttctgcaacaccttccgctcgttttatttatcttgcgcgccaagttaatcctgaaattagtgattacataagtaagctgaaaatcaaagggataaacatgcgccaagagtccaaacgctattatccttcaggagaagtgaccgctcacatcattggtgttacaaacattgatggtgatggtattgaaggggttgaaaaaagctttaaccaatggcttaccggtgcccccggagagcgagttgtacgcaaagatggctttaaccgtgtgattgaaaatatcgctcaaacagatagccaagctgctcacaacttaatgttaagcattgatgagcgtttacaatctgttgtgtatagagagttaaccaatgcagtcattgaaaataaagccgaatcaggtacggcggttttggttgatgtcaatacaggcgaagtgttagcgatggcaaatagcccatcctataacccgaataatttagcgggaacgccgaaagatgcgatgcgtaatcgagctatcaccgatatttttgagccaggctctacggtaaagccgatggtggttatgagtgcgctaaacaataatattattaaagaaaataccgttattaatactgttccttatcgaattagtggtcatcagataaaagatgttgcgctttatcgtgagctttcgataactggaattttacagaaatcgagtaacgtaggggtatctcgccttgcgttagcgatgccggcgtctgaactggtagatgtttattcccgttttggcctcggaaaaccaactaacttggggctagttggtgaaagtagtggcatatttccaataaaaaaacaacggtggtccgatcttgaaagggccaccttctcattcggatatgggctaatggtaacgccattacagttagcgcgtgtctatgcaactatcggtagttttggtatttatcgaccgctttctattactaaagttgaccctcctgtaccgggtactcgcgtttttcctgaaaaagtcatgagaacagtggttcatatgatggaaagtgtcgccttaccgggcggtggtggcgttcgtgctgcgatcaaagggtatcgtgttgcgattaagaccgggaccgcgaaaaaagtcggcccagatggaaagtatattaatgcctacatttcttatgcagccggtgttgcaccggcaagccgtccacgctttgccttagtagtgatcattaacgagccaaaagcgggcaaatattatgggggtgcagtttctgcaccagtgtttggcacaattatgggcgcggttctacgtacgatgaatgtagagcctgatgcattaacgccagacgataaaagtgaaatagtgattaataaaaaagaggatacaagtggcagatcc

SEQ ID NO: 32622 - DNA, 1254 bp, Proteus mirabilis
atgatcaaagcgacggacagaaaattagtagttggtcttgagattggtacggccaaagtagccacccttgtcggtgagatcctgcctgatggcgtagtgaatattatcggggtgggaagttgcccatctcggggtatggacaaaggtggcgtgaacgatctcgaatccgtcgtaaaatgtgtacaacgggctgtagatcaggctgaattgatggcagattgccaaatatcgtcagtatatttggcgttatcaggcaaacatattagctgtcaaaatgaaattggtatggtgccaatttcagaagaagaagtaacacaagatgatgttgatagcgtggtgcatactgcgaaatccgtcaaagtaaaagatgaacaccgtgttttacacgtaataccgcaagagtacgccattgattaccaagaagggatcaaaaaccctgttgggttatctggtgtacgtatgcaggctaaagtgcatctgattacctgccataacgatatggcgaagaatatagtaaaagcagttgagcgctgtggtttaaaagtggatcaactgatttttgcaggactggcttcaagttttgctgtgctaacagaagatgagcgcgaattaggtgtttgtgtcgttgatatgggtggcggaaccatggatatcgccatatataccggtggtgcattaagacatactcgtgtcattccttatgcaggcaacgttgtgactagcgatattgcttacgcttttggtacaccaccaaatgatgccgaagcaataaaagtgcgtcatggctgtgcattaggctctttagttggcaaagatgaaaatgtcgaagttccaagtgtcggaggtagaccaccaagaagtctacaacggcaaacacttgctgaggtgattgaaccgcgttataccgagcttctaaatcttgttaatgaagagattttgagtgttcaggaacaattacgtcagcaaggaataaagcaccatttagcggcaggtattgttttaacaggtggtgctgcacagatagatggacttgttgaatgtgctcaacgtgttttccacacgcaagtacggatcggtaaaccgttaaatattaccgggctaacagattatgcgcaggatcccttctattctacggcagtcgggcttttgcattacggtaaagaatctcactttggtgaggaaactgaaaccgaaaaacgctctgcagttagtggttggctaaaaaaactcactggctggttaaaaagagagttt

SEQ ID NO: 32623 - DNA, 786 bp, Proteus mirabilis
atgtcacaagcagcgctaaataataaagagataaaagagaaacgtcattctgatagaccgagtaatggtagctatttatcaggattaatcttcttcttatgtgtgattgccaccattatttggggcggaatacaagttgtgaattggatgaaagatgctaatcgtctaccgatatcaaagcttgtacttactggtgagcggcattacacaacgaatgatgatgtgcgtcaggccattttatctttaggccaaccaggcacttttatgacacaggatgtcaatatcattcagcaacaaattgaacgtatgccatggatcaggcaagtgaccgtacgtaaacaatggccagacgaattaaaaatccatctggtggagtatgtgccatttacccgttggaatgacacacattttcttgatagagaaggccgaattttcagtctgccaacgcgattggaaacacaaggaaattacccactattatatgggccgcaaggaagtgagaaaatggtattagcaggttatttagcaatgagagatcagcttcttgccagtaatctgaaattaaaagcagcatcaatgtcagctcgtcaaggatggcaattagtcttagacaatgatgtccgattggagttagggcgtaaggataccgaaaaacggattgctcgctttattgagctgtatcctatcttgcaacaacagactgacaaacgggttgattatgtcgatttacgttatgacagtggtggtgcagttggatgggctcctttattacttgatgtgaatgaa

SEQ ID NO: 32624 - DNA, 945 bp, Proteus mirabilis
atgacaacgaataattttagccataccagtgtattactggatgaagcagtaaacggcctgaatattaaaccttcaggtatttatattgacggtacttttggccgtggcgggcactctcgtctgattttatcgcaattaggtgaacaaggccgtctcattgcgattgatagagatccacaagctatcgcagtggcaaatgaaattgatgatccacgattctctattattcatgggcctttttcaaatattgaacactatatcaatgagttaggtttaagtggcaaagttgatggcgtattattagatttaggcgtttcttcaccgcaattagatgatcctgaacgaggattctcttttatgcgtgatgggccactcgatatgcgtatggacccaaccacaggacaatcagctgcacagtggttaatgaatgccgaagaagatgatattacttgggtgctaaaaaccttcggtgaagagcgtttcgcgaaacgcattgcccgtgccattgtggcgcgtaataaaactgaagagccattaacacgtactaaacagttagcggatttgattagtgaagcaagtccagtaaaagagcgacataagcaccctgcaacacgtagctttcaagcgatccgtatctatatcaatagcgagttagatgagattgaaaaagcattaaaaggtgccgtgtctattttagcgccagcagggcgtttatctgtgattagtttccactctttagaagaccgattagttaaacgctttataagagatgaaagtaaagggcctgttgttccagcggggatcccattaacagaagaacaaattaaagcactaggaagtgctcgcctgagtagcattcataaaatgaaacctaccggtgttgaagttgaggagaatccacgagcgcgaagttctgttttacgcgtcgcacagcgtattgaggaa

SEQ ID NO: 32625 - DNA, 1461 bp, Proteus mirabilis
gtgaatacacaacagctggcgaaattaagatcttttgtgcctgagatgagaaaagttaggcatatccactttgttggcattggtggtgccggcatgggcgggatcgccgaagtgttggctaatgaaggttatgcaatcagtggttctgatttagcgcctaatgtagtcacacaacaactcgttgcattaggggcgacaatctattttaatcatcgccctgaaaatattcgtgatgctagtgttgtggtggtttctaccgcaattagtgcagataatccggaaattattgcagcaagagaagcgcgtattcctgtgatacgtcgtgcagaaatgttagcggagttaatgcgttatcgtcacggggttgcgattgcaggaacccacggtaaaacaacaacaacggcgatgatttcgaatatttatgcacaagcaggattagatccaacctttgttaatggcggtttagtgaaatcagcaggtacccatgctcgtttaggttgtagccgctatttaattgcagaagcggatgagagtgatgcttctttcttacatcttcaacctatggttgcggtggtaacgaatattgaagctgaccatatggacacttatcacggtaattttgataatttaaaagagacttttattacttttttacacaacttaccgttttatggtcgcgcagtgatgtgtattgatgacgatgttattcggtcaattattcctaaagtagggcgttatattactacctatggttttagtgaagatgctgatgtacgcattactcattacgaacaaaaaggtgcgcaaggatttttcactatttctcgtgaagatatgcctgatttagatgtggtattaaatgcgccgggacgtcataacgccttaaatgcaaccgcagctgtggctgttgctacagaagaagggattgcggatgagcatattttagccgcactacttaatttccaaggtactgggcgtcgtttcgatttcttgggaaatttcagtcttgagcatgttaatggccaagaaggggaagtcatgctggtggatgattatggacatcacccaacagaagttgatgcaacgataaaagcggcacgagcaggttggcctgataaacgtttagtgatgttatttcaaccacatcgttatacacgtactcgtgatttatatgaagattttgcaacggtgcttaatcaagttgatattttattattaaccgatgtttatgcagcaggagaggcgcctattcccggtgcagatagtcgttcactgtgtcgtactattcgtcaacgtggcaaactagatccgatttgggtttctgatgttgagaacatctcctcaatattagcgggtgtattaacagataatgatcttgttttagttcaaggtgctggaaatattggtaaaatagcgcgtcgcttagcagaaacaaaattacaaccatctttaagcgaggat

SEQ ID NO: 32626 - DNA, 456 bp, Proteus mirabilis
atgtttcgtggtgcaacactcgttaatctcgacagcaaagggcgaataacagttccttcccgttatcgaacaacgctgaacgaggcttctgaaggtcaaatggtctgtaccattgatctcaatcagccatgtttattgctgtacacccttcctgaatgggaaaaaattgagttaaaactggcggcgctttcttccatgaatcccgccgaacgaagagtgcagcgtttattacttgggcatgccagtgaatgccaaatggatagcgcaggacgtcttttgttagctagcacgctaagacagcacgcggggctaaccaaagaggtcatgttagtcggtcaattcaataaatttgaattgtgggatgaacaggtctggtatcaacagatcaaagaagacattttggcagagcaaacctcacaggaaccgttatcgacacgactattggatttatcactt

SEQ ID NO: 32627 - DNA, 1080 bp, Proteus mirabilis
atgagcgaacgtaaacgccgattaatggtgatggccggcggaacaggagggcacgtctttcctggattagcagttgctcattatctgcaatcccaaggctgggatattcgttggttaggaaccgcggatagaatggaagcacaattagtgcctaagcatggcattgaaatcgagtatatccgtatttcgggtctgcgaggtaaaggggtaaaagcgttaattgcggcacctattcgtattataaaagcgatttttcaagcccgtcggattatgaagcgctatcagcctgatgccgtattaggcatgggaggctatgtttctggaccaggcggtgttgcagcatggagctgtggtattcccgttgttttacatgaacaaaatggtattgcaggcttaactaaccgttggttgtcaaaaatagccaaacgtgtgttacaagcattccccggtgcgtttgctaatgcgcctgttgttggtaatccggttcgtgacgatgtcttagcacttgaagccccagcagagagattaaaaggcagagaaggtgctgtccgagtgctggttattggtggtagccaaggtgcgcgtatcttaaatcatacaatgcccgtggtggctggattattaggagagcgagttacaatttggcatcaggccggcaaagggagcgaaagtgataccaaattacgctatcaaaatgaactttctaaaaattcagttaaatctgagtataaagttactgaatttattgatgatatagcgcaagcttatcaatgggctgatgttgttgtatgtcgttcaggtgcattaacagttagcgagattgccgctgcggggttacccgctatttttgttccttttcaacataaagatagacagcaatattggaatgcattgccattagaaaatgccggtgcggcgcgtattattgaacagaatgatttaacgccagaagcgatagctgacaccctagaaaattgggatagacatcagctaatgctaatggcagaaaaagcacaaagtgttgcgattacggatgctactgagcgagtcgctaatgtaattatcgaagtggctaaaaaa

SEQ ID NO: 32628 - DNA, 1191 bp, Proteus mirabilis
atgagtgtatacgcaatgcgaagattaaaacagtggctggtgggaagttatcaaacagataacagcgcgttcgtgccttatgatcgcactttgctctggtttacattcggattagcggttgtcgggtttgtgatggtaacctcggcgtcaatgcctgttggacaacgtttagcagaagatccttttctatttgctaaacgtgacggcatttatatgattgttgccctttgccttgcattagtgacaatgcgagtgccaatggcggtatggcaacgctacagtagcttaatgctgtttggttctatcttgctattactcgtggtattggcagtgggcagttcagtaaatggcgcatcacgttggattgcatttgggcctttacgtattcagccggcagaactttctaaattggcactgttttgttatctctccagttatttggtgagaaaagtagaagaagtgagaaacaatttttggggattctgtaaacctatgggggtgatgttaatattagccgtgttactgctattacaacccgacttaggtacggtggtcgtgttgtttgtgaccacattagcgttgctttttttagccggtgcaaaaatttggcaattcctcgccattattggtacaggtattgccgctgttgtgatgttaattattgttgagccttaccgtgtacgacgtatcacttcgttcttagaaccttgggaagatccttttggtagtggttatcagttaacacaatccttgatggcttttggacgcggtgatctactggggcaagggttaggaaattcagtacaaaagttggagtatctacctgaagctcatactgactttattttctccattttagcagaagaacttggttatatcggtgtggttttagtgcttttaatggtattcttcatcgcttttcgtgcgatgcaaattggacgccgtgctttgctgctcgatcaacgtttttcaggctttttagcctgttcgattgggatctggtttaccttccagactttggtcaacgtcggtgcggcagcaggtatgttgccaacaaaagggttaacgttacctcttattagttacggtggttcgagtttgattattatgtcaacggctatcgtgatgttgttacgaattgattatgaatcacgcctagcacaggctcaggcgtttgtaaggagtcctaaa

SEQ ID NO: 32629 - DNA, 1308 bp, Proteus mirabilis
atggcaaattatcaggggaaaaaagttgttatcgtgggactaggcattaccggtctatcctgcgttgacttttttatccgccaaggtgtaacacctaaagtgatagatactcgccagcatcccgcgggtttagataagctacctgctgatgttgagtatcatacggggagttttcatcaagtatggcttaatgacgctgatttaattgtctcaagtccgggtattgcgttatcaacgcctgagttagttgaagcgcgagatcatggagtggaaattgtcggtgatattgagctattttgccgtgaggcaaaagcacctattgttgcgataacaggctctaatggcaaaagtaccgtaacgacgttggtgggggaaatggctaaagctgacgggatccctgtcggtgtcggtggcaatattggtgtacctgctttaacgttattaacacagccttatgacttatatgtcttagagctatcgagctttcaattagagacaacctatagcttaacagcggcggctgccacggtattaaatattagcgaagatcatatgaatcgctatccgttaggattagaacaataccgtgaagctaaattacgtatttatgataatgctaaaacctgtgtctataacgcagatgatgttctgacattgcctttagctggcaaagatgcacgttgtgtgagttttggtatcggacaaggggattatcaacttgataataccaatcgttacttgaacgtaaatggtgaaaatattcttgccacttcacagatgttcctttctggtcaacacaattacaccaatgcattagccgcattagcgttagctgatgcagtgggaatttctcgtaaagcatcactagctgttttaaacacctatcatggccttgctcatcgtttccaattagtttactcccataatggggtacgttggatcaatgattctaaagcgactaatgtaggtagcacagaagcagctttaagagggcttgaagtagaagggactttgcacctgttgttaggtggggacggtaagtctgctgattttagcgcgctattaccttatctcagtggcgataatattcgcttatattgcttcggacaagatggtcaagcattggcaaatttacgaccacaagtctcacaattaaccgcgactatggaagaggcgatgcgattacttgcaccaacagtgcaaactggcgatatggtgctactttcacccgcttgtgcaagtctagatcagtttaaaagtttcgaacaacgtggtgatgagtttgcccgtttagcgcaggagcttggc

SEQ ID NO: 32630 - DNA, 1080 bp, Proteus mirabilis
atgttagtttggctagccgaatatttggttaaatatcatacattttttaatgtgttttcttatctgacattcagagcgattgttggtttattgacggcattaattattgcgttatggatgggaccccatttaattgcatggttacaaaaaatgcaaatcgggcaagtggtgcgtaacgaaggccctgagtcacactttagcaaacgtggtacgccgaccatgggtgggatcatgatcctattttctatcgctgtatcaaccttattgtgggcgcgattagataatccttatgtatggtgtgtactcttggtgctaattggttatggcatcatcggttttatcgatgattatcgcaaagtagtgcgtaaagatactcgaggcttaatagcgcgttggaaatatttctggcaatcggtattagctttagcggttgcatttagtatgtacgcgattggtaaagataccccagcaacgcaacttgtcgtgcctttctttaaagatgtcatgccacaacttggcatgttgtatatcttactggcttattttgtcattgttggcaccagtaacgcggtaaatttaaccgatggtttagatggcttagccattatgcctacggtgtttgtagcggctggatttgcattagttgcatgggctacaggtaatgtcaattttgccagctacctaaaaattccttatttaatgcatgcaggcgaattggtgattgtttgtaccgccattgtcggtgcgggattaggcttcctttggtttaatacttatcctgcccaagtctttatgggtgatgttggctctttagcattaggtggcgcattaggtactatcgccgtgttattacgccaagaatttttattagtgattatggggggcgtgttcgttgttgaaacgctctcggttattttacaagtaggttcatttaaactgcgcggccaacgtattttccgtatggcgccaatccatcatcactatgaattaaaaggttggccagagcctcgtgtgattgtccgcttttggatcatctctcttatgttagtccttattggtttagcgacattaaaggtacgt

SEQ ID NO: 32631 - DNA, 1380 bp, Proteus mirabilis
atgatagcgctttctctcgaaaccattgcacaagtcactcaaggcgtgttgagtactattactcaaagccaagccaatcaattaatgatcaaatcaatttctaccgatagccgtaaaattgatgatgcatgtctgtttattgctttagcaggtgatcgttttgatgctcatgactttattgctgatgtcaaacaaaagggtgccgttgcggttttagttaatcggaaaatcgatgttgaatgtccacaaatcatcgtaaaagatacccgtttagcaatggggcatattgccgcttatatccgttcgcttagcaatgctaaaattgtggcgttaacgggctcttctggtaaaacgtccgttaaagagatgacggcttcgatactgcgtcactgtggtgaaaccttatatacacatggcaatttaaataatgatattggtgttcccctgacactctttcgtctaacccctgaacatcgttttgccgtgattgagcttggggctaaccatattggtgaaatagcctataccgtggatatggttaaacccgatagtgcattggtcaataatctcttttctgcacatattgaaggttttggttccttacaagggattgctcaagctaaaggtgaaatattcactggcttaaaagagcaaggcacagccattattaatcagcaaagtaatgatgttgcgctatggcaacagcattttaactcacgtcaaactcagtggtctttctctttatctgcagacattcaggccgatttttacccaacgaatatcgttgttaatcaactcaccaccgattttacattgcatacgccagaaggaggtgtagcaatcaccctacctttacctggtcgccataatattgccaatgcgttagccgcaagtgcgttagccttgtcggtaggggcgacattaacggatattcagcaaggtttagcggtactgaaagccgtacctggcagactctatcctgttgaattaacaacaggaaaaatagtgttagatgatacctataatgctaatgatgggtcgatgatggcagggctgcaagttttatctcaattaccaggatataaaatctttgttgctggagatatggctgaactaggcgaggattcagaaaaatgtcaccgtgatgtgggacgttttgctcatcaagtcggtatcgatcgggtattaaccgtgggtcattacagccagtttattagtcaagaaaataaaggcggtgagcatttttcatttaaagctgatttgcttacccaattaattccattattacagcagcatgatgttgtttcagttttagtaaaaggttcacgaagctcagcaatggaggatatcgtgaacgcattaaaggagtgctttgaatgt

SEQ ID NO: 32632 - DNA, 660 bp, Proteus mirabilis
atggaaatctatttagataccgcagatattgaagaagtgagaaaactttcacaagtgcttcctattgctggtgtcactaccaatccttctattattgctcaatcagcgcagcccattgaaacgctattacctgaattaaaagccgctatgggcggtaaggggcgggtatttgcgcaggtaattgcccgtgatatcgataccatgattgaagaagcattgcgcattggtaatattgccgataatactgtgattaaaattcccgtcactgaagctggcttggttgctattaaacaattaaagcaaaaaaatatgttggtattggggactgctatttacagtgtgtctcaagggttgatggcggcgttagcaggggctgattatatcgctccttatgtgcatcgtatggatagacaaggctctgatggtgtgagagtagtaagagagttgcaaacgctgatttccatgcataatttacccactaaaatactggcagctagttttaaaacaccacgccaagtggttgattgtctgttgtctggcgcttcggcagtaacacttccgatagagcttgcctactctattatccgttcacccgtagtcgatgatgcgattaataaatttactgatgattggtcattagcctttaatcgccaatcattg

SEQ ID NO: 32633 - DNA, 1929 bp, Proteus mirabilis
atgattgttttttcttctttgcaaattcgccgtggtgtcagggtattacttgataatgccagcgcaacgattaatccaggacaaaagattggtcttgtgggtaaaaatggctgtggcaaaaccacactgctctctttattaaaaggggatctacaagctgaagcgggtaatgtcacgtttcctagcacttggtcaatggcatgggtaaatcaagagacacccgctttagacgttcctgccattgattatgttattgatggtgatagagaataccgcgaattggagcgtcgtctacaacaggcgaacgacaataacgatggtcatgctattgccctgatccacggccaactcgatgctattaatgcgtggactatccaatcacgtgcagccacattacttaatggcttgggattcagccaacaacaactcactgagccagtaaaatcattttctggtggttggcgaatgcgcttaaacttagcacaggcactaatttgtcgttctgatctattactacttgatgaaccgactaaccacttagatttagatgcggtaatttggctagaaaaatggctaaaaagttataatggtacgttgattttaatttcccacgaccgagattttcttgatccgattgtggataaaatcttacatattgaacaagagaaaatatttgaatattcaggtaactactcttcgtttgaaatgcaacgtgcaacaaaattggcacaacaacaagcactctttgaaaatcagcaagcaaaaattgcccatttacaaagttttattgaccgctttaaggcgaaagcaactaaagccaaacaggcacaaagccgtgtcaaaatgcttgaacgtatggagcgagtggcgcctgcgcactcagataacccgttccagtttagttttcgccaaccagaaagcttaccaaatccgcttctgtctatggaaaaagtcagtgccggttacggtgataagattatccttaataacatcaaacttaacttaattcccggctcacgaattgggctcttaggccgtaatggtgcaggtaaatctacattaattaagctgttagctggagaattagctccactacaaggaaaggttgccctttccaaagggatcaaattaggttatttcgcccagcatcagctggaatatttacgtgccgatgaatctgcattacaacatttaactcgtttagcgccacaagagactgagcaaaaattacgtgattatctaggagggtttggtttccatggtgataaagtcaccgatgcatgtggccaattttctggtggtgaaaaagcacgtttagttttatcgctactggtttggcaacgcccaaatttactactaatggatgaaccaaccaaccaccttgatttagatatgcgacaagcattaacacaagcgctaattagctttgaaggtgcgattgttgtggtatcccatgacaggcatttattacgctcaaccacagacgatttatatctcgtccatgatagtcaagtagagccatttgaaggcgaccttgatgattatcagcagtggttagttgatcaaaatcgccaagagactcaagctaataaaacgcaacccgatcaagaaacaacaaacgcctcgaacttaacggctcaagataaaaaagagcaaaagcgtaaagaggcggagtttagacaacaaactcaacctttgcgcaaaaagctcaccacattagaaagtaaaatggataagcttagccaagagctgaccgccatcgaaactgagctttctgatagtcaaatttatgaagcgaagaacaaggcgacacttaccgattgcttaaaccgtcaaagtattaccaaatcggctttagaagaagttgagatggcgtggatggaattacaagaaaaactagaagagatgaccaacgcttttgagtctcaa

SEQ ID NO: 32634 - DNA, 1026 bp, Proteus mirabilis
atgtccataagacagttatctcgattgactcatcgacttggtattttgctaacactaagtgtgatgttaatgatatccccaatgacacaagcgacagaaacccaagcaggatggcaacaatttaaagcgcgttacattactcccgaggggcgtgtcattgacagtgctaatcaaaatatttcacactcagaaggtcaaggatatggcatgttaatggcggttatgagtgacgatcgccaaacctttgtacaattatggcactggacggcaatgtcgctgtatcgtggtgatcttggcttatttaaatggcgttatgaacccgaaaataatcaacatacacccgatcctaataatgcaacagatggtgatattttaattgcttgggcattattaaaggctggggaaaaatggcatgatgaaagctatctttcagcgtcagattctattcagcatgcgatccttgaacacactttagtgaagacagaaaactacagtgtactcttaccgggaattaatggttttaaaacccccgaagaaattatcattaacccctcctattttatctttccggcatggaaagatttctatcgagttagtcatgatagtcgctggaaaaatttaattaacgatagccaatccttattaagaaaaatgcgttttggtaaatataaattaccaagtgattgggtaagtttataccctgatggtcatcttgccccgagtgaaaaatggccagcacgatttagttttgatgctattcgcattcctctttatttagcatgggcacaagataaactcgcattacaaccttttgtgaattattggcaacaatttgatcgtgataagacgcctgcgtggatcagcattgatggtaaagagcgcgccgattataacttaacgccaggtatgatggcggtaagagatctgacaatgaaaacagcaattgaaaatgtcgatttaactaaggatacggattattactcttcagccttacatttattagccgcctttgcacagaataataac

SEQ ID NO: 32635 - DNA, 918 bp, Proteus mirabilis
atgagtattcgcatcgttcctaaagagcaattaggtaaagagccatcagaaaaaagcatcagctttattccaccggtgttattcccgaatttaaaaaacctctaccaacgtcgtgctgaacgttttcaagcattagccaaagacaatcctttcgctgattatcttgaatttgctgccgaaattgccttagcacaagaaaaagcattacatgataacccgcttgaattagatttaaccccgttactttctcaacaaacgggtatagcgccgttagataaaaagacctttaagcgtagtaagcattggcatgcattactcgcctcaatcattgcggaattacaatccgttgtacctgaaagtgctaaaattgccttagaaaatctctctaaagcctctgaaaccgaattagaagagatggcaacagcactattaaacgatgaatactcaaaagtttccgctgataaatcagtgtttatttgggcggcattatcactttactgggcgcaactggcggcaaacattcccggtaaagcgaaaacagaatatggcgaaaatcgccaattttgccccgtttgtaacagtatgcctgtatcgagtatggtacaaattggcaccactcaaggactgcgttatttacactgtaatttatgtgaaaccgaatggcacgtggtacgtataaaatgtactaattgtgaactaacgggcaaattaaattactggtctcttgatagtgaaaatgcgccagtcaaagcagaaagctgtggcgattgtggtagttatttaaaaattttataccaagaaaaagatgctaacgtcgatgctgtagctgacgatttagcctcccttattcttgatgcaaaaatggaagaagaaggttttgcacgcagtagtattaacccccttctattccccaatgaa

SEQ ID NO: 32636 - DNA, 654 bp, Proteus mirabilis
atgatgaagaagaaaggtgataaaattcttcgccataccgcatcagagcgaattaatcactgggttgttgtgattgtatttctattcacagccatcagtggtttgggtttcttcttcccatctctgaactggtttatgaacattttaggtacgcctcaactgtcacgtttacttcacccatttgtggggagtgcgatggcgattttgtttatctttatgttcttcagatacctgaagtacaactttattgataaagatgacttagtttgggctaaaaatattcataaagtgctaaaaaatgaagaagcgggtgatattggtcactataacttaggtcagaaaggcatttactgggcattatctatcagtttgatcctgctgacggtcagtggcatcatcatctggcgtccttattttgctgaatatttctccattccggtgattcgtattgcattgctggtgcactcatttgccgcaatcttactgattattaccgttatcgttcacgcttatgcagcgttttgggtgaaaggctcaattcgtagcatggttgaaggttgggtgactcgcggttgggcgaaaaaacaccatcctcgctggtatcgtgaagtactggaagaagagaaaaaagaagccgaaaagcagtcacagaaa

SEQ ID NO: 32637 - DNA, 525 bp, Proteus mirabilis
atggaaagctcatttacgccaacagaagaactactaaacactcgcgctacacaacagaaatcgcttaacaaagatattccttaccaagaaattttgttaactcgcctgtctatgcacgtccagagcaaacttcttgaaagtcgtaataatatgttaaagtctcagggcattaacgagacattatttatggcacttatgattttagatacaacggaaaatcgtagtattcaaccatcagaattgagtgcggcgttaggctcatcaagaacaaatgccactcgtattgcagatgaattagaaaaacaaggatggattgagcgtcgtgaaagtcataatgaccgtcgctgtctacatcttcatttaactgatgctggagaagagtttttaaatagcttattaccaccacagcacgaatgtttaaagaaaatttggtcagtattagatgaaggtgaacaaaaacagctagaaaccctaatgcgtaaattattattacaacttgatacattagcggataatcagcaggaa

SEQ ID NO: 32638 - DNA, 1197 bp, Proteus mirabilis
atggcaattaaactcgaagtaaaaaacctatataaaatatttggtgagcaccctaaacgggcctttgaattattaggatctggtatgaacaaagaccaaatctttgataaaacagggttaaccgttggtgtgcaaaatgccaatctggccattgaagaaggcgaaatatttgtcatcatgggattatcaggctctggtaaatctacattagtgcgccttctcaatcgtctgatagatcccactaaaggcgaagtccttattgatggtgaaaacatcaccaccatgtctgataaagatttacgacaagttcgacgtaaaaaaatcagtatggtgtttcaatcattcgctttaatgcctcatatgaatgtactcgataatacagcatttggtatggagcttgcaggcattagcaaagaagagcgctatgaaaaagccatggcagcattagagcaagttaacttaagctctcatgctcaatcttggccggatgagttatccggtgggatgcgacaacgtattgggcttgctcgtgcactggccaatgatcctgatatcttattaatggatgaggcattctccgcacttgatccattaatccgaacagaaatgcaagatgagttattaagcttacaaggtgataaacaacgcaccattgtgtttatttctcatgatctggatgaagccatgcgtattggtgatcgtatcgcgattatgcaaggcggtgtggtggtacaaatcggtacccctgatgaaattcttaataacccagccaatgattatgtacgtaccttcttccgtggcgttgatatcagtcatgtatttagcgctaaagatattgctaaacgtcgcccagaaacactactgcatattgcgccaggttttggtccccgttcagcattaaaagtactggaagatgaagatagaaactttggttatttaattgagcgaggacggaaatttgcaggtattgtttctgtcacttctcttgaagaagcattaaaagcgaagcaacctattggatccgctattttaactgaaccttgtgcgattaatggtgatacaccattaaatgaactgatttctactgttgcgcaatctccctgtgcgatccctgttattgatgaaaaaaaccgttatatcggcttaatttcgaaaggaatgttgttacaagcactggataaggagacaccaaatgag

SEQ ID NO: 32639 - DNA, 966 bp, Proteus mirabilis
atgtctgcatcttatttaagtcgtgttaatgcgataaattggaatcgtattgaagatgaaaaagatttagaagtttggaaccgtttaaccatgaatttttggttacccgaaaaaattccactttctaatgatataccttcatggaataccttaacccaagctgaaaaacagttgactatccgtgtatttacagggcttacactgctcgatacgatacaaaatacggtcggggcaccaaccttaatgcctgatgctcagactcctcatgaagaggcggtattatcgaatatctgttttatggaagcggtacatgctcgctcttatagctcgatattttcgacactctgcttaacaacagatgttgatgatgcttatcgttggagtgaagaaaatacctatttgcaaaagaaatcagatattattctgcgttattatcaagatagtgatccattaaagaaaaaaattgccagtgtatttttagagtcttttttattctattctggattttatttaccaatgtattggtcaagtcgagggaaattaaccaatacagctgacttaattcgtttaattattcgtgacgaagctgtgcatggttattatattggctataaattccaaaatcagttattaaataaatcatcattagagaaacaagatattaaagacttttctttctcattattattagatttatatgataatgaagttaaatatacagaagatctttacgactctgtcggttggacagaagatgtaaaaaaattccttcattataatgcgaataaagcgctgatgaatttaggttatgaagcactatttccagatgaaataactaatgttagtccagcaatactttcatcactatcgccagatgcaaatgaaaatcatgatttcttttctggctcaggctcttcttatgttattggtaaaacgatcaataccgaagatgatgactgggatttc

SEQ ID NO: 32640 - DNA, 2124 bp, Proteus mirabilis
atgacccactctatagaacaactcgattatcacgccttaaatgccatgctcaatctctatgatgagcaaggcaatatccagtttgataaagacaaattagccacccaccatttttttcgtcaacacgttaatcaaaatacggtgttttttcatgatctaaaagaaaagctcgattttctggtgcaacaacactactacgaagcacaagtattagagcagtacgatttcccgtttatcaaacagctttttaagcatgcctatagcaaaaaatttcgctttcaatcgttcctaggtgcatttaaatactacaccagttacaccttaaaaacctttgatggtgagcgttatctcgaacgctatgaagatcgtgtttgtatggttgccttaaccctagcacaggggaataccaaactcgccactcaccttgtcgatgagataattagtggccgtttccagcctgcaacccctactttcttaaattgtggaaaaaaacagcgtggcgaattggtctcttgttttttattacgtatcgaagacaacatggagtccattggccgagcagtcaattctgcgttgcaattgtcgaaacgtggcggaggtgttgctttcttactgactaatttacgagaagcaggagcccccataaaacgcattgaaaaccaatcgtctggcgtagtaccggtaatgaaaatgcttgaagatgccttctcatatgccaatcaattaggcgcaagacaaggtgctggagcggtttatctccatgctcatcatcctgatatctatcattttctagatacaaaacgagaaaatgctgatgaaaaaatacgtattaagacgctttcattaggtgtcgttattcccgacattacctttgaattagctaaacgcaacgaagatatgtatctattttcaccttatgatgtagaacgagtatatggcgttcctatgtcagaaatcagtattagcgaaaaatatactgaaatggtcaacaatgcagagatacgtaagaaaaaaattaaagcacgggcattttttcaaactttagctgaaattcaatttgaatcaggttatccctatattatgtttgaagatactgtcaatcgcgcaaatccgattgcgggccgaattaatatgagcaatttatgctcagaaatcttacaagtaaatagtgccagtgaatacaatcctgatttaagttatcgacaaattggtcatgatattagctgtaatctcggatcaatgaatatcgccatggcgatggactcaccagattttgcgcataccgtaaatgttgccatcagagcactgacgagtgtggcacaaatgactaaaatagaatcagtaccttctattgaaaaaggcaaccaagcatctcatgccattggcttagggcaaatgaacttacatggttatttagcccgtgaagggatttattatggttcagaagaaggacttgattttaccaatatctatttctataccgtaacatactatgcccttttagcctctaaccaattagcgatagagactaaacagcgctttaaagggtttgaacagtcaaaatatgccactggggagtattttgataaatatttatcaaaacagtggttacctaaaacccaaaaagtccaccagctatttagccaatccaatattcatattccaacccaagaagattggcaaaaacttaagctctcgattatgactcacggtatttataatcaaaacttacaagcaataccaccaacaggatcaatctcttatatcaatcactctacatcgagtattcaccccattgtggcaccgattgaaataagaaaagaaggtaaaatcggtcgggtttattaccccgccccttttatgaccaatgaaaaccgtcatttttatcaagatgcttatgaaattggcgcagaaaaaattatcgatacctatgcccaagcatcacaacatatcgaccaaggattgtcgctaacattattcttttctgatgaagcaaccacaagggatgttaataaagcacaaatttatgcatggcgtaaaggtataaagaccttgtattacattcgtattagacaaacagcattagccggcacagaaataaaaggctgtgtttcatgcgccctt

SEQ ID NO: 32641 - DNA, 629 bp, Proteus mirabilis
atgtctgtgatcctctataccaaaccaaattgtgttcaatgcagtgcaaccgagcgcgcattacaacaacaaaaaattcctttcactgcggttgatctcacccaagacactcaagcattagcaaaaatagtttctatgggatatcgccaagtaccagttgtcgttaatggtgacgaacattggtctggcttctgcccagataaaattcgtcaaatagcgcgctaaaggagcaacttatgcaatcgactgcccctttaatttatttctctagtcgctcagaaaattgtcaccgcttcgtacaaaaacttaatctacaagcgacaaggataaaagaggatgaaccactacaagccacacaaccttttgtgttgctctgcccaacttatggtggcggtggcgttaaaggcgcagtgcctaaagcggtgatccagtttttaaatattcctgaaaatcgccaattaatacgcggtgttattgcttcaggaaataccaattttggctctgcttacggcttagcaggtgacattattgcacaaaaatgccaagtcccttttctctatcgttttgagttacttggtacgcctgaagatgttaaacgtgtaaaaaccggattaagcacattttggtca

SEQ ID NO: 32642 - DNA, 1032 bp, Proteus mirabilis
atgaatgaacctatttcattgcaatcatttaatacatttggtttgaaagccaatgctcgtcatatagaaacggcaaagaatacagatgaactctgtcggtactggcaaaatgctcaagaccaaaaactgcctattcttattttaggcggagggagtaatgttctattcattgaagattttaacggtacggtgattagaaactgtatttctggcattgaaattacagaagatgagcaacaatggcatattcatgttggggcaggtgaaaattggcataaccttataaagagcttaattgaaaagcatatttatgggttagaaaatctcgctttaatccctggtaatgttggatctgctcccatacaaaatattggtgcttatggtaaagaattaaaagacgtttgcgcctatgttgatattgttgagttaagcactggtaaagtcacgcgtttaacaaatgaagagtgccaatttggctatcgcgacagtatttttaaacatcactatcagcaaggttatgcaattattgccgttggcttagtgctgaataaacattgggaacctattttgacctatggtgatttagctaaattatcaccagaaacagtcacaccacagatagtattcgactctgtatgcggtatgaggacaagtaaattaccggatcctgctcttacaggtaatgcgggtagtttttttaaaaatcctattgttgatataaaacttgcacaacgcttaaaaagtaaatatccattttgccctcaatatgtacaacataatggtgtaaaacttgctgcaggctggcttattgatcaatgtggtttgaaaggttatcagagcggtggcgctgctgtgcatacaaaacaggcattggtattaattaataaagaaggcaaggcaagtgggcgcgatattgttaatttagcaagttatattcgccaaaaggtatttgaacgttttggagtgcaattagagccggaagtgcgttttattggacggcatggcgagattaacgcggtggatgctatttca

SEQ ID NO: 32643 - DNA, 1278 bp, Proteus mirabilis
atgcatcctttagaaaagattgttcagcaacataaatcaggcaaacagaatggtatttattctgtttgttctgcccaccctttagtaatagaagctgctttattacaagcgctggacgatgattcctttctgctgattgaagccacctctaatcaggttgatcagtttggtggttatacaggtatgactcccgctgatttctaccaatatgttattgagaaagcggaaaatgtcggttttcctgtcgaaaagcttatccttggtggtgaccatttagggcctaatcgctggcagcatcttaatgctgaagaagcgatggcaaatgcggatgtacttattgcacattatgttgccgcgggatttaaaaaaatccatcttgattgcagtatgtcttgtgcagatgatcctattcctttaacagatgaaatcgtggcatcgcgtgcagctcgtcttgctgttattgcagaaaataccgccaaaaagacatttggttttagtgatattgtttatgttgttggcacagaagtccccgttcctggtggtgctgctgaagagcttgataccgttgaggtgacttcacctgatgctgcccgtaaaacattagcgtgccatcgccaagcattttatgacgctggtgtgggagagtgttggactcgtgttataggtttagttgtacagcctggggttgaatttgatcataccggtattattgattatcaatctgaaaaagcacaagcgttaagccaagtagtaaatgactattctcatctggtttttgaagctcactctacagattatcaaaccaatcaagcttatcagcaactcgtccatgatcactttgctattttaaaagttgggccggcgctaacatttgctatgcgtgaaggtttatatgcactttgcgccattgaagaaacattatttcctcttgagaagtgctctcgattacgtgaaaaaatggaacaattgatgtgccgtgagcctaatttttggcaaaaatattatcacggtgatgaacgtcaactcgcctttgctcgtgtttatagttttagtgatcgtattcgttattattggcctgatgccgagattaatactgctattgacacattaatggataatttatctgttaagcctattccacttcccttacttagccaatatttgccttatcaatttacccagtttagagaggggaaaattgcgggtacgcctgagtcatttgttattgcgaaaattcgtgatgtgttgtcggtttatgccgatgcgtgcaatgtccat

SEQ ID NO: 32644 - DNA, 1167 bp, Proteus mirabilis
atgaatcagcgatatgccattttagcagatagaacctttacacctgaaggtatccgttatctctgctatgtccatgttaatggtgaaaatattgaatcaatcaccacacaagcaccaacagattgcccagttattcgcttaaaaggaaaatcattattacccggttttgtggatatccatattcatggtcgtgaaggggctgatgtgatggatgcaacgcaacaaggactacaaactatagccgatgcgctggttaaaacaggggttgtggcttgggttgcaacgactgtcacagcaccgatggaggatatccgtcatgcgctattacaagtccgtgagtttgtatcaaaacctcaagcaacaggtgcgttgttactcggtagctttttagaaggcccttattttacagaacgccatcgtggttcacaccctgtgaaatatctcaaagcgccgaccatctgtgaattagaaacattactcgacagtgctgggggatcgctattgcgtgttgctgttgcacctgaagctgaaggtgcgatgaatgcgattgattggttggtcagccgaggaattaaaccaagtgtggcacatacagcagcaacttatgaacaagcttcacgagctttttcacacggtgctgattgtggtgtgcatctgtataacggcatgaccgggcttcatcatcgtgagccgggatgttgtggtgcagtgttatatcacagtgtattagctgaacttattgctgatggtatccatgttcaccctgtaatgatgcaactggcatatcgcatgaaaggatatcaacagattgccctaattacagattgtatgcgagcgggaggtttagctgatggtgattacacattaggtgctcaaacggtcaccgtcaccaatggacaggcaaaaactgccgatgggtcgctagctggtagcacttgcagtcttgatagtgcgttaagaaacatggtgcaacttgcacatattcctgagtgggaagcagttcaaatggcatcggcgatccccgctgaatatctcggcataggggataaattgggttatatcaaagcaggtcaacaagccagctttgccgtggtggatgagtgttttcatcttaccgatacattcatcagaggaaatcatatttactctgtatccggggataatgca

SEQ ID NO: 32645 - DNA, 852 bp, Proteus mirabilis
atgtatctggtttctactcgtaatatgctcaataaagcacagcatgaaaactatgctgtgcccgcttttaacattcataacttggaaactatccaagtggtaatggaaactgcggctgaaatggcatcacctgtgatcttagcaggcacacctagcacgtttgcttatgctggtagtgattatttaatttcgatttgccagcaagcggctgaacaatatcgcatcccagtagcactacatttagatcatcatgaaaatattcctgatatttgcaataaagtgatttcgggggtgcgatcagccatgatcgatgcttctcattttccttttgaagaaaacattcgcctggttaaagaggtcgtcaatttctgtcattattgggattgcaccgtagaagctgaattaggtcgtcttggtgggcaagaagacgatttaatcgttgatgcgaaagatgcgctatttaccgatcctgattcagcagtacaatttatcaaagccacgggaattgactcattagcagtggcgattggtacagcacatggtatgtataaacatgaaccacatcttgattttgatcgtctacatgccatccgccaaaaaacagagatccctttagtactacatggcgcgtcaggtattcctgatactgatgtacgtcattgtatcgacttaggtatttgcaaagttaacgtagcaaccgaacttaaaattgctttctctaacgcaattaagcagtactttttagataatcctgatgccagtgatcctcgccattatctagtgccaggtaaagcggcgatgaaagcggtggttgcagataaaattcgcgtctgtaaaagtgatgggaaactg

SEQ ID NO: 32646 - DNA, 1608 bp, Proteus mirabilis
gtgaccttaccttttgttaaaaaaagcatactcgcggggatcattgccacgtcatgtttaagccttccaatatcagcccatgctggtggcacacctgaaaaaccgaatgtactgttaatcgtaatggatgatttaggcacaggacaacttgattttgtactggataccttagatgtagatgcgttagctcagcgaccaacacctcctcgttataaaggtgatatcaataaaatgatagaagccgcacgtattgcgatgcctaatgtcagtgatatggcagaaaacggtgcaaaaatgactaatgcatttgtagctcatcccgtttgtggcccttctcgtgcaggtatctttacaggacgctcgcccgccagttttggtacttacagcaatgatgatgccattttaggtataccccaagatatcaaattgttaccctcacttttccaagaaaatggctatgccactgccagcattggtaaatggcataatgcaaaagttatccgtaaaccgaaaataaatgaaaataaacaaacccgtgattatcacgacaatatgatctcaacccctgaagcgggttatgcgcctcatgagcggggctttgattacgcctttagttattatgcatcaggtgttgccttatggaattcgcctgcattttggcgtaatggtgtcaatgttcctgctccgggttacaccacccatctattaacggatgaaacactaaaatttattgatgaacataaagataaacctttttttatcaatctttcttatagcgttccacacataccgttagagcaagcatctcctgctaagtatatggataaatttgatacagggaatgtggaggcagataaatattttgccgccttaaatgcagcagatgaaggtattggacaaatcattgcgaaattaaaagaaaatggtgagctagaaaatacattaatttttttcttatctgataatggtgcagttaatgaatcccccatgcccatgaatgccatggatagaggctttaagggccagatgtttaatggtggagttagagtaccttttattgcttatcaacccggaactattcccgcgggaacaaaaagcgatgcgatgatctccgcacttgatattttgccaaccgcgttacaagtcgctgatattcaaattcctgatagcctgcaagtagaaggtaaaaacattatgccattgcttaaaggtgaaacaacgcgttcgcctcatgcttatctgtattgggctggccccggcactaaacattatagtgaagaaaaccaagagttttggcatggttatcaccaatggatcacctatcaacgtcaaacgcctccagtaaaccctaacttagagaaactgtctaaaggtgcttgggcagtgcgtgatggtgaatgggcgctctatttttatgatgatggtaaaaatcaaccacagctttttaacgataacaccgatcctggcgaatcaatcgatttggcaaaacaaaatccacaaaaagtggctgaactaaaaaatgcgtattaccagtggatcaaagataaacctaaacctgttatttgggggcaagatcactatcaaatactagtagattcagccaaacct

SEQ ID NO: 32647 - DNA, 2418 bp, Proteus mirabilis
atggccattaagaaaaacgaactatactcctcactatgggccagttgcgatgagttacgcggtgggatggatgccagccagtacaaagattatgtactgaccatgctatttatgaagtatgtatctgataagtataaaggtgatccgtacggtatgattgttataccccaaggtgccagctttgatgatatggttgcacttaaaggcgataaagaaataggcgataaaataaacaaaattatcagtgcgttagctgaagaaaatgacctaaaaagtgtcattgatgtcgccgattttaacgacgaagataagctcggcaaaggcaaagagatgattgaccgtctttccaagctgatagggatatttgaagggcttgatctctcttccaaccgtgctgatggtgacgatttattgggtgatgcttatgagtacctaatgcgtcactttgcaactgagtctggtaaatccaaaggccagttttataccccatccgaagtttcacgcattctctcgaaagtgattggtattaataaaaacaccctgcaagacgctaccgtttatgacccaacttgcggttcaggttcattattattaaaagctagtgatgaagccccccgtggcttgagtatttttggccaagaaatggataacgccaccagcgccttggctcgtatgaatatgatcctacacaacaacgccaccgcgaagatctggaaaggcaacaccatttcggatccacaatggaaagaagccaacgggcaactaaaaacgttcgactttgctgtcgctaatccccccttctccaataaaaactggactaacggcattaatcctaaagaagatgaatttgatcgttttcgctggggtattccccccgaaaaaaatggtgactacaccttcttgttgcatattatcaaaagtttaaaaagcacgggtaaaggtgccatcattctcccccacggtgtattattccgaggtaatgctgaagcgcgtattcgtgaaaacctgattaaacaaggttatatcaaaggaattatcggtttacccgccaacctgttctacggcacgggtattcctgcctgtattatcgtgatcgacaaagaacacgcgcaggcgagagaaagtatttttatggtcgatgccagcaaaggctttatcaaagatggcaataaaaaccgtttgcgtagtcaggatatttataaaattgttgaggtatttaccaagcaattagaacaacctcactttagccgaatggtgccattaagcgaaatagtggctaatgactacaacctaaatataccgcgttatattgattccagtgaaccagaagacttgcacgacctcagtgcccatctacaaggtggtattcccaatcgtgatatcgatgccttagaacgctactggcagatattcccgagtattcgtgcggccttattcaaaccagcacgtgaaggttatagtgaagctttagttaaagcctctgaagtgaagaataccattctaaaccatgatgaatttaaacagtttgcgacgaatagcttgcagcattatcacgtttgggctcacgcatctaatttagctgagatcagtgtaggtgatcagcctaaagcgttaatcgctgaaatcagcgaaagtttgttgcaaagctattcacaaacaccattgctgagcaaatacgatatctaccagatcctgatggattactggagtgatacgatgcaagacgatgtgtacgtactggtacaagatggttggtctacaggtaaagtattgcgtgagttagaagtcaaaaaaggtgaaaaactgagagaaacgcctgacttagtgattggtaaaacaaagtataaagctgagttgatcccccctgctcttatcgtggcacgctattttgccgatgaacaaacaaaaatcgataccttgcaaagcaaacttgatagtgccagtcaagagttagaaacctatcttgaggaaaatagcggtgacgacggcctacttaatgaggcattgaatgataaagacaaagtcaccaaagccacagtcacggcacgtttgaaaattgccactgaccccgatgaaaaatcggcattaaaacaagcccaaaagctgtttgataatgaagccaatgctaaaaaagcgctgaaaaaagcccaagatgccctcgatttagcggtgtttaaacaatacccgaaactgagtatcgacgaaatcaaaaatttgatagtggatgataaatggctggcgacgttgcaaagcaatattgaggccgaaattgagcgcgtgactcagcagctggctaatcgcgttaaagagttggaagagcgctacaatgagccattaccggctattactaaatcggtagaaaatttaagtgagaaagtcgcaggccatttaaaagcgatggggttggagtgggagcta

SEQ ID NO: 32648 - DNA, 1992 bp, Proteus mirabilis
atgaccactcgtaaaacccttgcaaatgcgatccgttttttaagcatggatgcagtgcaaaaagccaaatctgggcaccctggtgcacctatgggcatggctgatattgcagaagtattatggcgtgattttttaaatcataatccaactaatcctcactgggcagatcgtgaccgttttgttttatctaacggccatgcttcaatgctgatttatagcttattacatctgtctggttatcaagtttctttagatgatctaaaaaatttccgtcagctgcattctaaaacaccgggtcacccagaatatggttataccccaggtgttgaaactaccacgggtcctttaggtcaagggattgctaacgcagtaggttttgcgatcgcagaacgcacattagcggctcaatttaaccgtcctggtcacgatatcgtagatcactacacctacgcctttatgggtgatggttgtatgatggaaggtatctctcacgaagtatgctctttagcaggtactttacagttaggtaaactgattgcattttacgatgacaatggcatttctattgatggtaaagtacatggttggtttactgataatactgctgaacgtttcgaagcgtatggctggcatgtgattagtggtattgatggtcatgatgcagcgagtattaaagctgcgattgaaaccgcacaacaaattactgataagccttcactgttaatttgcaaaaccactattggttttggttctcctcataaagcaggcactgccgattctcacggttcaccattaggtgatgcagaaattgcagaaactcgtaaagctctgggctgggagtatggtccttttgaaattccacaagagatctacaaagagtgggatgctaaagaagctggtaaagcaaaagaagctgcgtgggacgctaaatttgctgagtatgcagcacaattccctgaattagcagctgaatttaaacgtcgtatgtctggcgaattacctgcaaattgggaaaaagagtcaacagcctttattgaacagttgcaacataacccagcgagtattgctagccgtaaagcatcacaaaatacattagaagcgtttggtaaagttttacctgagtttatgggtggctctgctgaccttgcaccaagtaacttaactatgtggtctggctctaaagcattaaatgaagataaagccggtaactacatccattatggtgttcgcgaattcggtatgtctgccattatgaatggtattgcattacacggtggttttgttccttacggcgctaccttcctgatgtttatggaatatgcacgtaatgcggtacgtatggctgcactgatgaaaatccgcagtatctttgtttatacccatgactctatcggtttaggtgaagatggtcctactcaccaacctgttgagcaaatggcaagtctgcgtgtaacaccaaatatgagtacatggcgcccatgtgaccaagttgagtcagcagtagcatggaaatacgctgttgagcgtaaagatggtccaactgcgctcatcttctctcgtcaaaaccttgctcaacagccacgtactccagagcaactggctaatatcgagaagggtggttatatcctgaaagattgtgacggtacacctgaacttatctttattgctacgggttctgaagttgaattagctgttaatgcttacgatcaattaacagcagaaggccgtaaagtccgtgtggtttcaatgccagcaacagatgcatttgataaacaagatgctgattatcgtgaagcagtattacctgcagcggttaaagctcgtgttgctattgaagcgggtattgcggattactggtttaaatatgttggtcttgatggtgtgattgtcggtatgcatagcttcggtgaatctgctcctgcaaacgaactgtttgctgagtttggttttactgttgaaaatgtggttacacaggcaaaaactctacttaaa

SEQ ID NO: 32649 - DNA, 714 bp, Proteus mirabilis
atgcacttttatcgcactctgatgccgattgcagcgatgacttttgatttagacgatacgctgtatgacaatgttcctgtgatgaataaaacagaagaagagaccttagcgtttatccgtcagtatgatgagcgttttcaccattttactgaacatgatgtagatgcttacaaacagccactattagaaaataatcctgatatttttcacgatatcactcagtggcgttggttagcggctaaaaatatgttgttagactatggctatagtgaaactaaagcacagcaaggtgctgatgaaattatggctcattttgcttattggcgtagccgtattaatgtccctaataatacccatcacgtgttgacacaactggcggaaaaaatcccattaatcgctattactaatggtaatgctaatccattaagctgtgggttggggcaatactttacacatattttaaaggcagggcctgatgggcgctctaagccttatcctgatatgtttgataaggcggcttcgttacttaaactccctcatcagaatattttgcatgtaggcgatcatctagtgacggatgtagaaggcgcggttaaaagtggattacaggcgtgttggattaatttagataatcgcagtttgtttaccgaaggtgaaacgcgtgttatgcctcatattgagatcactgaattagctaaactggttgaattaatt

SEQ ID NO: 32650 - DNA, 2154 bp, Proteus mirabilis
atggacgtctcatatctgctcgaaggccttaacgataaacagcgcgaagccgttgcagcaccgcgtgtaaatatgctggtacttgcaggtgctggtagtggtaaaacacgtgtattagtacatcgcattgcttggttattatctgttgaacaagcctctcctttttccattatggcggtaacatttactaataaagctgcagcagaaatgcgtcatcgtattgaggacttgattggtactagtcaagggggaatgtggataggtaccttccatagtctcgcccatcgtttattacgggcgcattatcttgatgctggtttacctcaagacttccaaatcattgatagtgatgatcaataccgtttaattcgtcgtatcgtaaaatccatggctcttgatgataagcaatggcctcctcgtcaaggtatgtggtatatcaatggaaagaaagatgagggactccgcccacaacatattcagacctatggtaaccccgtggaaaccacatggttaaaagtctatcaagcttatcaagaagcttgtgatcgtgcaggcttagtggactttgcggagttgttattgcgtgcccatgagttgtggctgaataaaccacaaattttagaacactatcaacaccgttttaccaatatcttagtggatgaattccaagatactaaccgtattcaatatgcttggatcaggatgttggcaggacagactggtaaggtgatgatagtcggtgatgatgatcaatctatttacggttggcgtggggctcaagttgaaaatattcaaaactttttaaatgaatttcccggcgctgaaaccatccgcttagagcaaaattatcgctccaccagtaatattctaaaagccgctaatgccttaattgctaataatagcgatcgtttaggtaaaaacctatggacagaaggggctgaaggcgagccgatttcactctattgtgcatttaacgacctagatgaagcgcgttatgtagtagggcgtattaagcgttggcatgaagagggaggcgcccttgcagattgtgccattctttatcgtagtaatgcccaatcgcgcatcatggaagaagcgctattacaagcgaatatgccttatcgtatttatggtggacagcgtttcttcgagcgtcaagagatcaaagatgccctctcttatatgcgtttaacagcgaatcgtcacgatgatgcttcttttgaacgtgttgtgaatacgccaacgcgtggaattggtgatagaaccttagatgtggttcgccaagtagctagagataaccaaatcacattatgggaaagtgcattacaggttattgagcataaaatgctagcaggccgggctattgcggcaattgcgcgctttttagaattaattgagacgttagcaaatgaaacagcggatatgccgttgcatgtgcaaacagaccgtattattcgcgattctggcttaaaagcgatgtatgagcaggaaaagggtgaaaaagcacaagcgcggattgaaaacttggaagagctggtgacggcgactcgtcaatttagctatcaagatgaagacgaagatttaatgccattgcaagcttttctctctcatgcggcattagaatcaggagaaggacaggctgatgcgtatcaagatgctgttcaattgatgacactacactcggcgaaagggctagagttctcacaagtgtttattgtcggggttgaagaaggcatgttcccaagccagatgtccttggatgaaggtgggcgcttagaagaagagcgtcggctagcttatgttggtgtgacgcgcgccatgaaaaagttaacacttacttacgctgaaaaccgccgtttatatggtaaagaagtgagccatcgaccttcgcgctttattggcgagttaccgaaagagtgtgttgaagaagtacggttacgggcgacggtttcacgtcccgtgaatcatcatcgtttaggtacaccgattgttagtaatgatacaggttactcccttggtcaacgggttaagcaccctaaatttggtgaaggtactattattaatatcgaaggtagcggtgaacactgccgattacaaatagcctttaatggtgaaggtattaagtggttggttgctgcttttgcacgattagag

SEQ ID NO: 32651 - DNA, 939 bp, Proteus mirabilis
atgtcaaaaagtaccatccgtattgctacacgccaaagccctcttgctatgtggcaagcgctttatgttaaagaacaactacaaatcgctcatccgagcttagtcgttgaattagtaccgatggtcacgaaaggcgacatcatcttagataccccattagcgaaagtgggtggtaaagggttatttgtcaaagagctagaactagcactactcagctctcgtgcagatattgccgtacattcaatgaaagatgtccccattgattttcctgaaggtctgggattggtgacgatttgtgagcgagaagatccccgtgatgcctttgtctctaatcattatgattcattagaacaactgccagccggaagtgtcgttggtacctcaagcctacgtcgccaatgccaattaaaagcactgcgccccgatttaattattcgtgatttacgcggtaatgtaggaacccgtttaagtaaactcgataatggcgactatgatgctattattcttgctgtcgcgggcttaaaacgtcttaaattaactgagcgtattcgttcttctttgtctgcggaacaatctcttcctgcggtaggacaaggtgccgttggcattgagtgtcgcttagatgatcatgatactcaagccttattagccgctcttaaccacgcagatactgcaacttgtgtaaaagcagaacgcgcgatgaacactcgccttgaggggggttgccaagtacctattggtagttatgcaatttggcaaaacggcaaaatttggctacgagcattagttggctcccctgatggtgaaactattttacgtggcgaacgcttagtatcacctgaagatgcagagcaagctggtatttctctggccgaagagctactagataaaggagctagagagattttaaccgctgtatatcaaggtaatacagcgata

SEQ ID NO: 32652 - DNA, 921 bp, Proteus mirabilis
atgagccaaattattgacgtccctgaaacactctcattagccattgatagcttcttaagttatatcgaagttgaacggcgattaagtccggtaacggtagaaaattaccagcgacaattaatgaccattgcacaaatgatggttgcaataaaaatcaaccaatggtcgttactagaaagccaacatgtgcgtatgttattggctaaaagccatcgcagtggattacaacctgcaagtttagcattgcgcttttcagcattgcgtagcttccttgattggcaagtttctcaaggaatgttagcagtaaaccccgccaaaggggttcgaacacccaaatcaggtcgtcacttgcctaaaaatatggatgttgatgaagtcagtcagttgatgaatatcgacttaaaagatcccctctctgtaagggatagaacgatgctggaagtgatgtatggcgctggattacgtttatctgaactgactaacttaaatatcaatgatattgatctccaagaaggcgaagtccgagtattaggtaaaggcagtaaagagcgtaaagttcccttgggaagaaaagccgtagaatggttacagcattggtttgccatgcgggagctgtattctcctgaggacaccgcggtttttatctcaacgaaaagcggtaaacgattatctgttcgcagtgtgcaaaaacgttttgaactttggggggtgaaacaaggactcagtagccatgttaatcctcataaactgcgccactcttttgccactcatttacttgaatcaagtggtgatttgcgagcagtacaagagctattaggccacgctaatttatcaaccacacaagtttatactcacttagattttcagcatttagcgaaagtctatgatgctgctcatccaagagctaagagagaaaaatca

SEQ ID NO: 32653 - DNA, 2331 bp, Proteus mirabilis
atgaatgaatcattaagccgaattattgcacaagagctatcagtaaagccccagcaagtactttcggccattacgttactggatgaagggaatacggtgccttttgtggcccgttaccgaaaagaggtaactggtgggttagatgatactcagcttcgtcaattggaaacccgcctgagttacttacgggaactcaatgatcgtcgccaaactattttaaaatcaattgaagagcaggggaaactcacagaagaattacgctcttcgattaatgagacgcaaagtaaaacagaacttgaagatctctaccttccttataaaccgaaacgtcgtactcgtgggcaaattgcaattgaaaatggcttagagccattagctgatttgttatggaatgaaccacaacatactcctgaagacgcagcaagtgcatatatcaaccctgaaaaaggaatagatgatagtaaagcagccttagatggggctcgctatatcttaatggaacgttttgcagaagatgctggattattagctaaagttcgccaatatttatggaaaaatgcgcatcttgttagcaaagttgttgacggaaaagaagcagaaggcgctaaatttagcgattattttgatactcatgagccgattgctcatgtaccttctcaccgtgcattagcgatgtttcgtggtcgtaatgaaggtattttgcagttatcacttaatcctgatccacaattcgaagaagcccccaaagagagctatggcgaacagttgattacggagcatttaggtttacgtcttaataatcaacctgcggacagttggcgtaaagccgttgtcagttggacttggcgtataaaagtgttaatgcatcttgaaactgagttaatgggtcagttacgtgagaaagcggaagatgaagccattaatgtgtttgcacgtaacctaaaagatctcttaatggccgcacctgcaggtatgcgagctacgatggggctagatcctggtttacgtactggggttaaagtcgcggtggtggatagtaccggtaagctgattgcgacagatactatttatcctcataccggacaagcggataaagccgctgctagtgtagcggcattatgtattaagcataatgtagaattagtggcgattggtaacggtactgcatcacgtgaaacagagcgcttttttgctgatacagtaaaacgctacccagaagttaaagcacaaaaagtgatcgtgagcgaagccggggcatcggtttattcggcatcagagctggcagcgaaagaatttccggatctggatgtttctcttcgtggcgctgtttctatcgctcgtcgcttacaagatccattggcggaattggtaaaaattgaccctaaatctatcggggtgggtcaatatcagcatgatgtgagccaaacattattggcaaaaaaattagatactgttgttgaagactgtgtaaatggtgtcggtgttgatttaaatacagcctctgtaccgctattgacgcgagtggcggggcttagccaatctattgctcaaaatattattgcttggcgtgatgaaaatggccgttttgtggatagaaaacagttactcaaagtggcgcgcttagggcctaaagcttttgagcagtgtgcgggatttttacgtattcgtgatggtaaaaatccacttgatgcctcaacggttcaccctgaagcctatcctattgttgaaaatatcttgcaatcaatacatcaaaaaattgatcaagtcatgggcaatagtgcattactttcacaaatcaatgccagagaatttgtcaccgagcagttcggtttacctaccattaatgacatcttaaaggagcttgctaaaccggggcgtgatcctcgtcctgagtttaaaacagccacctttgccgaaggtgttgaaacaatgaatgatttagtcagtggtatgatattggaaggtactgtaactaatgtgactaattttggtgcctttgtagatattggggtacaccaagatggattagtgcatatttcatcactgtcggatagatttgttgaagatccccatactgtggtaaaaaccggcgatattgtgaaggtaaaagtccttgaagtcgatttaccgcgtaaacgtattgcgttaaccatgcgtttagatgaagtggctgctgatagtgatcataaacgccagtcagtgactaaggataatgcttctaaacatagtcgcgggcaaaaaccgaccagaaaccgccaatcaaatacgggtaacaatgcaggtaatagtgcgatgagcgatgcattggccgcagcatttggtaaaaaacgc

SEQ ID NO: 32654 - DNA, 1059 bp, Proteus mirabilis
atgggagtattcaatatggaaacggcggatttacctgataacacacttattttggattcattaatccactcagtattggttatcaaccaagagtttattatttgctatgcaaaccatgctgcattgcaattactggctcaaagtcgtcgcaaattatttgaaaccccttttagcgcactgtttagttattcctcttttgatgaacagttaatgcgtgaaacattagcaaatgggcaaagcttcactgataacgaagtgattttggttattaataaccaatcacacactatgtcgctcagtgcccagcctatttccgagcaacacattttgttggagctggcgcctatggatagtcaacgccggttaagccaagagcagatacaacaagcacaacaaatggcagcgagggaattggttagggggctggcacatgaaattaaaaatccactcggtggattacgaggggcggctcaattattagcaaaatcattacctgatcctgcgctgactgagtatacccaagtcattattgaacaagccgatcgcctaagagcgcttgtggataggttactcggtccacaacatcccggcaccaaaacctttcagagtattcatcatgttgtagagcgtgttgcacaacttatcacattagaatgccctgaaaatgtcaccttactcaaagattatgatcctagtctacctgagctttcacactatccggatcagattgagcaggtattgttaaatatcacccgcaatgcattacaggcagtggagaaaactgggggaactattattttgcgaacccgaacagcgttccaagtcacactgcagggtgaacgtcatcgactagtggctcgcattgatgtgattgatactggcgcgggtattcctcctcatctacaagacacgcttttttacccgatggtcagtggcagagaaggcggaaatggccttggtttatccattgcacgtagcttagtcgaccaacacgccggtaaaattgagtttaccagttggccgggaaataccgagttttctatttacttgccaataaaa

SEQ ID NO: 32655 - DNA, 1407 bp, Proteus mirabilis
atgtcccttgaacatgtgttatccatgattgaagaacataaagttagatatattgacttacgtttcactgatacccgcggtaaagaacaacatattactattccggcgcatcaagttaacgatgatttctttgaagaaggaaaaatgttcgacggctcctctattggtggttggaaaggcattaatgaatcagatatggtgctaatgcctgatgctacaacagcgatgcttgacccatttttccaagatccaacattaattattcgttgtgatgttttagagccaggcactatgcaaggttacgatcgtgacccgcgctctatctcaaaacgtgcagaagactacttaaaatcaagtggtatcgctgacaccgtcctatttggccctgaacctgaattcttcctttttgatgatattcgttttaaaaatgatatctctggtgcttcttatgccatcaatgatattgaagcagcatggaataccaatacacaatatgaagaaggtaacaaaggtcatcgcccaatggtaaaaggaggttacttccctctacctccggttgattcctcacaagatattcgctcgaccatgtgtaatatcatggaagagatgggcttagtggttgaagcacaccaccacgaagtcgcaactgcaggtcaaaatgaagtggcaacccgctttaataccatgaccaaaaaagcagatgaaactcaaatttataaatacgtagtacaaaacgtcgctaacgtatttggtaaaaccgcgacctttatgccaaaacctttagtgggtgataatggctcaggtatgcactgccacatgtcactgtctaaaaatggtgtcaatttatttgctggtgataaatatggcggattatctgaaatggcgctgtattacatcggtggtattatcaaacatgctcgtgcattaaacgcatttactaacccaaccactaactcatataaacgcttagtgccgggatttgaagcccctgttatgctggcttattctgcccgtaaccgctcagcatccattcgtattccggtagtcgctagcatgaaagcacgccgtatcgaagtgcgtttcccagatcctttagctaacccttaccttgcatttgcagctcaattaatggcaggtcttgatggtattatcaataaaattcacccaggtgatgccatggataaaaacctctatgacttacccccagaagaagctaaagagatcccaacagtggcaggttcattagaagaggcgctcaatgctcttgataatgaccgtgaattcttaacccgtggcggtgtattcactgatgatgctttagacgcttatcttgagctattacgtactgatgtgcagcgtgttcgtatggcaccacatccacttgaatttgaaatgtattacagtgcg

SEQ ID NO: 32656 - DNA, 1860 bp, Proteus mirabilis
gtgtacaataacacgcttatttctacaatgcctgaggcaaattttgtgatcgaaaacttgcgtaatatcgccatcatcgcccacgttgaccatggtaaaactactattgtcgataaattactacagcaatctggcacgttcggtgaacgtgaaaccgttgctgagcgcgtgatggactctaatgatctcgaaagagagcgcggaattactattcttgcgaaaaatacagcgattaaatggaatgactatcgtattaatatcgtagataccccaggacacgccgacttcggtggtgaggtagaacgcgttatgtctatggtagacagcgttctattgctggttgacgcgatggatggcccaatgccacaaactcgctttgtgacacaaaaagcgtttgctaacaacttaaaacctattgttgttatcaacaaagttgaccgtccaggtgcacgccctgattgggttgttgatcaggtctttgatctgtttgttaacttaggtgcgactgacgaacaactggatttcccaattatctatgcatcagcattaaatggtattgcgggaacagattataatgacatggctgatgatatgactccattatatgaagctatcgtcaaatatgtagagccgccaaaagtcgatctggaggggaccttccagatgcagatttctcagttagattataataactatctgggtgttattggtattggccgtattaagcgcggtaaagtaaaacctaatcaacaagtgactatcatcgatagcgaaggtaatacccgcaacggtaaagtaggtaaagtattaggtcatttaggcttagagcgtatcgatgttgacgttgcagaagctggcgacatcattgcgattacaggtttaggtgaattaaatatttctgatacgatttgcgaagtaggtgctgtggaagcattacctgcattagccgttgatgagcctactgttagcatgtatttctgtgttaatacatcaccattctgtggtcgtgaaggtaagtttgttacttctcgtcagattttagatcgtctgaaaaaagagttagttcataacgtagcactgcgtgttgaagagactgaagatccagatgcattccgtgtatcaggtcgtggtgaattacacctatcagtactgattgaaaatatgcgccgtgaaggttacgaattagccgtatctcgtccgaaagttatcttccgcgagattgatggtcgtaaacaagagcctttcgaacaagtcactatcgatattgaagagcagcaccaaggtgatgtgatgcaagcgatgggtgagcgtaaaggtgaaatgcgcgacatgcaaccagatggtaaaggacgtgtacgtttagactacattatccctagccgtggtttaattggcttccgtactgagtttatgacgatgacatcaggtactggtttactgtacgcaacattcagtcattatgacgatgtgcgcccaggtgaaatcggtcgtcgtaataatggtgtgatgatctctaatggtcagggtaaagccgttgcttacgcgctatatagcttacaagatcgtggtaagttatttgttactcatggtgcagaagtttatgaaggccaagttattggtattcatactcgctctaatgacttaacagtaaactgcttaacaggtaaaaaactgacaaatatgcgtgcttctggtacggatgaagcgacaacgctgacgccacatatcaagcaaacattagaacaagcattagagtttattgatgatgatgaattagtggaagtgactccacaatctattcgtttacgtaaacgtcatctctcagaaaacgatcgtcgtcgtgcttatcgtagcaaagac

SEQ ID NO: 32657 - DNA, 747 bp, Proteus mirabilis
atggactttactgttattgctgataattggcagtatctactttttggcgcgtatcctgatgggccattagaaggtgcggctttaactatatttattagtgtgatcgccggtattgtatctattatattagggacgcttggggggatcgctctcgccatgcttagaggggtatgggttaacttatttgccgcttttttaggttttttccgtgctattccggtcattatgttgattttttggctctattttctattacccgtggtattaggaatggaaattcctgagataaccaccgtgatctgtgctctagcacttattacctcctcttatatcgctcatggtgttaaagccggtattctcgctattggcaaagggcaatggcaagcaggtttatcgttaggatttaatcgctggcagacgctttggtatatcgtgttaccacaagcattacgtatgatggtgccctcttttatcaatcaatggatagccttaattaaagatacttccctcgcttatgttgtaggtgtcggtgaactctcattcttagcaacccaagttaataatcgcagcatggtgtacccgatggaagtttttttatttgttgcctttatttactttgtgctctgtttttcattagagttaattgccaaccgagtggggaaattatttaccacccaaaaagaaaaacgctctttttggcaatatgttattcctaataaaaaaccttcactgagtgaaaaaattatt

SEQ ID NO: 32658 - DNA, 774 bp, Proteus mirabilis
atgactatggctaatgataacgctggaaacaaaatccaagttcgtgacttgaacttctactatggtaagttccatgcgctgaaaaatatctcattagatattgccaaaaataaagtaacggcatttatcggcccttctggctgtggtaaatccactttactgcgtacttttaataaaatgtatgagctttatggcgaacagcgtgctgaaggtgaaatcttgttagatggcaacaatattctgacagataagcaagatattgcgctattacgcgcaaaagtaggcatggtattccaaaaacctacaccatttccaatgtcgatttatgacaatatcgcttttggtgtacgcttatttgaaaaactgtctcgcgctgaaatggacgaacgcgttcagtgggcgctgaccaaagccgcattatggaatgaaaccaaagataaattacatcaaagtggctatagtctttctgggggacagcagcaacgtttatgtatcgcacgcggtattgctatccgtcctgaagtattattactggatgagccatgctctgcactcgatcctatctctacaggtcgtattgaagagcttatcagtgaactaaaatccgaatataccgtggtgatcgtcacccacaatatgcagcaagctgcacgttgttctgattacactgcatttatgtatttgggtgaattaatcgagttcagtgatacggatacattatttactcgtccagcgaagaagcaaactgaagattacatcactgggcgttatggc

SEQ ID NO: 32659 - DNA, 957 bp, Proteus mirabilis
atggccgagcatacaacggtaataaaggccccgagtaaacgaggggacgttatttttagcgcactagttcgactagctgcgttaattacacttttgcttttagcaggtatcattgtttcactgattttcgcctcatggccaagtattcaacaatttggtctgtcattcttgtggacgaaagagtgggatccacccgcacaggaattcggtgctttagtaccaatttacggtactgtcgttacctcaattattgccctgatcattgcggttccggtgagttttggtattgcactctttttaacagaactggcacccaattggctaaaacgcccattgggtatcgcgattgagttattagctgctattccaagtatcgtttatggtatgtggggactctttatctttgcgccgctctttgccacatacttccaagagcctgttggcaatgtgctctcatcagtccctattgtcggtgagttattctctggtcctgcgtttggtatcggtatattagcagcaggggttatcctcgcaattatgatcatcccttatatcgcgtctgtaatgcgtgatgtatttgaacagaccccggtgatgatgaaagaatccgcttacggtatcggctgtaccacatgggaagtgatttggaatatcgttttaccttatacccgaaacggtgtgataggtggtgtgatgcttggattaggtcgtgcgctcggggaaacaatggcagtgacctttattattggtaacacctaccagttagactctgcatcactctttatgccgggcaatagtattacctctgcattagccaacgaatttgccgaagcagaaacgggccttcataccgctgcattaatggaattaggtctgattttatttgtcattacctttatcgtccttgcgatttctaagtttatgacactacgtttatctaagaatgaaggagcacgt

SEQ ID NO: 32660 - DNA, 1338 bp, Proteus mirabilis
atgagaaggctgaggctttcaccccacaataagctcactcgctctctatttctggttatctcattacttttttttagcttgatagccagttatgttgttgtacagcatcttattgtcgggccaagcctccagcaatttaataaagtattagcgtatgaaattcgtacgctagtaccggaagaactgatcttagtcgatggcaccccacttaaaatttctcccgctctacgtaataaaatttacaacgagttaggtatctcattttttgataaagacgccgctttaaaagccggtttagagtgggcaagagaagatttagaacttagccagcagatgacggattatctcaatagtgatacgacgatttggctagaaaacaccctagagtatcctattttatggattaatacccaactctcacccacgctatggatacgcgtaccacttaccgaattagggcaaaatttcttattacccgtttatcggcaagccattatttttatcatcatcgtagtggcatttttctggttatataaccgttttcaaaatcgtccattgcatgaagttgaatatgcagcacgacgcattggtaaaggggtgatccctccgccaatacctgaatctggcactgctgaaatgcgttcaattattcgagcatttaatcaaatgtcatcagatattcgctcattagataatgatagaacactggtgatggcaggggtaagccatgatttacgcactccgttaacgcgtattcgtcttgctacagaaatgatgagtcctgaagatagttatcttgctgattctatcaataaagatattgaagattgcgatgccattatcggtcaatttttagactatatgcgcacaggcaaagagatgtctttagaattatgtgatatgaatggtctattgcgtgaagtgatctgcgctgaatctaactcaggcaaagtcagcgaagagcatttatacccttatcctatcaatatcacagcaaacccaattgccgtcaaacgggcgcttaccaatatgattgttaatgccacacgctacggacatggttggataagcatcacaagtaatcaaaatgaagaatatgcttggtttcaagttgaagacgatggtccaggcattgccaaagaagatagacaacgtttattccaaccctttgttcaaggggaacaagcacgaagttcaaccggtgcgggtttaggtctatctattattcgtcggatcatggatgcccatggtggctttgtcgaactcggcgatagcacgaaaggcgggttacttatccgtgccaactttccgttaaaagtacaagaagacgaagatgat

SEQ ID NO: 32661 - DNA, 1089 bp, Proteus mirabilis
gtggatatactaaaaatgagcacaaatgttttttacgtgttcctattttctttcgctttcctatttgtagctcgtaaggtggcaaagaagattggactcgtagataaacctaactatcgtaaacgacatcatgggttgatcccccttgtaggtgggatttcagtctattttggtattgttttcgctttttatgtttcagatatctacattcctcacaaagagctgtatttgatttgtgcggggatacttgtttttatcggtgcgcttgatgatcgttatgatatcagtgtcaaaatcagggcaactatccaagcgttagtgggtattgctatgatggtattcggtggtttaaaacttgaatcacttggtcatgcttttgggccttgggatatgcatttagggccttttggttatatcgtcacgctatttgctgtttgggctgcaatcaatgcctttaatatggtggatggtattgatggtttattaggcggtctttcttgcgtttcgtttggtgcgctgggtattttactttaccaaagtggaagctctgcacttgcgttttggtgcttctcatttattgccgcgattttaccttatatcatgttaaaccttggtgtttgtggtaaaaaatttaaagtctttatgggcgatgcgggaagtacgctaataggctttactattatttggctattaatttcctctactcaagttgatcctcatccaatcaatgcggttactgcattatggatcattgctattcctcttatggatatggtggcaattatgtaccgccgtttacgtaaaggaatgagtcctttttcaccagaccgtcaacatatccaccatttaattatgcgagcaggttttacccctcgccaagcttttgttttgatcacgcttgcagccgcggtgttggccgctattggtattattggtgaaaacttatcttttgtaccagaatgggtaatgttggcattgtttttgcttgcttttgttatgtacggttattgcattaaacgcgcgtggcgagtcgctcgttttattaaacgatataaacgtcgcctacgtaaagcgacacaacttaagcat

SEQ ID NO: 32662 - DNA, 1257 bp, Proteus mirabilis
atgaatcttaccgaattaaaaaatacgccggtatcagaactgatagcacttggcgaaaatatggggctagagaacctagctcgaatgagaaaacaagacatcattttctctatcttgaagcaacatgccaaaagtggagaagatattttcggtgatggagtgctggaaatactacaggatggctttggcttcctacgttcctcagacagttcctaccttgctggcccagatgatatctatgtttctccaagtcaaatccgtcgttttaaccttcgcactggtgataccatagcagggaaaattcgcccacctaaagaaggtgaacgctattttgccctccttaaagtgaatgaagttaactttgacaaaccagaaaacgcccgcagtaaaatcctctttgaaaacttaacaccattacatgctaataaccgcttacgtatggaacgtggtaatggttctaccgaagatttaactgcccgtgtactcgacttggctgcacctattggtcgtggacaacgtggtttaatcgttgccccaccaaaagcgggtaaaacaatgttgctacaaaatattgcggccaacattgctcataactatcctgattgcgtattaatggtacttcttattgatgaacgtcctgaagaagtcacagagatgcaacgtttagttaaaggtgaagttattgcctctacctttgatgagccagcatctcgtcatgtgcaagtagcggaaatggttattgagaaagccaagcgtttagtagaacataaaaaagacgttatcattttattagactctattactcgtttagcccgtgcttataacaccgtagtaccttcttcaggaaaagtattaaccggtggtgtggatgcgaacgcgctacatcgtccaaaacgtttcttcggggctgctcgtaatgtagaagaaggtggtagtttaaccattattgcgactgcattggttgatactggctctaagatggatgaagttatctacgaagagtttaaaggtacaggtaatatggaattacacctgtcgcgtaagattgcagaaaaacgagtattcccagcaattgattacaaccgttcaggaacacgtaaagaagaattactgacatcgcaagatgagttacaaaaaatgtggatcctgcgtaaaattatccatccaatgggtgagattgatgcaatggaattcctcattaataaattagcgatgacaaaaacaaatgaagaattcttcgactttatgaaacgctca

SEQ ID NO: 32663 - DNA, 335 bp, Proteus mirabilis
ccacaatggttaaaaatagaatccgttatctttcacaccctcgaccaattatgtcctgactatcacggggtttttggtcgttttgtactttatcaaatcaaggggcttacctttaccctgatttatcggaagagcacatgcttttaatcaactctcataataggcatgaatcgcaggtttctcctcaagtgatgggtattgtcgtgtgtttattggtttctagtgtgtggtcatttaaaacagaaagagaggtgatgtgcgaacgtttttatcaactacaggattttgcttcacagcaccctgaagcagaggctatcttctacctaattgattaa

SEQ ID NO: 32664 - DNA, 2019 bp, Proteus mirabilis
atgcgattaaatcccggtcagcaaaaagcagttgaatatgtgtcaggtccttgtctggtcttggcgggagccggctcgggtaaaacacgggtgataaccaataaaattgcttatcttattcgtcaatgccgttattctgctaagcagattgctgcggtgacttttaccaataaagcggcgcgtgaaatgaaagagcgtgttgctcaaacattgggaaaacaagaggcaaaaggattaatgatctcgaccttccatacattaggattggagattattaagcgagaatacaaagcattaggcataaaatccaacttttctttgtttgatgatcaagaccaatccgcattattaaaagaattaacggtagatttattagaagaagataaagatttgctatcacagttaaagagtcaaatctctaactggaaaaatgacatgctcacacctgagcaagtgattggtagagcacaatcgcagcaagatcatacttttgccgagtgctttcgacgttatgagcaacatttactaagctgtaatgtattggattttgatgacttaatcagtaagcctaccttgctattacgtactaatgaagaagtaagggcgcgctggcaacagcgtattcgttatctgctggtggatgaatatcaagataccaatacaagccaatatgagttggtgaaatggttagtgggtgaaagagcccgtttcactgtggtgggggatgatgatcagtctatttattcatggcgtggtgcgcgtccccaaaatctggtgttattgcaaaaagatttcccacagctaaatgtgatcaaactggaacaaaattatcggtcatcagggcgtattttaaaatcagctaatattttaattgaaaataatccccatgtatttgaaaaacggctgttttcagaattaggttatggggatgagctacgagtattaaccgctaataatgaagagcatgaagctgagcgtgtagcgggggaactgattgcccatcattttattaataaaactaattataaagattacgcaatactctatcgaggtaatcaccagtcgcgtatttttgaaaagtatttgatgcaaaatcgcattccttatcgcatttcgggtgaaacctcgtttttttcccgtgaagagatcaaggatattttggcttacttaagagtgatcactaatccggatgatgatgctgcattcttacgtatcgtcaataagcctcgtcgtgaaataggcccgatgactatccaaaagttgggggagtgggctaaagtccgtgataaaagcttatttaatgcctgttttgacttgggattaagccaaacgttaacagggcgaggtttaagtgcattacaggctttttcacagtggatggcgcgaattgtacaacaatcagagcgtgagcctttgctcgctgtacgtgatttgcttcatgaaatggattatgaaagttggttatatgaaacctctagtagcgcgaaagcggctgaaatgagaatgaaaaatattaaccagcttttttcttggatgagtgaaatgcttgagggggatgagctacatgaacccatgacgctctctcaagtggtcaaccgttttactctgcgcgatatgatggagcgtggtgaaaccgatgaagagttagatcaagtgcaattaatgacacttcacgcctcaaaaggactggaatttccacatgtttttctggttggcatggaagaggggatcttgcctcatcaaagtagtatcgatgaagataacgttgaagaagagcggcgtttagcttatgtcggtattactcgagcacaaaagacattaactttcacattatgtaaagagcgacgtcaatacggtgaattaattcgtccagagcccagtcgttttctatatgaattgcctcaagacgatctccattgggataccaataaaaagaaagtgttaagtgctcaagaaaagcaagaaaaagggcaaaaaggggtcgctggacttaaagcgatgttggcgagacataaacct

SEQ ID NO: 32665 - DNA, 1230 bp, Proteus mirabilis
atggaccaaaatataatagataatatgaaacatctacaagcctttaaattccagttaagacccaatggtcagcaagagcgtgagatgagacgctttgcaggggcttgtcgttttgttttcaatcgggcattagcacgtcagaatgaggagcacgaagcagggaataaatacattccctatacaaaaatggcttcatggctcattgagtggaaatctgacacagagacacaatggttgaaggaagccccatcacaaccgttacaacagtcacttaaagatttggaacgggcttacaagaattttttccagaagcgtaccgcttttcctcgattcaagaaacgcggtaaaaatgacgcttttcgttacccgcagggcgtgaagctcgatcaatctaatagtcgtatatcgttgccaaagttgggatggatgcgctaccgcaacagtcgtgaagtcgtcggagaagtgagaaacgtcacggtcagtcagtcatgcggtaaatggtacgtcagcattcagactgagtatgaagcgacagaaccacaacatgaatcaacctcaatagtcgggcttgatgcaggcgtgacaaaacttgccacgctttcagacggtacggtatacccgcccgtcagcagttttaaagtaaaccagcgaaagctggcaaggcttcaacggaaattaagccgtaaaatcaaattcagtgccaactggcaaaaacaaaagcgcaaaattcaacgtctgcattctcatattgccaatatcaggaaagactcccttcacaaagtcaccagcgaaatcagcaaaaaccacgcaatgattgtcattgaggacttaaaggtcagtaacatgtctaaatcggcaaaaggtacgacagaacggcatggacggaacgtaaaagctaaatctggtttaaaccgcgcaatactggagcagggctggtatgaaatgcgccgtcagtttgagtacaagcagctctggcgaggtggtcaggtactggcaataccccctgcctacaccagtcagaagtgcgcttgctgtggtcatacagcaaaggaaaaccgcccgtcacaaagtcaattcgagtgccttgaatgtggatatacagcgaatgctgatatcaacggggcacgtaacattttagcggcaggacatgccgtgcttgcctgtggagggagggtgcagtcataccgcccgtcgaagcaggaacccgccgaggtgattcagacatcagtc

SEQ ID NO: 32666 - DNA, 1056 bp, Proteus mirabilis
atgaactcggaaaataacgtctcccgacaggggttttcacccgataatgaactcgatattcgaggtctttgttgtgcactatggtcaggaaaacgctggataatagggttcgcgctgctttttgcgctgattgcattaggggcatcttacttgatgcaacctaaatggagcgctattgcgatgacagagagacctactgtgaataatttaggtagttattattctcagtctcagttcttacgtaatcttgatacgcaaattaatccgtctgtaactgtttctcagttaagtatccctgatgaagcttatcaagagtttgtaacacagatttcagcttttgatacacgacgtgagttttggctgcaaacggattattacaaacaacgtaaagaaaatgatgcgcaagcagacgcggcattattagatgagctcatcaataatattcaatttacaccggctgatgagaagaaattggttaatgatcaattgaaactcattgctgaaacggccaacgattcgagtctactgctcaatgaatatatcgcttttgcgaataaacgtgcggcagagcatctaaatgaagaagtgattgccgcatgggcaactcgaacacaatcgatgaaagccttagtgaaacgccaagaaatggccgctcaagctgcttatcaacgacaaattaatttactcaaacaatcgattaaagttgctgagaaacaaggtatttctcaaaaacagacctcgattgcgatagatgaattaccggattcgaagctgtttctactcggcgtacctttattgcaatcacagttagaaacattaatggcaacaggaccagattttgatagtgattatgatcaaaatacggcaatgttatccaccctcgcggtaggtgctaaattacaagataacttccaaacttaccgtttcttacgtacacctgaagatcctgtgaaacgagatagtcctcgccgtgcctttatgatggtgctttggggcgctattggtgttttagtgggcgcgggtgtggcattagtcagacgtagttcattaaaaaaa

SEQ ID NO: 32667 - DNA, 1521 bp, Proteus mirabilis
atgaataatttctctttattaaaccgccagtgggttcgcaccctactggcggtttttttcggtgccagtggcacactcgcattttctccctttgatttctggcctgcagcgttaatttctttatcaggtttgctactgataataacgcaacgaaccacacgacaaggggcatggcttggttttgcctggggatttggattatttggtagtggtgtaaactgggtatatgtcagcattgctgattttgggggaatgccatttgctatcaatattttcttagtcatattgttagccctttacttatcgctttataccgccctatttgccggattattaaacaagttcttccctaaacctaccgtttggcgttttgtctttgcggctcccgctgtatggcaactcactgaatttttaagaggttgggtgttatcagggtttccgtggttacaatttggttatagccaaattgatggcccattaaaaggtattgcacctatttttggtgtcaccatgataacctttttgctgaccataattagtggacttattgctgtcgctatctatcgtaaatcactatatagtgcggtgatcggagcaatattattactcttacctatcagctttaaatcttatcaatggtatcaacctttaactgatgaaacacaagaaattgccttagttcaaggcaatatcgcgcaatcattaaaatggcaacccggtactttagaaagtacgttaaacacctatctcaccttaagtcgcccttttatcggtaaagcaaacttaattatttggcctgagtcagctatccctgatgttgaaattcagcaacaaggctttttagcgcaattggataaacaattaagagcacaagacacgcatctaatgacaggaattattgatgcgcgtcccaccttagaaggctatcgtttttataatagtgttattacattaggtgaacactatgcttaccaatatccggcaacagatcgctataacaaacatcatcttgtgccttttggtgagtatgtccctttagagtccttattgcgcccattagcgccattttttaatttacctatgtcatcattaagccaaggtgaatacatacaacctcaactgacggtaaatgatgctaaaataaccgccgccatctgttatgaaattattcttggagaacaagttcgcgctaactttaagccggatacacgtttcttattaactatttcaaatgatgcttggtttggtaattcaattggtccatggcaacattttcaaatggctagaatgcgttcattagagttaggacgcccattattacgttcaactaataacggcattaccgcctttattgctgctaatggtgatgttattgcccagcttccacaatttgaagccggtgcattagctgaaaaaatgacacccacgacaggatcaacaccttattataaaatggggagttatccagtgtggattttagcaggggtatttttaattcttgcttttattaagcgtcgttct

SEQ ID NO: 32668 - DNA, 963 bp, Proteus mirabilis
atgagtaaacctattcagatggaacgcggcgtaaaatatcgtgacgccgataaaatggcacttattcctgttaaaacaatcgttacagaacgtgaagaactgctacgcaaacctgagtggatgaaaataaagttgcccgcagattcaagtaaaattcaaggtattaaagcggccatgcgtaaaaatggcctgcattctgtttgtgaagaggcttcatgccctaatcttgcagaatgttttaaccacggcaccgcaacctttatgatcttaggggcaatctgtacgcgtcgttgcccattttgcgacgttgcccatggtcgtcctaacgcacccgatccccaagagccaattaaattagcccaaacgataaaagatatgggattacgttatgttgttatcacctcagtagatcgcgatgacctacgcgatggtggtgcacaacattttgccgattgtattaccgctatccgtgaaaaaaatcctaatattcgcatcgaaactttagtccctgatttccgtggtcgtatggataaagcattagagatcctcactgatacaccaccagacgtctttaaccacaatttagaaaacgtacctcgtgtttatcgtcaagtgcgtcctggtgcgaactatcaatggtctctaacgttactagaacgctttaaacaagcccacccaaatattccaactaaatcggggttaatggtcggtttaggtgaaacaaatgaagaaattattgacgtgatgcgcgatctgcgtaaacatggtgtaacgatgctgacattagggcaatatttacaacccagtcgtcaccatcttcctgttcaacgctacgtcagtcctgacgagtttgaatatatgaaagagcaagcattagcaatgggctttacccacgccgcttgtggaccatttgttcgttcgtcttatcatgctgatcttcaagctcaagggattgaggttaaa

SEQ ID NO: 32669 - DNA, 753 bp, Proteus mirabilis
atgaaagaaaattattattatttggagcaaacttcagaaatagcgagtaacaaaaacgtattgttacaggcagattggcaacgattttgtcaattgttatgctatgaaggcattgaaattaaacaaaataatgatgaaaaacgacaaaataaggcagtgatttgtcgggttaaaatgaaaggggaatattcatcaaccttattcatgcagattttgggggaaggagagttacaattaacccttgaacaattttctcaacctagtggattggaacattttctgacacagttttttgccttaattgattatcaacagcaggtaaatgctaagttgagcaaaaaagcactgatccaatttcatagtcgatataaatatttgttaatggcttattctcaagtcgcttatcgagaattggggcgttatatggccaatatccctaattcgctaccgctgttacaatttgccgagcagtatcaaaaggccttaatgaaagcactgtcaataccagcaactcgagaagggcataccaatgcattaatgcatatggcgggatattttaagcgagcacttagcgcagagcaaaaacagttgttaacacaagagattttatcttatcggcaaggaaaaacgagtctttcggctcctttgtcacggttgaaaaactacttggcgttttatcctgataattatctactttctcaacgctatttttcaccttatccagcggtatttgatgacttaagagcgcaattt

SEQ ID NO: 32670 - DNA, 891 bp, Proteus mirabilis
atgcgcatgcgtaaactagcattatcattaatgattttaggggctgcaggagctgtgcaagcagaagaactcactggtaccttaaaaaaaatcaacgataacgatattattattgttggtcatcgtgaatcctctgtccctttttcatactacgataatcaacaaaaagtggtcggatactctcaagactattccaacctgattgttgaggcagtaaaagaaaaattaggcaaacctaacctacaagttcgccttatccctatcacttctcagaatcgaattccactattacaaaatggtacatttgactttgagtgtggctcaacgactaataatctcgctcgccaacaacaagctgatttctcaaatactatttttattgttggtacacgtttacttgcgaaaaaagacagtggaattaaagattttgctgatcttgcgggcaaaaatgtggttgttacgtcaggcaccacatctgaaatgttactcaacaagctcaatgatgagaaaaaaatgaatatgcgcattattagcgcaaaagatcatggcgactcattccgtacacttgaatcagggcgtgccgttgcttttatgatggatgacgccttattagcgggtgaacgtgctaaagcgaaaaaacctgcgttatgggagattgtgggaacacctcaatcggaagaagcttatggctgtatgttacgcaaaggtgatacacaatttaagtcgttaattgatgaaaccattgctaatgcgcaaaaatctggcgcagcagaaaaatcgttcaatcgttggtttaatgccccaattccaccgaaaaacctcaatttagaattcactatctcggatgaaatgaaagcactctttgcatcaccaaatgataaagcattgaac

SEQ ID NO: 32671 - DNA, 468 bp, Proteus mirabilis
ttgaaattacagctcatcgccgttggtacaaaaatgccggactggatccagaccggctttatggattatcttaaccgctttcccaaagatatgcccttagaactcatcgagatccccgcgggtaaacgagggaaaaatgctgatattaagcgtattctcgaaaaagaaggcgaacagatgttagcagcggtaggtaaaggaaatcgtatcgtcacccttgatattcctggcgcccgttgggataccccaaaacttgccgagcaactcgatcgctggaagttagatggaagaaatgtcagcttattaattggtggccctgaaggtttagcccccgcttgtaaagcagctgcagaacaaagttggtctttatctccattaactatgccacatccgctagtacgtgtagtggtagcagaaagcctttaccgtgcatggagtattaccacaaaccatccttatcatcgggaa

SEQ ID NO: 32672 - DNA, 2580 bp, Proteus mirabilis
atgcaagaacaatatcgtcccgaagatatagagcaaactatccaggaacactgggaaaagaacaatacatttaaagtgacagaagataataacaaagaaaaatattactgcctgtcaatgctaccttatccttctggtcgactacacatgggacacgtccgtaactacaccattggtgacgtgatttcccgttatcaacgtatgttgggtaaaaacgtcttacaacctattggttgggatgcgtttggtttacccgcagaaggtgctgccgtaaaaaataacaccgcacctgcaccgtggacttatgaaaatatcaattatatgaaaggccagttaaaaaaactgggctttggttatgattgggatcgtgaagtcaccacctgtacaccagaatattatcgttgggaacagtggtttttcactaagctgtatgaaaaaggtttagtgtataaaaaaacctctgctgtaaactggtgcccacacgacttaaccgtactggctaacgaacaagtcatcgatggttgttgctggcgttgcgacacccctgtcgagcgcaaagaaattccacagtggtttattaaaatcaccgattatgctgaagagctgttaaacgacttagatacgttagatgaatggccagaacaagttaaaaccatgcaacgtaactggattggccggtctgaaggtgtagaaattacctttgatgtcgcagatagcgacgatactatgaccgtatataccacacgtccagatacctttatgggtgtcacttatgttgctgtggccgccggtcatccattagctcaaaaagccgctcaaaataatcgtgaaattcagcactttattgatgaatgccgtaacatgaagatggcagaagctgaaatggcaaccatggagaaaaaaggtattgctacaggtctgtatgctattcatccattaacccaagagaaagtcgctatttgggtagctaactttgtcttaatggaatacggtacaggtgcggttatggccgttccaggtcacgatgaacgcgactgggaatttgccactaaatatggtttgccgattaaagcggttattgctgatgcagaaggtaaccaacctgacttatcaacaggcgctctgactgagaaaaatagcctgattaactctggtgaattctcaggacttgataaccaagctggttttaatgctattgcagataaacttactgcaatgggtgtgggtgaacgtaaagtgaattaccgtttacgtgactggggtgtttctcgtcaacgttattggggtgcgccaattccaatggcaaccttagaagatggtaccgttgttccagttcctgatgaccaattaccggttattttaccagaagatgtgaaaatggacggcattaccagtccaattaaagccgatcctgagtgggctaaaacaacgattaatggtcaaccagcgctacgtgaaacagatacttttgatacctttatggaatcttcttggtattacgcacgttatacctgccctgattacgacaagggaatgttagatccaaaagctgctaactattggttaccggttgactggtacattggtggtattgaacacgctatcatgcacctgatgtatttccgtttcttccataaattgatgcgtgatgctggtttagttaattctgatgaacctgctaaacgcttactgtgccaaggcatggtattagcagatgcattttattataccggtgaagatggcgctcgccattgggtctctcctgcagaagcgattgttgaacgcgatgaaaaaaatcgcatcatcaaagcaactgacagtgcaggccatgaactgacttacgctggtatgagcaaaatgtctaaatcaaaaaataacggcatcgacccacaaaccatggttgagcgttatggtgctgataccgtacgtctatttatgatgtttgctgcaccaccagaattaacacttgagtggcaagaatcaagtgttgaaggtgcgaaccgtttcttacgtcgtttatggcgtttagttcatgagcataccgaaaaaggaacgactcaatcacttgatttggcaacattaaccacagagcagaaagacttacgtcgcgatttacacaaaactatcgccaaagtttctgatgatgtaggtcgtcgcttagcattcaatacggctattgctgcgattatggagttaatgaataaattaacacgtgcaccacaagagactgagcaagatcgtgctttaatgcaagaagcattagaagcggtggtacgtatgctttctcctatcattccacatgcttgttttgttatgtggcaagcgttaggtggtaaagaggatattgatgttgcaccatggcctgttgctgatgaagaagcgatggtcgatgacacgaaacttattattgttcaagttaatggtaaagtacgtggtcgtatcactgttcctgctaattcagaaaaagattatgttcaggaaatggcaacaaaagagtacagtgttgctaaatatttagaaaatgtcaccgtacgtaaagtgatttatgtaccgggcaaattactgaacatcgttgttggc

SEQ ID NO: 32673 - DNA, 1182 bp, Proteus mirabilis
atgagaaatgtaaaaaacgattttgatgcagtcattgccggtggtggcatgattggcgcagccgttgccattgggctggcgcaagaagggttgcgtgttgcaatggtagaacggcaatctccagcaccttttgatgcctcatctcatcctgatattcgtatttctgcgatcagctgcgcgtccgttagtttattaaaacagctaggtgcatggcaacatgttttagcgatgcgcagtgcgccatacctaaccctcgaaacatgggaagaagataatgcccatgttatttttgatgccaaaagtcttggtttacctgaattaggttatatggttgaaaatcgcattttgcaattggcattgtggcaagaagcagaacgttatagcaatatcactttattatgcccaaatagtctaagtaacatgaaatacttagataataaatggcaagtcacgcttgctgatggtcaggaaatcaccactcagttagttgtaggggccgatggggctaattcgcaagtgcgtcaaatggcggggattggcagtaatggttggcagtatcgtcaatcctgtatgttaatcaccgtgaaaacgcaattaccaccagaaaaaggtacatggcaacgcttttacccttcagggccacgggcttatttgcctctgtttgataattgggcttgcttagtttggtatgattctccgcagagaattagaaagctacaaacgatgtcaatggcacagttagaaaaagaaatcgaacatgctttccctgaacgcttaggcaaagtgacacctattgcagcaggctctttcccattaactcgtcagcatgctagtcgttatgttgataatggtgtgattttagtgggggatgcggcacatactattaatccattagcaggacagggggttaacctcggttatcgtgatgtggattgcttgcttaatttagtggcgcaagcgaaacagcattttgaaccttggcattcaatggcattgttaaaaaaatatcagcgccgtcgtatgcctgataatatgctgatgcaagcaggaatggatctcttttaccacgcttttagccatcaattaccaggtttaaaattagccagaaatatcgggttattagcggcgcagcatgcaggaaaagcgaaagaagccgcgttacgttatgctttagggattaaa

SEQ ID NO: 32674 - DNA, 879 bp, Proteus mirabilis
atgagcgacgaccaatcttcgagtaacgataaccctggtcctaaaaaggggtttctcacattgcttaatcagttattccacggtgaacctaaaaatcgtgatgatctgatggagcttatccgcgattctgaacagaaagaattaatcgatcctgatacccgtgatatgttagagggggtaatggatatcgctgaacagcgtgtacgggatattatgatcccccgctcgcaaatcgtcacattaaaacgcaatcaaacccttgatgagtgccttgatgtgattattgattcagcgcactctcgctttcctgtcatcagtgaagacaaagatcatattgaaggcttattaatggcaaaagatttattgccatttatgcgtactggtgctgagccatttagtatagacaaagttttacgttctgctgtcgttgtaccagaaagtaaacgcgttgaccgcttactaaaagagttccgttcgcaacgctatcatatggctattgtcattgatgaatttggtggtgtttctggtttggtcacgattgaagatattcttgaacttatcgtcggcgaaattgaagatgagtatgatgatgaggatgatattgatattcgtccattaagtcgccatacctactcagtgagagcattaacccaaatagaagattttaatgaggcatttggtactcactttagtgatgaagaagtcgatacgattggtggtttagttatgcaagccttcggtcatcttcctgctagaggtgaaactattaccattgataattaccaatttaaagttgttatggcagatagccgtaaaattattcaggtttatgtgcacattcctgacgatgcgcctgtacctgaactaggtaatgatgtg

SEQ ID NO: 32675 - DNA, 2319 bp, Proteus mirabilis
atgaaactaggatataagcggttaatcgccgcgagcgttatttttctattagtaacaccattattgctatggatagcagataagatctggccactgccagatcccgagcctcaaatcgccaccatagtaacggctgaagatggaacaccactttggcgttttgctgataaagaaggaatatggcgttatcacgttaccctttctgatgtttcccctgaatatttgcaggcgttgatagcttatgaagatcgctggttttatcagcaccccggtgttaaccctatagctattttacgtgccgcatggcaagacttaagctcgggaaaaattgtttctggaggcagtacgctttcaatgcaagttgcacgtttgattgacccccactcacggactttagggggaaaattaaaacaattatggcggacattacagctcgaatggtattactcaaaagatgagattttagaaatttatcttaaccgtgcaccttttggtggcactttagaagggattggcgctgcaagttgggcctatttaggtaaatctcccgctgatttatcagcaggtgaagcaacattaatggcggtattacctcaagcacccagtcgtttaaggccagaccggtatccagagcgtgctcaagctgcacgggataaagtattagatagattagcggaatatcaaatttggcccaaagagaaagtggctgaaataaagcaagagcaagtgctacttgcaccaagacaaacgccacaactcgcgccattattggctcggcgtatgtataacgagcaaaaagcgccggtgatcacaaccacgattgatattaatcttcaacgacaactagaagagctagccaaacagtggaaatatcagctagccgataaaacttctctggcaatacttgtggtcgatcacacggatatgagtgttaaaggctatgttggatcggcagactttaatgataatcaacgctttgggcatgttgatatgataagtgcatggcgttcgccgggatcaactttaaagccttttatttatggtcttgctttggatgaaggattgatccatgcagaatcactattacaagatgttccgcgccgttttgaagattaccgtcctggtaattttgatactggatttaacggtgccgtgagtgcgagtgaagcccttagtcgttcattaaatttaccagccgttcaattaatagaagcttatggcgcaaaaaaatttgcagctaagttgcgacataatcaccttgaaatgcgttttccttatggctctgaacctaatttagcgcttattttaggaggaacagcaacacgaatggatcaattagtggcgacttttagtgcgcttgcaaggcatggaaagaccgcgccgttacgttttacgccagagcaaaccatcaatgaccgtatgttaatgtcacccggtgctgcgtggatcattcggcgaattttagcgggagaggcacggcctcgtcctgatagtgctatttcagcagttgttcctttggcttggaaaacaggcacaagttatggttatcgtgatgcatggtcgataggcgttaatgcgcgttataccattggtgtttgggtggggagacctgatggcacacctgttgcggggcagtttggatttgcaaccgctgtaccgataatgaatcaagttaataatttattgacgagttatttttatcaaaataaacagcggcctcctgttgatcctaggccaaatagtgtctcagccgcagctatttgttggccaacgggaaaagctttgcctaaagaagatagtaactgtcgagtcagccgacgaagctggatccttgataatactattcccccaacactattgaatgaaagccaagagggcattttaggcatcaatgaaaaagtatggatagataaagaaggaaaacgtacagggcctaattgtcctggtgctcaattaaaggatattgctttatggccgatagcattagatgcttggttgcctgaaaaagagcgtagagcaaaacgattaccaccaatttcattaacatgtccaccgattaaagaagatatgatcccattgtatatctctgggataagaaaaggggatttattgcgtccattgcctggtgaaactcagcttgaaataacggtttctacacaagggggaagtggtatgcagtggtggtttttaaatggtgaacaaatcggtaaaactgaaaatggggcaacgttctcttatttattagaaaaacgtggcaaataccaactttcggtgcttgatcttagcggtcaaacggatatggtgaatttcagttttcgt

SEQ ID NO: 32676 - DNA, 423 bp, Proteus mirabilis
atggatgtatctgaacaatttgaagtacaagaaattgttgctgttgaaggttcttctctacaactgagtgtgcttgagccacagcctgaaaaattaacacaagcattgagcgaattttttggtcaacataagcctattcgtcgtgcatttattgttaatgctttggagcaaggtgatgatgagtcattttatttgattgggctagaaatcactggagaagaaaatattattgctcagatactcccacaagctgctgaagccgcttttgagcatctagaagaaggacaatctctggatttctgttttgtgaataaagatgagcaaggtgtaagtcattttatgactcaccatgtaacccctttttatcaacgcaaattagggggctttcttcgtaagggtattccaatcgttaatttgaatacc

SEQ ID NO: 32677 - DNA, 384 bp, Proteus mirabilis
atggcttatagcgataaagtaattgatcattatgaaaatcctcgtaatgtgggttcatttgataacaacgaccctacagtggggagcggtatggtaggcgcaccagcttgtggtgacgtcatgaagctacaaatcaaagttgatgataacggtgtaattgaagatgcacgttttaaaacttatggttgtggctcagcgattgcatcaagctctttggttaccgaatggatgaaaggtaaaaccttagatgaagcagaagcgattaaaaataccgcaattgctgaagagttagaattaccaccagtgaaaattcactgttcaattctggctgaagatgcaataaaagccgcgattgcagactataaaagcaaacgccaaggcaaa

SEQ ID NO: 32678 - DNA, 1488 bp, Proteus mirabilis
atgatacccgttattgccttagtagggcgccctaatgtgggaaaatccacattatttaaccgactaacacgcacaagagacgcattagttgcggattttcctggacttacccgtgaccgtaaatatggtcgtgcagaattagacggtgaagagtttattatcattgatactggtggtattgatggtgcagaagagggtgtagaaacccatatggcatcacaatcactgcaagccattcaagaagccgatattgtgctatttttagtcgatgcgcgagcaggattaatgccagccgaccaaggtattgctaaacacttgcgtggtgttgagaaaaaaacctatttagtggcgaataaaacagatggtatcgatattgataccgctttggctgatttctactctttaggattaggggaaatattccctattgcagcttcacatggtcgtggtgtttctcaactgattgagcaagcgttgttacctattgtgggtaaagtcgtcgaagaagagaaagaattaacagaagaagaagagaatgccgcttattgggctgctttagaagcagagcagaaagagcaagaagaagaggaagaagaggatgatttcgatccgacaacacttcctgttaaattagctattgtaggccgccctaatgtaggtaaatcaactctgactaaccgtatgttaggtgaagagcgtgttgtagtttacgatatgccaggcactacccgtgatagtatttacataccgatggagcgtgatggtaaggagtatatccttattgataccgctggcgttcgtaaacgcggaaaagtaaaagaaacggtagaaaaattctcagtgatcaaaacattacaagcgattgaagattgtaatgttgcactacttgttattgatgctcgtgaggggatttcagatcaagatctctctttattaggttatattcttaattctggacgctctttagttattgctgtcaataaatgggatggtatgacccaagaagatcgcgaacaagttaaagatatgcttgatctcaaattaggttttgttgattttgcccgcgttcattttatctcggcattacatggtagtggtgttggtaatctgtttgagtcgattcaagaagcctatacttgcgcgacacgtcgtgttggtacatcaatgttgacgcgcataatgaagatggcagaggatgatcaccaaccccctcttattcgtggacgccgtgtaaaaatgaaatatgcccatgctgggggatataatccacctgtcgtggttattcatggtaaccaagtgtctgatctacctgatagctataaacgctatttaatgaattatttccgtcgcacactacaagtgatgggaactcctatccgtattcaatttaaagaaggggaaaacccttatgcggataagaaaaataaattaacagcttcgcaaatacgtaaacgtaagcgtttaatggctcatttaaagaaatcaaaa

SEQ ID NO: 32679 - DNA, 1170 bp, Proteus mirabilis
atgcaactgcgtaaaactctcctgatcggtctactagcatcagcattattagctgggtgttctagtgagcaggataatgtgacaatgtctccattgcctgaggtgcagagccaatttaccccttatgtggtatgggacaaatcggttggcaatggtattggaaaatactattcccacttgtcaccagcatgggatggttcagttgtgtatgtcgctgatcgccatggggtagttaaagcattagaattagaaacgggtaaagagatttggtctcaagatctctcaactaaaaaaggtttcttctcctctaatgaatcagcattactttccggtggtttaaccgtctctggtactcgtgtttttgtcggcacagaaaaagcaaaagtgtatgctttaaatacagatgatggctctattgattgggaaacagatgttgccggagaagcgatttccaaacctgttgttagtgatggtttagtgcttattcataccagtaacggtatgttgcaagggcttgatttgctgacaggtgaagtatcatggacggtcaacttagatacaccatcattatccgtacgtggtgaatcagcaccggctgttgcttatggtgcagcgattgtgggcgctgataatggccgtgttagtgcggtggtgttatctcaagggcaattagtttggcagcaaaatatttcacaagtgaaaggctctactgagatcagccgcttaaatgatgtcgatattacgccaattattgatgaaaatactgtttatgccatggcttacaacggtaatttagtcagtctagatatgcgttcagggcagatcatctggaaacgtgatttaggttcagttaatgacatggtacttttgggtgacaatctataccttgttgaccaaaatgaccgagttttagctgtgcgcaaatctgatggtgtgacattatggacacaagaagatctactgcaccgtaatttaaccgccccggctatcgttgatggttatttagtggtgggagatgcagaaggctatctccattggattgataccagtacaggcaaatttattgctcaaaataaagtaaatagctcaggtttattaagccgtccacaggctgttcaagataaactgatgattcaagcacgtgacggtaaactttatctatatcgtcgg

SEQ ID NO: 32680 - DNA, 1647 bp, Proteus mirabilis
atggaaattttctttactattttaattttaatattggtagtttctgtttcaggtgtcattaccaaagttattccttttcgcattccattaccattaatccagattgtgatcggggcacttttggcttggcctcagtttggtttacatgtcacctttgatcctgaactcttcttagttttactgatccctcctttactttttgttgatggatggaaaacccccacacgtgaatttatccaaaatggtcgagagatctttatccttgtgctggttttggtaatggtgacagtagtaggtattggttaccttatttactggataatgcctagtattccacttatttctgctttcgcgctcgccgcggttctctcgccaactgatgcggtggcattatcctccattgtcggtaaggggcgaataccgaagcggatcatgggggttttagaaggcgaagccttaatgaatgatgcttcgggtctggtggcgctaaaatttgccgttgctgtggctatgggcacgatgatatttaccgtgggtggcgcaacctttgagttttttaaagtggcaataggcggtttattagcgggtattgcggtaacgttagtctatagtaaatcactgcgattgatgagccgttggagtggtgatgatcctgccactcaaattgtctttatgctgctgttgccttttgcttcttatttgattgctgaacatattggcttttccgggatccttgctgccgtggccgcaggtatgactatcagtaaatcaggtgtgatccgcaatgcaccattggcgatgcgcttgcgtgcagatagtgtctggtcaatgttagagtttgtctttaacggactggtctttattatgctgggtttacagcttcctgttatttggacaagctcggttattcaagctgatctcgatcctgaagttgaagtatggatgctgtttgccgccgtctttgttatctattttgcgttactgattttacgttttacatggttatggctaatgaagaaaatcagccatctctttatgaaaaaacatccccttgatttcgccacttatacgacgagagaattatggctatcttcttttgccggggtacgtggtgctatcaccttagccggtgcgctctctataccgctatttttaactgatggcagtactttccctgggcgctatcagataatctttatcgcggcaggggtgatcctattatcgattttggtcggtattatttcattacctttcttactaaaagggattaaagctaccgataaagaagcggataaaaatgaagtacgttatgccaagaaagtcatggcagaagtcgctattgttagcctcaataagatggaagagcgtttagctgcaagtacagaagagcaactagatgcggaagaaattaatgaagtagcttctcgagttgccggttatttaagacgacgtaccgcggatcaggacgagatgatgcacaatatgttggtggaagatctggaaagacgttttcgcctaacggcattgcgtgcagagcgtggtgagctttatcacttacgtgcaacgcgtaaaattagtaacgaaacactacaacttttgcttcatgaattagatttaatggaagcgctgttagttgagaaagacagt

SEQ ID NO: 32681 - DNA, 753 bp, Proteus mirabilis
atgactcaacaatctaaggaaacaacagattttggtttccaaaccgttgacaaagatgaaaaacaaaccatggtggccaaggtttttcactctgttgcatctaaatacgatttaatgaatgacttaatgtcttttggcatccatcgtgtctggaaacgctataccattgaggcaagtggtgtaagacgtaatcaacgtgtacttgacttggcaggtggaaccggcgatttaacggcaaaattctctcgtttagtaggagagaatggtgaagtggttttagctgatatcaatgactccatgttaaaaatgggacgtgagaaactgcgtgatcacggtattgttggtaatgtcagttatgtacaagcgaatgcagaagagctgccattccctgatgattactttgactgtatcactatctcgttcggtttacgtaatgtgactgataaagccaaagcgttacgttctatgttccgtgtgctaaaacccggtggacgtctattagtccttgaattctctaaacccgttcttgatccgctaagtaagatttatgatgcttactctttccatatattaccaagaattggtcaagtgattgtgaatgatgcagatagctatcgctatttaaccgaatccattcgcatgcacccagaccaagaaacattaaaaggaatgatggaagaagctgggtttgatcaggtttcctataccaatatgactggaggtatagttgcattacacaaagggtttaaattc

SEQ ID NO: 32682 - DNA, 2178 bp, Proteus mirabilis
atgctctatcaaagcgaaaatattcaagccgattgggtgaagcaaggtattgttgagctcgttttcaatgctagcggttctattaataaattagatacaaaaacggtggcaatgttaagcgaagcgttaacagtattagaaaacacatctgatctaaaaggggttattttacgttcagaaaaacccgcctttattgttggtgccgatattaccgaatttttatcactttttgatgcaccggttgaagaactgacacaatggctacattttgctaatcatattttcaatcgattagaagatctccccgttcctacagtttctgccattaatggctacgccctaggcggtggctgtgaatgtgtattagcaacggattttcgtattgcatcaccggatttacgcattggtttgcccgaaacaaaacttggtattatgccgggttttggtggctctgttcggctacctcgccttattggcgttgataatgccttagaaattattaccgcgggtaaagatattaatgccgaaacggcacttaagaatggcttaattcaagctattgtccctgttgataagctaaaagaaagcgccatttcactgatagagcaagccattgatggcaaatttgactggcaagctgctcgtcaacctaaaactgtggcgttaagattaacggaacttgaacataaaatgtcatttgctgtggcaaaaggcatggtgatgaaagtcgcaggccctcattatccagccccaatgaccgccgttaatacgatagaaaaagccgcatttctagatagaaaagcggcacttgaattggaaacagaaaactttgtcaaactgacccgcaccgatgttgccaaagcattagtgggtattttccttaatgatcaatatgtgaaaggcattactaaaaagcgtcatgctagcttgccaaaacaagcggcagtattaggcgcggggatcatgggtggcggaattgcctatcaatctgcactaaaaggcattcctgttaccatgaaagatattaatgccaactcccttgaattgggtatgacagaagcactcagtctgttacaaaaacgtcaagaaaaaggacgtatgagtgccgttgatatggcaaaaaccctcgcctctattcatcctaccctaaactatgccagtgtagctgatgcacaaattgtggtcgaagcggtggttgaaaaccctaaagtaaaagcctctgtacttgctgaaaccgaagcgctccttgctgatcatgctgtacttgcttcgaatacctcaacaatccccatttcgctacttgccaaatcactaacacgccctgaaaatttctgtggaatgcacttctttaatcccgttcaccgcatgcctttagttgagatcattaaaggtgaaaaaaccagcgaagagacgattaatcgcattgtcagttatgctagcaaaatgggtaaaacgccaatcattgttaatgactgtccggggttctttgtcaatcgcgtgctcttcccttatttcgccgggttttctcttttattaagagatggtgctgattttattgctgtagataaagtgatggaaaaagcctttggctggccaatgggtccggcttatttactggatgttgtcggtatcgatacagcgaatcatgctcaagcagtgatggctcaaggtttcccagacagaatgggaagtattgataaagacgttattgcgcttttatatcaacaacaacgctatggtcagaaaaataatcatggtttctatgactacactattgataagcgtggtaaaaaacaaaagcaggtagataacgatattcacagccttattgaacatcatgtcggcaaaaaacaggaatttaaccaagacactattattgctcgtatgatgatcccaatgatcaatgaagttattcgttgcttagatgaaggcattatcgcctcacctgcagaagccgatattgcattagtgtatggtttaggcttccctcctttccgtggtggtgtcttccgttacctcgataccattggattagcacaatttgttgcaaatgcagagcaatactcagaattagggccactttaccaaattcctgagagcttaaaacaaaaagcattacgtaacgaaacctactatccaaagcctgcaaaagtagatgttaacatcagagaactcgct

SEQ ID NO: 32683 - DNA, 627 bp, Proteus mirabilis
atgattggtttagtcggtaaaaaagtaggaatgactcgtatcttcactgaagatggcgtttcaatccctgtaaccgttatcgaaattgaaaacaaccgtgttactcaggtcaaagatctagagaaagacggttatcgtgcaattcaggtgactacaggtagcaaaaaagcgaaccgtgtactgaaacctgaagcaggtcattttgctaaagctggcgttgaagctggccgcttactgcgtgaattccgtctgaacgaaggcgaagaatacactgtaggtcaaagcattagtgtagaaattttcgctgacgttaaaaaagtcgacgttactggaacatctaaaggtaaaggttttgctggtactgtaaagcgctggaacttccgtactcaagatgctacccacggtaactccttgtctcaccgcgttccgggttctatcggtcagaaccagactccgggtcgtgtatttaaaggcaagaaaatggcaggtcaactgggtaacgaacaagttaccgttcagagcctggaagtagtacgtgttgacgctgagcgcaacctgctgctggtcaaaggtgctgtcccaggtgcaactggcagtgacctgatcgttaaaccagctgtcaaggcg

SEQ ID NO: 32684 - DNA, 141 bp, Proteus mirabilis
atgagacgcacttttcaaccgtctgtactgaagcgcaaccgtaaccacggcttccgcgctcgtatggccactaaaaatggtcgtcaggttctggctcgccgtcgtgcgaaaggccgcgctcgtctgaccgtttcttcgaaa

SEQ ID NO: 32685 - DNA, 357 bp, Proteus mirabilis
gtggttaagctcgcttttccaagggagttacgtttgttaactcccaagcatttcaattttgttttccagcagccacagcgtgcgagttcaccagaagttacaattttgggtcgccagaatgagctggggcatccccgcatcggtctaactatcgcaaagaaaaacgttaaacgtgctcatgagcgtaatcggattaaacgattagcccgtgaatactttcgtttacatcagcatcaattacctgctatggattttgtggtattagtaaggaagggggtagctgaacttgataaccaccaattgacggaagtgttgggtaaattatggcgtcgtcattgtcgcttggctcaaaaatcc

SEQ ID NO: 32686 - DNA, 497 bp, Proteus mirabilis
atggcactaaatcttcaagacaaacaagcgattgttgctgaagtcagcgaagttgccaaaggcgcgctgtctgcagttgttgcggattcccgtggtgtaactgtagataaaatgactgaactgcgtaaagcatgtcgtgaagctggtgttactgtacgtgtagtacgtaacacattgctacgtcgcgctgttgaaggtacttcttatgaagtgctgaaagacgcatttgttggtcctaccttgattgctttctcttctgaacacccgggcgctgcagctcgtctgttcaaagatttcgcgaaaggaacccagcattcgagattaaagcggctgcctttgaaggtgagtttatcccaggttcaaacattgatcgcctggctacactaccaacttacgaagaagcaatcgcacgcctgatgtcaaccatgaaagaagccgctgccggcaaactggttcgtactctggctgcactgcgcgatcagaaagaagctgcttaa

SEQ ID NO: 32687 - DNA, 651 bp, Proteus mirabilis
gtgacaaaacttgccacgctttcagacggtacggtatacccgcccgtcagcagttttaaagtaaaccagcgaaagctggcaaggcttcaacggaaattaagccgtaaaatcaaattcagtgccaactggcaaaaacaaaagcgcaaaattcaacgtctgcattctcatattgccaatatcaggaaagactcccttcacaaagtcaccagcgaaatcagcaaaaaccacgcaatgattgtcattgaggacttaaaggtcagtaacatgtctaaatcggcaaaaggtacgacagaacggcatggacggaacgtaaaagctaaatctggtttaaaccgcgcaatactggagcaaggctggtatgaaatgcgccgacagcttgagtacaagcagctctggcgaggtggtcaggtactggcaataccacccgcctacaccagtcagaagtgcgcttgctgtggtcatacagcaaaggaaaaccgcccgtcacaaagtcaattcgagtgccttgaatgtggatatacagcgaatgctgatatcaacggggcacgtaacattttagcggcaggacatgccgtgcttgcctgtggagggagggtgcagtcataccgcccgtcgaagcaggaacccgccgaggtgattcagacatcagtc

SEQ ID NO: 32688 - DNA, 623 bp, Proteus mirabilis
attggtgttgggccgtcaaacgccaattcaattctgatcatctggcagttttacgtcctcatgtttggtcaatgattggtcattgtggaggcttaagagaaagccaattattaggtgattacgttctagctcatgcttatttacgagatgatcatattttagatgctgtattaccgccagatattcctattcctaatattgctgaagttcagcgtgcactttatgatgccactaaagctattagcggtaagcctggacatgaaatcaaacaacgattaagaacaggaacggttgtgacaacagatgatcgcaattgggaattacgtttttcagcaacatcaaggcgatttagtttaagtcgagccgttgccgtggatatggaaagtgccactattgccgctcaaggttatcgttttcgcgttccttatggcactttgttatgtgtatctgataaaccgttacatggtgaaataaaattaccaggacaagctaatcacttttatgaaggtgcggtatcagagcatttgcaaataggtattcatgcaattgagttattaaaagacgaagaagataaattacattctcgtaaattaagaacctttaatgagccgccatttagataa

SEQ ID NO: 32689 - DNA, 516 bp, Proteus mirabilis
atgtcagcatatgaaaaaatgtcagaaaaagaattagatcagctcgcaaactacattgtttctattgtacaaaatggcgcatctatcaaagatgaaagtgaaattccagatggatttatggaagggatttattcatttgcgtatgatttttatcagaaagggaagttagatgaagctgaggcgatttttaagtttttatgtctctatgatttttataatgttgattacattatgggacttgctgcagttaatcaattaaaaaagcaatatcaagcagctatcgatctttatgctttagcttatctaaatgctaaaaatgattatcgacctgttttttatgctggacaatgtaatttatcaattggtgaaaaagaaaaagctaaatattgttttcaccaggtggctcaaaatattaatgatcaaacgataaaagagaaggctaatagctatttagagctattaaaagatattcctcttgttgtccttaataaagaggaagaaaaggaagaaaaggaa

SEQ ID NO: 32690 - DNA, 980 bp, Proteus mirabilis
gtgtcactttcgctttggcagcattgtcttgcccgattgcaggatgagttacctgccactgaatttagtatgtggatacgtcccttgcaggcagaactaagcgataacacgctggcactgtatgcacctaatcgttttgtgttagattgggtaagagaaaagtacattaataatattaatgcgttattagtcgacttttgtggttctgatgtcccttcgttgcgttttgaagtggggaataaacctgtatcagcacgtaccaccgagagtgttcccaaaaccgtgacacatcccgcggttaattccacaccgactaacagccagcctgtgcgtcctagctgggataatcaaccgcaatcccaattacctgaacttaattatcgttctaatgtgaatcctaaacataaatttgataatttcgttgaaggtaaatcgaaccaacttgctagagctgccgcaagagcaagttgctgataatcctggaggagcttataacccactgtttttatatgggggaacgggtctgggtaaaacgcatctattgcatgcggtgggcaacagtattatggaacgtaaagccaatgctaaagttgtttatatgcattcggaacgtttcgtgcaagatatggtaaaggcgttacaaaataatgctattgaagattttaaacgctactatcgctctgtagacgcgctattaattgatgatattcaattttttgccaataaagagcgttcacaagaagagttttttcatacctttaacgctttgttagagggaaatcagcaaattattttaacctcagaccgttatcctaaagagattaacggggtagaggatcgattaaaatcgcgctttggttggggattgactgtagccattgaaccaccagaattagaacgcgtgtggcgattttgaatgaaaaaagcggacgaaaatcatatccagttaactgatgaagtggcgttttttattggtaaac

SEQ ID NO: 32691 - DNA, 666 bp, Proteus mirabilis
atgaatagaatagtatttgtttttgctttaatcatatcgtcattaacctgttttaaagcatattcagcgtttacgcttaatggtactcgctttatttatgatgaaggtcgcaagaatatcgcgatagaagttaagaataatagtgataaaacctatggtggccaagtttggattgataatcttaatgggaatgaagtgttctttattcctgcacctaatttattcaaaataactggaggagaaaaacaattaatccgcttgctatatgtaaatgatattttacctaaagatagggaatcattgttttggctcaatattcaggaaatcccgccaatttcttctgccgatgacagtaatgtgcttgctgttgcattaaacacacaagttaaactgatttatcgccctaagattttagctgaaaaacgcgaggatgcagaaaaaagtctgacatatagtggttcagttttaaagaatcctacaccttactattttgcattaactcaagtgtcagtcaataataatcctttggtcttgtcaaaagacattgagcaatctattagtttatttccacctttcagtgaggtaaatgtgcagcgcccattgttaggtaaagtaaccgttgaagctattgatgattatggtgctagacgtgttattgagcttaat

SEQ ID NO: 32692 - DNA, 699 bp, Proteus mirabilis
atgggtcaaaaagtacatcctaatggtatccgccttggcattgtcaagccttggaattccacatggtatgcgggtaccaatgaattcgctgacaacctagacagcgattttaaagtgcgccagtacttaactaaagaactggcaaaagcatctgtatctcgtatcgttatcgaacgtcctgcgaaaagcatccgtgtgactattcacactgctcgcccaggtatcgttatcggtaaaaaaggtgaagatgtagaaaaactgcgtaaaaacgtagcggatatcgctggcgttcctgcgcaaattaatatcgccgaagtacgtaaacctgaactggacgcaaaattagttgctgacagcatcacttcacagctggaacgtcgtgttatgttccgtcgtgctatgaagcgtgcggtacagaacgcaatgcgtttaggcgctaaaggtattaaagtggaagtaagtggtcgtttaggcggcgctgaaatcgctcgtactgaatggtatcgtgaaggtcgtgtacctctgcacactctgcgtgcagatatcgactacaatacctcagaagcacatactacttatggtgtgctcggcgttaaggtatggatcttcaaaggtgagatcctgggtggtatggctgcggttgaacaggcggaaaaaccagccgctcaacctaaaaagcagcagcgtaaaggccgcaag

SEQ ID NO: 32693 - DNA, 330 bp, Proteus mirabilis
atggaaactatcgctatacatcgccacgctcgttcttctgctcagaaggttcgcctggtggcagacctgattcgcggtaagaaagtgtcgcaagctctggaaactctgacctataccaacaagaaagctgctggtttagtgaagaaagtactcgagtctgctattgctaatgcagaacacaacgatggcgctgacattgatgatctgaaagtagctaagatctttgttgacgaaggtccttctatgaagcgcattatgcctcgtgcaaaaggccgtgcagatcgtattctgaagcgcaccagccacatcactgtggttgtgtccgatcgc

SEQ ID NO: 32694 - DNA, 843 bp, Proteus mirabilis
atgaaatttgttggcgcacatgtcagtgctgcaggtggtgttgatcaggctgtattacgagctcatgagatcaaagcaacggcatttgctctttttactaaaaatcagcgccaatggaaagcagcccctttatcaactgaatcgattgataaatttaaaaaaaattgtgaaatctatggctatggtccagcacaaattttaccacacgacagctatctgattaatttagggcatccagaagaagaagcccttgaaaaatcaagagccgcttttctcgatgagatgcaacgctgtgagcaattaggcattgaattacttaattttcacccaggtagccatttaaaaaaaatcgatgttgataaatgtctgcaacgcatcgctgaatcaattaatatcaccttagataaaacccaaaatgtgaccgcagtgattgaaaataccgctggacaaggcactaacttaggctatcgttttgaacatctcgccgccattatcgatggtgtagaagataaatctcgagtgggcgtttgtattgatacttgtcacacttttgctgcaggttatgatctacgtaccgttgaagactgtgaaaagacctttgctgaatttgataatattgtcggctttcaatatttaaaagccatgcacttaaatgatgctaaaagcgaattggctagtcgtgtcgatcgccatcatagtttagggcaaggcaatattggcaaagtaccctttacttatattatgcaagatacccgttttgatgggatcccacttatcttagaaacaattaatcctgatatttggccagaagaaatagcttggttaaaatcacaacaaactcaa

SEQ ID NO: 32695 - DNA, 1504 bp, Proteus mirabilis
tttgatattgtcgaactgtcacggttacagtttgccttaacagcgatgtatcacttcctgtttgtcccattaacgctcggtatggcgtttatgttggcaatcatggaaacgatatatgtcctgtcaggtaaacaagtttacaaagatatgacaaagttctggggtaagttattcggtattaactttgctctgggtgtcgcaactggtttgaccatggaggttccaatttggtactaactggtcatatttctctcattacgttggtgatatcttcggtgcgcctttggcaatcgaaggtctgatggcattcttcttagaatcaactttcgtcggattattcttcttcggttgggatcgtttaggcaagaagcaacacttaatggtaacttggttagttgcctttggttctaacttctctgcactgtggatcttagtcgcaaatggttggatgcaaaaccctgttgctgcagacttcaactttgaaaccatgcgaatggaaatgttgagttttgctgatctggtcttaaacccagttgctcaggtgaaatttgttcacaccgttgctgcaggttactgtactggtgcattctttgttttaggtatcagctcttactacctactcaaaggtcgtgatatcggttttgcaaaacgttctttcgctgttgcggcaacctttggtatcgctgcggtattatctgttatcgtactgggtgatgaatctggttatgaaatgggtgacgtacaaaaaaccaaattggctgctattgaaggtgagtggcatacagagccagcaccagcttcctttaacttgattgcattccctaatcaagaaaaaatggaaaacacgtttgctctacaaattccatatgtcatgggtattatagcaacacgttcttttgatacgccggtattaggtctgcatgatctgatgagccagcatgaagtgcgtattcgtaatggtatgaaagcgtatgacctgttaactgaactacgttcaggtaacactgatcctgccgtacgagctgcattcaatgagtctaaaaaagacttaggctacggtctattattgaagcgttatactgaaaatgtttctgatgcaactgaagagcaaattaagtcagctgtaaaagactctattcctaacgtcgcaccacttttctggtcattccgtatcatggtcgctgccggcttcctgatgttactggttgttgcgatctccttctggactgttctgtctaaccgtatcggtaactacaaatggttactgcgtgctgcgctgtttagtattccattaccatggattgctgttgaagcgggctggtttgttgcagaatatggacgtcaaccatgggcgattggtgaaatcttgcctacggctgtagcaacttcttcactgacacaggctgatattctcgtttctatgggacttatctgcggtctgtatactctgttcctcgttgccgaaatgttcctgatgttcaaatttggtcgccttggcccaagt

SEQ ID NO: 32696 - DNA, 1620 bp, Proteus mirabilis
atggattcgcaacgcaatcttctattcatcgctttactgttcgtttctttcctgatctggcagcagtgggagggtgataaagtatcacaaaacaccaccactactactcaggtctcgcaacaagcggacatgccaagcagtgatagtcttgctgtgactggtaacagcaatgagcaggcaaaattgattaccgtaaaaactgacgtacttgatcttcgtatcaatactcagggcggtactatcgatgaggctgatttgttagcctatcccgccgagcttaattcaaaaacccctttccgtttactggaaactacacctcaattcctgtatcaggctcaaagtggcttaattggccctgatggtccagatcagaaatctcgccctgtctacagtgccacacaacaagaatttatcttaggtgaaaaccaagatgaattacgtgtacctatgacttttgtgaatgaagaaggcgtgaaattcgtcaaaacctttattctgaaaaaaggtcagtatgacattggtattgaatacaaagttgagaacccaacagataaaacactgacaatgaacttttatggtcagttaaaacagtctgttaagttaccagaacaccgtgatactggaagtagcaactttgcgctacatacctatcgtggtgcggcttattcatcagatgaaaccaactataaaaaatatagctttggtgatatcgaagataaaaacctttctatcacaaccaacaatggttggattgcgatgttacaacaatacttcgcaaccgcgtggatcccagctaaagatagtcagaataacaacttctactctatcactttagataataaatctatcgcactgattggttataaatcagcacctattactgttgcacccaatagcacacaggatatcacttcaacattatgggtcgggcctgagatccagtctgaaatgtctgcaatcgcaccacatttagacctatctgttgactatggttggttatggtttatctctcagccactgtttaagctgttgaaattcctgcacagctttatcggtaactggggtttctccatcatcatgatcacctttatcgttcgtggtattatgtatccactcacgaaagcgcaatacacctctatggcgaaaatgcgtttactgcaaccaaaactggcggcacttcgtgagcgtattggtgatgataaacaacgtatgagccaagaaatgatggcgttatacaaacaagagaaagttaatcctcttggtggttgtttaccgctgattatccagatgccaatcttccttgccttatactatatgttaatgggctcggttgaattacgtcatgcgccatttatattatggatccaagacttatcagcaccaagatccgtactatattctgccattattaatgggtgtgacgatgttcatcattcagaaactgtcaccaacagcagtcactggatccgggtgcaacaaaaaattatgacctttatgccggttgtatttactgtattcttcctgtggttcccatcaggtctggttctgtactatatcgtcagtaacctagtaaccattatccagcagcagttaatctaccgcggtctggaaaaacgtggg

SEQ ID NO: 32697 - DNA, 237 bp, Proteus mirabilis
atggaaaacctgagtatggatctgctgtacatggctgccgctattatgatgggtttagctgcaatcggtgctgcaatcggtatcggaatcctcggaggcaaatttttagaaggtgctgctcgtcagcctgatctgatccctcttctgcgtacacagttctttatcgttatgggtctggttgacgccatcccaatgattgctgtgggtctgggcctttacgtgatgtttgctgtcgcc

SEQ ID NO: 32698 - DNA, 1468 bp, Proteus mirabilis
cttaatatgcataaaaaacaacgttcgcccttctctttacgaacaagatttttacttgccaccagcgccattattttagcactgacactctcttatggtttggttgccatagtcggttctattgtcagttttgataaaacgacttttatgctaatgcgcagccaaagtaatctctactatagcttagcgcaatggaaagatgggcaattgcagattgaatttccgactaacctcaataacaacaacacatcgctggtggttatcttcgacgagaaaggcaatgtgctatggacgccaacggatttacctcaggtgatcccaaacagtatcgcgccaaaatggcgcaataaagaaggcttatttgaaattagtgtgaatgttaaaacgacacgttttatgttacagcaactgcctcaatatcgtgcctatctaaaaaaactcaacgaatattcaagtaatgataccttaacgcattccgtggttattaatcactatcctgcggcggataatatgccttatctatccattgcggttatcgatcctattcctcaaagtctgcaaaatgtaagtagagtctgggattggtttctctatatattactagctaattttcttttggtgatcccattaattttgttagcaaggcccctatttgagtttaaggccgattaaatccattattgagcagatcagcgcgttggaaaaaggcactcgcgataatttagatgaaaatcctcctaaagagctcaaaggattagtttataatctcaacattttattgcgtaatgaacgcaatcgttatagtaaataccgtaccagtttatctgatctgacccatagcttaaaaacgccccttgctgttttacaatcaacattacgtgctctacgtgctggcaaacaaatgtctatagaacaagctgagccaattatgcaaagtcaaattgaacgaatttcacagcaagttggttattatttacatcgagcttctcttcacggcgatcacgatataacaacacgcaagctccactctttatcaggcttacttgacaatctttgtagtgcacttaataaggtctatcaatccaaaggcgttgatataacgttaaatgtttcccctgaaatgatgtggttaggtgaaaagaatgattttatggaagtcatgggaaatgtacttgataatgcttgtaagtactgcttagagtttgtcgagatcaatgtaagtcatgatgacaattgtgtgattatcaccgtagatgatgatggcccaggagtcagcccagaaaaaagggagcttatttttcagcgtggtacacgtgcagatacattgcgcccaggacaaggcttaggattatcaattgctgttgatattattgagcagtataacggtgatatcaccattaccgatagtccattagggggggcgagactcatcgtcacctttgctgagcaacaactcactactgaaata

SEQ ID NO: 32699 - DNA, 552 bp, Proteus mirabilis
atgaaagctatttttttgactgctttatttgtattaactagtttagtgactggctgtgatcaaatcagacaatttgatgtcagtgaaaaagtaattaatgactatctgagtcaaaaatcgggattacaaaaacacattggggaagacggtgttgtttctgccgatatcacattaagtgatttagcgatccaaattggtcgtactgagcctggaaaagtgagcttttctggtagtgcttctcttaaaattgattctttgtttggcaaaactggcgcgaatgtgaatttaactttatcaggccagcccttttatcaagcagagcttggggcgatatatatcaagtcaatgaaaattgatagctataaagtgtctcctgaaaaaatggagccagttgtaatggcattaaaaccttacttagatacgactattgcgacttattttgataatcagcctgtttatgtgctcaaccctgaaaaaaatagtgcagaagcggctgcctttaaattagcaaaagggattgaagttaaaccgggtaagtttgtgatccaactt

SEQ ID NO: 32700 - DNA, 372 bp, Proteus mirabilis
atgcgtatttcagcacgccgtcgcttagaaacttttcttgatacaggaagcacgactgagctgggcagtgagttagagcctaaagatattctgaaattccgcgactctaaaaaatataaagacagaattgctgcggctcagaaacaaacccatgaaaaagatgccctagtggtgatgaaaggtacgttaaaagaaatgcctgttgtggccgcatcttttgaatttgcatttatgggcggctctatggcgtctgttgtgcaacagcaataccgacacggatcgctaattgtgcagcttctggctgatctttcattgccagaatatacttcatcgtttcacctttaccgacttcagtatcagattcaaaactgc

SEQ ID NO: 32701 - DNA, 1492 bp, Proteus mirabilis
atgctacatttgtttactgacctggaatttcatacaggtttaatgttggttttagcactgattttcgtgctattttatgaagccattaatggctttcatgataccgcaaatgcggtagcaactgttatttatactcgtgctatgcgtgcgcaatttgcggtcgtgatggcgggtgtatttaacttccttggagttttgctcggtggattgagcgtggcttacgctattgttcacttattaccgacagatcttctgctaaatgtgagctcggctcatggccttgccatggttttttcgttgctgttagctgccattatctggaacttaggtacatggtatttcggtattccagcatccagttcacatacgctgataggtgctatcattggtattggtttaacaaatgctatcgtgacagactcgtcaatcgttgatgcattaaacatacctaaaatgatcagtatcttcctttctcttatcctttccccaattattggcttggtgattgctggcgcgatgattttcttgttacgtcgctattggagtggcacgaaaaaacgtcgtcgtatccacctaacccctgccgaacgtgagaaaaaagatggtaaacgcaaaccaccattttggactcgtaccgcgctgattttatctgcggtaggggtgagtttctcacatggtgcgaatgatggtcagaaaggtattggtcttatcatgttagttttaattggtgtcgccccagcagggtttgtcgtcaatatgaatgctagcggatacgatatcactaaaactcatgatgccgttgtacacttacaacagtattatgagaagcatcaaccagctctacaacatgcgattgaaaataccccgggtagtatcagcacaagctgatcctaacgacacggattttcattgtaatagcgcaagaacgccaattgttctcaatcaaacagaacaaatgttgtctggtattagctcttatgatgagctgagtgcagaccagcgtgctcaaatgcgtcgcttactgatgtgtattgctgatacagctacggaagttgctaaactaccagaaactagcgcccaagatgcacggttcttaaaaacattgagtcgtgacctgctaaatacagtggaatatgcaccaatttggatcattatctctgtggctttagcgctctctatcgggacaatggtaggttggaaacgcgttgcggtaactatcggtgagaagattggtaaaaaaggtatgacttatgcgcaaggtgtttctgctcaggtaactgctgcagtttctatcggtgtagcaagttatacaggtatgccagtatcaacaacacaagtgttatcatctgcggttgcaggtacgatgattgttgatggtggtggggtgcagaccaaaaccgtgaaaaatattgcgctggcctggatcttaacattaccagtgagtattgctttatccggtgtgctttattggatttcactttcactgctggtg

SEQ ID NO: 32702 - DNA, 114 bp, Proteus mirabilis
atgaaagttcgtgcttccgtcaagaaaatgtgccgtaactgcaaaatcgttagacgtcacggccacgtgcgtgtaatttgcagtgttgaccctaagcataaacagcgtcaaggc

SEQ ID NO: 32703 - DNA, 900 bp, Proteus mirabilis
atgctatcagggttattgattatcctattgcccctgtttatagggtattttattaagttaaacaatcgccctttgcttcaattggctaaccgtttacttagtgcaatggtctatgtgatcctctttttaatgggggttagcttagccatgttagataatattggtgaaaatttattttctatccttgcctatgccagtgtcttctttatctgtacttttggtgccaatctgctgtttttatggttgctggataaaaaagatccctggcatgtccctgcacataaacaagctaagcccccttcacgtatcaaaatggtactcgaatcactacaactttgtggtgtagtggtagtaggtttttttgtcggtttaaccggatggtcaatttttggttatgcatctcaagccagccaaggcgcacttatctttttattatggcttgttggtctacaattacgtaatagtggcatgagtccaaagcagatcttaattaatcgtcgcggtactaccattgcaatagtgatggcaataagtgcccttgcaggtggtgcattagcggcttatttactcggattacccacaaaaatgggattagcgatagcctctggttatggttggtattctttatcggggatcgtattaaccgatgcgtttggcccggtaattggtagtaccgctttctttaatgacttaatgcgtgaattagccgctatcatgctaatccccattattgttaatcgttatagaaatacggcattaggtatttgtggttcaacttctatggactttacgctacctgtattacaacgcagtggaggggttgccatagttcctgctgcaattgtgcatggtttcgtattaagtttggtcacaccaatcttaatggcgttctttacttca

SEQ ID NO: 32704 - DNA, 1304 bp, Proteus mirabilis
agtattatggatacaaccaaagctggttctatcgcacagggtaatacccaaagtgattacaaaacatggcgtaagtcagacacagtatggatgctcggtttgtatggtacagctatcggtgctggcgttctgtttttacctatcaatgccgggattggtggcttaattcctctgttgattatgttagtacttgcttttcctatgaccttttttgcacaccgtggtatgtgtcgctttgtgctatcaggtaaaaatccaggtgaagatattactgaagtggttgaagaacactttggtaaaacagcaggtgtattaatcactctgctctatttctttgctatttatcctatcttgttggtttacagtgtcgctatcactaatacggtagaaagctttattgttcaccaaatgcatatgacagcaccacctcgtgcgattttatcactggtactgattgtcggtattatgtgtatcattcgctttggtgaacaagctattgttaaagcaatgagtgtcttagtattcccattcgttgccatcttgatggtacttgctttatacctcattcctgaatggaatggtgccattcttgatacgctctcttttgatcacgcctcaacttctggtatgagccaaggcttgttagtaaccttatggttagctatcctgtgatggtgttctcttttaaccactcacctatcatctctgcttttgctgtggcaaaacgcgaagagtacggtgacaatgcagagaaaaaatgttcacgcatcttagcttatgctcatatcatgatggtgatcactgttatgttcttcgtgtttagctgcgtatttagcttaacaccagaaaatttagctgaagcaaaagagcaaaacatcagtattctgtcttatcttgctaaccactttgaagcacccgttatcgcttacattgcacctttcattgcctttgttgcgattactaaatctttcttaggtcactatttaggggctcgtgaaggtttcaatggcttaattatcaaagggatgcgcggaattggtaagaatgtcgaaaaagatcgtttaaacaaaatcacagctctgtttatgttggttacaacgtggatcgttgcaacattaaacccaagtatccttggtatgattgaaacactgggtggcccaatcatcgcaatgttactgttcttaatgcctatgtatgctatccgtaaagtaccagcgatgaaaaaatatcaaggccatattagcaacgtatttgttgttatcatgggtctgattgcaatctcagcggttttctacaccttaggt

SEQ ID NO: 32705 - DNA, 1233 bp, Proteus mirabilis
atgaataacaacaaaaagaccaaaaaaagattttctcttattatcatcctgcttattgttatcgctggcgctatcgcctattggcaatactcttcaaacaacagcgcacctcctgtgagtaaagatacccctactgcgaatacaccaaatagaagtacagctggctcaagacgaccaccgatgcctcctgtacaagtggcgacatctgcacaagaagatgtgccgcaatttttaactgctttaggtacagtgaaagccgtcaatagtgtgaccgtgacaagccgtgtggaagggcaattaatggcgttgcatttcaccgaaggccaacaagtgaatcaaggcgatttgttagcagaaatcgacccacgtccttttgaagtgcaattagcgcaagctaaagggcaattggcaaaagatcaggccacactggcaaatgcgcgccttgatttagctcgctaccaaaaactggcaaagacccatttggtttcacaacaagaattagacaaccaagcggctttagtcaaacagtctgaagccagtattagtatcgataaagcagcaattaataatgcacaattacaattaacctatagcaaaataacggcccctatttcaggacgggtgggattaaagcaggttgatgtcggtaactatatttctggtggctcatctacgccaattgtcgttattaatcagatggatcctgttgatgtgctctttacattaccagagcaagatctatcacaggttatcttagcccgtaaaaataaccctacattaccggttattgcattagacagaaataataaaattgaattagcacaaggggcactatttagtgttgataatcaaattgatgccactacagggactatcaaattaaaagcccgttttcctcaacaagaaagtacgctatttcccaatcaatttgtcaatattcgtttatatgtcactacattagaaaaagcggtagtgatccccaatgcagcattacaaatgggaaatgaaggacactttgtttgggttgttgatgaggaaaacaaagtcagcaaactcgctgttgaggttgcatcacaaaatgcagataaagttgtcattgcctcagggttatccgctaatcaacgtgttgtcaccgatggtgtggatagattaacgcaaggtgccaaagtcgagattgtaacaccgctggcacctaaagctaaaaccactgatcccgttgttgcggagaaagca

SEQ ID NO: 32706 - DNA, 234 bp, Proteus mirabilis
atgtctctcattccaaatcatagctacaagatcctcagctattccccgcaaattagccctgcctatcggcagaagctattatcattagggatgctgccaggcgctattttcaatgtgatccgtatcgcacctttaggtgatcctatccaaattgaaactcatcgggtctctttaattttgcgtaaaaaagatctcgctttgataaatcttagcgaaatcgctcataacgaaaaa

SEQ ID NO: 32707 - DNA, 1197 bp, Proteus mirabilis
gtggagcgtttggagcaaggtcctatcgctctctattgtggcttcgatcctaccgctgatagcctgcacttggggcatttggttcctttgctgtgtttaaaacgattccaactagccgggcataagcctgtggcgttggtgggtggtgcaacgggtcttattggtgatcctagttttaaagccaccgagcgcaaactgaatacccaagatactgttcacgagtgggtagaaaaaattcgtaaacaagtgtcacctttcttagatttcgaccgtggtgaaaacagtgcggaattagcaaacaactatgactggtttggtcaaatggatgtgctaaccttcctgcgtgatatcggtaaacacttctctgtgaaccaaatgatcaacaaagaagcggttaaacagcgtttaaaccgtgacgatgtggggatctcttttactgaattcgcttataatctgttacaagcttatgactttgcgtcattaaacaaaaacctcggtgtcgagttacaaattggtggctcagatcagtggggtaacattacttcgggtattgatctaactcgccgtttcaaccaaaaacaagtatttggtatgacagtacctttaattaccaaatctgatggtactaaatttggtaaaacagaaggtggtgctgtttggttagatccgaagaaaacgagcccatataaattctaccaattctggatcaataccgcggatgcggatgtgtaccgcttcttaaaattcttcacttttatgagcattgaggagattaatgcactggaagaggaagataaaaacagcggtcaagcacctcgcgcccaacgtgtgttagcagaacaagttacacgtttagtccatggtgaagaaggtttaactgccgctaaacgtattaccgatagcctattttcaggagctattgcagatttaacgcaagctgatcttgaacaattagcgcaagatggtatgccaactattgagttagaaaaaggcaatgatttacaacaagcactggtcaatgcagaattagttccttctcgtggtcaagctcgtacaatgattggctctaacgcagtatctattaatggcaaaaaacaggataatcctgaatacgtctttgaagaaaaagatttcttatttggtcattattccattttacgtcgtggtaaaaaacattactgccttgttatctggaaa

SEQ ID NO: 32708 - DNA, 2163 bp, Proteus mirabilis
atgaaaaataaaaatttgttatttttaagtgctgctgtcctttcagctatatatggctcagccgtagcggctgattgcgatagtactttaaccatttgtgaaaccgtaaacattaataatggcgatacagcgcaaataaataaagatgttaatgtatcacaaggtgacggtgtagtatttaatggctcatcaacagaatataaagctcaagcaattacaaaaaatattactgttactggtaatggagcaaatgcaattaaaataaatcagggagctacttttagtagtaatattaatttaaatggcgctaacgttactagtgaaaatggtacagcaatattagttgaaggtaactttcctaaacgaggaacaggtgtttatatccgagatggcgctattatcagaggaaaaaccgcagcgattgattttagcactttaaaaacaggctttagaagtgatgttaatggcgagatccacggtgatattttagggaataatcatgtggataccaaaatcaattttgcttatcagggaggagcacaaaatgcattatttgacggctataaaattaccggtgttcctttaattgaaaaccatggcaatttaactatccaaggtaaagataaaaccattcaatgggaaggtaacttcatgaataaggaaaatagccagcttattttccgccttgatgataataccaatactgatgaaactatcttacatgttaccggcgatgtcacctttaaaaaaggtagccaagcaaaacttgattttaaaggcaccagtgttgataacatcattaataaagatattgtattaattgcttcagactcggcaattaaagatgaagcgggcattacagtgactgatgcaaatgccatagcgccagatatttcacctttattagaaaaaacagattcatggttagaaacgacaccaccaaatattagcggtggtgtcagtggtaatcaattaattgcgcgttatggtattagctacgaagggggggataattttattagcgctgctgaacgtggcaatgtcacagagaatggattagcagcagctaaatttattattccaacagtattaaatgaatttaataatacacgtagccagatttcagatgaagcattaagtttattagtcgccgctggtaataatgataataatattgctgcactatcaaatgatctggcgcccattgctgacggtagtgatattcaagcaggattaatcatggttgaagatatgcgcaacaatattgctcatcgctacttacgctatgataatcagctccccattgaagaaagagaaataggttggaatagctgggcaaatattctgtacggttatggtacgcaaagtcaacaaggtggaattaacggctacaatacttatcgcactggtattcaaatcggtactgattatgaaataaatcaagatgcgctaattggcgtttctttagcatataactacgctaaagccgatgctaaacaacgtaatgcaagcaaagaaattagccattttgaatttatgccttatgccggttggtatagtgatacattattcttaaacggtaatttaaatattggttattacactgtcgatagtgagagggatatcggtggtaatacgggatggcaaggaaataccaaagcaaaaggtgactactctggtgtgcaattaggctatcagattaacgctggcacctatttggattttgattttatccatattaaaccgatgctaacttaccaatatcaatggctcaatattgattcttgggaagaaacaggctctacattatctatgcgtacttatggccaacgctacgcagttaatcaattaggtggctctgttgctttatggaatgactaccaaacctcttatggcaaattaaccccttctcttaaccttcgttatatcaaagatattgcaggtaataacgatattaatcaacgccacagccttacctattttaatactggaggaagcaccttcgatattaaaggaaataccgttggtggtgacatcattagtgctgaattaggtgcaaaccttgatattacccaatcgttaaatttaggtacaacaatgggatatcagcgttatgacaaattcaatgaagggcgtatcggctttactgttagccagcgtttc

SEQ ID NO: 32709 - DNA, 669 bp, Proteus mirabilis
atggtaagttttttgagaacaaagtccgctgtcttattatcaatagttatttttcctattttctttttattatcaggctgtttttcattcgggttaatgttatcaactaaaaatgataatcgttatcatcgttctcattggaaaggcgattcaattaccgcactctctctagcaaaagatagtaacggtactagcggatgggtatttattggtgatcattttgattatttattaataagaggtggagataacgcagtaaatattttaagagatcctcttatccaccatgataaattgagcgtagaaaatccagttgaatttattattgataatcaaaagaagcaatttaatgggaaaattaaaataaattataactgggtaactcaaaccgataaagaagcagcactaacttacggttttatatgtaaaacagatataaacacctgttcactaaaaatagataatttacttggaacagttcatcaaaaaaataaagaacaaaaaaatgagtatttactaccttttaaccatccctttaatgttgaattctaccaatacaaagaaaatcttattggtgccagcacaccaagaatattattacccgttactttggcgctagatatagtcacatctcctttacaattgctgatgatcccaatactaagcaag

SEQ ID NO: 32710 - DNA, 360 bp, Proteus mirabilis
gaacagactatgctgaacgtggccgacaactccggtgcacgtcgcgtaatgtgtatcaaggttctaggtggctcgcaccgtcgctacgcagatgtaggtgacatcatcaaaattaccattaaagaagcaattccacgtggtaaagttaagaaaggtgatgtactgaaagcggtagtggtgcgcaccaagaagggtgttcgtcgccctgacggttctgtcattcgcttcgatagcaacgcttgtgtattgttaaacaacaacagcgagcaagttattggtacgcgtatttttgggccggttactcgtgaacttcgtaacgagaagtttatgaaaataatctctctggcacctgaagtactc

SEQ ID NO: 32711 - DNA, 2661 bp, Proteus mirabilis
atgtctgtaactaacgttactgaactcaatgatctggttgctcgtgtaaaaaaagctcagcttgaatttgctaacttttctcaagaaaaagttgacgcaatttttcgtgctgctgcattagctgccgctgacgcccgtattcctcttgcaaaattagctgttgaagagtctggcatgggtatcgttgaagataaagtgatcaaaaaccactttgcttcagaatatatctacaatgcgtataaggacgaaaaaacctgcggtattttgtctgaagatttaacctacggtactatcactattgctgaacctatcggtattatctgtggtatcgtgccaacaactaaccctacttctaccgctatttttaaagcattaatcagcttaaaaacacgcaacggtattattttctctcctcatccacgggcgaaattagccacaaaccgtgcggctgaaattgtgttaaacgctgcaatcgccgcgggtgcaccaaaagatattatcggctggatcgatgaaccttcagtggcattatccaatgcattaatgcaccatgatgatattaacctgatcttagcaacaggtggcccaggaatggtaaaagccgcttacagttcaggtaaacctgctatcggtgttggtgcgggtaatactcctgttgttattgatgactcagcagacattaaacgtgcagttgcttctattttgatgtcaaaaacctttgataatggggttatttgtgcttcagagcaatctgttatcgtcgtagacagtatctataaacaagttcgtgaacgtttcgccactcacggcggctacatgttaaccggtaaagagttaaaagctgttcaagatattatcttaaaagatggtaacttgaatgcggccatcgttggtcaaccggcagtgaaaatcgcagaaatggccggtattgaagtgcctgttaacactaagattttaattggtgaagttaaagaaactactgatgcagaaccttttgctcacgaaaaactatcgcctctgttagcaatgtaccatgcacaaaactttgaagatgcggtacataaagcagaaaaattagttgaaatgggcggtattggtcatacttcttgtttatataccgatcaagacaactgtcctgaacatgttgcctactttggcgacaaaatgaaaacttcccgtattttaatcaatacaccggcatcacaagggggtattggtgacttatacaactttaaactcgctccttctctcactttaggctgtggctcatggggtggtaactccatttctgagaacgtagggccaaaacaccttatcaacactaaaaccgtggcgaaaagagcagaaaatatgttgtggcacaaacttcctaaatcaatttatttccgccgtggttgcttacctattgcactggaagagattgcaactgatggtaaaaaacgcgcatttatcgttacagacagtttcttattcaacaacggttacgttgatgaagtgaccaatgtactgaaaaaatttggtgttgaaacggaagttttctttgaagttgaagctgatcccacattaagtgtcgtacgcaaaggtgcagagcagatgaacagctttaaacctgatgtgatcatcgcattaggtggcggttcaccaatggatgcggctaagattatgtgggtaatgtatgaacacccagaaacacacttcgaagaattagcattacgatttatggatatccgtaaacgtatttataaattcccgaaaatgggtgtgaaggctcaaatggtagcaattaccacaacatcaggtacaggctctgaagttacaccatttgctgttgtgactgatgatgaaacaggccaaaaatatccattagcagactacgcattaacgccagatatggcgattgtagatgccaatctggtgatgaatatgccaaaatcactctgtgcttttggtggtttagatgcggtgactcacgcattagaagcttatgtttctgtattagccaatgagtattctgatggtcaggcactgcaagctctgaaattgctgaaagaatatctgccagcaagctatcatgaaggtgctaaaaatccggttgctcgtgagcgtgtccacaatgcagccaccatcgcaggtattgcatttgctaacgccttcttaggggtttgtcactcaatggcgcataaattaggctctgaattccatattcctcatggtcttgccaatgcgttattaatttctaacgttattcgttataacgcgaatgataacccaacaaaacagactgcatttagccaatatgaccgtccacaagcacgtcgtcgttatgctgaaattgctgatcacttagaactgtctgctcctggtgatcgcacagccgctaagattgaaaaactgttagcttggttagaagagatgaaatcttcattaggtatccctgcttctatccgtgaggcgggcgtacaagaaagtgatttcttagcgaaagtggataaattatcagaagatgcgtttgatgatcagtgtactggtgctaacccgcgttatccgctgatctctgagttaaaacaactgttattagattcttactacggccgcgaatttaacgagcaccctgttgctgaggtaaaagaagcgaagcctgcgaaaaaaagcagtaagaaa

SEQ ID NO: 32712 - DNA, 1386 bp, Proteus mirabilis
atgactctaccgataaacaataatatttttactgttagccgtctaaataagaccgttcgccagttattagaaatggaaatgggtcgcatttggatcagtgctgaaatttccaattttactcaacctgcttctggccattggtatttcacgttaaaagatacccatgctcaaattagagcggcgatgtttcgcggtcaaaacacaaaagtcacttttcgccctcaacatggtcagcaagtattagtacgtgcgactatcacactgtacgaacctcgtggtgattaccaactgattgtcgaaagcatgcaaccggcgggtgatggattattacagcagcaatttgagcttttaaaacaaaaactaagtgctgaaggtttatttgatgctcttcataaaaaaccactaccaacacctgctaaacaaattggggtgatcacctcctcaactggcgcagccttacacgatattttaaatattctacgtcgtcgtgatccctcattacctattattatttatcccacagccgttcaaggtgcggaagcaccaatgcagatagtccatgccattgaactggctaaccgtcgtaaagaatgtgatgtgctaattgtcggccgaggcggtggctcattggaagatctctgggcatttaacgatgagcgcgtagcccgtgctatttttgctagtgatattcctattgtcagtgccgtgggtcatgaaactgatgtgactattgctgattttattgccgatcttagagcgccaaccccttctgccgctgctgagttaattagccgcaacaaactcgagctattacgccaattgcagtcacagcaacaacgtcttgaaatggcgatggattattatctagcaaaaaaattacgcgcactaacacaacttcatcatcgcttacaacaacagcatccacacttacgccttgctcgccaacaaaatgtattggctacaactaaacagcgtttagtgaccagttttcagcgccttctacaaacaaaacagaatcaacatactcagctacaaaaacgccttaattaccaagagccaagccctcaaatacaagcactactgcgccaacaacaacagttaatttatcgtatgagagaaagtatttcacaacagcttgctcgtcaacgtgaacaatttgcaattagctgttcacgtttagaaagtgtgaatcctctcgcaaccctttctcgcggttacagtattagtgaagttgcttcaggtgacgtactgaaaaatacgaaacaagttaaaaaaggtgatacgctaaaaacgcgtgttgaagatggctggatcaccagtgaagtgataaatacacaaaaaatatctgttaaacgtaaaccagcccccaagagaaagtcatccatt

SEQ ID NO: 32713 - DNA, 195 bp, Proteus mirabilis
acccgtgtatcttatccaatctatcatattgataatattgtcaaaccggtatcgaaagcgggtcatgctaaaaaagtcattttcttaaccgccgatgccttcggggtgctacctccggttgctcgtttaacacccgagcaaacacaatatcacttcttatcaggctttactgcgaaacttgctggcacagaggta

SEQ ID NO: 32714 - DNA, 543 bp, Proteus mirabilis
atgactgattctcctaaaaaacgctggtatgttattcaagccttttcaggcttcgaaggccgtgtagcacagtctctgcgtgaacatatcaaattaaacgaaatggaagactcatttggcgaagttatggttccaacagaagaagttgttgagatccgtagcggacagcgccgtaaaagtgagcgtaaatttttcccaggctatgttcttgtccaaatggtcatgaatgatgcaacttggcatcttgtgcgtaatgtgccaagagtcatgggttttattggcggtacttcagacagacctgcaccaattagtgataaagaagttgatgcgatcatgaatcgtctacaacaagttggtgacaaaccacgtcctaaaacactgtttgaaccaggtgaaatggttcgtgttagtgatggtccatttgctgactttaacggtgttgttgaagaagttgattacgagaaaagtcgcctgaaagtgtctgtttctatctttggtcgtgcgaccccagtggaattagactttagtcaggttgaaaaaggt

SEQ ID NO: 32715 - DNA, 905 bp, Proteus mirabilis
atcttaccccaagaatggcgactctcgctaatttttctcagcaccccattggcacagggccataccaagtgatgagcaatgatcaacataaactgcaaatcaaagcgtttgatcgctattttggtttacgcgcactattagataacatcgatatttgggtggttcctgaattaaaagacaaaatggtttgctctacccttcatttaaccgatgatgatactcataacaactcactggaaagccgcaaagaggaaggctgttattttttactttacgatagccgctcaacacaatgccaacaacctgagatccgcgaatggcttagtagtgtattaacaccggtgaatatgttggcccattgtgcgccctcttatcaacgccattggtcacctgcttatggtttattgttacactggcaccatagcaaactgatcccaccgcatactaaacccgcttcactcacaaaactgaccattacactgtataaagagcaccacgaatacagcactattgctgaactgatcaaaaaaatcttatctgactatgatatcgaattatccattcaagtgcttgattatgaacagtggtattatggtgatgcaaagagtgatatctggttagctaccgtcaatttctataaaccgctcgagttttctatttttgcagcactttatgaactgcccctatttcaccagtgcatgggtgaacgttatgaagatgccctagccttatggcgtcaaaaagtattaccgcttgaagagtggtgtcgccaattaacacaaaataattggcttttcccgttatttcaccatttacttgaattacaagggcaacgtacgatacgcggtgtaaaaatgaatacctttggttggtttgattttaaatcggcatggtttatacctgat

SEQ ID NO: 32716 - DNA, 140 bp, Proteus mirabilis
gggtacacacgtgctacaatggcagtacaaagagaagcgacctcgcgagagcaagcggaactcataaagtctgtcgtagtccggattggagtctgcaactcgactccatgaagtcggaatcgctagtaatcgtagatcag

SEQ ID NO: 32717 - DNA, 316 bp, Proteus mirabilis
gtgaaacctgctgctcgtcgtcgtgctcgtgagtgtgctgtacaagctatctactcatggcaattatccggaaatgacatcgcggatgtggaattggagtttttatccgagcaggatacccaaggtgtagatattgcttatttccgtgagcttttagtgggtgttgcaatcaatgcagcacgtttagataaggcgatggagccttatttatcacgtcaactggaagagctaggccaagttgaaaaagcgattttacgtttagccatgtttgaactcagcttccgtgaatactttcccttataaagtagccatttaa

SEQ ID NO: 32718 - DNA, 173 bp, Proteus mirabilis
atgacgtcaagcatcatggcccttacgagtagggctacacacgtgctacaatggcagatacaaagagaagcgacctcgcgagagcaagcggaactcataaagtctgtcgtagtccggattggagtctgcaactcgactccatgaagtcggaatcgctagtaatcgtagatcag

SEQ ID NO: 32719 - DNA, 432 bp, Proteus mirabilis
atgcgtttaaatactctgtctccggctgaaggtgccaagcatgcgcctaaacgtgtaggtcgtggtatcggttctggcctaggtaaaactggcggccgtggtcacaaaggtcagaaatctcgttctggcggtggcgtacgtcgtggttttgaaggtggtcagatgcctttataccgtcgtttaccaaaatttggttttacttcacgtaaatcattcgtgactgcggaaatccgtctgtctgatttggcttatgttgaaggcgatgtaatcgatctgaatgcactgaaagccgcaaacgttgttggcccacagattgaatttgcaaaattaattctgtctggcgaggttaaccgtgcagtgactattcgtggtctgcgtgttaccaaaggtgcccgtgcagcaatcgaatcagctggcggtaaaattgaggaa

SEQ ID NO: 32720 - DNA, 291 bp, Proteus mirabilis
atggcaaaagaacaaactgatcgcaccacactggatttgttcgcaaatgaacgcagacctgggcgacctaaaacaaacccgctttctcgggatgaacagcttagaattaataaacgaaaccaattacgacgcgatcgcgtcaatggattacgtcgggttgagttgaaattaaatgaggatgctgtcaatgcgcttaatgagcttgcgagcgcaaaaaatgtcagtcgtagtgagcttattgaagaaatattactagaacaactcgcacaaacttatgcgttaaaaaaacat

SEQ ID NO: 32721 - DNA, 213 bp, Proteus mirabilis
atgccggtaatcaaagtacgtgaaaacgagccatttgacgttgctcttcgtcgtttcagacgctcttgcgaaagagcaggcgcattagcagaagttcgtcgtcgtgaattttatgaaaaaccaacgactgagcgtaaacgcgctaaagcatcagcagtaaaacgtcacgctaaaaaattagctcgcgaaaacgcacgtcgtactcgtctgtac

SEQ ID NO: 32722 - DNA, 605 bp, Proteus mirabilis
atggaattggtaatgaaagacgcgcaaggcgcgctgactgtttccgaaactaccttcgggcgtgactttaacgaagcgcttgtgcatcaagtagtcgttgcatacgctgctggtgctcgtcaaggtactcgtgctcagaaaactcgtgctgaagtttctggttcaggcaaaaagccatggcgccagaaaggtacaggtcgtgcacgttcaggtcaatcaagagcccaatttggcgctctggtggtggttagttcgcagctaaaccacaggaccacagtcaaaaagtaaacaaaaagatgtaccgcggtgctctgaagagcattctgtcagaactggtacgtcaagatcgtctgatcgtcgtagagaagttctctgttgaagcgcctaaaactaagcttttagcacagaaactgaaagatatggctctggaagatgtactgattgtcacagcagaagttgatgagaatctgtacttagcagcacgtaacttatacaaagtagacgttcgtgatgcagcaacaatcgatccagttagcttaatcgccttcgacaaagtcgtcatgactgctgacgctgtgaagcaagttgaggagatgctggcatga

SEQ ID NO: 32723 - DNA, 978 bp, Proteus mirabilis
atgaatttagaatctattataaaactcacatccgctgatatggctgcggtaaatgacgcaattctttaccagcttaattcagatgtttctttgataaaccagcttggttactacatcattagcggtggtggtaaaaggatccgcccaatgatcgctgttctgaccggccgagctttggattatcaaggggacaaacatatctctgtcgccgctttaattgaatttattcataccgcaacattattgcacgacgatgttgttgatgaatccgatatgcgtagaggcaaacaaacagctaatgctgtgtttggtaatgctgcaagcgtgctggtaggtgactttatttatacacgatcttttcagatgatgacggatcttgattccatgcgcgtgctaaagctgatgtctagcgcaaccaatgtgatcgctgaaggtgaagtattacaattaatgaattgtaacgatcctgacattactgaagatgactatatgcaagttatctacagtaaaaccgcccgtttatttgaagctgcctctcatgcgtcaccatcctctgcggagcactccagagcaagagaaagctttccaagattatggtcgttatcttggtactgcattccagctgattgacgatttactggattatgatgcagataatacccaattaggtaaaaataccggtgacgatctggatgaaggtaaacctactttgcctttacttcatgccatgcaccatggtaacgaaacagaatcacaactcattcgtcaagccattgaaaaaggtaacggccgtcatttactcgacactggtgttataaacgattgaaacagatgtggtctcactgtgaaaatacccgccaaaaagcggaagaagaagccgataaagccattgaggcgtttcggattattcctgattcatcttacaaagatgcattaattggccttgcgcacgttgctgtggaacgtcaatcggagatt

SEQ ID NO: 32724 - DNA, 535 bp, Proteus mirabilis
tttggctgggtagggatgcgactggtgtctgagcacagcagcgcagcgccccataccacggtttatcatgcttacaatgaccaaagttataccccactagcccgcattgaatgcacggataacccgcttaatccgcaacgggggatttattatacgcacagcagtttaagtggcttaccggaagcgctgaccaacagtgagggtgaaatagtttggcaagggcaatacagtgcttggggacatttacagcgtcaaacccgccccacaagcacgtttaatcgtgaacagaacctgcgttttcaagggcagtatttcgacaaagacaaatttgtcgggaacaaatttgaacagcgcttgcgctggcccgtagggcgagtatcaggatgatacgagtatactggcctacattataatacgtttaggtattataatgtaggctgttttacccagcaagacccgataaggttgggcgggcgggttaaatctgtatgcctatgcgccaaatccattgacatgggtggatccgtgggggctt

SEQ ID NO: 32725 - DNA, 600 bp, Proteus mirabilis
gtgaaaatattaattattgatgagtgttactttactcgtaatggtattcggcatttcttcttaaaaaaaaatgtaaggcatgaaattattgatatgtcttctattgaagaagctaatcattatattaataactctatgcctgatattatttttattgatctcactaaatattgtcgtgaagtagcacattgtcagcacttgcacatattcttttcactgactcaagagtgttcgattatactctataatgatgccaactatccagacaaagatagacctatcgccttgacaaataactgttttatccttgctaaacgagtactaccttgggtattagagagaacatcaacattaacttctcgttgccaagtttttttccccacttataaacattctctttgctcaatatttagcatacaagaacaaaaaatcataaattactggatgggagagttgcctaactatcaaattgccaaaaaattaaaaattagcaatagcaccgtttattcgcataaaagacatattactgaaaaaataaatgtaaaaaatagaattgaactcttctttatatataatatattaaaatatatctatgagaaa

SEQ ID NO: 32726 - DNA, 1338 bp, Proteus mirabilis
gtgccgacaattgctcacgccaatacaaatgaattatcgatagaacaacgtttagctcgactagaagagagaacgttagccgctgaaaaaagagctgagttagcagagcaacgtgccgctaagttagaaaatgcgttaaaacaaaatcaggcgcttaataacaatctatcacaaactagcgaaactataactgcgccaccatcatcgctgatagaaacaaataccggttatggaaaactcaagttatatggtgatgttgaatttaatacagatattgcaagtaaaaaaggtcagctaacctccattaacatgcgctcaggtaaagaaaaagactatggcgattatgataaatgggggatcaatgggcgtatattaattggcttagacggagagcgtctgttagataataaaaattatgcaggcttcactgttcaacctctggcaaatattgatggtaaggtatctctcgacgatgccgctttttattttggtaaaaaagagcgttggcaatttaagttaggtcgttatgaagcttatgacatgttcccgcttaatcaagatacttttgttgaatattcaggcaacactgcaaatgatacttatagtgatggttttggttatatctacatgataaaagaaggtcgagggagaagcaatagcggtggtagcatgatgtttaatagccaatataataattggtattttgaaactaatttattaattgaagatggaacgtctatttttgctaacaaggaatatcacggaaataaactatataataataaaaatgttatttattttcgcccagttattgcatggaataacaataattttaaagttgctgtcgccttagaaaaaaatattatcaataatgcttatggttatgatgataaaaaaacgggtgaatttagagatcaatccaaacgcaacggttatggattaactttaggctggagcaatctacaacaaaatcctgaaaatggtgtcacaataaattggaataccgcttatttagacgctaacgatgagaacgactttacaacaggtactaatattttatggcgtaaattacaattaggctatatctatgcccataataatattaagtcatatactattaataatgatgatgataacaataatgatattatatttggcccaggaaaatataatatccacactctctattcctcatatgaattacctaatattttagatatggataattttaaaatctatttaggtgcatattattctgttcttaatggtaaagatattgaaatagaaaatagcgataaagatcgttatggtgtaagagcacgttttaaatacttcttc

SEQ ID NO: 32727 - DNA, 534 bp, Proteus mirabilis
atgttaaaaaaaacaacactagctttatttgttgcaacgttctttctttctactaatgcattggcgttatctgataatactattacttttcagggggaagtttctgatgaaacttgttctgtctcaattaatggtaatcaggcaaaacctgtggttattttaccgactgttagtgccaaggagctaaaagatagtggagataccgcaggacaggtaacatttgatattggtctttctggttgtacaggtaatacagataaacccactaaaatatcgacagtttttgtcggtaatcaagttaccagcaatggcaaccttggcaatacgggaaacgctaccaatgtggaaattcaacttctggatactgctcagaaagttatcaatttaactggtggttttaaaggtgagggagatctgcaattaaagccaggagaaacgcaagccagcgcaacttacactgcacaatactatgctacaggtgccgcatcagcgggtactgttgaagcaactctacaatatgcggtttcttatctg

SEQ ID NO: 32728 - DNA, 195 bp, Proteus mirabilis
atgccaaagattaaaacagtacgcggtgcagctaaacgctttaaaaagactgcaggtggtggttttaagcgtaagcacgctaacctccgtcacattctgactaaaaaatcaactaagcgtaaacgtcatttacgtccaaaaggtatgatctctaaaggagatttaggcctggtcgtagcttgcctaccatacgca

SEQ ID NO: 32729 - DNA, 333 bp, Proteus mirabilis
atggcaactattaatcagctggtgcgcaaatctcgtagctcgaaagttgttaaaagcaacgttccagctctggaagcttgcccgcaaaaacgtggcgtatgtactcgtgtatatactaccactcctaaaaaaccaaactcagcactgcgtaaagtatgccgtgttcgtttgactaacggtttcgaagtttcttcctacatcggtggtgaaggccacaacttgcaggagcactccgtaatccttatccgtggttgtcgtggttaaaggattaacagggtgtgcgttaacaacactgttcgcgggagcgcttggacttgttccggcgtttgaagg

SEQ ID NO: 32730 - DNA, 3759 bp, Proteus mirabilis
ttgaatagtgtaggctgtactttggtgagtgaaatcgccagtaccgcggtgggcagtatggtagtcgcctcggtgacccaagcctttaatagtgtgcgtcaccccgtgcatgcggctacgggggcgaaagtcctaaatggagaggatgacaccgattttattattgatggtgtgtacccgttagtctggtcgcgtatttaccaaagtcgtaatacgggtgaaaatcgtttaggatgcggttgggcgatgccgtttgatgtctttttgacaattgacgacacaggtaaagggcttgagaatgaaaacatttattatcatgacatgtcggggaggcgtttagcgttaggaaaaatcgcccttggtcagaaagtgttctatcaagatgaaggctttaccgtctatcgcacgacaaacaatcttttccttgttgaatcggcggaaggtgattatcaatttttcgaagccaatccacataaaatcaatacactgcgcttaatgaaaagtgctgatcgtcataataacgctttacactaccgctatgctaatgacggtgaattggtacaaattcatgatgatgcgtatctgaccgatatccggttacattatgatgaaatcacccaacgcttacagtcggtgacccgccaccaaggacaagaagaaaaaacgctggtcacttatacttatgatgcacaacagcgtttagtgcaagtcactaatgcggataagcgagtgactcgtcgttttggctgggatgatgaatcgggtttaatggccatgcaccaatatgccacaggggtcagtagtcattatcgttggcaacgttttgatgcctttaccattgaagacaatgaacctgagtggcgagtggttgagcactggcttaaagacggtaaacgctgtttagagcataccgaactgacctatgatttagctcaacgaaccctcaccaccgtggaaacggggggcgaaaccaccttccgtcgctggaatgaacaacagcaaattatcgaatacactaatgcattgaatgaaacgtggtggtttgaatgggataccagccgcttattaacgaaagcaatagccccagatggcagtgaatgggggtatacctatgatgagcgcggtaatttaacccaatcgaccgatccggaacaacaatcgacttgctatgattgggacaaagattttgcgtttcccacggcacaaactttgccaaatggggcggcttggcattgggagtacaatgagcacggcgatattcgtcgtgtgattgacccgcttggccatatcacgcgcttggcgtgggatgaccaaggcctgtgtctggggcaagtggatgctaagggcaatgaaacccagtatcgctataatgcccgcggtcagttaatcgagcaacgggactgttcgggttatcccaccaccttgacctacgatgattggggacaacttcgctcgttgaccaatgcacagaatgaaaccacgacttacacctttagtgaagcggggttgttgttaacagagtgcttaccggatgggacagaaaaccgttatgactatgatgccaccgggcaattagtgggaataacggatgccggagagcgccatattctgttgcgccgtaaccgtcgtggacaagtaatagcccgacgcgatccggcagggcattggttgcattttcactatgatactttcgggcgtatgcaggcgctggagaatgaacagggcgagcagtaccgctttggctatgatgcgttacaccgtttaaccgatgaacacgatttaatcggacaacaaaagcactatcagtacgatgtgatggggaatgtcacccagataaaaaccactccggggccttgcgttgatacgccgatacccttatccccgcaggtgaccaccttcggttacgataaagtgggacggttgctgtttcgagaaaacgccgattatcgcacggaatacctttatcaacctttgagtgtgacattacgccgagtccccatggcgatatggcatgaagccgaacgcaccggcaccaccacccgcgtagagtatcaagacgccctgacctttacctacgataaagtggggcagttggttcgagaagccagtgctcgcggtgattatcagcatcactatgatgtgctgggtaatatcactcgcaccgagttgccccatcaacgggcatttgaatacctgtattacggctctgggcatttacaacaaacgcaatggcgagataatgcgcaattgacggtattggcggaatatcaacgagaccgtttacaccgagaaacgttacgcaccagtggcgccttagacaatgaaacgggctatgactgtcggggacgtattacgcaccaagtggcgcgccaaatgaatgcctcacagtttgtgaccccggtgatagaccgtcgttatcgttgggataaacgcaatcaacttatcgagcgcagtgtcagttatggtcaaacgggtgaggtttttaccgtcggacattggtactaccacagttatcagtacgacccactggggcagttgacggcgcatttagggtcggtacaaaccgaacactttctgtatgatgcagcagccaatttactgactcgtccgcacaccgaagcaccgcataaccaagtacaaggcagtgataaatttgattatcgttacgacggttttggtcgcatggtatcgcgctatgaaaaaggcagtagctcgggacaacgttatcactatgacagtgaccaccgcattatcgcggtggatatcgaccaagggcccttagggtatcagcgagcggaataccgctacgatatcttaggacgtcggattgaaaaacggttatggaaagccagtgcgattgccaacacagtcacctatcatcaacatgagccggatgaagtgtacagctttggctgggtagggatgcgactggtatctgagcacagcagcgcagcgccccataccacggtttatcatgcttacaatgaccaaagttatacgcctctagcccgcattgaatgtacggataacccgcttaatccgcaacgggcgatttattatacgcacagcagtttaagtggcttaccggaagcgttgaccaacagtgagggtgaaatcgtttggcaagggcaatacagtgcttgggggcatttacagcgtcaaacccgccccacaagcacgtttaaccgtgaacagaacctgcgttttcaagggcagtatttcgacaaagagacgggcctgcattataatacgttcaggtactatgccccggatttaggccgttttacccaacaagacccaatagggttggtaggggggataaatttatatgtttatgcgccaaatccattgacatgggtggatccgtggggttggagttgttttaattcatcaaaacggtttgataaaagaaataatataacaagtcgctttattaatctattaacaggcaaaacacctagtgatgttgagcattatttaaagaataaaggatggactgtgacatatccacaaagtgctacaccagcaaaaactcagcatgtcgtttttgtaaaaacaacaaagtcgggagaagtatatcatttagattataatccagcaggtaaaactcatgggagtgattattggaaagtgataaaacctaatgatcctatagaaaaagtatatggtcgtataggccatggaaatttttctcattatgataaaataaaaaattcacctgtttatattgatggtgttttgatgaatccttggagtaag

SEQ ID NO: 32731 - DNA, 723 bp, Proteus mirabilis
atggcgctgttaaaagctgaaaatttagcaaaagcatacaaagggcgcaccgttgtcggtgatgtgagcctcaatgttaactccggtgagattgttggcttacttggccctaacggtgcggggaaaaccaccaccttttatatggtggtaggtattgtcgcccgtgatgcgggtagcattactatcgacgatgaagatattaccttactcccgttacatgagcgtgcgcgtaagggtattggttatttgccacaagaagcctctatttttagacgcttaagcgtttatgacaatatcatgggaattttagaaatacgccatgatttaacggccgaacaacgaaaagatcgtgcagaagagctacttgaagagtttaatgtcagtcacttacgtaatagtttagggcaatctttatcagggggtgaacgccgtcgtgtagagatagcacgggcgctagcggcaaatcctaaatttattttattggatgagccttttgccggtgttgaccctatttccgttttagatattaagaaaattatccaacatctacgcgattatggcttgggcgtattaattaccgaccataatgtacgcgaaaccttagatgtgtgtgaacgtgcttatatcgtcagtcaaggacaccttattgcccatggttcaccagaagaaattttggcaaatgagcaagttaaacgtgtttacttaggtgaaggcttccgcctg

SEQ ID NO: 32732 - DNA, 407 bp, Proteus mirabilis
gaacatatcaacaccaaagaagcggcacagtatgtcttagagggaaatgaatttcttggtgcaactattacagcacaacacttaatgtttaaccgtaatcatatgcttgtcggtggtgtgaaaccgcatttgtactgtttacctatccttaagcgtaatgtacaccaagaggcattaaggcaagccgttgcatcaggccattcgcgtttcttcttaggtactgacatccggcggcctttcccaatttacaacatcgcaaagaatcatcttgtggatgcgctggcgtgtttaacgcccccaccgctttagcagcttatgctagcgtatttaaagagctcaatgccctttctcactttgaagccttctgttcactcaatggtccacgtttttatggtttaccggttaat

SEQ ID NO: 32733 - DNA, 204 bp, Proteus mirabilis
atgaaaaaacctgtggtggttcctaccgaacgtatggtgaaacatccattatatggtaaatttaacccgcgtacgactaaactgcatgtacatgacgagaacaacgaatgtggcatgggtgacgtagtagaaattcgtcaaacacgtcctatctctaagactaagtcttgggcgttagttcgcgttgtagaaaaagctgttctg

SEQ ID NO: 32734 - DNA, 117 bp, Proteus mirabilis
atggcagcgaaaatccgtcgtgaagacgaagttatcgtgctaactggtaaagatcaaggtaagcgcggtaaagtaaaacaggttctttcttctggtaaagttatcgttgaaggtatc

SEQ ID NO: 32735 - DNA, 345 bp, Proteus mirabilis
atgtcaaagccagaatacccttttgaaaagcgccttgaagtcgtgaatcactacttcacaactgatgatggttacaggatcatctcggcacgttttggtgtcccccgagcccaggtcaggacatgggttgccctctatgaaaaacatggagaaaaaggtttaattcccaaacctaaaggcgttagtgctgatccagagttgcgtattaaggtcgtgaaagctgtgatcgagcagcacatgtcccctaatcaggctgctgctcactttatgcttgctggtagtggttctgtagccacgtggctgaaagtctatgaagaacgcggagaagctggtttacgcgcgctc

SEQ ID NO: 32736 - DNA, 1731 bp, Proteus mirabilis
atggttactattgaaccgacattacgtcggcgtgtggcgaaagcaacagcattgccagaaagcctcgatcccttattacggcaaatttatgccaatcgaggtattacctctgaaactcagctcgagcgctcgttaaagggcttattgcattatcaagatttaaacggtattgatgttgctatctctttattagttgaggcattaaagctgcaatcgcggatcgttattgtaggggattttgatgccgacggtgcaaccagtacagctcttgctattaaagcgttacggcaaatgggatttcagcaagtaagttaccatattcctaatcgttttgatgatggttatggacttagccctcaagtggttcatgatgtggcgaagaaaggcgtagatctgattattacggttgataatgggatctcctcttttgaaggtgttgatgttgctcatgaatatggtatccgtgtattggttactgatcaccatttgccgggtcactcccttcctcaagctgatgcaattatcaatcctaatttagcggattgtgcctttttgtcgaaatcattagcgggtgtcggtgtcactttctatttaatgaccgcattaagagctgaattagaaaaacaaggttggtttacagcacagggattagctcgccccaatatggccgattaccttgatttagtcgcattaggcacggttgctgatgtggttcctcttgatgaaaataatcgtatttttgtttatgagggattacgccgtattcgtgcaggacgttgctgtgcagggatcaaagccttgacggaagtttcacgtaaaacgttatcacaattagtcagcagtgacttaggttttgcattagggccaagacttaatgcggcagggcgtcttgatgatatgtctgttggcgttgctttactgttaactaatgatattggtgtcgcccgtgaaattgccaatgaactggatggattaaatcagactcgtcgtgaaatagaagcgggaatgcaagaagaagcatcgacaatctttcgccaatttattactacccaagatgacttaccgaatggattagctatttatcatcctcagtggcatcaaggtgtggttggcattctcgcctcacgaattaaagagaaactgcatcgcccagtgattgcttttgccccaagtggtgatggtttactaaaaggctctggacgttctattcatggtgtacatttgcgagatgcattagaacgtttgaatacgttaaatccgggattaatggtgaagtttggtggccatgcgatggcggccggactatcactggaagaagataaatttccactttttcagcgtcacttttcggcacttatggcggaattagtttctgctgaacaattgcaaggcgtgattttaacagacggcgagttaagcgacagtcagttatctttacctattgcggaaatgttaagagaagcagggccttggggacaagcctttcctgagccacttttcgatggcaaattcaccttactacagcaacgtattgtgggaagcaaacatttaaaaatgatgcttcaaccgataaatagccatgtaatgattgatgctattgcatttaatgttgatgttaatatatggccggataacagtattaaaacggttgagcttgcttaccgattagacgtcaatgaatttagaggacagcgcaatgcacaactgctggtggagcatatttggccttgt

SEQ ID NO: 32737 - DNA, 13860 bp, Proteus mirabilis
atgatgtcaaaaattttaaaagatttagagtttacttttacaggaaaacgttatggtacagatggaaatgacgatattgatgccataggttttggagggatcatttatgcaggaaagggacacgatacaatcacagtcggaacattagcagttaccgcttacaccggagacgggcacgattttgtcagagggggaagtgcttatcttaagattattgatgagaacggtgatttagatgtcagaggattaaatgcatggggagaaattgaaaagtccggtcatggcgatctgaaatatgttggtgcttctgccgcgattaagattaatcatactggatatgaatatggaaatatcaattattcaggagctgctattgcaaatatcatcacccgtaaaggcgcaattagtaatatcaactaccaaggtgctggcggttacaatcaaatttggcatgaaaccaatactggcaatatgacgtttaaaggggggggaggctataataaattggttcgtacttggtttaatagctatcaaaattcaaaaggaaatattaattttgaaggattaggcggaggcaacggaatcttctctcgcgttgaaacaggtgatattaaatttaccggaggtggcttagaaaacgtcttaatacgcgaaggtaaatcaggcgatatctttatgtatggagcaggagccaataataggcttacacgtatcagccgaaatactgatacctataaagaaacaagtggcaatatctatttttcgggggggggaggttataatcatatctattccaatatagcacaaggcaatatcacattttatggagcaggggcttacaatgagatcattcgtacaactcaagttcatcctcataatgatttattagttgaatatacgaaagctgaaaatatttttctaacaagtgcttatatgttaaatctagacttagataaaagtattaattttctaacaagtgataataagcaaaatttcgaatccggtaaacctgttgaagtaaaagcgattaaatcattgcgagaaccaaatacttatttgtttaaaacaccgggcccaagggataccaatttattcatatcagactatggtcgtcgagattatacctttaataaagtcaaaatttacaatgatcctgaaacgggaaaacttcaatacgattccgaactttggcgtataacgcctgatagtggggacattaggaacatacgttttgataaaaaaaattttgaggatacctataatcttagtgtggtcaataattgttggaatacattagaaaaacaagaaattatcgaatcaccacgtttcacaaaaataaatgctgatagccactatcaattatctaatttaaaagtatttcaacacattaatacagaacaaatccaaagaaagtctctagaaacaatcaagttgggcgtagcacaagaactttttaaagacgataattctgctgaatgctctggtgatatcaatttcacaggtggtggcgctggtaatgtcattaaatctgatgttacacaaggtgatatcaattttacaggtggcggcatagcaaatgtaataaaacataactctaattatggtaataccaactttactggtggaggcgcagccaacatcattgtaaaaaaaggtcaaagaggagacctaacatttgatggaggaggattagcaaatgtcttactacatcaaagtaaagaaggaagaatgaacattaatgctactggtgccacgaatgtattaatccgaattggtgacggtgaatataaagcacatcttacggcattagggaatgtttctattcacaaaggacaaggtgatagtcatatcacaatgttaggaggattaaatacccatacccagattgatagtcatcagcgtgataaggctttatggcgagcattaggcggacttaatgtcatgacacaagtcggtgctggtactattacatctttactcggcggcggtggaaatgtcctgactaaaatgggtgaaggcgacctaagtagcatcatgttaggtggtgctaatatcattacacatatcagcaataacaaaataaaatcaaatacttacactatcaccctaggtggattaaatattttaacaaaaaaaggtcaaggtgatattttagccataatggggggaggtggcaatgtcctaacacatatcggaaacggtaacatacatggcgttatgcttggaggtgccaatatcttaactaaagtaggtaatggtgatctttcaggcattatgctaggtattggtaatgtactaacacatgttggcgatgggcaaaccctaggtataatgggcgctgtggggaatattttcactaaagtcggtaatggaaccagtatgggtgccatggtcggtggtggcaatatattcacccatataggtaatggtgaagcttgggcactaatgggaggtttaggcaacgtctataccaaaataggcaatgggaatactttggcactaatgatcgccaaagggaatgtgttcactcatgtgggtgatggaatgtcggttgctctaatgttagcgataggcaatatagccacaaaagtgggcgatggcatgacattagctgcaatgattggcagtgctaatatttttactcacattgggcatgaagaaacctttgctgcaatggtgggtaaaggtaatgtccttaccaaagttggcaatggattaacattgggattaatgctaggtgtggctaatatttatacccatgtcggtgatggcattagtattgggctgttttctggtaaagcaaatatcatgaccaaagtgggtaatggaaccacattatcagcgatgtttggcaaagccaatattatgacccatatcggtgatgggataactggcatacttgcattaggccaagccaatatcataacaaaagtgggtgatggcattgcgggaatcattgctggtgcgaaaggaaatatcgttactcatgtaggtgatggaataaccgctgcgatcctcggcggaaaagcgaatattttaacaaaagtgggtgatgggctcaccgtaggtctgctgatttcaaaggtgggaaatattatgacccatattggtaatagcaccacgattggttttgccaaaggcaacgccaatatcatcacaaaagtaggctatggtttaggcattaatgcggcatggggtaaagctaatattttcactcatatcggcgatggtgaacgatataacttcgccaaaggaaatgccaacatcattaccaaagtaggtaatggacaagaaacctctgttgttaaaggtaatatcaatattattacacacgtaggtagtggaaataattatactggtgcatggggcaatgggaatgttgtaacacaaattggtgatggtcgtcaggtcgccttagcaaaaggtcatgcaaatattgtcactatgctcggaaaaggtgacaactatggcatagtttggggtaaagccaatatttcgacaaaagtaggtaatggcacgcaagtcaccatagcaaaaggccaagcaaatattacaacaaccgtaggtgatggcctaggtgttaccgttacatacggcaacgcaaatatcaatactaaagtggggaatggtgtatctgtaaacgttgcttgggggaaatataacgtaagtaccaaagtgggtgacggtttaaatgtttcggtcatgaaaggtaccgctaatgcaaatatccatgttggtaacggtttaggtattaacgcctcttacgcaaaaaacaatgtcatcgttaaaattggcaatggtgatatctacagcttatcggttgcttctagtaatactcaaagtaataaactcgctactttcttcggcaatataaaacagagtgtacttggtgtggtcgggagtcaggctattaactatttagtacaaggtgatgatgtaaccacttccggctcccgcaaaggcaaaggcgctattcatttaattgaaaaatcttcaatcgacggtttcaaaatgaacaaaatcgacgaagtgaagagtaacattgatataaatttaaaaggtcatatcacagaggtagaaacccctagtttaagtgatgttaatacagatgaatccaacttaaccaataacagtccgaatttgatcataaatggtgactttaaacatggatttaaacctgtaacagaaggttggaatattgcatatactcaggataaaattacagcaattagccaatatggacatagagcctctattgatacaccaactaatactaataataaagattattgggatggtggacttatagcagaatacaaggaagaatatgaaccaaatatcgctatatatcaagatattagtggtttaatgcaaaatgaggtgattgaattaagttttgagtatgaacgacaagataatacgccaacagagaataaattaagtgttatctggaatggtgaggttgtcttcacttcatcaagtgatgataagtcaatagcatggcaacaacaacaaattaaattaaccgcaaatgcagaaaataatcgtcttatttttaccattccaggctctgatggcttgcaaggaaataattacagactaagaaatattgtcgctaaatcagctgtagcaaatataaacaagcatatctcagattctgatgcgacaaaaaatgccctcgctgacaaaaagaaggcagatgccaatcgtcaaaaactaactgatgaaaaacaacgcctattagaccacatctctaccacacagactgaacttgaatcgaccgatcaccttgcactggagaaaaacggccatagagaacgcgatgccattcttgaagaagctaattcagtaacacacaatttgaccacagttggtcaaacactggaagtactcagcgaatattcacaagatgcccccccctcagatcaaccatggagtgagccattcgcggaaggaattttaaaggatgtacagaagagcttaattaatactaaaaaaattgtttcagtgcctgttaataatattaaaactcagtatgttgcaaaccttacaaaggtgaaaaaatcgataaaaaaatcggaatatggcgttattcaaagtgaagaacattgtcaagaagtgcaactcgatacttccaaagcaaaaaatgatgcagataaaagatactcagacgcgatagataaaaaaaatagtgctcaaatggcagagaaaaaagcatcaaccatggtggaagatgcgagatcacgaggagatacggagcaaaaaacagcgactagcatatcggataaagcacaaaaagaagctaaatctgttcaactgaaagaaagtgataaacctaatcgtcacagggcgcatggtagcggtttatccggagaagcggcctatgtagagggggctgatgataatccatccagttatatcaaaccaatatcaactaaaaaaaatgatggtcgtttcaataataaactgacaacatttaatcaggaattacttgatgatgctcagcaagccattaatcgtttaagcattaatgctgggatccgacaaaaatcggcaaacgttcttccctcttttacatcagaccttaatggagatgacgtagcaacctatcaacaaccttctcttcgttcaggcaatcttcaatatcacaaaataggagctatcgcggtcaatctttctggattaggcgaaagccccatttttgaaacgctaaaacaaaaattcaatgtaaaaattaagaatagaaatacttactttacttttattttggaaaaaaatagtggtcgtatccaaaaaaatatttatttggataacatcaatgatcccactcagcaaaaaataatagaacactttattttagctaattattcaaattttgaagcaatgcctaatgaacttcatttagaaaatgacaaaattaaatcaagtcataacaacaaagataggatacttgcagaatacgtagaacataaatggcaaatgctaactgattcaaaagtcatgtcagttgatgaactacataaagttgcaagtgttaaaggcaaaatacaaggcgaaagttataaatcaatcattacaactctctcggaataccatgaaaaagaatcgaatacaaactgcttaccaatagagaaattgagagtgctagctcagttgcgaaaccaaattgatggttacctattaggacaccccgactctgaacgcaatgatggattgaaacagttacaaactcaagtcaatacacgttataaacacgcatcggctttaatacaagatagtcacaccatcaacgctgatagcagctttagtcgcttatacgattcactttcaaatgccaatttaaaaagaagtaaacacatttatattgatattaacggacactttgtcactgaaggaaaaaacaatctgcaagggaaaaatagactaaccagcggaaaagaagtgattgagcgagtaaaaaatgccgtagaaaaagaatatggcgcaccgattgccaataaagtcttcagtcaatttgcaaataatgaattcgctgaaaacggcgagggtattgatgtttcagggttaaaaaaaattcacagagctattgagcgggaactatctcctcatagtgcaaccttatatatctggaaaccaagcaatcatagtaatttgggacacgccacactacaaataggtcaaggtcgcttactgttaaacacagaagacgcacaaaataatcataaagaaaactacatcagttggtggcctaacaaggcgaagtcatattttgatgtgatgggagtcccctcacaaccaaaagagtcgttagcatcggatgttgcagcagaagaaaatgatggctttggtttaaattacaaatataaagaactaaacagatatgaccgactcatgaatattgcgaaaggtgaaacggtcaccactgcagatgatttatctcttgcagacgcaaaaaatatattgacgatcccaaattatatagaaaattcaaaaataccgcgaacaattggacagccttttattgatgaatgggtaataactcagaaaaaactcaacaacatcgccacaaattttctagaagctgtacaaggtaaatttagtggaaataccataactataaatggtgccatgatactattgacagagcccacgttactatcaaaaagaaaaatcccactttctgttgcacagccttttattgaacaatgggataatataaaaacacaacaagaagatatatctattcaattattaaaagcgatgaagacttggatacaagaaggtaaggatccaacgttaacgaaaaaacgaattgctttagtagaaaacgaatttgctgagcaaaaacaaaaaagtattgacagatttaaaaccagcttacctgatgaaggacgagtattccgtattaatttagaggggttagacgttgctgctatgcaagctgaatggcaacgaattaaaaattcacctaatggtcgttatcatttattaacccaaaattgttcgagtatcgtagcgaaaattttaaaagcgggtggcgcagatgaactgattggctataactggcaacctaaatataatatttggacaccaaatcaaatgttcgcatttgctcaagagttacaagaagcgcaaatggcacgacaacaaagtagaatgattccacctaacttacacgcgttgtcaggttctgaaaatatccgtcaagagctagaaaacacctcccctcttatttctgctgaacaaaagctcaatattgtttttagtgaacaggaaacgggttttctactgacacaagcatcagatgaaacgaatgaaaaatttatttatataaaaaatggagataatcaagaacaacaaaaaataatgagtaattttatactcactcattatcgtgattttgactctatccctgagcaactttatttcttagataatacaatcgtgtcactcgataaaaaccattcacgaatattatcagaaaaagtcggtgaaaattggcaacctgttgcctattcgaatctaatgactgctgatgaattaacctccgctgcagaggtgacaggaaaagcacgcggtgaaaattataaagcgatcattcaatcgcttagagattatgaattacaaagtacaaatacaaacaacacaccaatagatatatttcagcaactatccacattacgtatacaaattaatagttatctgcttaaacaccctgattcaaaacgtaacgaagcattgcaacaattacgcgaccaagttgatatacgttataaacatgcttctatcttattaagtaatagccagcaagttgattcaaataatacttttagttatttatatgagattttttcaaatgctaacttaaaaatcaacaaacatatttatcttgatgaaaacggcaactttgttacaaaagggaaaaataatttacaaaaccaagacaaacttatcagtggtaaaaatgcaatcacaagcattaaaagattggtcgaaaaagagtatggcagtgaaattaccaatcaggtatttaatcaatttacagaaaatgaatttgcccaaaatggccatggtattgacctgtcaggattgaaaaaaattcaccaagcaattgaacaacaagtttcaccaatcagttctacactatatatctggaagcccagcaaacatagtcgcttgggacatgctgcgctacaaataggttctgggcgcttacaattagatagcgatagtgtgcaggataaccatgataataattatgtcagttggtggcctgccgggagcaaatcgctcgcaaacccactgaatattacaacagaaaaaaatcctgatttaaaattacgctggtatgatttaagccaaccagtgagtcgctcaacaaatttcatgactttacaaattgatattcaagaagaggaaaagacgaatttcaaattaaataaagatgaaggggaaaatgacagacagttaaaagaatttagagataaaacgaatcttacccgaggtctcgaaaatattacacctgaaatcgcaggcttactgttgaatgctcctcattggataccagaaacacttatcccacctgaaatttcacacccctttattaaacagtggaaaagcccaaatagtaatctacttgaagtatcaacaaacttttcaatcgcagtgaaaaactggctaaaagtcgcctttccaacagcgatgattaaccaaacctttgcattggaaatcaagaaaattaaagaaattgaagaccgaaaaacagaaaatttcaaaacaagtgtcgctgatgatacaaatgatggcgtggtgtttcgcattaatctagagggacttgatgccgccgccatgcaaaaagagtggaagcgcattaatagccagtctgatcctcgttaccaattattaaccaagaactgttctagtattgttgctagaatattaaaagcaggcggagcagatcaactgattggtcatcattggaaacctcgatttggcatatggacaccaaatgagttgtataaattttctcaaaagatacaggaagcacgcttagcccaaattgcggtacaacaaggcaaacctatacattctaatttacaagcattatcagaccacaataaagtggctattgataatgacggtacatcaccaaacgagagaaaaaatcttagcccattaacacgtttttttaatgatcattttttcggcagctatgaacgtcgtagagacatgacaacggtgatgagaataaaaaatgaagaaaaaataacattaaaaggggatgcaggccgtcttacaggatcatattacagaggaaacgacaatattccagaagctaccgataagaaagtagtactatttttacatggttcaaattcccctaccgaaaaacaatcctctagtttttatcattattataaccaacaaggcatcgatatgttagcgattaacatgagagggtttggcgaaagcgatggctcgccaacagagcaaggaatgtatgctgatgcacaaaccatgttccgttatctcgttaatgataaaggtatcgatcctaaaaatattattattcatggttattccatgggggcaccaattgcggctaaattagccagcgatatttcagctaacggtcagcatatagctgggctattcttagatagaccaatgccaagtatgtcaaaagcaattgaatcttatgatgaatatagccttaagaaattgactggacaactcgcaaaaaaaatcaatggccaattctccgtagaaaaaaatctacagggtttctcaaaagatatccccattatattgctcactgactgtggcgagctgggcattggtggtgaaaaaatgcgcactaaattacttgataaaggatatctagttaaaggagaaagaaccgatgtttctcatttagagagccttaagttgatgaatcaatacggtaaacaaataatatcaagtttactatccccagagtatgtaaataacaccaatcacagaaatgcgttagattcgatacaaaacccgataaaaaagaataaggtgactgattgggggatggtatatgtaaaacccaatgataatgggggtgatagtcgttttgatagccagattattatccaaacagaggatgatccgatagtcgctcaagcagcttcggcacttgccgctaaacatgccaaaaatagtatcgtggtacaattggatgccgatggtcattaccgcgtagcttatggcgacccagcacaactttcaggtaaaatacgttggcagcttgttggccatggtcgtgaaacaaccgaaaataatcatttacgccttagtaactacaatgctgatgagctttccaatcaattggttaaattcaataccgtattcagcaaagaaaatcatatcaatacaactcctgaacatatcagtattgtcggttgttcattaataagtaatgacaagcaggcaggatttgcccaccagtttatcaatgcattagatcaacaaggcattcgtagtagcgtttctgctcgagtaacagaggtcgccgttgatagcaatggtcacaaatacaccaaagataacaacggagagtgggtagccaaacaaacccaaaacaaggtagtgttagattggaataaagaaggcaaaatcacgactgaatttgagcaaatacataatggtgttgctgaaggtgatattgatttgactaaagtaggtgcttcagctgacaacaaagtacgtggcgcaattgcagataataatgaagtctttaccgcccccaaaaaaggtaaaaaatcaaccaaacaaagctcatcaggaagtgataattcatcactaagctattctggcaatatccaagtcagtgtgggtgacggcgagtttacaacggttaattggggaacctctaatcttgggatcaaagtaggtactggcggatttaaatcactggttttcggtgataacaatgtgatggtacacgttggtaatggtgatagtaaacatagtgttgatattgctggctatcaagctttcgaaggtatgcaattatttgttggtacacgtaacgtcagctttaatctggggcgtagtaatgatcttattgtgatgttagaaaaatcaattccaacccctccactgatcaacccttttgatggtgctgctagaatcaccaaagttctagagtcaatcgcatgctcaggtgaaaataatgataatgattggttgtcggtacaaaacgatcagtggacactcgctggcgctaaaaaatttgccatagatatgtcaggaatagaccaaacgagcaatgttgactataaaacactgactgatctgaattcacagaataagcgtagtagccgtggattaaagagtgatctagaagccacactaaacaaaaaatataaccagtggttaggtggtagtggcaataacaacgagatgggaaaaatcagccgagctgagcaacttcgtcaactagatagtaaaatcgcttttaatttcgccattggtggtcaaggtgctgatattcaagttactgccgggaattggaacttgatgtttggtgataatatccagtctattatagacactaatcttggctcattatttggcttaatgacgcagcaatttacagcaactggtatggtggaaaccacctttacttatactccccaaaacttaccaactaagttaaaaaataaattgctaggtcggttagccagcgtgagttcagacacgactctgggggatatttttggagtagactctaccacagatggaaaaataatctctcgtaatggtgagcccattgatgttgtcgctattttgaaagatatgctcgctgtagtgactgagtttggaggtgaaaaactgtccgcatttactgatccgactaaattattagataacctccaatcatctattaatctgggcaaggatggtattatttcatttgctgaaagccatggtttaaaagaaaaagcgacagaagatcaacaaaatgaatctgaagtttcaattaatgcccaaacaccaataacaacgagtcaaactgaaaatagcaagatcacagaggaaaatgatcgccctttcggcttcaattcgctaaatatccccaatctatttgccacaatctttaataaagataaacaaacagatatgcgtgatctcgcagaaaacctcaaagaaaatttagcagctgatgtactgaacatggagaagaaaacgctcgatttcttgcgtaatagtggtcatttaaaaggcgatggtgacatacatgtctctcttggcaactataatttcaactgggggggagatggtaatgatctcggcgcttacctaggagataataataatttttggggtgggcgtggttcagatactttctatgcaacggggatctcaaatatttttactgggggttacggaaatgatctcggcgtcttgatggggcgctcaaacatgatgtttggaggcgatggagatgacactgctattatcgccggtcggatcaataatgtctatttaggtgacggactcgataaagcatttgtctttggggaaggcggtgaaattcacactaatgcaggtaatgactatgttgtcactaccggtaactacaatcgcattttcagtggtagtgaacaagattttgttgtcacaattggtaaccacaaccaaatatccttagaagaaggcaatgattttgccaaaatttttggtaactacaataggttgaatggagggggcggtgatgacgaaattcaactaatgggttatcacgccgtagttgatggaggcgatggaaatgatcaactaattgcagcttcattctcgaaatttagccttcttaatggtaatacaggtaatgatattatcatattaggtggatatcagaaccacttcaaaggtggaaacggtatcgatagcttcctgattaataataatgtgattgattgttatatagacgatattagccaagaagataatattgtacttggaggtattgattggaataaattatggtttgaacgcagtggctatgatttaaagatctcacatattcgcttcccacaaaatacaggggaacaagccacatttgagcgcattggctcaactacttttactgattatttcaatggtaatcaggcaaaaatcgttatcgcaatgactgataaagatcactctgatcagcgcgaatatacggctttatcaagcaatgcactcgctattcaaattcaggccatgagtacatttcctatgaaggcaggcgcatccggatttttcgataatataagtgatgaggctaaacaaatgatagccgtagcttggacagatacaatttcaggaaaaggcatattagtg

SEQ ID NO: 32738 - DNA, 714 bp, Proteus mirabilis
gtgtttgacccgtttaatgattttgagcaagtcggttatttacgtaactattatggtgaaaaagatccgataattattcgtcaacttgaacacacaatgtttcgtgctggtttagatgaagcattagcttacttagtaggaaaagaaatcttacattatgaagattttttgggtgttcatcggatattattcgaagcattctacccatgggcaggtcaagatcgtgccattaccgcgcctaattgtgcggtatctaaagctggtacgatgttttgccatcctcatcatgctcgattagctattgaggaggggctacgcctcggacagaatgtaaagtatatgcgtcagcatcctggtgaggtaatggggttttttgcgtatgggcatccatttcttgatgggaatggacgtactatgttaattattcataatgagctttgccatcgagctggcttttcgattgattggcatagaacgaataaaatggattacttgagagccttaagcgctgaaataaaatccccatcaaaagggcttttggataactacttatttcagtttataggtgatacccgagatcgaaatctttggggggagtctataaatggtattcgtggtttagatggtcaaagtatagaaaattccgtagatggtgagtacacggacatagcagttgctcaaaagtatcaatcattcaagatgaatagaggtctg

SEQ ID NO: 32739 - DNA, 408 bp, Proteus mirabilis
ggaatattaacccgtttcccatcgactacgcttttcagcctcgccttaggggtcgactcaccctgccccgattaacgttggacaggaacccttggtcttccggcgtgcgggtttttcacccgcattatcgttacttatgtcagcattcgcacttctgatacctccagcatacctcacagtacaccttcgcaggcttacagaacgctcccctacccaacaacactttgtgtcgctgccgcagcttcggtgcatggtttagccccgttacatcttccgcgcgggccgactcgaccagtgagctattacgctttctttaaatgatggctgcttctaagccaacatcctggctgtctgagccttcccacttcgtttcccacttaaccatgactttgggaccttagctggcgg

SEQ ID NO: 32740 - DNA, 408 bp, Proteus mirabilis
ggaatattaacccgtttcccatcgactacgcttttcagcctcgccttaggggtcgactcaccctgccccgattaacgttggacaggaacccttggtcttccggcgtgcgggtttttcacccgcattatcgttacttatgtcagcattcgcacttctgatacctccagcatacctcacagtacaccttcgcaggcttacagaacgctcccctacccaacaacactatgtgtcgctgccgcagcttcggtgcatggtttagccccgttacatcttccgcgcgggccgactcgaccagtgagctattacgctttctttaaatgatggctgcttctaagccaacatcctggctgtctgagccttcccacttcgtttcccacttaaccatgactttgggaccttagctggcgg

SEQ ID NO: 32741 - DNA, 267 bp, Proteus mirabilis
atgcgttactcagaacaaatcaaaccaattagttatttaaaagctaatgtcgccgaagtgatgactaaactcactgaatctggtgcaccgatgattattactcaaaatggcgaagcaaaagcggttattcaggatattaccttttatgaagagacacaggaaacattagccttacttaaaatattggcgttaggtcagcaacaagttgaagcaggtgaagtaaaagatataaaaagcgttgttcagcgtttaaaaagtaaaaggaaa

SEQ ID NO: 32742 - DNA, 366 bp, Proteus mirabilis
atgctttcagcggttatctcttccgcacttagctaccgggcaatgccattggcatgacaacccgaacaccagtggtgcgttcactccggtcctctcgtactaggagcaacccctctcaatcttccaacgcccacggcagatagggaccgaactgtctcacgacgttctaaacccagctcgcgtaccactttaaatggcgaacagccatacccttgggacctacttcagccccaggatgtgatgagccgacatcgaggtgccaaacaccgccgtcgatatgaactcttgggcggtatcagcctgttatccccggagtaccttttatccgttgagcgatggcccttccattcagaaccaccggatcac

SEQ ID NO: 32743 - DNA, 348 bp, Proteus mirabilis
atgctttcagcggttatctcttccgcacttagctaccgggcaatgccattggcatgacaacccgaacaccagtggtgcgttcactccggtcctctcgtactaggagcaacccctctcaatcttccaacgcccacggcagatagggaccgaactgtctcacgacgttctaaacccagctcgcgtaccactttaaatggcgaacagccatacccttgggacctacttcagccccaggatgtgatgagccgacatcgaggtgccaaacaccgccgtcgatatgaactcttgggcggtatcagcctgttatccccggagtaccttttatccgttgagcgaatggccttccat

SEQ ID NO: 32744 - DNA, 261 bp, Proteus mirabilis
atgctttcagcggttatctcttccgcacttagctaccgggcaatgccattggcatgacaacccgaacaccagtggtgcgttcactccggtcctctcgtactaggagcaacccctctcaatcttccaacgcccacggcagatagggaccgaactgtctcacgacgttctaaacccagctcgcgtaccactttaaatggcgaacagccatacccttgggacctacttcagccccaggatgtgatgagccgacatcgaggtgcc

SEQ ID NO: 32745 - DNA, 1059 bp, Proteus mirabilis
atgagtttattattactaaaaagtcgccctttagtcgttattcctgaattagcggtacgtcttggtttaaatgaggcgatgctgttacagcaaattcaatattggctaactgaaactacttcaggtgttgaatatgacggctcacgctggatttataacacagttgaagagtggaagaatcaatttccttttttctctgaatcaacgattaaacgtgcttttactaatttgaaaaagcagggtgttttacgtattgagcaaatcaataaatcgaaccatgaccgtactaattattatgcgattaactacgatcaccatctgctaactgatggggtcaatatgaccttatcgaacagtgataatacatctaatcgagcagttcaaaatgaccttatcgataagcgcaaattgaaaccctcaaacagttcaaaatgcgctgttctgaatgggtcaaaatggcctgatcttacagagaatacaacagagattacttcagagagtacaacagagactaactcttcttgtcaggttcctactgaacccgacaacgctcctgaaaaattaattttggattatttcaacaaggtgacaaattccaaatatcgtgaaggaaaaacaacaacagggcatatcaaggcgcgattagcagaaggatttacctctgaagacttgatattaattacggattacctgacagctaaatggcaaaaagatcccaagatgcgtgattacttacgccctaaaacattatttgttcctgaaaactgtattgaataccaagataaggcgatcaaatggcgtgatgcagggcgtcctgaatgtgtgaatggtcgttggttaaagcctggagaagtttcagtggaaattaacacggttgaacgtgatgaaacttttagaaaaatgttcacctcaggctggaaacctgaaaatcgtattcaagcattagcagtcgagcaagcaaagaaaaatggtcttggccgtatgagtgaagttgctggtttagcttcattccgtggtatctggaaacaggcgacagaacaagttgcactggaggctaag

SEQ ID NO: 32746 - DNA, 363 bp, Proteus mirabilis
gtgtcggtacaaaccgaacactttctgtatgatgcagcagccaatttactgacccgtccacacaccgaagcaccgcataaccaagtgcctcatagtgaccgctttgattatcgctacgacggttttggtcgcatggtatcgcgctatgaaaaaggcagtagctcggggcaacgctatcactatgacagtgaccaccgcattatcgcggtggatatcgaccaagggcccttagggtatcagcgagcggaataccgctacgatatcttagggcgccggattgaaaaacggttatggaaagccagtgcgattgccaatacaatgacctatcaccaacatgagccggataaagtgtacaaaaggttc

SEQ ID NO: 32747 - DNA, 381 bp, Proteus mirabilis
atgaaaattacacaccttgatcatttagtattaaccgtggctgatatcgaggtgagttgtcatttttatcataatgtattaggttttgagataattacctttaaacaagggcgtaaagcccttgcttttggtcatcaaaaaatcaatcttcatcagctaggaaaagagtttttgcctaaagctgctaaaccaacggcaggctctgcggatttatgttttattactgaaacgccattgttagacgtgatagagcatataaaccagcagggtatcaatatagaagagggtcctgtaccaagaacaggggctacagggcctattatgtcagtttacttacgtgatccagataataacttattggaaattgctaatattattgaa

SEQ ID NO: 32748 - DNA, 482 bp, Proteus mirabilis
atgacaaagaaaaaatcacacaaacccggctctgccactattgcactcaataaacgtgctcgccatgaatatttcatgaagatgaaatcgaagcgggactgtcgttacagggctgggaagttaaatcactgcgtgcgggtaaagccaatatcagtgatagctatgtaatcatgcgtgatggtgaggcgtacctgtttggtgccaccattacaccgttaaacgttgcctctactcatgttgtttgtgatccgacacgtacgcgtaagctgttattaaaacaacgtgaattagctaatctctatggccaaataaaccgtgatggttacaccgtggttgccctttccttatattggaaaaatgcatggtgtaaaatcaaaattggcgtagctaaaggtaaaaaagatcacgataagcgtgacaccataaaagatcgtgagtggaaattagacaaagcacggatcatgaaaaatgctaaccgctaa

SEQ ID NO: 32749 - DNA, 768 bp, Proteus mirabilis
atgactaaccctgttattttagccgatcttgacgataccttatttcaaactcgtcgcaaaatggtggatgagttagcgcttgcaccctataaaactggtgcgttggatagaagtttagcgccacgtagctttatgactcaagagcaagctatgctggttgattggatgctagaacatgctgatttaattccagtcacagcacgtggaacggaagaaatgagccgtgtcactattccttttcattcatgggctattaccacacacggtgctgttatcttaaccccagaaaaagtcgcagatgaacaatggcaacaccatatcacacaaagcttaacaccttataagcaacctttacttaggttacagcaatctattacccaattaatggctgaacgtaatattgatggttgggcgagaattaactatgaatatgatgatttacccatttatttagtgatgaagcataacgatagcgctcgattagatgagctatatgctatcggtgatgagatagaaaaaatattctcaaccaaaggtttttatattcatcgtaacagtaacaatattgcttggttacctgagccaattgaaaaaggtaaagccgtcacttatttgcttaataaattaaaagcagaacgtggcgtttttcctgtaattggtttcggcgatagcctaagtgatcatcgctttatgaaattatgcaattggtatgctatcccccgccaaagccaattcgcgaatgcgatcaacacaaaaatttttggagaa

SEQ ID NO: 32750 - DNA, 3090 bp, Proteus mirabilis
atgagtaatgtcggtcaacgcgaacgtataacccaaaatcgtatcgttcagttttttcaaactgacttaggctatcgctatttaggcgattggcaagatcgcgtcaataataaaaatattgaagttgagatccttgttgattggttaacaaaacgtggtgtaagtgaagcgctgatcaatcgtacaattcgccagctagatgctgcagccgcgctgggtgaagggaaaaaactctattacgctaacaaagaggtttatcgcttactacgttacggtgtgaaagataaagaaggtgcaggccaccaaaatgaaaccgtttggttgattgattggcataaccccgaagccaatgactttgcgatagcagaagaagtctcgattaaaggtgaaaataaaaaacgcccagacatcgtgttgtatgtaaacggtattgcgctgggtgtgatagagcttaaacgttcatctgtctctgtttctgaaggtattcgccaaaatctggataaccaaaagaaagattttattcgtaatttctttaccacaatgcaattggtgatggcgggtaatgatactcagggactacgttacggcacaattgaaacacccgaaaaattttatcttgagtggaaggaaccgcttgaaaatacttatgactataaactcgattttcacctaagccgtatatgtaataagtctcgctttttgcaaatcatccatgattttattgtctttgatgctggaaccaagaaaacctgtcgccataaccagtttttcggtgttgaagcggctaaggctcatatcacaaagcgtgaggggggtataatctggcatacccaaggttcaggtaaaagcttaactatggtgtggctagctaaatggatacgggaaaatgttactgatgctcgcgtgctgatagtgactgaccgaactgaacttgacgaacagattgaaaaagtgtttacaggtgttgacgaagaaatttatcgtaccaaaagtggtgcagatcttgtggccacgttaaatcagcctaacccttggttgatctgctcattagtgcataaatttggaaggcagtctgattctgaaaatgatgccgcaaccgatgaatttattgaagaactgaaaaaatcactgtcatcgaatttcagagctaaaggaacattgtttgtctttgtcgatgagtgccatcgtactcaatctggtaagttgcacaacgcaatgaagaccattttacctgaagccatgtttgtcggtttcacagggactcccctgatgaaaaaagacaaaaagaaatcagttgaagtctttggtccttatattcatacctataaattcgatgaggctgtcgctgatggcgtagtattggatttacgctatgaagcaagagatatagaccaacacattacctcccaaaagaaagttgatgagtggttcgaggcaaaaacgcgcggattatctcgaatagctaaaacgcagctcaaactaaaatggggcaccatgcaaaaggtgctatccagtaaatcacgcttgcaacagattgtgaatgatatcttgttagatatggatactcggccacgtctgatggatggtcatggtaatgcgatgttagtctgctccagcgtttatcaggcctgtaaagcctatgaaatgtttagtcagaccgatttagcaggtaaagttgctatagttactagttttcaaccaacacctgcaagtattaaaggtgaggagactggtgaaggtttaacggaaaaactctttaaatacgatatttatcgtaaaatgttagcagactactttgaactacctgaagacaaagcagctaataaagttgaggactttgaaaaggaagttaaaaagcgtttcgttaatgaacctgggcaaatgcgcctgctgattgtggtcgataaattgttaactggctttgatgcgccttctgccacttatttgtatattgataagcaaatggcagatcacagcctgtttcaggcaatttgtcgcgtcaaccgtctcgatggtgatgataaagaatacggttatatcatcgactataaagatttattccgctcattagataaagcaatttctgattatactcaaggtgcttttgaaggttatgacaaggaagatgtggttggtttactaaaagaccgattagagcaagcaagactaaatttagatagtgcgctggaaatggttcgagcattatgtgagccagtaaaagcaccacgaaatacagaggattatatccattatttttgtggcgaatcaggcttaaatcaagatgagttaaccgaaaaagaggcacttcgtttaaccttatatcagagtgttgccaagttactgcgagcattcgcaaatatcgccaacgaaatgccagatgcaggttattctactcatgatataaactctattagatctgaagtttgtcactatgaaaaagttcgcgatgaagtgaagcttgcaagtggtgatctcgtcgaaatgaagcgctttgagcctgcaatgcgtcatctgctagatatgtatattcgtgccgatgatagtgaagtccttatggactttgaagagcttggcttgattgaattaatcgtcgaaaaaggcgtcagtgctatcgataccctgcccgaggatctccgtaaaaatccgggagcaatggctgagaccattgaaaataacgttcgcaaaatcattgtcgatgaaaatccggttaaccctaaatactatgaacagatgtcagtgttactcaatgaactaatcgaacttcgtcgacaaaaggcgattgaatatcaagattacctcgagaaaatccgcgaactcgctgctaaagtcgtacgtcctgagcgaacatcatctagctaccctgcatcaatggatactaatcccaaacgtgctttttatgataactttggcaaagatgaatggcttgccaccaaaattgatagtgccattcgttataccaaaaaagcggattgggtaggagatcgttttaaggaacgagaaattgccaatgcagtacgagaagaaacggcgggctatgaggtggatattcaggacgtaatggaactcgctaaagctcaaaaagagtatcaa

SEQ ID NO: 32751 - DNA, 417 bp, Proteus mirabilis
atgaattatcaattccaagaaggtgctatcacattaccggatgaagaatatcaagacaatagtcttaatatgctgcgtttccctacgcgacaaggcagtatttctattacgcgtgatgtagtggctccagagataaccctcaatgactatctggctggacagttgtcggccatcaaacgtgaaatgaaaaatgcggtggtaaaagcacccacagattttcgtaccgaaaaaggagttacgggctgtgaaatctattgtgaaaccaaacaaaaagggatccctatttatcagtggatcgccgcttttcgtctcgaaaataaaatagtggtgttgacttactgccaaattaaaccgttttccaatactgagcaggcgcaatggcaagcgttaagagacagttttacgccatcgcccaat

SEQ ID NO: 32752 - DNA, 735 bp, Proteus mirabilis
atgtttgcgcagtttctttctcactatcttcttgagcctcactacttaagttggctgtggcaaggttttttaatcaccttgcttatctctttctggactatcattattgccacattactaggttttcttctcagtgctgcctatgatagccatatcgcgccattacgttggtgtgcggccatttatacttcactctttcgtaataccccattattggttcagctcttcttttggtattttgcttctggtgaactattgccacaaacggccatgatatggcttaacaccccacatgaactttctttatttggcttaacgctctcttggccctcttttgaatttttagccggtattattgggcttaccttttactctgtaccttttattgcccaagagctaagagcaggaatacagggagtcagacaaggccaaaaatatgcagctttagcgttaggattaacccactggcaatccatgcgttatgtcattttaccgcaagcttttcgtatcgcccttccgccattgttgggtcaatatatgaatattatcaaaaactcctctctcactatggccataggtgtcgcagagctttcctatgcttcaaggcaagttgaaactgaatcattacgtacttttgaagcgttcggcgtcgccaccatactgtatatcgctgccattgcattaatggaagcttgggggcaatggcatcagcaacgaaaattagcgcaaggatat

SEQ ID NO: 32753 - DNA, 1392 bp, Proteus mirabilis
ttgaataaaaaacttggtttaatgtcactaacagcgttagtgctaagctcaatggttggtgcaggtgtattcagtttgcctcagaatatggctgaggttgcaagccctgcggcactgattatcggttggataataacaggggttggcatcctttttctcgccctatcattgttattgctttctcgcttaagacctgatcttgatggcggtatttttacctatgcgaaagaaggatttggtgaatttattggcttttgttctgcttggggctattgggtctgtgcggtagttgccaatgtctcttatttagtcatcgttttcgctgctgtgagttttttcaccgatagccctaataatattatttttggtgatggtaatacatggcaggcattgttgggtgaatcaatcttactttgggttgtgcactttttagttctacgaggtgtacaaacagccgctagtatcaatttaatggccacgatggcaaaattaataccattggggttatttattattgttgccctacttgcctttaatatggatatttttacccttgatttcgaagggataaaaatgggcgtgcccgtttgggaacaagtaaaaaataccatgttaattactttatgggtatttattggtattgaaggggccgttgtcgtatctgcaagagcaaaaaatagaagagatgttggtttagcgacaatatttgcggttgtgatcgcgctgattatttatattctcgttaccctattatctcaaggattagttagccaaccagagcttgctatgatgaaaaacccatctatggcacctttactggttcaactaattggaaatataggtgagatagttattgccgccggccttattctatcggtatgtggcgcttatttaagctggacaattatggctgctgaagtcccttatattgccgcattacaccactcttttcccaaacaactgagtaaacaaaatcacaatgatgcgccttcctcttccttgtggtttactaatttagctgttcaattatcactagtattaatttggcttactggtagtaattacaataccctactgaccatcgcgtcagaaatgatcctcgttccttatttcctggttggtgctttcttatttaaagttgccatagaacgcagtagccgaggattattactgatagcaatacctgcaagcctctatggtttatggttactttatgcatcaggtgtaattaatttattactttccgtcgttctctatgcacccggtgtattaatatttttatattcacgaaaacaatataaagataaacagtcattaaatactagtgaaaaaatactactgatgatggtattaattggcgcaattcctgcttgtggctatttagtatttaat

SEQ ID NO: 32754 - DNA, 762 bp, Proteus mirabilis
atgaactcattcagcacactaaaaacactattttgtggctctttgctggcactgagtctagtgaatacaacacaagcgggtgtttcactggatagaactcgtattgtattaacgggtaatgaaaactcagccagtgttaatttaaaaaataccagccctgatattccttttttagcgcaatcttgggttgaaaatgaaaatgggcagaagatctcttcacccttagtggcacttccaccgttacaacgccttgatggtgctcaaaaaggcgtagttcgcattacaaaaacagctgaagttgggctattacctcaagatagagaatcactgttttatttaaatgtgcgtgaaattccacccgcaccaaaacaagccaacgtattacagatggcgatgcagtcacgcattaaattattctatcgccctagtgccatagtacctgaaaaaccgggaatggtttggcaagatcaactggtgtttaaaaaacaaggtaataaatttattgttaataatccaaccccttattacatcacgattatctcactttctaataaattaaatggtgaggatagcgataaattaaccaccttccccggattaatggttgcgccaaaagcttcactggatataccagtaaaaaccagtaacgttaatcagttttatatgatgtatgtaaatgattacggtggacacccagagctcaaatttgtatgtcagcaagatagctgcaaagtagcccctaaagatcaacaacctaaatat

SEQ ID NO: 32755 - DNA, 1308 bp, Proteus mirabilis
atgaaattccctggcaaaagaaaatccaaacactattttcccgttagtttacgagatccattattaaaacctatcatcaatatgactgagagcgaatcttctcgggcttatattgttggcatcgaccaaacattagttgatattgaagctaaggtagatgaagcgtttatcaatcgctataacttgagtcagggacactctctggttattgaagatgatgtagcagaagccctttatcgcgaattaacagttaataatcttattacccatgaatttgcgggtggcactattggtaacacactacataactactccgtattagcggatgatcgttctgttttattggggactatgtgcaacaatattcagattggtagttatgcttatcgctacttatgtaatacctcaagccgtactgatttaaactatttacaaggtgttgatggtgcaatagggcgttgctttaccctcattactgaaaatggtgaacgtacttttgctatcagtcctggtcaaatgaatcaacttcagcccgaaagtattcctgaggatgtgattgcagatgcatcggcattagttttaactgcttatctcgtccgttgcaaaccgggagagccaatgccgttggcaactatgaaagcgatagaatatgccaaaaagcatgatgtaccggttgtcttaacattaggtactaaatacgtgattgccgacgatcctcagtggtggagagatttcttaaaagagcatgtctctgtagtggcaatgaatgaagatgaagccctagagcttacaggtcatgctgatccattgttagcatcagatgcggctttagagtgggttgatttagtcttatgtaccgcaggccctgcagggttgtatatggcaggttttacagagagtgattttaaacgccaaaccactcatccgttacttccaggtgcaattgctgaatttaatcgttacgagtttagccgtgctatgcgttttaaagattgccaaacgccggaaaaagtctattcgcatatagagccttatatgggagggccggaaaaaatcatgaataccaatggtgctggcgatgcggcattatctgcactattacatgatattacggcaaatagttatcatcgcattaatgtacctaattcgagtaaacacccacgtagttatttgacttactcttcattggcgcaagtgtgtaaatatgctaaccgtgtaagctatcaagtattaagtcaacactcaccacgtttgactcgcggtttgcctgaaaaagaagatagcttagaagaagcttactgggaacgt

SEQ ID NO: 32756 - DNA, 1934 bp, Proteus mirabilis
ttagatgatattccctctctagctatgccagtattattattattaaaaaatgaagagagtgctgttttaaccgaagtttcatttgatgaaactggacaacgtaaatataaaattcagcaagtagatggtttatctatatggttaacacaatctgaattaagtgaaaaatatttaggttattgctggttcattaagccacgtattacagaagatgttcgttcagaattgcctgaatatacgatgcctaaagcatggttttttaaagttatatggcgctttaaaaagtattactatcaaatcattctcgctacttttgttattaattttttggcacttgttagttcattatatgtcatgaatgtttatgacagagtaatacctaataagtcatatcaaacactctgggttttaagtatcggggtaattattgcaatattatttgaatttacagctaaaatgctccgaggccggttaactgatattgctggtaagaaagctgatttaattatcagttctgctttatttagaaaggtcacaaatcttaagttacaagaaaaacctatatcatctggctcctatgttaataatttacgagattttgaatctgtccgtgattttatgacgagcgcgagtttattaacattagttgatatgccttttttaattttatttgtatctgtaattgcgcttgttggaggctatttagcttttgtgccacttacgataattccattggttattattgtcggacttttagctcagatccctttatccaaatatattaatgaatcgatgaaggaatcatctcaaaggcaaggattagctgtagaagcgattgaaggcatagaaacattaaaaacgaataatgccatgaattgggcgcaaaagcgttgggattattacacagcaaaaacagcatcttcatcatgaaagttaaaaacatcagtaattttgttatttattttgcagtaatgatgcaacagttaaatacgatatttttagttattattggtacttatttgattcatagcgatgatcctgcaagtaaaattacaatgggggcgttaatcgcaacggttattttatctggtagagcgttatcaccattaggacagattgcggggttagccgtgcgctttcaacaggcttgggtcgcattaaaaggtgttaatggcattgttgagcgaccatcagaacgtgaaccatctaggaaatatattacgttaaaacaaataaatggaaatataaaattccaaaatgtttcatttgcttataaccaagatagtagcagtgtagtgaaaaatttatcatttgaaataaagccaggtgaaaaagttggaatacttgggcgtattggcagtggtaaatcaacgactttaaaattagcagctgggttatatcctgcagagcaagggagtatcacactagatgatgtcgatattcgccaaatagatcctcattatttgcgtaatcaggttttgttattagaacaagagccaaggttatttttaggtagtttaagagaaaatcttgatttagcccgtatggatggcttctctagtgatcaagatttgattgtggcactgaagcggtttggtttggataaagttattaaaaaacatcctaggggattagatatgtccttgggagaaaatgggttaggtctttctggtggacaaaaacaaattgttgctttggctagaatgacgttgagaaatcccaaaattgttttacttgatgaaccaacaacggggcttgatcaatattcagaaattcaggcattaaatgccatttcagcatggtgtcgctcaaagacattattggttgttactcatcgacctcaggtactgagtattgtcaatcgaataattgttgttgataacggtaaagttgtgatggatggtcccagagatgcggttttacagcagttagct

SEQ ID NO: 32757 - DNA, 390 bp, Proteus mirabilis
atgaaaaaatatatttttactgcaattattcttagtttaacagctagttatgcatcagcagaaacagcggttaatggttgtgacatcaaaaaacagaatattcaacgacaaatcgactatgccaaaatgcatggtaatcaatatcgagtacaaggcttagagcgagcacttaataaagtagaacgttattgcactccagaaaaggttgttgaagatacccgcctagaattacgtgaaaaacaactggaagtgaaagagcgtgaattagaattaaaagaagcgcaacttaagggagagcgcgataaaattactaaaagagaagataaacttgcgcaagcaaaagctgagttgaaagcagctgaagaagagttagagctactcacaaaaaaa

SEQ ID NO: 32758 - DNA, 708 bp, Proteus mirabilis
atgaaacctcatctcaaacgttcactaacaatcaaacagatggcagctgttgcaggtgtcacgttggtgactattgctatttttattagtattcagcttgtttatttgattgatcaacgccgagaagattatcaaaatcagctatttaatgcggcagtcagtatacaacaaccgctagctgatgcgctattgcgttcagatttaaatgatgccaaacaactgatcattagtttaaaaacgaccgggatactgggtaaagcgattgtgacacaacccgaaaatgttcaggtgatgaacttagattttgcaccgaaaaaatcagtttctcaattttcacgttggctgtttggcatccctgttgaagtgactatccctttacagcctttaggtattacctccgctgacgataaagcctataccagtcatcttattttacaggcagatactaaccgtttttatcgttttgcgagtaatactgtcgcactgatgttgacgacttatttattaatgggtcttatcctcactattgcaattagctggtgtattaatcgtattatggtaaaaccgttgcgccacattgctgtgactcttaataaaagtaatcaggtttcgatgttgtcgtgttcagaatctcatcgtgatgatgagattggtttgctgattaaaggatataatcaacaaaaatctgatcaaaaagagtcagatatc

SEQ ID NO: 32759 - DNA, 672 bp, Proteus mirabilis
atgtataggtttacctcccgccaaaaagcggcggcgctattatggctttcgttatttcatatattgataattacttctagtaactatcttgttcaattgcctatttctatttttggcttccataccacatggggtgcatttacttttccatttattttcttagcgacagatttaactgttcgtatctatggagcccctctggcaagacgcattattactgccgttatgataccggcattagctatttcctacctaatatcaacactctttttccaaggaagttggcaaggttttgcctcactcaatgattttaatatcatggtggcaagaatagcgacagcaagctttatggcgtatgtgttagggcaaattatggatgtttctgtctttaatcgtttaagacagcaacaaaaatggtgggtagcaccaagtgcagcgatgttttttggtaatttcttagatactgttgccttcttttttattgccttttatcgcagtacagatgcgtttatggcggccaattgggtcgaaatagcgctcgtggattacacttttaaattgacgatttgtatgctgtttttcttaccggcctatggcgtattattgaactttattttgcgctatttttttgcacaagaaaatcaacaacaaagctatgctcaaatccgtcct

SEQ ID NO: 32760 - DNA, 714 bp, Proteus mirabilis
atgaaaatagccgctcatagaggattttctggaaaggcacctgaaaacacattagctgcatttaaaatggcaattgattttgggtgtgaatggattgaaaccgatgtgcaattaacggcagatcatgtacctgtactgatccatgacaagacggttaatcgttgcacgaatggacaaggtgcggtgcgctttcatagtttggatgatttacaccgtcttgatgcaggcagttggtttagttcactttatcaaggggaaaaaattcccacactaagacaaggtttgcagttgataaagcgctcaggcactaagctcaatatcgaacttaaaacatggcctgatgatgatgtagagcgcttatgtttagcggtatctgaaatgataaaaagcgcagatatccctaacgaacaaatcctgttttcctctttcgatactcatgcattaatggtgatgaaacgttatctgcccgccattcgtcgaggacagctatgggatgatattcctgataatgcactagaaactttacaagctatagaggggtttagcgtgcattgtaattatcaatatttaacgcagcaacaagcggctatgttgaaacaagcaggctatgaaatttattgctatacccccaatgatcctaaagaagtgaaagattttgaagcatggggagtcgatatgttgatcactgatgtcccagatatttatcaacagaat

SEQ ID NO: 32761 - DNA, 732 bp, Proteus mirabilis
atgtactctgtttaccagttttttcaggctatcggtcttggtcttattttacttctaccgctaactaacccactcaccacggtcgcgctttggcttggtctgtcggggaatatgaccaaggaacagcgtaatcaacaatcctttatggcatgtgtctatatttttattattatgaccatcgctttttatgcgggtcgtgtaataatgacgacctttggtatctctattccaggccttcgtattgctggggggatgatcgttgcttttattggttttagtatgttatttccccatactcccaatgtggacgatccgctttcagaagaaaaaaatccgcatcgaaatcctcaggcgcccaatattgcttttgtgcccttagccatgccaagtaccgcagggccgggaacaattgcgatgatcatcagtacagcagcatcaattccttcacgtacagatattgcgcagtgggtattatacgtagcacctattaccactttctttttaattagcctgattgtttggctttcactgcgcggttcaaccggtattatgcgctatctcggtcacagtggtattgatgccatttctcgtgttatgggatttttattaatttgcatgggagttcagtttatgattaatggtgtacttgaaatcattgctgatctccccgctttattacaacaagctcaatcagcggctgctgccagcttatcagaaaagttatccgctaaa

SEQ ID NO: 32762 - DNA, 813 bp, Proteus mirabilis
atgagccagacgaaaacctctcttatgggtcaatgcatttccgagtttatcggtactgcattgctagtcttctttggtcttggttgtgttgcagcagcacgtatcgcaggcgctcaactcggtctttgggagataagtattatctggggcttaggtgttgccttagccgtttaccttactgcgggtacctctggtgctcacctcaacccggcggtcacagtcgcattctggttgtttgcgtgctttgaacgtaaaaaagttatcccttatattgttgcacaaatgttaggtggtttttttgccgccgctgttgtgtactttatgtattacaatttatttatcgactacgaacaggtcaacggaattgtacgaggatcacaagaaagcctctttactgcgggcgtcttctctacttacccagcagcccaaatctctgtgatccacgcattttttatcgaagtaattattgccgttattctcgttggcttaattttagccttaacagatgatggtaacggtgtacctcgtgggcctttagcgccattacttatcggtattctgattgcggttatcggtggtgcatttggtccattaactggattcgccttaaaccctgcccgtgattttgggccaaaattagtcgcattctttgccggatggggtgatattgctttaacaggtggacgcgatattccttatttcttagtcccactcattgctccaatgattgggggtattttaggcgcacttgcttatcgtaaacttattggccgtcacttaccttgtgatacctgcaaaattgaaaacgacaaa

SEQ ID NO: 32763 - DNA, 1473 bp, Proteus mirabilis
atggccaattattttaatacattgaatctgcgtcagcagttgtcgcaactgggtaaatgtcgctttatgtctcgtgacgaatttgccgatgaggctaattatctaaaaggtaaaaaagtcgttattgttggctgtggtgcacaaggtttaaaccaaggtttaaatatgcgtgattcaggactggatatcgcctacgcattacgccaagaggctattgatgaaaagcgtgcttcatggcgtcgtgccactgaaaatggttttgaagtaggaacctatgaagcattgatcccgcaagccgatttagtggttaacttaacgccggataaacagcactccgccgttgttcaagccgttcaaccactgatgaagtcaggcgccgctttggggtattctcatgggtttaatatcgttgaagtgggtgaaaaaattcgtgacgatattactgttgtgatggttgcgccaaaatgtccaggtactgaggtgcgcgaagagtataagcgtggttttggtgtacctaccctaattgctgttcacccagaaaatgatgctaaaggtgaaggtatggccattgcgaaagcatgggcggcggccacaggtggacatcgtgcgggggtattggaatcatcttttgttgcggaagtaaaatcagacctgatgggcgagcaaactatcctgtgtggtatgttacaagccggctctctgctgtgttatgacaaaatggttgctgaaggtgttgaaccgggctatgcaggtaaacttatccagtttggttgggaaacgattacagaagccctgaaacaaggtggtattaccttgatgatggatagattatctaatcctgccaaaatgcgtgcttatgctttatcagagcaattaaaagagattatggcaccactgtttgctaaacatatggatgatattatttcaggtaaattctctgaaaccatgatggcagattgggcaaatgatgataaaaacttgctgacatggcgtgaagaaacgggtgcaagcgcatttgaaaattatccggaatatgaaggtaaaatcagcgagcaagagtattttgatcatggcgtattgatggttgcgatggttaaagcgggtgttgagctggcgtttgatacgatgattgaagctggcattatcgctgaatctgcctattatgagtcactgcatgaattgccattaatcgcgaatacgattgcgcgtaaacgtctgtatgaaatgaatgtggttatttcagataccgcagagtacggtaactatctgttctcttttgccgccgtgccgatgttaaaagagtttatgacgacgttgcaaagtggcgatttagcgaagcatgttccagatagtgggacagataatgctcaattgcgtgatatcaatgaagccattcgtcagcaccctattgagattgtcggtaagaaattaagagggtatatgacggatatgaaaaagattgctgttgccaac

SEQ ID NO: 32764 - DNA, 939 bp, Proteus mirabilis
atgaaatacataaaaagtattgggacactctcgctattagcagccgctgttcttttaagtggttgcgatatggcgttaatgaatcccaaaggcgctatcggcgctgagcaaaaaacattaatcctcattgcgcttggtttaatgttgattgttgtgataccggtaattttaatggtgattgttttcgcttatcgctaccgtgaatccaatactaaagcaacttatcgccctaattgggctcactcaaataaaattgagcttgtcgtatggaccgtgccgattatcattatcgtgatattggcaaccatcacatggaaaacaacccatgaacttgatccctataaaccactagtttcagatgagaaaccggttaccattgaagtggtttcaatggactggaaatggttgtttatctatccagaacaaggtattgcaaccgttaacgaactggctttcccaaccaatgttcctgttaatttcaaaattacctctgattctgtcatgaactcattctttatcccgcgcttaggtggacaaatctatgccatggctggaatgcaaaccaaacttcacttaattgctaatgaaccaggtgaataccaaggtatgtcagcaagttatagcggacacggtttctctgacatgaagtttaccgccattgcgacacctgatcgtgcaggctttgatgcatgggttgcaaaagtaaaacagtcatcagatacgttaaataccaccgctgcatttgatgaacttgctaaaccaagccagaaaaatccagtgacctactattcaagcgtgaagccgatgttattccaagagaccatctctaaatttggtcatacaggtcatggcgctcacaccggtagcaatcagactgaacactctgatgcaacaatgaatatgaacatgagccacgcggcacatgcaggagcagaggaa

SEQ ID NO: 32765 - DNA, 612 bp, Proteus mirabilis
gtgacgatacatcaaaatattgtctggcatcctcatcaaatagggttaaaagagcgtgaagcacaacaggtacacaaaggatgtgtactttggtttactgggttatctggctcaggtaaatcaacactggctgatgcgctagagcaaaccttatatcagtactcgacactccatgcgcctatccgcacctatttattagatggtgataatctacgccatggtttatgccatgatcttgggtttagtgaacaagataggcatgaaaatattcgccgtgtaggggaagtggctaaattaatggttgatgccggattaattgtcttaacagcatttatttctccttatcagcaagatagacaacaagtaagagaaaggtttactcaagggcgatttattgagatctttgttgatacacctttagctctttgtgaagcacgtgatcctaaaggcctctatcaaaaagcacgacgaggagagatcaaacagttttccggcattgattcaccttatgaacgacccattgcgccagaaattcatttagacggctcactcgcgattaatgagcttacacaacaaatcctcgcttatttacagcaacaacaaatttaccgc

SEQ ID NO: 32766 - DNA, 1422 bp, Proteus mirabilis
atggcaacagtagttaattttacacaatggccgtggcatcactgggcgcagcttaacccaaatgaaacggccatcatatccggtgattcacctataacatggcaacaattaagttgtcatatcaatcgattggcgaaccatttagcaaaacagggtgttaatactaaaagtaccgtgttgctacgtggtaaaaatcatattcatgttgtttttactctacttgctgtttttcaatgcggtgcaaaagtattaccgttagatcctcagctccctaagtctctacttgatgatttattaccccatttaaacatcgatttttatgctgatttaagtggatcaacacttgagttagatgcgaggttactcgatctttcaggtgtcgaattcaataacaaatcacatcaagataaaaataacatggcaggtgttgcatgggcatcttctcgtatggcaacactgatcttaacctctggatcatcaggtctacctaaagccgctgtgcatacttttcaagctcatctttgtagtgcagaaggtgttcttgaattgataccctttgaaaaaagcgacagttggttattgtctttacctctctttcatgtatctgggcaaggaattctttggcgttggttattacgaggcgctaccttggtagtgcgtaatatgcacccctttattgctgctttgcaaggctgtactcatgcttctttagtgccaacgcaactttggcgtttattacaaaatacacaacaggatagttcgcagcccatcacattaaaagcggttttattagggggagcgatgatcccaactgaattaacccaatgtgcggaaagtaaaggtattcagtgttggtgtggttatggcatgactgaaatggcctctactgtttgtgcaaaacgcgcagatggtaaagcgggagttggtacgccattaaagggtaaagcggtcagattagtggataatgaaatccagatcaaatctgatagtgttgcattaggatattggtttgatggtcaattaaagccgttatcacagactcaggatgattggtatgcaacacgggatagaggttgttttaaagagggggaatggtgcattttagggcgattagataatctgttttttagtgcgggtgaaggtatacagccagaagatattgaaaaggtgctaaatagtcacccgaatgttcgccaaacatttattgtcccgattgacgatattgaatttggtcaacgtcccgttgctgttgttgatactgatattgagacaattaatcaattaccacaatggtatcatacgcgtttagcaggctttcaacgtcccatcgcttgtttactattaccagaacagctaaagagtggggggatcaaaatctctcgtaaacaagtgcaacagtgggtgaaagggcaacaagtaaat

SEQ ID NO: 32767 - DNA, 1896 bp, Proteus mirabilis
atgttttatccagaacattttgacgtcattgtcatcggtggtggtcacgccggtacagaagccgctatggctgcagctcgtatggggcgtcaaaccctattactgacccacaatattgatactttgggccaaatgtcttgtaacccagctattggtgggattggtaaagggcatctggtaaaagagatcgatgccatgggtggattaatggccacagccatcgaccatgctggtattcaatttagaacccttaatgcaagtaaagggccagcagtaagagcaacaagagcacaagccgatcgcgtactttatcgccaagctattcgcacaacccttgaaaatcagcctaatttaatgatcttccaacaacccgttgaagatctcattgttgaaaatgaccaagtaacgggtgcagtcactcgtatgggattaaaattccgtgctaaagcggtagttttaaccgtaggaactttccttgatggaaaaatccacattggtttagaaaattacagtggtggccgagcaggtgatccaccatcagtctctttatcacatcgattaagagaattacctttacgtgtaggtcgcttaaaaacaggtacaccacctcgtattgatgcaagaactatcgattttagtcaattagcgccacagttaggcgataatccaatgcctgttttctcatttttaggtaatgtggatcaacatcctgaacagatgccttgccatattactcatactaatgagcaaacacatgaaataattcgtaataaccttgatcgcagtcctatgtatgcaggggttattgaaggtatcggccctcgttattgtccatcaattgaagataaagtgatgcgatttgctgatcgcaattcacaccaaatctttttagagcctgaaggcttaacaagcaatgaaatttaccctaatggtatttcaacaagcttaccttttgatgttcaaatgcaaatagtaaattccatgaaaggtatggaaaatgccaagatcatccgacctggttatgcgatagagtatgacttttttgatccccgtgatcttaaacaaacactcgaaagtaagtttatcaacggattattctttgctggccaaattaatggcactaccggttatgaagaagcagcagcgcaaggtctattagcaggtcttaatgcggcacgttatgcttttgatcaagaaggttggttccctcgtcgtgatcaagcctacattggtgtattagttgatgatctttgtaccttaggtacgaaagagccataccgaatgtttacttcacgtgctgaatatcgcttgatgttacgtgaagacaatgctgatttacgtttaactgaaattggtcgtgaacttggtatggttgatgacaaccgttgggcgcaatttagtgaaaaagtcgaattagttgaaaaagagcgtcaacgtttaagagatatttgggttcatccaaaagcggataacctagaagaaatcaatcaattacttaaaacgccactgtctaaagaggcgaatggggaagacttattacgtcgtcctgaaatgacctatgagattttgaaaaagatccctcgttttgctcctggtattgatgattcgagaccacaagcggcagagcaagttgagatccaagtaaaatacgaaggttatatcaatcgtcaacaagaagagattgaaaaacaactgcgtaatgaaagtgctgcattgcctattgatatcgactacaaacaggtgagtggattatcaaatgaagttattgccaaactaaacgatcacaagccaacttcaataggtcaggcatcgcggatctccggtgtgacacctgcagctatctcaattttacttgtttggttaaaaaaacaaggtttattacgccggagtgcatca

SEQ ID NO: 32768 - DNA, 2007 bp, Proteus mirabilis
atggcgattaatttattacctcctcagttagcaaatcagattgcagcaggggaagtcgttgaaagacccgcttctgttgttaaagagttacttgaaaacagcttagatgcgggtgcgacaacaattgatatcgatatcgataaaggtggcgctaagctaattcgtatccgcgataatggatgcggcatttcccgtgatgatttgaagttagcacttgctcgccatgcaacaagcaaaatatcgacactggatgatcttgaagccattatgagcatggggtttcgtggtgaagccttagccagtatcagctctgtatcacgtttaaccttaacatctcgtaccgcatctcaggaggaggcttggcaagcctacgccgaagggcgtgatatgacagtggcagtcaagccagcagcacatccggtggggagcacagttgaagtgctcgatcttttttataacactcctgcaagacgtaaatttttacgtaccgaaaaaacagagtttggtcatatagatgaagtagtacgtcgtatagccttatcccgctttgatgtgtcaattaatttaacccacaacggtaagcgggtgcgtcaatatcgcgctgcgaaagaaactcatcagcatcatcgtcgtttaagtgctatctgtggtaatcattttgttgatcaagcaatgcaactaacgtgggagcatggtgatctggcaataaaaggctgggtagagcatcctttagctccagtgcaaagcagtgaaatacagtactgttatgtcaatgggcgcatgatgcgcgatagattgattaaccatgctattcgtcaagcatatgaaggttatttgcaagttgagcagcaaccttcttatgtgctttatttaaccgttgaccctcatcaagtggatgtcaatgtgcatcctgccaaacatgaagtgcgttttcacgaatcgcgcttagtacacgattttatctatcaagctgtcttgagtgtgttaaggcaggttacagaagatacgttatctttagatgaagaggataatggggctttaactgccacaacatttcctgaaaatcgccaagttgcgggagaaaatgttttttcgcagccttatcaagcaccagtaacctcatctacgcaaaaaaagagcacgggagcttaccaaggaagtgcaggaaaagggttaacagatacgcaaaagagtccccaaaaaacgctagatacacgtcagtttggtgagagttatcaacgtacgcaaggcatgctttatcaaaaaatgatgcaagaaagtgcgagcgatgttgaaaataaagaaaaaatacccctatttccccctcgtcccccattgaatttggttgatgttggtcatacaacgaataacaatgaaacaaatgtaatttcagtggtgcctcgttctgttaatgccagcgcagcgcaaacagattatacttttggccgggtattggcgatttatcagcagaaatatgcgttaattgaatcttcgcaaggtctagggctgttagcattggaagaagctgattttctgttaaaatgtgcccagttattgccagaaaatgaaaatctgaaaccccaacctttgctagtgcctttaaaagtcacactcagtaaagatgaaattaatacatttaagcagtttcaggcgttaatcagtgattttgggattgttatcgacatctctcatggtaaagcgacgatccacgcggtctcgttgcctttgcgacagcaaaatttacctgaattactgacaaagctattagcttatttggcaacagaaaaattatgctctaaacaacaaattgggcattggttagcaaaacagttaagtcatgagtcgggtgtttggtcacaggctcaggcagtaggattattggctgatattgaacgattatgtccacaatatgtcagacagccgtccaaaaacttattacaattaatagaattacaacctgtggtagcggcactgaataatgagcgaagtaaaaacgcaaataaaacc

SEQ ID NO: 32769 - DNA, 750 bp, Proteus mirabilis
atgagtgaagaaacctcaacaattatttttgaacacccgcttaatgagaaaatgcgttcatggcttagaattgaaaactcattaattcaattaaatagttttcaatctattaattcattatcttctgcattatctttttttcgtgccgtttcagaatttattgaagttttagatcgcggggagatccgcgcagagctacttaaagagttagaaaaaagacaaaaaaaactgcaacagtggttatcctttcctaatgtcgataaagagattgtcagtcatattattaatgagttatcagaaagtgcttgcgcattaagtaaagcaccacgtattggacaacatttaaaacaagataaaatcatcagcttagtaaaacaacgcctcagtattccgggaggatgttgtagctttgacgtccctactttgcatttgtggttaaatcttcctcaaacggtgcgtactgaaaagttaacttgttggcaggaagggttatatcctctacaaaatgcattaaatgccctattaacacttattcgtcaatcagatacatttaaaccggtattaagccataatggtttttatcaagacagtacggaagaaggtgaattattacggatcaaactacttgccagccagcaaatttaccctcaagtctcaggacacaaaaaccgttatgctattcgctttttgcctcttgacagtgagcatggcacaatcccttctgaactaccttttgagatttcatgttgt

SEQ ID NO: 32770 - DNA, 417 bp, Proteus mirabilis
atgtcaaatagaacggtaatggggtttgattttggcaccaaaagtattggagccgcaataggtcaagaagttacagggacagcaaggccattagcctcctttaaagctaaagatggtattccagattggagtcaaatcgaaaaaatcattaaagaatggcagccggatttagtggtggtgggtttgcctcttaatatggacggtacagaacagctagtgactacccaagccaaaaaatttgctaatcgcttacatggacgctttggcgtacaaatcgccttacatgatgagcgccttagcacagtagaagcccgtgctcacctttttgaacaaggggggtatcgctctttagataaaggcagtgttgatgcaacttctgccgttattattttagaaagctggtttgaacggcagtat

SEQ ID NO: 32771 - DNA, 342 bp, Proteus mirabilis
atgcgaattaaattgttattgggagccactgcagcgttgttgttagcaggctgttctgcaacaaatacattgaccagtgcaggttcacaggtacaaattactgatacgcaaccaggcagcgagtgccagttattaggcacagtaaccggcgttcagaataattggttatcaggctctcgtactgaaagccaatcactacgcggtgctgctaatgatttacgcaacaaagcagccgctatgggtggtaatgttatttttaatgttggtacaggtgcaggtagcattgtcgatagctttgcgccactagatagcaaaatgagtggacaagtttataaatgtcag

SEQ ID NO: 32772 - DNA, 705 bp, Proteus mirabilis
atgagagttggcgtaataggtgcaatggaacaagaagtcaaacttctgcgtgaacaaattgaaaactgcgaaatagtctctcgtggtggttgtgaaatttatactggcaaaatcaatggtgtagatgttgcattactaaaatcaggcattggtaaagtggcagccgccatcggtaccacactattacttgaacattttcgccctgatgttgtgatcaacaccggctctgcaggtgggttagatgcaaaattaaatgttggcgatattgtcgtatcaacagaagtacgttatcacgatgccgacgttactgctttcggttatgaaccaggacaaatggcacaatgcccaccggcatttattgccgatcccaaactggtcaatattgctcaagagtgtattggatcactaaaattaaatgccgtgcgtggattaatctgcagtggcgatgcttttattaatggtgccgagccattagcgcgtattcgtcgtacttttccagaagtcgtcgctgttgagatggaatcaaccgctattggacatgtttgccatcaatttgatacaccttttgttgttgttcgcgccatttcagatgtggcagataaagaatcgcatttaagttttgatgagtttttatctgttgccgcacaacaatcaagcttaatggtcaccactatgcttgataaattaaaaacagaaactcagttt

SEQ ID NO: 32773 - DNA, 1302 bp, Proteus mirabilis
atgaagtcatcagcgagcagtaccataaaagatcgtgttgcgattgtcagtggattgcgtctcccatttgctaaacaagcaaccgcttatcgggggatccctgcggttgagctggggcgctcggttgtacaagaattagtgatccgtaatgaaattcctcctgaaattattgatcaactggtgtttggtcaagtagtacaaatgcctgccgcaccgaatattgcccgcgaaattgtacttggcgcagggctaagtgtaaaaacagatgcttatagtgtaacccgtgcttgtgcaacgagttttcaggctattgctaatgtggctgaaagtatgttggcaggtcacgtttcagtgggtattgctggtggcgcagattcatcttctgtattaccgattggcgtgagtaaaaaattagccgatgtcttactcagtttaagtaaagcgaaaacattagggcaacggcttagttatttaagtcaactacgctttggtgatctgctacccgttgcacccgcagtggctgagtattccacaggattgcgtatgggggatactgctgagcagatggctaagacttatcatatttcaagagttgcgcaagatgaattagcgcatcgctctcatcaattagcggccaaagcgtgggaaatgggaaaattaaatgacgaagttatgacggcatttttcccaccttataaatcaggttttcatcaagataataatatccgcaaaaattctgtacttgattcttacgcaaaactgaagcctgcctttgataggcgccacggtagtgtgacagcggctaatagtacgccccttacggatggtgctgctgctgtgctaatgatgaaagagtctgttgccaaaagtttaggctatcaacctttaggttatctgcgtagctatgcttttaccgccattgatgtctggaaagatatgttactggggccttcttatgcgactccgttagcactatcaagagccggccttactttgagtgatttaacactaatagatatgcatgaagctttcgctgctcaaactttgagtaacttaaccttatttgcaagtgataaatttgctcaagagcaacttggactgtcaaaagcaataggtgaagttgatatggataaattcaatgttcttggtggctctattgcttatggacacccctttgctgcaacaggggcgagaatggtgactcaaacattacatgaactgaaacgccgaggtggtggctttggtttaacaacagcttgtgctgcgggcggattgggtgcagcgatgattttggaggtggaa

SEQ ID NO: 32774 - DNA, 984 bp, Proteus mirabilis
atgacaaattcaacaaataagccattgttaagtgtaaaagatctctgtgtcacctttggtactccagatggggatgtaactgcagtaaataagctcaactttgagctatctgcaggggaaaccttaggaattgtcggtgaatctggctctgggaaatcgcaaactgcgttcgccttaatgggattattagctaaaaacggtcgtactgctggaagtgcgcattttaatggtcgtgaaattttaaacttacgccaaagtcaattaaacaaaatgcgtgctgaagaaatatccatgatatttcaagatccgatgacctcacttaacccctatatgaaagtcggcactcagttaatagaagtgcttatgcttcataagggtatgagtaaaaatgatgcatatgcggaatctgttcgcatgcttgatgcagtaaaaatgcccgaagcccataaacgtatgggcatgtatccccatgagttctctggtgggatgcgccaacgggtaatgatagcgatggcactattatgtaagccaaaactattaattgctgatgagccaacaacggcactggatgtgactgttcaggcacaaatcatgacactgctaaacgagctaaaaaaagagcttaatactgccattatcatgatcacccatgacctcggggtggttgcgggtatttgcgacaaagtactggtaatgtatgctgggcgaaccatggaatatggtaatgcgcgagatattttctaccaaccatcacacccatattctattgggttgctgcaagcagtacctcgtttagatggtgaagatgaacgtttggcgaccattccgggtaatcctcctaacttattgcgtttacctaaaggttgcccattccagcctcgttgccaatatgcaacagagcagtgtttgaatagtgaacctcaattaacacaatttgctcagggaagattacgagcctgttttaaagcggcggaggagttagta

SEQ ID NO: 32775 - DNA, 834 bp, Proteus mirabilis
atgggacaagttctatttgttgtttggcgagaaagttttgaagctctgctggtggtagggatcatttatgcatggataaaacgctctcctacccctaaacaaggtatgaaatatctctggggaggagtaatagtaggaatactactctctattcttttagctcttagcatttatggggtatttagctccttagaagatatctggcaatctctgtttatggttatgatggaaatcattgcctgcctattaattgttcagatggtctattggatgaacaaacaaggtaaatcactaaaaaccaatatcgaaaacgaattgacacaaaaaacgcaacaacaaagtgtctgggggattttactgatcatcgccattgccattgcgagagaaggcagcgaagtggttgttttcctatcaagccatattatggctctcacagcacaaaccgcgttgtctttcttgattgaagtattcattggcctattgatagcgggactaactctatggttatttttgctaacatcaaaaatgatttcttggcgtaaattctttgttattaccggatttttactgcttttcctcgccgtttccttgctattaaaagcagtagaagagatagctaatctacttattgaaatggatattgaattacctgactttttgatttatccactatgggatcttagccatattttggatgattcaagcatttttggtaatttcttagtttcattctttgcttatcgctcacaacccatcggtttaagtgttgttacttttattgtgttttggttggtggtcgcactgttatttaaacaaggggatcgtcatgccaaa

SEQ ID NO: 32776 - DNA, 867 bp, Proteus mirabilis
atgtatgaagaactagcttatcatggcaacttcgatgaaataaaaaatgactactgctacgcacgctacttgttttttactgcccacagcatacctgacgaagaacaacacttctataactcaacatatcgacatgttgacgacatgtctcactcgataaacaaccttaaaatcagtcattacaaaacatcattccggatactttattcattattcgacaaaatagcttatttagtaagtcgcttttttgatcttaatgatataaaagatgacaacatgataagtattgacaatctatttcgtgacttcaagtcaagtaactggagaaaaagttggagtccaaataaaaagctagagactagcgacaatcatttcattcatgctttattttacatattaaaagatattcgcgacgtaaaaggcacttcatctgtttcaaaatggatagacccagacgctaaggcattttctgaaattaggaatgctatggagcatagatcactcaaaatagtagatgatttcagttatgaactgacaacctcatataacagttatcatgatggtgaattagaaaaacttaacctagaaataaaaaaaataaaagaacaattaaagtcctccttgcacactgaaaaaccgagaacactagaatccgacctgaaaaaacttgaatcggatcgttatgaaaagaaaaaattaagctcacattctctattaatacctttaggccaatttgagacccgattaatgacgctaatgaaactggcaagaaactctattatttacctatcgctatccattcacttcgaagaaaggaaacgtcccaaaaacaatctatacttgccaaagcacgttcccttaaaagat

SEQ ID NO: 32777 - DNA, 1377 bp, Proteus mirabilis
atggtgctgttaccgcttctcgtccttgcctatcaggcttatcaaagtttggatcagcttagtaaccaagccgctattaccaataaaaatgcgttagcggataccgagcgtagtgaggtgatgcgtaatttagctattgaaatggaaggaaattatcgacgatattgtgtattgcgtgataaaactgatgaagaaatgtatcaacagcgttatcaacaatacagcaaaatgttctttaccttgcagcagaccatcatccctctttctgagtctaaagaagcacaagccttgaatacttctttgaaaacgctcaaatcaattcaatgcaaaaatagtgaacccacttctcaaatgcaacaagcattagagcaattttcttatgccaataaccgcattgtcgtgttaaccaaagagattatttttagtcgtggcgagcaactacaaatggctattgctgaaaaagggcgttattttggttggcaaagtttaattgtttttgtttttagcctgattttaattgccttatttacccgtatgatcatcggtccggttaaaggtatagaaaaaatgattaaccgattgggggaagggcgtacattaaataataacttgaattcgtttcaggggccacgtgaattacgctctttagctcaacgtattatttggttaagtgaacgtcttgcatggctagaatcgcaacgccatgagtttttacgtcatatttctcatgagttaaaaacaccgttagccagtatgcgcgaaggaacagaattattagcggatgaagtagcagggcctttaaccttagatcaaaaagaagtcgtagctattcttgataatagtagtaaacaacttcaattattaattgagcaactacttgattataatcgtaaactttccgaagtacctcagcaaattgaggaagttgatttaaccacattagtgaatgatgtggtgttagcgcatagtttacccgcccgagcgaaaggcattaagacgataatttcacttgatctgaaaaaatgtcgagcagaaacgacgttattatcaagagttattgataatctctactcgaatgcggtgcactatggcgctgaatcgggtaatatctggatctctagttatcaaattgaacagaaaatagttattgatatagccaataaaggcactccgatccctgaatcagaacaaaaaatgatttttgagcccttttttcaaggttctctattacgtaaaggggctgtcaaagggagtggtttggggttaagtattgctcatgactgtatcaaaagaatggatggcgagttaaatattgttcattctgactatgctgatgtctgttttcgtattgaactaccgctactttctgagaataaa

SEQ ID NO: 32778 - DNA, 1980 bp, Proteus mirabilis
atgttcggaaaattaactctcgatgcaatcccgctacaagaacccattgttgtcgtaaccctaatcggcatcattcttggcggtcttgctgttgttggcgctttaacctatttccgtaagtggaaatggctatggagcgaatggttaaccagtgttgaccataaaaaaattggtattatgtatatcatcgttgcaatggtcatgatgttccgtggctttgccgatgccattatgatgagaagccaacaggcactcgcctcagcgggtgaagctggtttcttaccacctcatcactacgatcagatttttaccgcacacggcgttatcatgattttcttcatggcaacacctttcgttgtcggtctgatgaaccttgttgtacctttacaaattggtgcgcgtgatgtggcattcccattcctaaactcactgagtttctggttctttgtcgtcggtgtactgcttatcaatatctctttaggtattggtgaattcgcacaaacaggttggttagcttacccaccactttcgggcttggagtacaatcctggggtcggggtcgactattggatatggagtttacagatatccggtattggtacgcttctgacgggggttaacttcttcgccactatcctgcgtatgcgtgcaccaggcatgacaatgatgaaaatgccagtgttctcatgggctgcattatgtactaacgtactgattatcgctgcattcccaattttaactgtcactatcacactactgacgttagaccgctatcttggtacacacttctttaccaatgatatgggcggtaacatgatgatgtacatcaaccttgtttgggcttggggtcatccagaagtttatattcttattctgccagtctttggtgtgttctctgaagttaccgcgacgttctctaaaaaacgtctattcggttatacctctttagtcggtgcgaccgttgttatcaccgtcttatcatttatcgtttggttacaccacttctttaccatgggctcaggtgccaacgttaatgccttcttcggtatagccaccatgatcatcgctatacccacaggggttaaaatctttaactggctgtttaccatgtatcagggccgtatcgagtataaaagccctatgctatggacaatcggtttcttagtcaccttctcagtaggggggatgactggggtactattagcggttcctggcgcaaactttgtattacataacagcttgttcttaatcgctcacttccacaacgtcattatcggtggtgtggtattcggttgttttgctggtatgacttactggttccctaaagcatttggcttcactcttaatgaaaaatggggtatccgcgcattctggttctggtttatcggtttctttatggcctttatgccactgtatatccttggctttatgggtatgactcgccgtttaagccaaaatatcaacccagaattccacccaatgctgatggttgctgctggtggtgccgctctgattgctcttggtattgtttgccaagttatccaaatttacgtcagtatccgcgaccgccacttaaaccgtgatttaacaggtgatccatggggtggacgtactctggaatggtcaatttcttctcctgcacctttctataactttgccgttgaaccgcaagtgaaagctcgtgatgagtggtgggatcagaaagaaaaaggtactgcttatcagcgccctgcaaaatatgaacctatccatatgccaaaaaataccgcagcaggcgtcattatctctgcatttagcttagtgtttggctttgccatgatctggcatatctggtggttagcgattgttggtttcgcaggaatgatagtcacttggatcgcgaaaagcttcgatacagatgttgattactatgtccaagtacctgaaattgaaactatcgagaataagcattatgaagaactgaaaaaagcaggtgtgaaa

SEQ ID NO: 32779 - DNA, 1098 bp, Proteus mirabilis
atgagtaaattaagagtcgctattatttttggtggaaaatcaaccgagcaccaagtttcattacaatcagcaaaaaatattatcaatgaattagatcgaacgaaattcgacctttgtttaattgggattaatgaacaagggcaatggcatgaatatgctgaagacaattatttaattaatagcgataacccctcaactatctcattaagccaacctttgcgtccagtggctattattcctggtagtacccgtcagcaatttatctctttaactgatgggcaacctcttgcacaaatagatgttgtatttcctattgtgcatggtgcttatggtgaagatggcaccctacaaggactattacatatgattgatatgccatatgtaggccctaatatcatgagttctgcagcatgtatggataaagatatcactaagcgcttactggatgatgcaggattagcggttgcaccatttattacactgatggctcaccaattaaatgatatttcctataatgaagttgttgaacaattagggctccctttatttattaaaccagcaaatttaggttcttctgttggtatcagcaaagtcaataatgaagccgagtttaatgctgcattatccatggcatttgaatatgaccttaaagtgattatcgaaagtgctattgttggccgtgaaatagagtgtgccgttttaggtaatgaagagcctgaagttagcccttgtggtgaaattgtgttaaatgatgctttttatgcttataacacaaaatacattgatgacgatggtgcaaaagtagtagtacctgctgatttagataatgcgattagcttacatattcgccaaacggcattgaaagcttaccaagttttaaactgtttaggtatgtcgcgcgttgatgtgtttttaactgaagataatcaagtcattatcaacgaaattaatacattaccaggtttcactaatatcagtatgtatcctaaactgtggcaaagtacgggattagattatcaatcactcatcacgaaattaattgaattagcgctagaacatcataaaaaaacagccgtattaaaaactaagtgtgagctt

SEQ ID NO: 32780 - DNA, 1425 bp, Proteus mirabilis
atgatacagaatacttgtttaaatggtcataaaatagatatgcaattacagcaacgtgaattaacttatacccctgatttagcattacgggtatttgcgcctatcgcctctttgtcttggtctagtttactgcattcaggttttgccgaacatcaccataatcgttttgatattgttgtatccgatcctgctattaccttagaaacacgcaaacaaattaccactattaaagagaaaaccggtcgagtcaaacgctctaaaaaagatccctttacgcttatccaaacagcattagacgcttttaattttcatccagtcagtgatgaaaggcttccttttctaggtggcgcattaggtatatggagttacgatttaggtcgtcgcattgaaatattaccagaattagcaaaaaatgaacttaatttcgctgatatggctatcggtatttatgattgggcactaattgttgaccatcaactgaaaaaagccacattaataagctaccaagatattgacgcacgtctccaatggctaacaaagcacgctgataataacacaatagaaaaaaaagaaccttttgtcttaacttctccatggcaatcaaatatgagtagtgatgaatacaatgaaaaaattgctaaaattcatcaatacttactttcaggggattgctatcaagtcaatttagcacaacgtttttgtgctaattatagcggtgatgaatggaatgcatttttaacactaaatcaagcgaataaagcgccattttctgcttttatgcatttacctcatcattttgttatgagtatttctcctgaacgttttattcatttaagtgatcataaaattgaaacacgtccaataaagggtacccttccccgtaaagcgcatcccgatgaagatgatgaacaagcgcaattgttggccaattctcgtaaagatcgtgctgaaaacttaatgattgtcgatttaatgcgcaatgatattggtaaagttgccacaacaggatcagtcaaagtacctgagttattcgttgttgaacgctttcccgccgtacaccacttagtcagcaccattaccgctgaacttccagaaaatttaaacgcaactgacttattacgtgcggccttccccggtggctccattactggcgcacctaaaattagagcaatggagattatcgaagaactagagccacatcgtcgccatggatattgtggtgccattggctatattagtttttgtggtacgatggatactaatatctcaattagaaccctactgacggaaaaaaataaaatttactgttgggcggggggtggaattgtcgctgatagcgttgccgaacaagagtaccaagaaacctttgataaacttggtcaaatattaactgttttaagtgaagtttctcccgatgacacttat

SEQ ID NO: 32781 - DNA, 528 bp, Proteus mirabilis
cttgctcttagtttgctggcaggcattttgcctgtcacgcaagccgcagatgatccgactgaaacttttttatatgagcaagttagactaggcaactcgaaaagtaacgatgttttagtttctcaatcactgtatcgtttatcacttataaaaccgaacgatcctagtgtgttgttaatgcgtatccaatttgctgtaaaacaaaaagaaacagcaaaagcacaacaactggttgagcaattacgtatgcatggcgaaaatactgaacaatatcaacgtgcgattaagctactatcattaacccatgaagataaccgccaaatcctacaaaaagcctacctttatcagactgcgggtcgttatgatgaagccttgcaattatatgatgatatttaccaaggcacgccccccgatgaagggttagcccttgagtatctcaatgtattaattgctgcaaaccatgccaacaaaatggcacgtattaagcagatttatcacacttaccccaataaccaacagatagctaat

SEQ ID NO: 32782 - DNA, 1698 bp, Proteus mirabilis
atgaaaacgcataaagttaaccgggttcgcccctttagtgcatttattgatgcatgtgtaaaagagccttactcttttgcccgtttattaaaagatattattgcagggatcaccgtcggcattatcgcaataccactggcaatggcattggctattggtagcggtgttcccccgcaatacggtctttataccgcagctattgccggtattattatcgctgtaacaggtggctctcgctacagtgtttcagggcctactgccgcctttgtggtgatactttatcctgtttcacagcaatttggtttaagtgggctattaattgccactttgatgtctgggattattttagtggttatggggttagctcgttttggtaagctcattgaatatattcccgtttctgtcacattaggatttacttcggggattgccatcactatcgccaccatgcagatcaaagatttctttggtttagaaatgtcgcatgtcccagaaacctatattgataaagtaattgctctaggtgccgctctaccgacaatccatcttggagatacattaataggcgtaaccaccctcttagtattaatttattggcctaaattgaatttacgcctccctggtcatttaccagcattaattgccggtacggctgttatggggatagttaatttatttggccatgatgttgccaccattggttcacaatttagctatctattgcctgatggttcaacaggacaaggtattccgccgatcctgccacaatttgtgctaccgtggaatttacccagtagtggtgagtctattgcattaaattggagcacggtcagtgcgttattacccgccgctttttcaatggcaatgttaggtgcgattgaatcactcctctgtgctgtggtgcttgatggtatgacggggaaaaaacatcactctaatggtgagttagtcggtcaaggtattggtaatattgtagcgcctttctttggtgggatcaccgcaactgcggctattgcccgctcagcggcaaacgtacgtgccggtgcaacgtcccctgtatctgcgattgtgcactctttattagttttagtaactttactggttttagcgccttttctctcttatttaccattagcagcaatgtctgcattgttattaattgttgcatggaatatgagtgaagctcgtaaagttatcgatcttattcgtcatgcaccaaaagacgatattatcgttttagtattatgtttatcgcttaccgtgctgtttgatatggttattgcgatcactatcggcatcgtattagcctctttattatttatgcgtcgtattgctaatatgacgaaaataacagaatcaacttatactgatgatgataaacaattattagttgtgcgtgttaatggtccgctattctttgctgccgccgagcgtatttttaatgaattacgtgaacgtagtaaaggatataaaactcttattatgcagtgggatgcagtacctgtattagatgcagggggattacatgctttccaacactttgtggcggatgtgcaacatgatactcatattattgtttgtgatattcccttccagccattaaagacattagcaagagcacgagtaacgccaattgatggcacacttaatttttatccttcgctacaaaaagcgctggatgatatggaattaattcag

SEQ ID NO: 32783 - DNA, 1182 bp, Proteus mirabilis
atgagaaagttagaacatgcaaatctgttattactgattattgcactggttgctgtcggtcaaatgacacagacgatttatgttcctgtgattgctgatatggctgtctattttggtgagccaacaggtgctgtacagcaagtaatgggcgcatatctgttttcttatggtttttcacaattaatttatggccctatttctgaccgagtagggcgtcgtccggttattttagtggggatgagtattttctgtttagcgacgatcgtggctattttttcacagaacttaactaccttagtgatcgccagtaccttacaaggaatggggactggggtagcaggggtaatgacccgtactcagcctcgtgatctctataccggtactgcgttacgctatgcaaatagcttattaaatatgggggtgttagtcagtccactcttagcgccgatgatcggtggggtggtggcgcacttctttggctggcatgcctgttatatcttcctattattattaggaggaagtgtactctttagtatgtatcactggatgccagaaacccgacctgtacaggctgaaagacgcagtatgttgtcatctttttatttattgctgtccaacagtacttttagtgcctttttgatcatgttgatttgtgcattatcaggtattgccgtatttgaagcttccagcggtgtgttgatgggaggcgtgttgggtttaaatagtattactatcagtattctatttattttacctattcccgcggccttctttggtgcgtggtacgcagggcgtgaaggtaaaacctttgtgcaattgatgtggcactccgtattttgctgtgtagcggcaggtattttaatgtggcttcccggctggctgaatattattaatatttggactttactggtgcccgctgccctgtttttctttggcgctgggatgctatttccgctggcaacgacaggggcgatggagccattcccttatttagccggagcggctggtgcgttggtgggcggattgcaaaatgttggctcagggatagcaacgtggttctctgcactattgccacaacataatcaatttagcttaggaatgattatgtttattatgtcagtggctattatgttgtgttggatcccgttatcacaccgttttagtcatcagcagaatacggtt

SEQ ID NO: 32784 - DNA, 525 bp, Proteus mirabilis
atgaaattaaataaattagctttagttcttggtttaggtttatctgttgttgcgggttctgctttagcggcagatcaaggtcatggtactgttaaatttgttggttcaatcattgatgctccttgctcaattactcctgatactgaaaatcaaacagttccactaggtcaaatttctactgctgcattaaaagatggtggccgtagtaattctcgtgactttaaaatctctttagaaaattgtactacagagacttacaaaactgttcaaacaactttcactggctctgaagcaactgaagttttagaaggttctttaggcattgaaggtatcgctaaaaatgcagctgttgttatcaccgatgcgggtggtaaacaaatcaaattaggcaccccaagtgctgctcaaaacctgcgtgatggtaacaatgatctgaactttgctgcttatttacaaggttctgcatctgaagctgctgttccaggtgactttactgcaatcgcaactttcgcactgacttatcag

SEQ ID NO: 32785 - DNA, 1527 bp, Proteus mirabilis
atgcgaattggtatacccaaagagcgactttctaacgaaacaagagttgcagcaacacctgctacagtcacacaactcttgaaattaggatttacagtcgcgatagaaaatgaagctggcattgcttctagtttcgataatgacgcttatcaacaagcaggggctgagatcttagattgtcaaaatatttggcaatccgacattatcttaaaagttaatgcccccctagaagatgaaattgctttactcaaaaaaggctcgactttaattagttttatctggcccgcacaaaatgcaccattgctagaaaaattagctgaaaaagagattaatgtaatggctatggatagtgtaccgcgtatctcccgtgcacaatctttagatgcattaagttcaatggcgaacattgccggctatcgtgccgtagttgaagccgctcatgaatttggccgtttctttactgggcaaattaccgctgcaggtaaagtaccaccagccaaagtgatggtgattggtgcgggtgtcgctgggcttgccgctattggggccgcaggtagtttaggcgctgttgttcgtgcatttgacactcgacctgaagtcaaagagcaagtgcaaagtatgggcgctgagttcctagagctggattttaaagaagaagcggggagtggtgatggctatgctaaagtgatgtcaaaagcatttattgatgcagaaatggcattatttgcagagcaagccaaagatgttgatatcattattaccacagcattaattccaggaaaacctgcaccacgtttaatcactaaagagatggttgattcaatgaaaccaggtagcgtggtggtcgatttggcagcccaaaatggtggtaactgtgaatataccgttcctggtgagatttttaccactgaacatggtgtgaaaattattggttatactgatttagccgcccggttaccggctcaatcatctcaactttatggtactaacttagttaacctattgaaattactctgtaaagaaaaagatggtaatatcaatattgattttgacgatgtggttattcgtggtgttaccgttattaaagcaggggaagtgacatggccggcgcctcctattcaagtttcagcgcaacctaaagcagctcctgcagcaaaaccccaagaaaaacccgttgcgaaacctatttccccgtggaaaaaatatggtttattggctattgcctttttactgttcgcatggttggctaatgttgcgccaaaagagttcttatcacactttactgtcttcgcactttcttgtgttgttggttattacgttgtttggaatgtcagccattcattgcacaccccattaatgtcggtgacaaatgccatttcaggtatcattgtcgttggtgcattactacaaatcggtagtggtggttgggtaagctttttctcatttatcgctattttaattgccagtattaatatttttggtggatttaccgtcactcaacgtatgttgaaaatgttccgtaaagga

SEQ ID NO: 32786 - DNA, 807 bp, Proteus mirabilis
atgttcgataaattacttgaagtcaaaaacttatcaaaaacatttcgttaccgtacaggattatttcatcgccagcagttgaaagcggtaaaaccggtgagtttcactcttgaaccgaagcaaacactggcgattattggcgctaatggttcaggtaaatcaacattagctagaatgttatccggcgttacagagccaacggggggtgatatttttataaacggtcatcaattaagttttggcgattactcttatcgtagtcaacgcattcggatgatatttcaagatcccacaaactcactcaatccacgtcagcgtatcgggcaaacattagacttaccattacgacttaataccgaacttagtggcatagagcgagaaaaacgcatttatcaaactttgcggcaagtgggtctattaccagaacatgctaattactatccacatatgtttgcctcaggacaacgccagcggatcgccttagctcgtgctcttattttacagccacaggtgattatagcggatgaagctattgcctctttagatatgtctttacgttcacaaattattaatttgatgttagagctacaagagacacatgaaattgcctatatctatgtgacacaaaatttaggaatgactaagcatattagtgataaagtcatggtgatggataatggtgaagtggtcgagcgtggtaacaccgctgaggtgttggcatcgcctttacatgaagtgactcgtcgattagtggctagtcattttggggaagcacttacggcagaagcttggcgacaagatttacct

SEQ ID NO: 32787 - DNA, 2457 bp, Proteus mirabilis
atgcgagtgttaaaatttgggggaacttcagttgccaatgcagaaagggtactgaatgttgctgatatcgctgagaaaaaacgagagcagggacaagtcgctctggtattatcagcacctgccaagataacgaattacttggtggcaatgattgaaaaaacggcagaaggagaagaacctctcactcaagtacgagaagcagagcaaatcttcgctaatctattgcaaggtttacgagaaaatcaacctggttttgattaccaaggcttaaaagacaaagttgagcgagagtttgctgagattaaacatatcctgcatggtatctccctattagggcaatgtcctgatagcatcaatgctgcgatgatttgtcgtggtgaaaagctttcgattgccattatggagtcggtgttacaagctagaggatataacgttaccgtcattgatccggttaaaaatctccttgctcaaggtcattatctcgaatcgacagtggatattcctgaatcaactcgccgtatttccgcccttaatattccgaaagatcatatgatcttgatggcaggtttcactgccggtaatgaaaaaaatgagcttgtggttctcggtcgtaatggctcagattattcagccgccgtattagccgcgtgtttacgtgcacaatgttgtgaaatttggacggatgttgatggtgtttacacctgtgatccacgcctcgtcccagatgcacacctactaaaaggcatgtcctatcaagaggcgatggagctttcttactttggtgctaaagtccttcatccacgcactattgcacctattgctcaatttcaaatcccttgtttaattaaaaatacgggtaatccagaagcaccgggtacgttaattggtgatggtcaaaaagatgacagcacgccggtaaaagggatcactaacctgaataatatggcaatgatcaatgtatcagggccgggtatgaagggaatggtgggtatggcggctcgtgtcttttccgtgatgtcgcgagcaggaatatcggtagtattaattactcaatcttcatctgaatacagtattagtttttgtgtaccgcaaaaagagctaattagagcgcaaaaagcactgtcagaagaattctatctagagttaaaagatggcgtacttgatccgttagatattatgaacaatgttgctatcatctcggttgtcggtgatggtatgcgcacccttaaagggatctcagcccgtttcttctctgctttaactcgaggcaatattaatattgttgctattgctcaaggctcttctgaacgctctatctctgcagttattgctaatgatgcagcgacgaatgcggtgcgtttatgtcaccaaatgctctttaacactaaccaaatcgtagaagtctttattgtcggtgtcggtggtgttggcagcgcgctaatcgagcagatccatcgtcaacaagcatggctaaaaaacaaacatatcgacctacgtgtttgtgggattgccaattcacgtgcaatgctaaccaatatgcaaggtatcgatttagataattggcaacaagcgctacaagcagctaaagagccttttagctttagtcagcttattcgcttagaaaaagagtaccacttcctcaatcctgtgattgttgattgcacttcaaacgaaatgatttcacagcaatatgccaatttcttacaaaatggctttaatgttgttacgcctaataagaaagccaatacgatgtcgatggattactatcatcaaattcgccaatcagcggaagcatcacgtcgtaaattcttatatgacactaatgttggtgcgggtttacctgttattgaaaacttacagaacttgcttaatgctggcgatgagttggtgcaatttaatggcattctttctggctcactctcttatatttttggtcagctagatgaaggaaaaagcttgtctgaagcgacactttctgcgaaagaaaaagggtttacagagccagatccaagagatgatctctcgggaatggatgttgcacgtaaactgcttattctcgctcgtgaagcgggctatcaattagagttgagtgatattgatgtagagcctgttttacctagctcatttgatagtacaggtgatgtcgagagtttcttaaaccgcttacctcaagtagatgttgagtttgatgctaaagtcgaagaagcccaaaagtcagcgaaggtattacgttatgtggggatcatcaatgaagggaaatgccaagtcaaaataatggccgttgatgctaacgatcctctctttaaagtaaaaaatggtgaaaatgcgctagccttctacactcgctactatcaaccaattcctttagttttacgtggatatggtgcaggaaatgatgtcactgctgctggggtatttgcagatgtattacgtacactatcatggaaattaggagtt

SEQ ID NO: 32788 - DNA, 840 bp, Proteus mirabilis
atgctgagctatcgtcatagtttccacgctggcaaccacgccgatgtattaaaacatattgttcaaaccctgattattgagtctttaaaagagaaagaaaaaccgtttctttatttggatactcatgctggcgctggacgttatcagctcaccaatgcacatgcgactcgcacgggagaatacttagaaggcattgcacgcttatggcaacaagaagaggtgcctgagcttatcttgccttatttggaggcggtcggttcgttaaatacatctgatgagttacgttattatcccggctctcctttattggctgctaaattattgcgtgagcaagatctgttaatgctaaccgaattacatcctaccgatttccctttattacgtacggaattttcccgcgataaacgtgtgagagtgtgtcgggaagatggctttggacaattaaaatcaaaactccctcccgccagtcgtcgtgggtttgctttaattgatccaccttatgaacttaaacaagattatagtgcggttgttaaaggcattgtggaaggctataaacgtttcgccaccgggacctatgcaatttggtatcctgttgtgcatcgccaacaaattaaacggatgctaaaagagctagaggccaccggtattcgtaaaattctgcaaattgagttggcagtgaaaccagatagtgatcaactaggtatgacagcatcaggtatgattgttattaacccaccttggaaattggcatcacaaatggcgtctatcttgccttggctacataaaaccttggttcctgaaggtactggacacacattagttgaatgggttgtaccagaa

SEQ ID NO: 32789 - DNA, 699 bp, Proteus mirabilis
atggtactagtgagaaagttaaagaaactattaattattctaattgctttatggttagggatagttgtcctgttttcttttttaccggtgcctttttctgctgtaatgctacaaagacaaatttcttcgtggagtaagtttgatttttcttatgtatcccattctacatgggttaatgaaaatgagatatccccacagatctatttagcggtaatagcctctgaagatcaaaattttccaaaacattggggatttgatttcgatgcgattgaaaaagttttccaaaatagcctgcaaagctcaaaaacgatacgaggtgcctctactatttcacaacaaacggtcaaaaacttatttttgtgggatgggcgcagttggataagaaaaggacttgaagccggaatgacaccagtggtggagctgatttggtctaaaaaacgtattttaaccgtttatctgaatatcgtagagtttggcgacggtatttttggggttgagcaggcttcccagcactattttcgcaagccggctaaacaactcaccgcccatgaggcggctttattagccgctgttttacctaatccacatattcttcatgttaataagccttccgcgtatttgctaaaacgacagcagtggatcttaaatcaaatgcgattaatgggaggaacttcgtttttaagcaaaaatgcgttgtta

SEQ ID NO: 32790 - DNA, 2132 bp, Proteus mirabilis
gagaaatcaccggtattccagttttcagtgcgtcccgataaggtaggaattatcaccattaatgttgtagatgaaaaggtcaatacactgaaagctgcttttgttgaacagtttcaaaatgtattaaaacaggctcagcaacattcaggtgtaaaaggattaattatcacctcaggtaaacctgataattttattgctggtgctgatatatcaatgattgcagattgcaaaaccaaagaagaggccaccgcattagcaaaagcaggacaagatctttttactcaattagaaaattatcctttgcctgtcgtcgcagccatcaatggcgcctgtttaggtggaggattagaactagcattagcctgccatgggcgaatttgctccgataacagtaaaacacgtttaggccttccggaagttcaattaggattactaccaggttcggggggaacccaacgattaccacgtttaataggggttacgaccgccttagatatgatcttaactgggcgacaaattaatgccaaacgggctttcaagcttggcttagtcgatgacgttgtgccacaagctattttattagatgttgcagcccaatggattttaacagctaaaaaagctgctaaaaaacagactattatggagcgtttttgggcaaataccacattaggaaggaatatcctctttgatcaagctaaaaagcgcactttagctaaaaccaaaggtcattacccagcggcagagcgtattcttcacgttattgaacgaggcttagagaaagatattcaaacaggttttaaagaagaagctaatgcgtttggtgaattagccatgaccccggtttcatctgcattacggcatctcttttttgcctcaacagcattgaaaaatgaaacaggatcatctgcaaagccagataacttacaccatataggtattttaggtggggggtaatggggggcggtattgcttttgtgacagcaacaaaaggtaatttacccgttagaattaaggatattagtgataaaggtattgcgcaggcacttaactatagttggaaagcgttatcaactaaggtcaagaaaaaacggctctctgctcgtgaacgccaaagacaaatggggttattatcagggacattggattatagcggtttccatcaaactgaccttattgtcgaagctgtttttgaagatttggctttaaagcaaaaaatggtggctgatattgaagccttaggtgaaggcaagatcatctttgcttcaaatacttcttctcttcctatccataaaattgctgaaaaagcacaatatccagaaaaaataattgggctgcactattttagtcccgttgaaaaaatgcccttagttgaagtgatccctcatgaaaaaacggatgctaagacaatcgccacaaccgttgtttttgctaaaaaacaaggcaaagttgccattgtggtaggagataaacccggtttttatgtcaatcgaattctcgccccttatattagtgaagccttaacctgtttggttgaaggggaaacgatagagaatattgacaaagcattagttcaatttggctttccagtcggccccattcaacttttagatgaagtgggaattgatattggtactaaaataacgcctattttagtcaatgagtttggtgagcgttttgcatctcctcctgcggtggatgcgattattgcggatgacagaaaagggcgtaaaaacggtcgtggtttttatctctataatcagcatgccttacctttctctttaggaaaaaataaaaagcgtgcagacccgatgatttatcgcttattacaggttaaacctaaaaatcagttatcggcttcagaaataactgaacgttgtttattgcttatgcttaatgaagctgttcgttgtttagatgaaaacattattcaacaacctagggatggtgatattggtgctgttttcggtattggttttcctcccttctttggtggaccattccggtatatagatagtatgggaacaacaaaaatagtcgataagcttaatcaattaactgaaaaatacggtgaaaagttccagccatgtgagcgattagcagcaatggccaagttaaatgaacgattctatagc

SEQ ID NO: 32791 - DNA, 624 bp, Proteus mirabilis
atgaagatcgttgaggtaaaacacccactcattcaacataaattggggctgatgcgagatcatgatataagcactaaacgctttcgtgaattggcttcagaagtttccagtctactgacgtatgaagctaccgccgatttagaaacagagacggtaacaattgaaggttggtgtggcccggttgagatagaacagattaaaggaaaaaaaattactgttgtacctatcctccgtgccggtcttgggatgatggatggagtattagaaaatattcctagtgcccggatcagtgtagttggtgtttaccgcgatgaagaaaccttaaagcccgtcccttacttccagaaactagcctctcatattgaagaacgtatggcacttgttgttgacccaatgttagcaactggtggctctatgattgccacaattgatttattaaaaaattcaggctgtacttcaattaaagttttagtgttagtggctgcgcctgaggggatcaaagcattagaagaagctcatcctgatgttgagttatatactgcatcgattgataagcatcttaatgagcatgggtacattgtcccaggccttggtgatgcgggtgataagatatttggtacaaaa

SEQ ID NO: 32792 - DNA, 1848 bp, Proteus mirabilis
atgcctaaataccgttcagcaacaacgacacatggtcgcaacatggctggcgcccgcgcattatggcgtgcaacaggaatgactgacgctgattttggtaaacctattatcgcagttgtaaattcatttactcaatttgtacccggtcatgtgcatttgcgggatttaggaaaactggttgcagagcaaattgaagctgcgggtggtgtggctaaagaatttaatactattgcggtggatgacggtatcgcgatgggacatggtggcatgctttattcgttaccttcccgtgagttaattgctgattctgtggaatatatggtcaatgcacattgtgcagatgccatggtatgtatttctaactgcgacaaaatcacaccgggtatgctgatggcgtctttgcgcttaaatatcccagtcatttttgtttctggtggaccgatggaagcgggtaaaaccaagctttctgatcaactgatcaagttagatctggttgatgcgatgatccaaggggctaatcctaatgtcagtgatgctgatagtgaacaaattgagcgttctgcttgccctacatgtggatcatgctctggtatgtttacggcaaactcaatgaattgtttgactgaagcgttaggattatcgcaaccgggtaatggttcattattagcaacccatgctgatcgtaaaacattatttattaatgcgggtaagcgtattgttgaattaactaaacgttattacgaacaagatgatctatctgcattaccacgtaatatcgctaaaaaagaagcatttgaaaatgcgatgatcttagatatcgccatggggggatcaacaaataccgttttacatctattagctgccgcgcaagaaggtgatgttgattttaagatggaagatatcgacagactttctcgccaagttcctcatttatgtaaggtggcaccaagtacccaaaaatatcatatggaagatgtgcaccgagcaggtggggtgatggggattttaggtgaattagacagagcaggattacttaatcgtaatgttaataatattttaggcttaagtttgcctgaaacattagcacaatatgatgtgatgctaagccaagatgagcaagtgaaatcaatgtaccaagccggtcccgcaggtattcgtaccacaaaagctttttcacaagattgccgttggccgactttagataccgatcgtgaacaggggtgtatccgaagtaaagcgcatgcttatagccaagatggtggtttggccgtgttatcaggtaatttagcgcaagatggttgcattgttaaaaccgcgggtgtggatgaagataatttagtgtttagtggccctgctaaagtatacgaaagccaagatgatgcggtagaggcaattttaggtggcaaggtcgttgcgggtgatgtggtcattatccgttatgaaggcccgaaaggggggcccggtatgcaagaaatgctctatccaacctcatatttaaaatcaatgggattaggcaaagcgtgcgcattaatcacggatggacgtttttctggtggaacctcggggttatctatcggacacgtttcaccggaagcggcaaatggtgggatcattggtttagtggaagaaggggatattgttgatatcaatattccaaatcgcgaaattaacttacgggtagatgagaaaacactagcagcccgtcgtgaagcacaacttgctcgtggagataaagcgtggacacctaaagataggcagcgccaagtctcttttgctttacgtgcctacgcgtctttagcaaccagtgcagacaaaggtgctgtacgtgacaaatctaaactagggggc

SEQ ID NO: 32793 - DNA, 978 bp, Proteus mirabilis
atgcaacaacttgttgatgcgttttcccgcaaatttttctatttacgtctatcaatcacagacgtgtgtaatttccgttgcacttactgcttacctaatggctacaagccaaatggtcataagtcctttctatcactggatgaaatccgccgactgactcactcttttgctgaattaggcacagaaaaaatccgtttaacgggtggtgagcctacgatgcgtcgagattttactgatattatcgcgactattaatgaaaacccagccattaaaaagattgctgtgacaacaaacggctatcgtttagcccgtgatgttgcacaatggcgtgatgcggggctaagtgcgataaatgtcagtgttgatagcttagatccccgccaatttcatgccattaccgggcaagataaattccatcaagtgatggaaggaatagacgctgcttttacggcaggttatgacaaagtgaaagtcaatgttgtgctaatgcgcaacgtaaatgataaaaacttgcctgattttctccattggatcaaagacagaccgatacaactacgctttattgaactaatggaaactggtgatggtagtgatgtttttaatcgctttcatttatctggtgaagtgatccgccaacgtttacttaacgaaggttggctacaaattcctcgcgcccgtagtgatgggccagctcaagtctttactcatcctgattatcaaggtgaaattggtcttatcatgccttatgaaaaagacttttgtgtcacctgtaaccgtttacgcgtttctgcgattggtaatcttcatctttgcttatttggcgaaaatggtattcctttacgcgatttattggctgatgatgcacaacaacaagctctacaacagcgtattcagggtggacttcttcataaaagagaaacacattttcttcatcagggcgatagtggtattacccctaatctttctgtgattggtgga

SEQ ID NO: 32794 - DNA, 1041 bp, Proteus mirabilis
atgacaaaaaatttaaacgtggggattataggctatggttatgcaagtaaaacctttcatgctcccctgatcagtaccactgaggggttaacactatcagccatttcaagctctgatgaaagtaaagttatcgctgattttcctaatattacggtgtatgccaacccacaacgactgattgatgatccagacatcgatttaattgttattccaacacctaataacactcactatacctacgcctcacaagccttaaaaaacggtaaacatgttgttgtcgataaaccttttactttgacactcgatgaagcagaaaaattggcacaacaagcgaaagaagctaagagattactctcagtttttcataatcgtcgttgggatgccggttttcttaccgttcaaaaattactcgccgataaaacattaggtgaagtcagtgcctatgaagcgcatttcgatcgttttagacccgctgtgcgccaacgttggcgtgaagatgccggacttggtggaggactttggtacgatctggcccctcatttactagaccaagcggtatgtctttttggtcaaccttatgcaatcactgctgatattgctcagttgcgccctaatgctaaaaatgctgactactttcatacactattagactatggtcatctgaaagttattttacatgcctctatgttggttgcttcacctacgcctatttttgctattcatgggaccaaaggcagttatgtaaaatatggtttagatacccaagaagatgcattaaaagcgggttatcttccgactgaaatgtataactggggggctgatcctcaagagggtgaattaacattatcgacagagagtggtgaattagtaacaacaaagttaccgactctatcaggtaattatcccgcttattatcagcaaatttatcgtgcgattgcatttggtgaagagagtcctgttactgtgtcacaggccattaatgttatgcgtttaattgaagccgggagcctttcaaatcaatcaaaaaccacaattaagctg

SEQ ID NO: 32795 - DNA, 231 bp, Proteus mirabilis
atgaaactaaaaactattttaccgatttgtgccgcctctttctctttactgctattagcaggttgttcatcgccacaaaaaattgaaaccgtcgatgggcaaactattttgaccacagataaacctcaagaagatgagtctaccggattaattatttataaagatgctgaaaccggtgcaatcacacaaattaatcgtgatcaaattagaagaatggttgagcttgatgat

SEQ ID NO: 32796 - DNA, 1833 bp, Proteus mirabilis
atgaatatactctatttaacctttgtgctaccactgctgggatttttactgctcgcattctcaggtggtcgttggtctgaaaatgtatcagcatggattggcacgggcgctgttggtttatcagctttagtgacactttgggtggggatagatttctttgctcacggacaagaaacagaagtcttaacactctggacttggatgtcagcggggaactttactatcccatttacgttggtgcttgatggcctatcattaaccatgctaggtgttatcactggcgttggttttcttattcatatgtatgcatcttggtatatgcgtggtgaagaaggatattctcgcttctttgcttataccaacttatttatcgcgagtatggttgttttagtattggctgataatatgatgctgatgtatatgggttgggaaggggttggtttatgtagttacttattaattggtttctactataacaacccagctaatggcgcggcagcaatgaaagcatttattgttacccgtattggtgatgtcttcttagctatcggtatgtttatcctgtttgatcaattaggtacgctaagtttccgcgaaatggcggtactggctcctgaacaactgaccgcaggatcaagcatcattaactgggcaatgttaatggtcttagggggtgcggtaggtaaatcagcacaactgccattacaaacttggttagcggatgcgatggccggtccaacacctgtttctgcgttgatccacgccgccaccatggttaccgctggtgtgtacttagttgcccgtagtcatgcgctattcttaatggcacctgatatcttagaattagtcggtatcgtcggtgcagtgacattagtattagcgggttttgcggctttagtacaaaccgatatcaagcgtattcttgcttactcaaccatgagccaaattggttatatgttcttggcgttgggtgctcaagcatgggatggcgcaattttccacttaatgactcacgcattctttaaagcattactgttcttatctgcaggttcagtgattattgcctgccatcatgaacagaatatctttaagatgggcgggttacgtaagaagatcccatttgtttatgcatgctttttaattggtggaggtgctttagcagcattaccactgttaacagcagggttcttcagtaaagatgaaatcttatggggtgcgtacgcaaacggacatttcaatttaatgttagcaggtttaattggcgcattctttacgtcactttataccttccgtttaattttcatcgtattccatggtgaaaccaaaaccgaagcacaccaagttaaaggcttcactcatactttcccattagcggtattagcgttgttatcaacctttattggggcgttaattacccaaccgttaggcgatgttttcccagaaagcaccgttactcatgaaggtaagtatgtattagaaatcctttctggtgtggtagcgattgtaggcgttgccattgcagcatggttatacctgaaacagcgtcaacttgtttctcaggtggcaaataccaaaacagggcgtttcttctcaacatggtggttccacgcatggggatttgatgcactgtatgaggtgctgtttgtcaaaccttataaaggtgcggcatggcttatccaaaatgatcctgttaaccaattctttaatctctttggttgtctctttaaaggcgccaataaaggcttgagtttcagtgaaaacggattagcgcgttggtatgcggcttctctcggtttaggtgcagtgctggttatcgctctgctgcttctggtt

SEQ ID NO: 32797 - DNA, 534 bp, Proteus mirabilis
atgatattacaaagattatctctgagtactgcaatctttgccgctgtgatagctatggctaatgctgatcctaatatgcgttttcatggtgagttaattgatgagccatgtgtaataaaacccggtgatgaaattattgtcatcacgctggataaagtgactgatagtgctttttacaatggagtagaaaggaccaaaagccagcaatttgagatccatctatcggagtgcgatctctctatgaataacaaagtttccatcacatttaaaggtgatgaaaataaggcgatggcagggaaaggttttctagcattgagtccaataagtcgagcctctggtattgctattggtctagaagatagcgatggagtcctcttacccattaatcagccatcaaaaaatatggctttactttcaactaataacacattgaggtttagtgcttttatacaagcagaacctaccgcaattgctaatcaatcaataaaacgggggccttttagcgccattgctacattccatttaaattatgac

SEQ ID NO: 32798 - DNA, 2562 bp, Proteus mirabilis
atgactgacagccaaaatttcgaatcccacacccccatgatgcagcagtatcttaagcttaaggcagagcacccagaaatcttactgttttatcgtatgggtgacttttatgaactgttttttgatgatgctaaaaaagcctcacgcttattagatatttcattaacaaaacgaggtcagtcggcaggtcaacctatccctatggctggcgttcctcatcatgcggttgaaaactatctggctaaattagtgcaattgggagaatccgttgccatctgtgaacaaattggtgatccggccaccagcaaaggccctgttgaacgtaaagtgatccgtattgtcacaccgggcaccgttacggacgaagcgctacttgaagagcgccaagacaatctattagccgctatctggcaagataaaaatggcgcttttggttatgccactttagatatcacctctggacgttttcgggtcactgaaatgccggatagcgaaagtatggctgccgagctgcaacgcactcacccagcagaactactctatccagaaacctttgagtcaatggcattaatcgagcgtcagcaaggtttacgccgacgtccaatttgggagtttgagtgtgagaccgccaaacagcaacttaatttacagtttggaacccgtgacttaactggatttggtgttgaaaatgcccgacttgcactttgtgctgcaggttgcttattacaatatgttaaagatacgcaacgcactgcgttgcctcatattcgtagcattaccatggagcgtccgcaagataccattatcttagatgcagccactcgccgtaatttagaattaacccaaaatcttgctggcggttgtgataacacattggcatctgtacttgatctgtgcgtgaccccaatgggaagccgtatgctcaaacgttggatacacacccctttacgccagcgtgaacaattaattaaacgccaagatgcgattagcgccttacaacccctctattttgagttacagccttttttacgtcaggtgggggatttagagcgggtacttgctcgtttagcattgcgatccgctcgtcctcgtgacttatcacgtatgcgccatgcctttcaacaatatcaagatatccaccaagtgcttgatcaggcggatatgccctatattaaagaattacagcagcgtatcagccagtttgatgagttgcgtgaattactggaaaatgccattgttgaaacaccccccgtattagtacgcgatgggggggtgatagcccctggttataatgcagaattagatgaatggcgagcattggctgacggtgcgagtgactatcttgaaaagcttgaagttcgtgaacgtgaaaaatggggtattgataccttaaaggttggctttaatggggttcatggttactacatacaagtcagtcgcggccaaagcaatttagttccaatgcactatgtgcgtcgtcaaacactgaaaaatgctgaacgctatattattcctgaactaaaagagtatgaagacaaggtattaacctctaaaggtaaagcactagcgattgaaaaaatgctctacgaagagcttttcgaaaaactattacctcatctaaccgccttacaaaccagtgctgaagcgttagctgaaaccgatgttctggctaatctcgctgagcgtgcagaatcactcaattatacacgccctgaattaacagaaaaaacaggtattcaaatcactggtggacgtcaccctgttgtagaacaagtactgagtgagccatttatctcaaatcctctacaactcgcgcctcaacgtcgtctactcattattaccggccctaatatgggcggtaaaagtacctatatgcgtcaagcggcattaattacgctactggcttatattggtagttttgtgcccgcagaaaaagcggtaataggcccaattgatcgtatttttacccgcgtgggtgcctctgacgatctggcttcgggtcgttcaacatttatggtggaaatgacagaaaccgcaaatatccttcataatgccactgaaaacagtttagtgttaatggatgaaattggccgaggcacttctacttatgatgggctttctctcgcttgggcttgtgccgaaaatttagcgaatcgcattaaagcaatgacactctttgccacacactattttgaattaacaacactgccagaaaaactagaaggcactgccaatattcacttagatgcggtagagcatggtgagactattgcctttatgcacagtgttcaagaaggtgctgccagtaaaagttatggtttagcggttgcggcattagccggtgtgccaaaagaggtgatccgccgtgcaaagcagaaattaaaagagctggaaaccctatcaggtcattcaggggcaagccatgtagaaacgtcacaactgatgttattagcagatattgagccttctgaagttgaattagcattaaataaaattgatccggattcattaacaccaaaacaagcgttggaattgctctatcacttaaaagagctaaataaa

SEQ ID NO: 32799 - DNA, 1239 bp, Proteus mirabilis
gtgtctaagcgtcgtgtagttgtgaccggactaggcatgttatctcctgtcggtaataacgcagaagcttcttggaaagctgtgtgtgccggacagagtggtatcggccttatcgaagaatttgacaccagtcatcatgcgactaaattcgcaggattggtaaaagatttcaatcatgaagattacaatctttcgcgtaaagatgcgcgcaagatggatctctttattcaatatggtattgcagcaggtgttcaagccattgcggattcaggtcttgaagtaacagaagccaatgcaagtcgtatcggagctgctattggttctggtattggtggcttaggccttatcgaggaaaatcattcatcattaatcaatggtggccctcgtaaaattagcccattctttgttccttcaaccatcattaatatggttgctggccatttaagcattatttatggcttacgtggaccgaccatttctatcgcaactgcatgtacatcaggtgtgcataatatcgggcatgccgctcgtattatcgcttatggtgatgctgatgtgatgttagcgggcggtgctgaaaaagcaacaacaccattaggtgttggtggttttggtgcagtacgtgcattatcaacacgtaatgatgatcctcaagcggcaagtcgcccatgggataaagatcgtgatggtttcgtgttaggtgatggtgcaggtgtgttagtcctcgaagagtatgaacacgctaaagcacgtggcgctaaaatttatgcagaagttgttggttttggtatgagtagtgatgcttaccatatgacctctcctgcagaaaatggtgcgggtggtgcacttgcaatggaaaacgcattgaaagatgcgggtattactgctgctgatgtcggttatatcaacgcgcatggtacttctactaatgcgggtgatattgcagaagcgcaagctgttgaaacggtatttggcaaagggactgatgtattagttagctcaacaaaatcgatgacgggtcacttattaggtgctgccggggcgattgagtctatctttactattttgtctttacgtgaccaaattgtaccgccaacaatcaatcttgataatcaagatgaacattgtcaccttgatttcgtaccacataaagcgcgtaaagttgagaacatggattatgcactatgtaactcatttggctttggcggtaccaacggttcgattctctttaagcgtgtg

SEQ ID NO: 32800 - DNA, 2625 bp, Proteus mirabilis
atggctaaattattcaagacgattgatttaaatgttaaacataaaagtaagcagtgcagaggtcgttctgctaccacactgatctatttcgtgattatagggatggcaagtattgccagcgagtcatttgctgttagcaaagatattgaatttaactcagatattcttgacttaaaagatcgaggaaatattgatttatcaagcttttcccgtgcgggatatattactcctggcaagtatgagttaattattaatattaataacaatgaattaagtggaacttatcgtgttgactatattgtgcccaaagatgatcccaaggcaagcgaaccttgtatctcacctatattagttaagcagtttgcactcagaccagaatggttaaaaaagttaacttggaaagataagggtaattgccttaatgaggcatcgttaccaggtatgagcctgaggacagatttaggtagtggggttttttttattactcttcctcaagcttatctagagtattcatcaccgaattgggaatcgccttctttttgggacgaaggtattgctggattattgtttgattataacgttaatgccaatgtcagagcgcctagtgatggcaagcagaaacagcagatcaccgcaaatggtacggcgggggcaaatttaggtgtttggcgttttcgggcagattggcaagcaagttatgagcacacaacaggtgtattgcatagcacagaaaatcactggaattgggatcaattctatctttatcgagcgataacgaaatggggcgcccgtttagtcatgggggagacttacttacgttcaaacctattagataatttccgttttacgggaataagtttacttacggatgagcaaatgttgccccctaatttacgaggttatgcaccagagatcacgggagttgcaaaaacgaatgcaaaagtcaccgtgagtcaacaaggacggattatctatgagacacaaatcgcgcctgggccatttcgtattcaagatctgcatgatgcggtaagtggacgcttggatgttcgtattgaagagcaggacggaacaatacaagaataccaaattgatacagccaatattccttatcttacaagaccgggacgccttcaatataaagtatctgcgggtaagccttctcgattagatcataaaactgaagggcctattttttcaatgggagagttttcttggggagtgaataatggttggtctctttttggtggcactttagtttctaaggattataactcggcctcgctaggttttggacgagatctaatgatgttaggtgctatctcttttgatacgactcattcatgggcaaccttcgctaatgagaataaacactatcatggcagttcatatcgaattagctattcaaagcgttttgaatctattgatgggcaaatcacttttgcaggctatcgattctctgatcgtcattttatgagtatggatcaatatttagataggcgttatcgctatggcgcacaagaaaataataaagagctttatacccttacactgagtaaacaatttcctcaatggggacttagtacctatataaattataaccatcaaaggtattgggatagaccgaataacgactattacaacttctctttatcaaagtatctcgctatcgggaagtttaaaaacattaacattagcttatccgcttatcgtaatcgttttaatggcaatcatgacaacggcgtgtatttcaacattaatttgccttggcgtgatagagcaacgataagttataactcggtcataaataaagaaggtaactcacataatgtcagctatttcgatcgcattgatgataacaataattatcgtctaagtgcaggagttagtagtcgaggtaaaccatcggcggatggtttctttacacattatggtgatgttgctttagtaacggcttcagccagtcatattaacggcgactatacttcggcatctttatctttccaaggtggggcaacattaaccactaaaggcggggattttcaccgtagcaatatgccgggggcaacccgtttgttaattgatactcaaggtgtttctgatgtcccggtaaaaagtcttagtgccatatctcataccaatatttttggcaaggcggtgatccccgatattaatcactattatcgaggcagtgcttctatcgatcttaaacagctaccagacaatgttgaagcactacgttctattcatcaattaactttgactgaaggcgctattggctatcgtcaatttgatgtgattgccggacacaaagcgatggcaacagtacagttggctgaaggaggcgctccgccatttgcagcgacagtaacaacgcttaatggtcgagaattaggtgtttttaacgacggtggaaaggtttatttaagcggtattaattcaggcgatgtcttgtatgtacattgggatggtaaaaaccaatgccaattatccattcctaaattggcggatacacaactgatcacatcactgcttttaacttgctttcaaagacagccgactatttcaacatcattcctggaaacagataaaacgcaagcattacctcaacattcattccttagtaaa

SEQ ID NO: 32801 - DNA, 579 bp, Proteus mirabilis
atgatgatgtttagctttaagtctatcgctgctgatacctttttgatctttggtgacagcctaagtgccggatatcgccttcctattgaaagcgcatgggcgcaacgcctcgcggataagtggaaattaacttatcctgaaataaatgtcgtgaatgcaagcatcagtggcgaaaccgcatttcaaggtcaaaataggctccctgatttattaaaacagcaccaacctcgttgggttttgattgaactgggtgcaaatgatggcttacaaggctaccctgtagcccaaacgaaagaagcgttgcaaaacatcattacccaagtaaaagaagcgggagcaacgccactctttatgcaaattatgatttcgcctaattatggtaaacgctatacgcaatctttttctgcgatttacccacaattggcgaaagacaatgctcttgagcttatcccattttatatggagcaaatagcagataaacctgagtggatgcaaaacgacagcattcacccaaatgaagcggctcagccttttattgctcaatggatggataaaaccctatccccttacctaacacgt

SEQ ID NO: 32802 - DNA, 618 bp, Proteus mirabilis
atggcaagatatttgggtcctaagctcaagctgagccgtcgcgaaggtacagatttatttctgaaatctggcgttcgggcgattgacaccaagtgtaaactggaacaagcaccaggtcagcacggcgcacgtaaaccgcgtctgtctgattacggtgttcagttacgtgaaaaacaaaaagtacgtcgtatttacggtgttctagagcgtcaattccgtaactactacaaagaagcaacacgtctgaaaggcaacacaggtgagaacttacttactctgttagaaggtcgtctggataacgttgtttatcgtatgggctttggcgcaactcgcgcagaagcacgtcagatggttagccacaaagcaatcatggtaaatggtcgcgtggttaatattgcttcttatcaggtttccccgaatgacgtagtcagcgttcgtgaaaaatcgaaaaaacagtctcgtattaaggctgctttagagctggctgaacagcgtgaaaagccaacatggctggaagttgatgctgctaagatggaaggtgtgttcaaacgtattcctgaacgtactgacttgtctgcggacattaacgagcacctgatcgtcgagctttactccaag

SEQ ID NO: 32803 - DNA, 1011 bp, Proteus mirabilis
atgacgagtaagtcgggaaatcaacctcacacagatgaggcgcctgcaacgcttttggcagatacccatgatcaattaagccagcaatctattgatgaacaagctgcgctttggttcacccgtcaacatagtcagcaaatgagttcacagcaacgacaagcctttaaacagtgggtagcagataaagataatcaacaagcttatcaagctatcgcggaaatttggcatagttgtgaagccttaccacgccctactattgtgcctatagaaaaaaggaaatcttcactctggcgcccctttattcacactacagccgcactctgtttagttgctgtgttatatcttccttatagtcatttacctgccctgttaatggataatatgaccttagccaccagcaattttcctaaagagatgaccctcgctgatggctctaaagtttttttaaatagaaatacacaggtacgcgtctcgtatgtccaaacccaaagacgcctttggttagataaaggtgaggcttattttaaagtaaaacccaatccttatcggccattttatgtccatgctgatgagcgattaattaaagttgtcggtactgaatttgaagtgagtcgttatcaaaataatcaaattagtgtcgccgtacatgaaggcattgttgaagttaaagccacagaaaaatcccctgcgacttacctatatgctggctctcaagcaattagccaatcaactgataatcaatttgtcatttcctcagtcaatgctgattctgtagcaagctggcgttttgggcaactccatttctttgaacaaccacttggtgacgtgatcactaaattaaaaccttatctggatatcaacgttcatatctcatcagccgatgtagcaaaaataaaggtatcaggtgtagcaaatattaatgacgcgaaaagctttattactgcacttccgctacttttaccggttaatgttatttttactgataaaaataatgtgttaattatcaataag

SEQ ID NO: 32804 - DNA, 1389 bp, Proteus mirabilis
atgctaaagatttttaatactcttactcgacaaaaagaagaatttaaacctatccataaaggaaaaataggtatgtacgtgtgtggcatcactatttatgatttatgtcatattggtcatggacgtacatttgtggcatttgatgccataacccgctatttacgttatttagggtatgatgtgaattatgtgcgcaatgtcaccgatgtggatgataaaatcatcaagcgtgcgattgaaaataatgaaacttgcgaacaattaacgacacgtatgttagcggaaatgcataaagattttgatgcattgaatatcttacgccctgattcagagccacgagccacacatcatattgcagaaattattgctcttaccgagacattaattaaacgtggtcatgcttatgtagcagaaaatggtgatgtgatgtttgccattgataccgatccggattatggcttgctttctcgtcaagatttagagcaactacaagcaggggctcgggttgaagtcgctaacgtaaaacgcaatcctatggatttcgtgctttggaaaatgtcaaaacccggtgaaccaagttggacatcaccatggggagaagggcgaccaggctggcatattgaatgttcagccatgaatggtaaagaattaggtcatcattttgatattcatggcggtggttccgatttaatgttcccgcatcatgaaaatgaaattgcacaatcaacctgcgctcatgatggtccttatgttaattattggatgcattccggtatggtgatggtagacaaagaaaaaatgtctaaatcactgaataacttttttactattcgtgatgttcttgcctattacgatgctgaaacggtacgttatttcttattatcaggacactatcgtagccaactaaattataccgaagagaacttaaaacaggcgcgtaccgcattagagcgtttatatacttctttacgtggcactgatgcaaatgctcaacctgctggtggtgaagcgtttgaagcgcagtttattgaagcaatgaacgatgatttcaatacaccagaagcctattctgtgttatttgatttagcccgcgaagtgaatcgcttaaaaaccgtcaatatggaggcggctaatggtttagcagcggtgttgcgtaaattggccaaagtattaggcctattagagcaacaaccagaacacttcttacaaagtggtgcgcaagcagacgatgctgatgaagtagaaaaaattgaagcgttaattcaacaacgtaatgatgctcgtaagaataaagattgggcagctgcggatgccgctcgtgatgctttaacagcaatgggaattgtattagaagatggcccacaaggtacaacatggcgtcgtaatagc

SEQ ID NO: 32805 - DNA, 990 bp, Proteus mirabilis
atgaatctaaaaaagagatgttttagacaaattgctcctgcgcttattttttctttattaacaattggtgctttctcggtaaatgcgaatattgatgttcgcgatgaaaccttatttgaagcacatcagcgttttaaaacacaaattataaatgatagttttgacaatactgaagcaccttgggaagcgccagcagaaatattcaatgtagttaaatatcccaccaaactaggtgatatgtatgcttatttaacccctccgccggcgaataaaaaaaataaactacctgcggtgatttggctgaatggaggatatggtgggataggaggagatgattatttttggacaccacaaccagttgaaaatgaccaaacaggagcgacgtttcgtgatcctaatatggtactcatgataccttcttttcgtggtgaaaataccaaccctggtcgctatgaaatgttttatggtgaattagaagatttagactcagccagagaatatttagcatcattaccttatgttgatcctaaacgtatttacatagtaggacatagtactgggggaacgagagcattattggctagtgaatacagtgataaattcagggcaatattctctttaggaggaatacctgatcttaaactacgcacagaagggcggatgatggttgaattaccctttgataaaaataacgaagaagaatttaatgtccgttctgtataccgctatattaaatcaataaaaacaccaacattttattttgaaggtcatgattatttttgggatgaattcaatgaattacgtgtgtttgcaatggaacaggatattcctctgaaaatttataatataaaaaatggagaccattttaatattattgtccctgttagccaattaattaaagagaaaatattgcaagatactgatacaaataaagaaagtaatattcgattcactaacgaagaaattaagtggatcaataaaatggtgaaa

SEQ ID NO: 32806 - DNA, 1065 bp, Proteus mirabilis
gtgattgatagtgcaaatttattgactgcacaacaattcaaagcgttaaatactttattggttaacttcgaaaatagtcgtaatgatggatcacaatttgttgtctatatcgttccaacgacagggaaagaaaccatcgaatcctttgcttttcgtgtttttaatcaatggaagataggcagaaaagggaaagataatggattattgctcgtggtggcaattaatgatcgtaatgttcgttttgaagtcgggtatggctatgagggagcattaactgatgtactggcaggacgaattattcgcaatgaaatgttgccattttttcgttcaaataattattatgcaggcatcgaacaaggggttaaaaatgctattcaagccgttaatcatgaaccaataagtttcactaactcacagataaatactaatacacttaaaatattccacacacattttatcctaatttatttggtaatattaggcggtgtttattggtttcagttgatattctcgacgcgaaaaataaaaaccaaaattaatcaattattagcgcctagaggaagaaaaaagaaaaatccagcagaccaaaaaggtaagttaagtataaagcaacgtaaacagttgaaaaattatctgcaatattcgtactattttcctacattttcaacgttatttttccccatgacactctgttttgcggcggcgatgttttatacacaagtctttcttgatggtattattgataattttgttttagtgataatagtcatattgtcattattatgtaattttatcgtattagtggttttatttggtattatcaacctgttatttccaatttatcggcaacaacgaaaagaatggaaagcgatttgtgtcgctagtccgtttggttcaccgtttaatcaactgccatattcaaaacgtattcgtagacgtagtggttattcaggctctggtggttattcgagttcgtcttattcatcaagttcatccagctcttctagttcttctagcggtggcggcggtggttcgagtggtggtgggggtgcttcagggagttgg

SEQ ID NO: 32807 - DNA, 1203 bp, Proteus mirabilis
gtgggatcattcgatacagttattataggtgcaggggccgctggacttttttgtgcctctttagcaggacaagcgggattatctgttttagttttagataatggcaaaaaagccggcagaaaaattttaatgtctggtggtggacgttgcaattttaccaatatgtatatcgagccatcagcttacttatccgataatcctcatttttgtaagtcagcacttgctcgctatacacaatgggattttatcgagttagtacaaaagcaccatattgcttaccacgaaaagacattagggcaattattttgtgatgattctgcccagcaaattgttgatttattactcgcagagtgccatgaaggaaaagtaagtattcgcttacgtagtgaggtgactcaaatagagaaaaccgccgaaggctttactcttttggtaggagagaaaacaataaccgcctcctctgtagtgattgccagcggaggactttcaatgcccggtttaggtgccaccccttttggctataaaattgcgcaacaatttggacttaatgtattgcccactcgtgcaggcttagtcccttttacattacacaagccacaacttgaacaactcagcccgctctctggtgtggcgatccctgctattgtcaccgctgaaaatggcacccaatttaaagagaatattctttttactcatcgtgggctttccggtcctgctattttacaaatctctagttattggcatccgggagagaatgtgagcattaacttacttcctgacacggatttggaaggctatttacaagaaaaacgacaagcacagccgaatcaattattaaaaaatacactttctcgcctactaccgaagcgttttatagagataatgattgaaaataatcaactgcctgatacctcactggctcaacttagcaatgaacgtattacacaaataacgacgttgctacaagcatggcttgttttacctaatggcacagaaggttatcgcactgcagaagtcaccctaggtggtgttgatacccgtaatctctcctctaaaacgatggaagcaacaaagataacaggtctctattttattggtgaagtggttgatgtcacaggttggttaggaggatataacttccaatgggcatggagctctgcttatgcctgtgcccaagcattgatctctcgacacatgactaag

SEQ ID NO: 32808 - DNA, 849 bp, Proteus mirabilis
atgtctggaattaccgctgcattggtaaaagaactgcgtgaacgtactggcgcaggcatgatggaatgtaaaaaagcgctggttgaagctaacggtgatatcgaattagctatcgacaacatgcgtaaatcaggtcaagcaaaagcggctaaaaaagcaggtcgcgttgctgctgaaggtatcatccttgcagaagttgctgctgatggtaaattcggtgcgctggttgaactgaactgtgaaacagacttcgttgctaaagatgctggcttcatcgcattcggtaaagatgttatggctgcagtattagcagacaaaactgacgatatcgaagcactgaaagcgaaattcgaagacgctcgtactgcattagttgcaaaaattggtgaaaacatcaacattcgccgcgttgctattttagaaggcgaagagttaggtacttacctgcacggtgctcgcatcggtgttttagttgcagctaaaggcgctaacgaagaactgatcaaacacattgctatgcacgttgctgcacgcaaaccagaatatgttcgccctgaagatgtgcctgctgatgttgttgagcatgagcaccaaatccagatggacatcgcaatgcaatcaggtaaaccacgcgaaatcgcagaaaaaatggttactggtcgtatgaacaaattcaccggtgagatctctctgactggtcagcatttcgttatggatccaagcaaaactgttggcgatctgctgaaagaaaacaatgctgaaatcattaacttcgttcgtttcgaagttggtgaaggtattgagaaagttgaagctgatttcgcagcagaagttgcggcaatgagcaaa

SEQ ID NO: 32809 - DNA, 393 bp, Proteus mirabilis
atgcgtcattacgaaatcgtttttatggttcacccagaccagagcgaacaagttcctggtatgatcgaacgttataaaaccgctatcactaatgctaatggtcagatccaccgtctcgaagactggggtcgtcgtcaactggcttatccaatcaacaaactgcacaaagcacactacgttctgatgaacgttgaagctccgcaagaagtgattgatgaactggaaactactttccgcttcaatgatgccgtgctccgcaacatgatcatgcgtactaaacacgcagtgactgaagcttcaccaatggttaaagcaaaagacgaacgtcgtcgcgatgttgctgaagatcttgatgaagaagaagttgatgatgtagcagaggattctgaagag

SEQ ID NO: 32810 - DNA, 1977 bp, Proteus mirabilis
atgaatataaaatatcgtgctgatattgacggtttaagagcaattgctgttattttggttatcttctttcatttagataatcgcttaataccatcaggttttattggtgttgatatcttttttgtgatctcgggtttcttgatctcgttaattattaaaacatcacttttacaaggtcatttttcatttggtgatttttatattcgccgattatggcgtttacagccactctatctttttgttttagtagcagttcttgtaatttcaggtattttctatctacctagtgattatcttgatatcactaatagtgaaaaatatgcttcagcttttctgtctaacaaatattttgcaagagcaacgactagttatgcagcgcaagatgcactcttcttaccgttattacatacatggtctttagcaatagaatggcagtggtatctattcttaccttttgtactctattttcttcacaaaattaatcataaagagaaaataaataatttttattttattgtttttattacaataatttctttctccttggtgcttgtttatcaaaaagatcaacctaagaattattattactttagtacgcgtatatttgagtttatgttaggggcttgtgttgcttatttacccgtaaaagtaatcattaatcaaagagttaatagtgttattagtctcatcgccttaggggttatcttttgggtagccgttcaaaaagatgtgattgctggttatccgaatttcaatacgttatatgtttgtcttagtgttgcactaattatttatacaggacaacatggcagtattattcaaaaagtgttgtcattaaagccaatagtgatcattggattattatcttattcactttatttatggcactggcccttatttgctattgcgcgttatataggcgtatttaacaccgagatacaaaaagggttatttttagcattaacatttttactctctattttttcttaccttcttattgaaaaaccgtttagaagacagcgtttgaactttaaatattcgataacattattgtttgttatacctattttattggctttaggattaaatgcattaaatgaaaagtatcatggatttggagtaaggcttgggcaaaattacgttaatttagaaaacaaactcaatcaattcgattatcccaatcgaggtaattgtatgaattttcaagcctctgatcctgataagatgtgtcatattggtaaagtgggtagccagaaaaaagcctttttattaggggattcccatgctaatcatttttggggatttatggatattttaggtaaagatgctgagcttgatgtctatgcgcaagcaacttcatcatgcattactattcctaatatttatctttatgattggtctaatcataagaatacggtttatcaacgttgttatgatcaaacagcaaaatattaccagattattaaacataatcggtttgattatgtgatttttggacaggtttggaataattacgcctcaaatcatgttattaataaaataggtgataaaagaacggttgaggcatctcgtcaacgtgtggaaaaatcgatgcgtgaagcgcttgatatcattgttgctactggagccaaacctgtttttataaaaaccgtttattcaatgcctagtggttttatgacctgtttttatgaaaatgccaagttaagaaaagattttgctgataacaactgtaatcccaaaaactataaaggtgaggggaatacatggatgaaccaattatttgctaaattaaaacaggactatccaagcttaattattatcgatcctaaagatgtacaatgcgataaagatacctgcttaacagatattgaaggagtgccggtttatcgtgatgtaggacatattactgattatgcatcaacgatttttggcatgatgtatcttaataagatgggtaatccatttaaagagaaccaa

SEQ ID NO: 32811 - DNA, 756 bp, Proteus mirabilis
atggatgcacaactgtataaagagtttaaaattatagaaaaagcgttttggtcagagatatgtgaaaacaatattcgtattggtgatcatacccactgctttatgacaccgatggacgcgcctatttttaattttatctatcttcgtcaaggcgctagcgaaaatactttccaacaagcaagtacgctgttctcctcgcaaaaaaaaggtcacatgctggttctgccggaatctctgttgcctgaatttgaagagataataaaaaaagcaggttatacgggtgacggtatgacaaccgctatgtatctctcattgtctgatgcgacttatcccccctataaaaataacccgtgcgatattattttaactaaccatgatcttaaacagtgggcgcaaccattgaaaaccgcctttcctgttggtgacgatacgataactaatgaatatattcgttatcaccaaaaagcgttagataatggtgcgacgatccttcattatgcattattagttgcagggcagcctgtatcatcattaacgctgacattacatgataaactagcaagatttgacgatattgggacggatattgcctatcaaggcaatggttatgccacacatttaattactcacgtattagagttttgtcgagagcaaggtgtcgagcgttgtttcttagatgcgtcagcggatggtctagcgctataccgtaaatttggttttaagccactttttaactatttaagctttattaacgaa

SEQ ID NO: 32812 - DNA, 619 bp, Proteus mirabilis
atgatgctagctgatctgcgcttatatcaattagttagcccctctcttccggtaggtgcttttacttattctcaagggttagagtgggccattgaaaaaggttgggtatgctcagcagaaaccttgtcagattggttaagcgcacaaatgaccggaacattagccacactcgagcttcctatattgcggcaattacaaacgagtttggcaaagggtgatagcgatacagtgaaatattggtgtgactttatggtcgcaagtcgcgaaaccaaagagttaaggcaggaagagcgtcaacgggggatcgcttttgcccgtttacttcctcaattaggcattgaattagacgatacgttacaacagcgggttaaacagacgcaattaatggcgtttgcgttagctgccgtgcattggcatatcgatagtgaaaagctctgttgtgcctatgtttggggctggttagaaaatacggtgatgtctggggtaaaactggtgccattagggcaaagcgcagggcaaaaaatgttgtttgctctagctgagcagatccccgctattgttgagttatcggcacattggccacaagagaatattggcagttttacgccagctcaagtga

SEQ ID NO: 32813 - DNA, 2125 bp, Proteus mirabilis
acctttcaaacagcaccaccgtccccttcgttgctgactgaaaatacgctagatagtactttactaaaacactctattgaacaatttcagtcatggttagcagatgcttttcatcatgatgctgatgttgctttgttactacaagctcgtagtcactttatcgaccaactactcacacaattatggcgttatactgaattagcggatcaccctgatctctgtatcattgcagtgggggggtatggtcgccaagaattacaccctctttctgacattgacttgctatttttaagtcaacagcctcttcctccccaaattgccgaaaaagtgagtcaattaattaccttgctttgggatatccgtttagagataggtgtcagtgtgagaacgatggaagagtgccttttagaaggactgtctgatttaactattgccaccaatttactagaagcgcgtcttgtttgtggtaataacgcactctatcaacaattaattaaacatatttttagccaaggtttttggccatcgcctgatttctttgcagctaaaattgaagagcaagaacaacgtcatcaacgctttcatagcaccagttataatctagagcctgatattaaaagtagtcctgggggacttcgtgatattcacacccttatatgggtcgctcaccgtcattttggcgcaacatcaatatctgaaatggtcaactttggctttttaacccctgccgaaggacaagaattactcgagtgccaatataccttatggaagatccgttttgcgctacatttagtcctcaatcgttatgacaataggttactgtttgatcgccaattaagcgttgcccaacttttaaattatcaaggtgaaggcaaccaacctgtcgaaaaaatgatgaaggattactatcgcgttactcgccgtgtgagtgagctaaacgatatgctactgcaactctttgatgaagcaatcctcgcattacaacccaatgttaaacctcgccctcttgacaaagaatttcaattaagaggtacattaattgatgttatagacgatgaatgttttcttaatgatcctattgccattatgcggttatttttacgtatggcagagcatgcagagataaccggaatttattcgaccacactacgccatttgcgttatgcccgtcgtcatttagtacaacctttatgtgagtacccactagctagacaagtatttatgcaaatcttacgtcatcctagggcggtttcgggggcatttgtcccaatgcataaacatagtgtattaagtgcttatttcccacaatggaacaatattgtcgggcaaatgcagtttgatctattccatgcttatacagttgatgagcatactatccgtgtattacaaaaacttgaaagtttcgctgatgatgcaaatcgaaaccgacatcctctttgtgtcgatatctacccgaaactacctcaaattgagttattaagacttgctgctctatttcacgatattgctaaaggacgacatggtgatcactctttattaggtgcacaggatgttattagctttgctcaacaacatggactaaatcaacgagaaatcgctttagttgaatggcttgtaagtcatcacttacttatgtctgtaacggcacaaagacgtgatattcaagatcccgatgttatcttccaatttgcctctgaagtcaaaaatgagagccgtttacgctatttactctgtctcactgttgctgatatttgtgcaacaaacagtagcttatggaatagttggaaacaaagcttactgcgtgaactatttctcgctacggccaatcaattacgccaagggatgcactctattccagatttacgggaacgtatccgcgatcaccgtcagcaagcactaactattttacaacagcaacaggtcgatgaagaaaaactgcaagcgatttgggctcgttgtcatgcggactattttttacgtcatactccagagcaaattgcttggcatgctcaggcacttattgagcacaatagtgctgagcctatggtattgattagccaacaaaccgagcatggtggtacagaggtatttatttggtgtgctgaccgaccttctctatttgctt

SEQ ID NO: 32814 - DNA, 1002 bp, Proteus mirabilis
atgacaaccacactttttcagcacatgtggttatctcgtgaaaagcaattctctgcttttacgaatggtatcttattggacttttggaaccaacgacaggaaggcgaatttaccggagtcgatggcgtgagcattcgctatgctcattggcgctcttcatcacacaaaaaagcgttggtgatctgctctggtcgtagtgaaagttatgtaaaatatcctgaagtggccttcgatttttatcatcttggttatgatatttttcttctcgatcatcgggggcaaggattatcagggcgcttattagatgatccgcaaaaaggccacgtagaaaaattcagtgattatgtcgatgatttatcgacatttattgatactatcgttttgccttatcactatcagcactattttgcgttagcccattcgatgggcggcgctattttagccagctacctattacgtaaacctgatattttccaagccgccgcactgtgtgcgccgatgtttgggattaatttaccaataccacgctgggtggctaattttttagttaaccgtgcagaacaaagtgtttcagaacgaaataattacgcggtatcaacgggcaaatggtttcctttgccatttatcttgaatgtattgactcatagccatgaaaggtatcgtcgatacttacgttactatgccgatttccctcaattacgtttaggtgggccgacctatcattggatgaaagagagcctagaaacgggggattggctgattgaacatgcaaaagagattaacacccctttgctagtacttgaagctgagctagataaagtggtggataatcggggagtaagggctttctgtgatggttatagtcagtccagaacaagagaagaaaagcaaaaattgccacttgtgattgaaggtgcgcaccatgaaatcttgttcgaaatagataagctacgctcacaagcattaattgaaatctgtgagttttatgataagcatttattt

SEQ ID NO: 32815 - DNA, 342 bp, Proteus mirabilis
atgactatggaaaatgataataaaggttatttattgacacttatttgtgataacagtgatgataaagcagagaaaatcttccttaatcctaagatactttatattcctgatgttgccactaaagaaattttgttattaactaacgaattaaagagcaaaatagatctctcagcccaagcgctaactttaacgctcaccaataaaaataatggtgtttcagtggataaagaatgcgagataaaagatttacttgatcctgatatggcgagtctaatggttaaagatttaatcaatatcgtccgtggttatgatatggatgaagaagccaatgtttgtggttgg

SEQ ID NO: 32816 - DNA, 729 bp, Proteus mirabilis
atgcgtattcctcgcatttatcatccagagccactcagtgcaggtacacaaacttcattagcagaagaagctgcaaatcacgttggacgagttttaagaatgtcaaaaggccaaaaactggcactttttgatggctccaatcaagtatttgatgctgacattatcgaaagcagcaaaaaatcagtgattgtgcaggttaatgaaggacaaatggatgatagagaatccccacttgatcttcatttaggccaagtactttcacgtggtgagaaaatggagtttactatccaaaagtccgttgaattaggtgttaacaccattactccgctgatctctgaacgttgtggtgttaaactagatcctagtcgtttagaaaaaaagcatcagcaatggcaaaaaattattatctcagcctgtgaacaatgtggcagaaataaaattccacagcttatgccggtgatgtcattagaggcgtggtgtgcccaaacggatgatagcttaaaacttaatttacaccctagagcaagccaaagtattaataccttgccacttccagttaaaaaagtacgactattaattggccctgaggggggattatcccctgaagaaattgccatgacagcaaaataccattttactgatattttattaggtcctcgtgtattaagaactgaaacaacagcactcaccgcaatcaccgctttgcaggttcggttcggcgatctggga

SEQ ID NO: 32817 - DNA, 1245 bp, Proteus mirabilis
atggatatgaaaataacttctcgcctacttattatgatgtttgtgcaatatttcatgcaaggagcatggaatatgaccatgggactcgtattaagtagttatggtatggcaagcattatcggcaatgcttatgccttattaggtgtcgcgacaattatctcccccttatttattggtatggtcgcagatcgtttctttgcttcacaaaaagtcatggggatacttcatttaattaatgccgtcgttattctctgtgttccccaatttattgaagcacaaaacagtggcatgacattatttttaatttttattattggcttattgttttatccaaccactgcgctatctaatagcattagtttctcccatattaatggggttaaatatttcccaattattcgcgtatttggtacgtttggttttatggcaattggttttatattgggtgaaatgggcttctctggtagcacaatgacttggtatatcgcttctgcagttggtgtattactcggtttctattgttttacattacctaatacgccacctaaagcgaaaggccagcctttctcactacgcgatattttatgtttagatgcattgtctttatttaaagatcgctactttgctattttgatgtttagcatctttattttaatgatccccaaaacagcttattctgcttatattcctgtctttattaaagcattaggctttgataatgcagcttctattatgcaaatagggatcgcttgcgaagttctgtttatgtttgttttgtcattcttcttaatgaaatttggcttcaaaattacactactgctaggagccgtgagctggatcatacgctctatgtttttctcttatgctgcagtaaatacagagctttactttatcgtcatcggattaatgctacagggattatgttgggatttcttctttactgcaggagatatctatgtcgatcgcaaagcaaaacctgaaattcgtgcacaagcacaaggtctgcgctttattgtctctaatggtttcggcttactatttgcttccactatttgtggtcaaatctttaacacaaccgtaactgaaacaggtgatgcagcattaccacaatggtcaacattctgggtctatcctgccattgtagcggcggtggtaaccctattctttattttcttctttaaagatgatgtttctaaaaaaagaaatagtgaaaataaagaaacatcacgaggaattacagcacct

SEQ ID NO: 32818 - DNA, 951 bp, Proteus mirabilis
atgaccaacaaattaacttctttgcgtaaactgactacagttgtagctgatacaggtgacattgcagcaatgaaactgtatcaacctcaagacgcaactaccaacccttctttaattttaaatgcagcccaaattcctgaatatcgtaaattaatcgatgaagcgattgaatgggcgcgttcacaaagcgattctcgcgagcaacaaatcgttgatgcgtgtgataaacttgctgtcaatatcggtttagaaatcttaaaactgatcccaggtcgtatttcaacagaagttgacgcacgtctttcttatgataccgaagcctgtatcgtcaaagcgcgtcgtttaattaaactgtataacgaagcgggtattagtaacgatcgtatcctgattaaacttgcttctacatggcaggggattcgtgcagctgagcaattagaaaaagaaggtatcaactgtaacctaactttactgttctcttttgctcaagctcgtgcatgtgcagaagctggtgtatacctgatctctccattcgttggccgtattatggattggtataaagccaatacagataaaaaagagtttgcaccagcagaagatccaggtgttatttctgtaactgaaatttataactactataaagagcatggttataacaccgtcgttatgggagctagcttccgtaatattggtgaaattttagaattagcaggttgtgatcgcctaactatttctcctgcgttattaaaagagttatcagaagcacaaggtgaagtagagcataaactatcctttaatggtgaagttaaatcacgtcctgcgccaatcactgaagctgaattttattggcaacataatgctgatccaatggccgttgataaattatctgatggtattcgtaaatttgcggttgatcaggaaaaattagagaaaatgattgcagatttatta

SEQ ID NO: 32819 - DNA, 862 bp, Proteus mirabilis
cttatagccgtagccgttattatcgtaacggtctatttgctaataaaaaaatatgaaacccgtatggtattgatcggtgccggcttattgttatgtattttaagtctgacaccgctcgatgctttcactgcatttagtgatcgcatggtttcatcatcattaattcaagctatctgttcaagtatgggttttgcctacgtgatgaaatacaccaagtgcgatatgcacttagtccatgttttatcaaaagtcctgactcgtcttggtttctttcttattccagcaacagtgatcgtcacttattttattaatattgcgatcccatcagcagccggatgtgcagcggccgttggtgcaacacttattccgttattaatcgcggcacgtattcaccccgcaatcgcaggtggtgcggtgttatgtggtactatcggttccatgttaagccctggtatgtcacataacgcttttgtggcgaatatggccaatatggaagtcgtcgatttaatcgctcgccatagcccatatagtttaatggcaggagcaatagcagcggtttcactcgctgttgtcgctttagtgaaaaaagagtttaaagtctcttctgtaaccacagatgtcgccaactcatcttctcaagcaacaccagaagcagtacgccctaattatttatatgcaactgcgccttatatcaccattaattctattaatactgcatttattagaaccatttagtactgttaaactatatatgccagcagcaatgttaattggtgccatttatgcactgatcatcacattaaccaatccggatcaaattactaaagagttctttaaagggatgggtaatgcttatggggat

SEQ ID NO: 32820 - DNA, 552 bp, Proteus mirabilis
gtggtaacaatgagcgaacaaaaaacctttaaagagcctgtagaacctattgttatgggtaagttgggctcaccttacgggatccgtggttggctcagagttttttcttccaccgaacatgccgaaaacatttttgaatatcaaccgtggtttattcaacgacatggtcaatgggaatccattgagatagaaacttggaaacaccacaatcaagatattatcgtcaagctaaaaggtattgacgacagagatgctgcaaatattttgactaattttgaaattgtcgtaagtgctacacaacttcctgatctagacggtgagtattactggaaagatctgatgggttgtcaggtagaaactgacaagggctacgatttaggtgtcgttaacgacatgatggaaacgggctcaaatgacgtcatggtaatcaaagcaaatctgaaagatgcattcggtgtcagggagcggttagttccgtttcttgatgggcaggttatcaagaaagtcgatctctcagcgaaaaaaattatcgttgattgggatcctggtttt

SEQ ID NO: 32821 - DNA, 777 bp, Proteus mirabilis
atgttgaaaattgctgatactacattcacatcaaggttatttactggtacaggtaaatttgcgacaccaacactcatggctgaagccattaaagcctctggtagccaattagtcacaatggcaatgaagcgtgttgatttaaaaaatggcaatgatgatctaatcgcccctcttaaatcattagggataaaattattacctaatacttctggtgcaaaaacagcacaagaagccgtttttgctgcacgattagcaaaagaggcctttgatacccattggatcaaattagaaattcatcctgataccaaatacctacttcctgatccaatagaaacacttaaggcggctgaacttctcgttaaagaaggttttgtggttttaccttattgcagtgctgatccggtattatgccgtcgcttagaagaggtaggatgcgcagctgtaatgccgttaggttcacctattggttccaatcagggtttacaaactcgcgattttttgcggattattattgaacaaacctcaatacccgttgttgttgacgctggtattggcgcaccaagccatgctcttgaagctttagaattgggtgcggatgctgtactcgtcaataccgccatagccgtagctaaaaatccagttttaatggctcaagcttttaaagctgcaattgatgctggagagcttgctcgacaatctggactggctgtaccgactgcaataacacatatgcaagcacaagcctctagcccattaacccaatatttagaggctttc

SEQ ID NO: 32822 - DNA, 2601 bp, Proteus mirabilis
atgctaaaatctaaaactatatgttttaatttatatatctttttaggtacatgcttttctggtgtggtgtatgcggatagtttttttaatcctaacttaatttcaaatattgataatgaagtagcagatttatctcgatttgataaaggtgaaggccaacctgaaggaatgtattcagtagaaatttatgtaaacgatgaatatgttgaaacaaaaaatttaatattttatgaaagcgatgcatcatccgatgatacaggtttattaccttgtatagataataaaactttgacaaattttggaataactttaactgaaaatagcaaaaagaaatcagaagaggtagaaagtaaagatagtgcttgtgagaatattttagataaaatagaaaactcaagtgttaaattcgattttgaaggacaaaaattatttttaagtattccacaaataatgtttaaaaataatgttcgtggctttatcccacctgaaaaatgggataatgggattaatgcgtttttactaaattataatttcacaggaagaaatagtaagaactttaaggataacgttgataataataattattttttaaacttaaatcctggtattaatcttggttcatggcgatttagaaatgaaagttcatggaactatgccagtggtgaaagtaagcaaaataaatggaggaatataagaacatatgtacaaaaacctattattccattacgtgctgaattaacccttggtgactctttttctaatggaaccatttttgatagtcttggttttagagggattaagctagaatctgatgataatatgttgcctgatagcatgagaggatttgcacctacgataaagggtattgcgaatagcaatgctattgttacagtcaagcagaatggttttgttatttatcaaatttctgtacctccaggtgcatttgaaataaaagatctctatgccacatcaagtagcggtaatttagatgtcacaatcaaagagaataacggtaaaattacacaatttgttgtaccttattcaaatgtgcctattttacaacgtgaaggacgcttaaaatacgaattgattggaggggaatttcgtagcggagcagattatcaagataaacctaattttggtcaattaagtttagtatatggcttaccttataatatgacgttatatggaggaagccaattttcaaataattatcaagcctatgcgattggtttaggtggtaatctaggcacctttggggcgatatcagcagatgtaatacaggcgaatagtatattgccaaacgatgagcataaaaaagggcagtcattccgattactctatgctaaatcgattaatagcacaggcactaactttcaaataatggggtatcgatattcaacgcaaggctattataccctaaatgaagttagttataaaaaaatggcagggcgtgaaatagtaacagataatggaataataagagatgaggataacttatctaactactataatttaaattattctaaaaaagggaggtttcaacttaatataaatcagcaaattaccaataatagttctttgtatattttaggctcttaccaaaactattggcgcacaactgaaactgaacagttatggcaactgggttataatgctaatattgataggataaattatagtcttagtttatcgaaattaaaatcaccgggtatgcgtggtgataataaaaatgtagcttttaatatatcaattcctcttaatgatgtatttaaccaacaaactgtaagtgacttacattcaagtagaaatagtatgtatgctgtttactcaatgaatagaagcgatgacaatgtttgggtcaatcaagtgggactaacaggaactctccttgaagacaataatttaaattataatattcaacaaggatatacgcataatggttctggttattcaggaatggtttatgctaattataaaggtaaatatgctaatataggtagcggatataattatagtaatgattggcatgagtttaattatagtttaaatggtggtgttgttgctcatgcaggtggtattactttaactcaacctttaggggataccaatattcttattaaagcaaatgatgctaataatattaaagtagaaaatgcaaatggtatattaactgataataatggttatgctgtcttaccgtttgcttcaacatataaaaataatcgagtttcattagatgttaattcattagaagaaaatattgaattagaaaatacgattattaatgtagttcctactaaaggggcattggttgaagctaattttaaaacgaatattggctatcgagcaatggttacattaagcaaaaaagatggcgctattatacctttcggtgcgatggttgttgatgaagagcgttccgtaagtggtattgttggcgataatgggaatgtttttatctctggtttagcacctgttggtaggctaaaagcaaaatggggaaaaatggctgatcaacaatgtatattcgattatcaaattaatgagaagtcatcaaaagaaaaaggtatctattttatttcttccacatgccaatat

SEQ ID NO: 32823 - DNA, 699 bp, Proteus mirabilis
atgattaaaaaatatattgtttatataatatcatttgtctttacattctcatgttatgcttctattcaaattaataaggatagatttttttataaagaacaagataaggaaattctatttgacataagaaataaaagcgaacaaaaaacctatattattcaaagttgggtatcacactataacaaagaagataatagtgaggcaccatttatcatttctcctagtttaataagattagcacccaatgaaaattttacattaaaaattatcaaaacggatgatataaaagaaatcaaccaagaatctgtatatagagtaaatataaaattagttccagttatagatgatgagatggctgataaaaacttgcttcttatctctttaaactcaatatataatcttttctatacacctagcgatattattaacaaaagtgataataaagatattaatttttttattaatgatgaaaattttattaaaataaacaaccccactccttattttattaccatagcagaagcaaaggtagataacattgatatattaaatgagcgaataaccctatcgccatttaaaaattacagtataaaaaataaaaaaataactaaaaatattaaagataaaaaagtacattggaagagagtcgatgagtatgagcagactatcattgcaaccccaaaggaacttatttatgag

SEQ ID NO: 32824 - DNA, 540 bp, Proteus mirabilis
atgaaaaaaacagatccattgagtttgtttaaaaaacagatcgacaatctcgccgaaaccttagcgccaattgcaaacaaaaaaattgcagcaccttgcttcgacacagcactatttcaccaccgtagtgattctcttggtggttatatgcaacagatccgcgataattttactcagttaataacttgtgttgaggcacaacgtagccagcaagttaagtttctggcaacacaaatcctacaacaaattgaagcattaactcgtgaattatcgacacaaacactaagaaagcaagaaaaccagcttagtcaacgcaaaaaaagtgtcgatttataccaaaaacttgcccaacatcaggattacgagcgccgattacagtcgatgatccaagatagagagcttgctttaactcaagcacaaggctttgtacgccaacaagaattacaaaaagagattgctgctcttgaaaatcgcctagcgcgttgtaaaagtgccctagtttctatagaaaagagtattgaacgacaagaagataaatat

SEQ ID NO: 32825 - DNA, 603 bp, Proteus mirabilis
atgcaaactagccctcttcttgaatcattaatggaagcgttgcgttgtttacccggcgtcgggccaaaatcagcgcaacgaatggcttttcatctgcttcaacgtgatagaagcggaggaatgcgacttgcacaagcattaacgcgtgcaatgtctgaaattggtcactgttgtgattgtcgaacatttactgaagaagagcgttgtacgatctgtgctaatgctcgacgtcagcaaaatggtcagatatgcgtagtggaaagcccggcagatattcatgctatcgagcagacagggcagtttgcaggtcgatactttgtgttaatgggacatctatctccgctagatggcattggtcccatggatattggcttagatagacttgaagagcgtctaagccaagagtctatatcagaagtgattttagccaccaatcctacggtggaaggtgaagctacagcaaactatattgctgagatatgcgctcaatatgatattgctgctagcagaatagcacatggcgtgcctgttggtggtgaattagaaatggtggatggtaccacgttgtcacactctatcgcgggacgccagaagatccactat

SEQ ID NO: 32826 - DNA, 6740 bp, Proteus mirabilis
atcaaaagacaagaagtctatatgggtgaaatcccattaatgaccgataatggtacttttgttatcaatggtactgagcgtgttattgtttcccagttacatcgtagccctggtgtgttctttgatagcgataaaggtaaaacgcactcttcaggtaaagtactgtataacgcacgtattattccttatcgtggttcatggttagacttcgaattcgaccctaaagataatctttttgtccgtattgaccgtcgtcgtaaattaccagcgactatcattttacgcgcaatgaactacagcaccgaagacatcttaaatctgttcttcgagaaaacaacgtttgaaatcagtaataataaactgatgatgacgttagttcctgagcgtctgcgtggtgaaacagcttcatttgatattgaagcaaacggcaaagtttatgtcgaaaaaggtcgccgtattactgctcgtcatattcgtcagttagaaaaagaacaaattgagcgcatcgaagtacctgttgaatacatcgcaggtaaagtagtggctcgtgactatattgatgaagcgacaggtgaattgatttgtgctgctaacatggaaatctctttagatgtgttagctcgcttaagtcaagctggtcataaaaccatcgaaacactgtttaccaacgatttagatcatggtgcttatatttcagaaactattcgcgtcgatcctaccaacgatcgtttaagcgcattagttgaaatctatcgcatgatgcgtcctggtgaaccaccaactcgcgaagcggcagaaaacttatttgagaacttattcttctcagaagatcgttatgatctctctgcggttggtcgcatgaaattcaaccgctctttaggtcgcgaagaagttgaaggttctggcatcttaagccaagaagatatcattgaagtgatgaaaaaactgattgatatccgtaatggtaaaggtgaagtggacgatatcgaccacttaggtaaccgtcgtattcgttctgttggcgaaatggctgaaaaccaattccgtgttggtctggtgcgtgttgagcgtgcagttaaagagcgtctatctttaggtgatcttgatgcattaatgccacaagatatgatcaatgcaaaaccgatttctgctgcagttaaagagttctttggctctagccagttatcgcagtttatggatcagaataacccgctgtcagaaattacccataaacgtcgtatttctgcattaggccctggtggtctgactcgtgaacgtgcaggcttcgaagttcgagacgtacacccaactcactatggtcgtgtgtgtccaatcgaaacacctgaaggtccaaatatcggtctgattaactcattatctgtttatgcacagactaacgagtacggattcttagaaacgccttaccgtgttgtagaaaacaacgctgtaacagatgaaatccactatctgtctgcaattgaagaaggtaacttcatcattgctcaggctaactccgtattagatgatgatggccacttcgtagaagaattagtaacttgccgtcataaaggtgagtcaagtttatttagtcgtgatcaagttcagtacatggacgtttcaactcaacaggttgtttctgtcggtgcttcactgatcccattccttgaacacgatgacgccaaccgtgcattgatgggtgcgaacatgcaacgtcaggctgttcctacacttcgtggtgataaaccactggtaggtacaggtatggaacgtgctgtagcggttgactccggtgttactgcggtagcaaaacgtggtggtactgttcagtatgttgatgcttctcgtatcgttatcaaagtaaacgaagatgagacttatgctggtgaagcaggcattgatatttacagcttaactaaatatacccgctctaaccaaaacacatgtattaaccaaacaccttgtgtttctttaggtgaacctgttgaacgtggtgatgtacttgccgatggtccatcaacagaccttggtgaacttgcattaggtcaaaacatgcgcgtggcatttatgccatggaatggttataactacgaggactccatccttgtatctgagcgtgttgttcaagaagaccgtttcacaactatccatattcaagaacttgcttgtgtgtctcgtgatactaagttagggcctgaagagatcactgcagatattcctaatgttggtgaagctgcgttatctaaactggatgaatcaggtatcgtttatatcggtgctgaagtgaaaggcggtgatattctggtaggtaaagtaacaccgaaaggtgaaactcaactgactccagaagagaaactgctacgtgctatcttcggtgaaaaagcatctgatgttaaagattcttctctgcgtgttcctaacggtgtatctggtacagttattgatgtacaagtcttcacccgtgatggcgtagaaaaagacaaacgtgcattagaaatcgaagaatcgcaattacgtgaagttaaaaaagacttaacagaagagttacgtatctttgaagcgggtctttttgcacgtattcgtggcgttctgattgccggcggtattgaagctgacaaattagataaactacctcgtgaacgttggttagaactgggtcttgctgatgaagagaagcaaaaccagttagaacaattagctgaacagtatgatgaactgaaagctgaattcgcgaagaaactggaagctaagcgtcgtaagatcactcaaggtgatgatttagcaccgggtgtattgaagattgttaaggtttatctggctgttaaacgtcagatccaacctggtgataagatggcgggtcgtcatggtaacaagggtgttatctctaagattaacccaattgaagacatgccatacgatgaaaacggtaatcctgttgacctcgtactgaacccactgggtgtaccatcacgtatgaacattggtcagatccttgaaactcacttgggtatggctgctaaaggcatcggtgataaaatcaatgcgatgctgaaacagcaacaagaagtggctaaattacgtgaatttatccagaaagcttatgatctgggtatggcacctcgtcagaaagttgatttggacaccttcagtgatgaagaagtgttacgtttggctgaaaacctgaaaaaaggtatgccaactgcaacacctgtgttcgatggtgcagaagagatggaaattaaagagatgctgaaattagcagatcttccaacttctggtcagattacacttttcgatggtcgtacaggtgaacaattcgaacgtccagtaactgtaggttacatgtacatgctgaaactgaaccacttagttgatgacaagatgcacgcccgttctaccggttcgtacagcttagttactcagcaacctcttggtggtaaagcacagtttggtggacagcgtttcggggagatggaagtatgggcactggaagcatacggtgcggcttacacactacaagaaatgcttactgttaagtcggatgacgttaacggtcgtaccaaaatgtacaaaaacatcgttgatggtaaccatcagatggaaccaggtatgcctgagtcgttcaacgtattgttgaaagagatccgttcactgggtatcaacatcgaattggaagacgaataacgtattccatgaaagcagactgctaaatatggcagtctgctaaacagtgactacactggtttaaaggggtgaatgacaggggtcatttgcctggcagtcctaactccgacaggagccatttcgtgaaagacttattaaagtttctgaaagcgcaaaccaagaccgaagagtttgatgcgatcaaaattgctctggcatcacctgatatgatccgttcatggtcatttggtgaagttaaaaagccagaaacaattaactaccgtacgttcaaaccagaacgtgacggccttttctgtgcccgtattttcggaccagtaaaagattacgaatgtttgtgtggtaaatacaaacgtttaaaacaccgtggtgttatctgtgagaagtgtggcgttgaagtcacacaaactaaagttcgtcgtgaacgtatgggtcacatcgaattagcttctccagtggcgcacatctggttcttgaaatcactgccgtcccgtatcggtctgctgttggatatgccactgcgcgatattgaacgtgtactgtattttgaatcttatgttgttgttgaaggcggtatgaccagccttgaacgtggccaaatcttaacagaagagcaatacctcgatgcattagaagaattcggtgatgaatttgatgcgaagatgggtgctgaagctgttcagaacttgttacagagcatggatctggaacaagagtgtgaaacgctacgtgaagagttaaatgagactaactctgaaactaaacgtaagaaactgactaaacgtatcaagttacttgaagcattcatgcaatcaggcaataaacctgagtggatgatcttaactgtactgccagtgttaccaccagacttacgtccactggttccacttgatggtggtcgttttgcgacttctgacttgaacgatttatatcgtcgcgttatcaaccgtaataaccgtttaaaacgcctgctagatttagcagctccagacattatcgtacgtaacgaaaaacgtatgttacaagagtctgttgatgcgttattagataacggtcgtcgcggtcgtgcaattacaggctctaacaaacgtcctctgaaatctttggctgatatgatcaaaggtaaacaaggtcgtttccgtcaaaacctgttaggtaaacgtgtcgactattctggtcgttctgtaatcaccgttggtccatacctgcgcctgcatcagtgtggtctgccgaaaaaaatggcacttgaattattcaaaccatttatttacggaaaactggaaactcgtggtttagcgacaacaattaaagccgctaaaaaaatggttgagcgtgaagaagcggtagtttgggatatcttagatgaagttatccgtgaacacccagttatgctaaaccgtgcaccgacacttcaccgtttaggtatacaggcgtttgaaccaatcctgattgaaggtaaagctattcagttacacccactcgtttgtgcggcatataacgccgacttcgatggtgaccaaatggcggttcacgttccattgacattagaagcgcagttagaagctcgcgcgttgatgatgtcaactaacaatattctgtctccagcaagtggtgacccaattatcgttccttcacaggacgtggtattaggtctttactacatgactcgtgattgcatcaatgccaaaggtgaaggcatggtgttaagtggtccaaaagaagctgaacgcgtttatcgcgcaggtttagcctctttacacgcgcgtgttaaagtacgtatcactgaagagatcaaagatggcgaaggtaatatcaccactgaaactagcttaaaagacactacagttggtcgtgctattttatggatgattgtaccaaaaggcctaccttacgcactggttaaccaaccattaggtaaaaaagctatttctaaaatgctgaatacctgctaccgcgtaatgggcttaaagccaacagttatttttgctgaccaaatcatgtataccggttttgcttacgcagcacgttctggtgcttcagtaggtatcgatgacatggttatccctgcgaaaaaagcagagatcattgccgaggcagaagcagaagttgcagaaattcaggaacagttccaatccggtctggtaacagcgggtgaacgttacaacaaagtcatcgatatttgggctgctgcgaatgaacgcgtcgctaaagcgatgatggaaaatctgtctacagaaactgtgatcaaccgtgatggtgaagaagaacaacaagtttccttcaacagcatctttatgatggctgactccggtgctcgtggttctgcagctcagatccgtcagttagcgggtatgcgtggtctgatggctaagccagatggctccattatcgaaaccccaatcactgcgaacttccgtgaaggtctgaacgtactccagtacttcatctcaacccacggtgctcgtaaaggtttggcggataccgcactgaaaacagcaaactccggttacttgactcgtcgtttagttgacgttgcacaagaccttgtcgtaacagaaagcgactgtggtacaaccgaaggtgtaatgatgactccggtcattgaaggtggagatgttaaagagccactgcgtgagcgtgtattaggacgggtaacggcagaagatatcctgaaaccaggtactgcagatatccttgttccacgtaatacgctgttaaacgaaaaactgtgtgatctgttagaagaaaactcagtagacagcgttaaagttcgttcagttgtaacctgtgacacagactttggtgtatgtgctaaatgttatggtcgtgaccttgctcgtggtcatatcatcaacaaaggtgaagctatcggtgttatcgcagcacagtcaatcggtgagcctggtacacagttaacgatgcgtacgttccacatcggtggtgcggcatcccgtgcggcagcagaatcaagcattcaggtacgtaataaaggtactctgaaattgatcaatgcgaaatttatcaccaacactgctggtaagttagtgattacttctcgtaat

SEQ ID NO: 32827 - DNA, 786 bp, Proteus mirabilis
gtgacctatgctctgattatcataggacagttagcggagaacattatgaagtatcgcctgtgcggtgttgctcttttagtagctttactttcaggatgtgcaagcacacctaacaatggtgacagtcgttctgatcccttggaagggtttaaccgccagatgtttaattttaactattatgttttagatccttacgtattacgacctgtagccgtagtatggcgtgattatgttccaccaccagcacgtaatggactatcgaatttcttaggtaaccttgaagagccagcaagtatgctaaatagcatcttacgtggagattttgaaaaaggggctaagcatttcggacgtttttggatcaataccgtatttggtattggtggtttaatcgatgttgcaggaatgtctagagaatcaatggaaaaagaagttcctgtaaggtttggtagtacgttagggcattatggtgtgggatatggcccttatgtggtattaccgggctatggcagctttacagtgcgagaagaggggggcgattgggctgatgccacctatccagtactgagttacctcactttctggatgtctgcgggtaaatgggcccttgaaggtattgaaacgcgagctcaattattagattcagatgcaattttacaaaactcatctgatccatatttaatgatgcgtgaagcctatttccaaaaaaatgatttcgatgctaatggcgggaaaacaggtgaaaatccaaacgcaaaagcgattgaagatgatttagattctatcgat

SEQ ID NO: 32828 - DNA, 1371 bp, Proteus mirabilis
atgtctaattcagctaaaagtgttgttattcttgctgcgggaaaaggtacccgtatgtattcacagttacctaaggttcttcataaacttgcgggcaaatccatggtgcaacatgtcattgataccgcaaagtcccttggtgctcaacaaacccaccttgtttatgggcacggtggtgaacttatgaaagaaacattaggttcacaacctgtcaattgggtgctacaagctgagcaattaggtaccggtcatgctatgcaacaagccgcacctttctttgctgatgatgaagatatcctaatgctttatggtgatgtaccacttatcactaaagaaaccttagagcgtttaattgcggtaaaacctgctggtggcattggtttattaaccgttattttagataaccctatggggtatggccgtattgttcgcgaaaatggcgatgttgttggtatcgtagagcaaaaagacgcctctgaagaacaattaaaaattaaagagatcaatactggtatattggttgctaatgggggcgatttaaaacgctggttagcgaagcttgataataacaatgctcagaaagagtactacattactgatattattgcgcttgcacaccaagaaggtcgtaaaatcgaaaccgctcaccctactcgtcatagcgaaatggaaggggttaataaccgcttacaacttgcctcattagagcgtatttatcaaacagaacaagccgaacgcttattacttgaaggggtaatgttacttgatccggctcgttttgatttacgtggtacgctaactcacggaaaagacgtggtgattgatactaacgttattattgaaggtgaagtcactttaggtaataacgttgaaattggtacgggttgtgtactgaaaaactgtgtgatcggtgatggttcgattatcagcccttatacggtgatcgaggatgcaaatttagcgcaagagtgtactgttgggccttttgctcgtcttcgccccggcgcacagctggcagacaaagcacatgttggtaactttgttgagatgaaaaaagccagtctaggcgttggctctaaagcgggtcatcttacttatttaggtgatactgaagtgggtgctaatgtgaatattggcgctggcactatcacttgtaactatgacggtgcaaataaatttaaaactatcattggtgatgatgtgtttatcggctctgatactcaacttgttgcccccgtttgcgtggccaatggcgcaacaattggtgcaggtacaacattgacaaaagatgtcaacgaaaacgaattagtcattagtcgagttaagcaaacacatatctctggctggaaacgtccggtgaagaaaaaacaa

SEQ ID NO: 32829 - DNA, 645 bp, Proteus mirabilis
atgttacaggtctatcttgttcgccacggtgaaactgagtggaacgtggcgagacgtatacaagggcaatctgatagcccactaacagcaatgggtgtgcgacaggcacaacaagttgctgaaagagtaaaatcagcaggtattacccacataatttctagtgatcttggccggacttgtcagacggcagagattattgcacaagcttgtcgctgtgacgtaatcacggatccccgtttgcgtgaacttgatatgggcgttcttgaacagcgagagatcgccacattaaatacacaagaagaagcttggcgcaagagtttaattgatggtacacctgatggacgaattccccaaggagaatccatggtggaattagctaatcgtatgcaggctgctttaaacagttgcttggcgttaccagagcatagccgtcctttactggtgagtcacggtattgcattaggttgcctgctaagtactgtgttaggcctacctgcttacgctgaacgacgtttaagactacgtaactgttcaatttcacgagtggactatcaaaacagtccttggctcgctaatggatgggtaatcgaaacagcaggggatgtgagtcatcttactgatatcgctcttgatgaagtacagcgt

SEQ ID NO: 32830 - DNA, 453 bp, Proteus mirabilis
gtgcttttaaagatatcattgcttaataaagatactaacatcatttctactctacattcagtacggagtaacatttcaataggtatcgaaacgtttattattttccttgttatcctgcttattcttaacaaggagaataaaatgatcgctgttatttttgaagttcaaatagccacaagtaagcaggggcaatatttatctttagcatcgcaactaagaccattactaaacaacattgatggatttatatctatcgagcgctttcaaagcctagcgacggaaggaaagctattatcgctttcttggtggaaaaatgaagatgctatactgcaatggaaaaataatattttgcacaccaaagcacagcaggaaggtaaaaagagcatttttgatttgtataaaataagtatagttaaactagaacgttgttatgagtttacaagtactcacacg

SEQ ID NO: 32831 - DNA, 897 bp, Proteus mirabilis
atggctattgaccttagcaatcttgtcacggaaagtcgcaatcatcacagtgaacatattgatacactttcaacacttgaaatgctaaaagtcattaataatgaagataaaaaagtgccttttgcggttgaagccacattaccccatattgcacggctggtggataaggtcgtaacagcattttctcaaggtggtcgattaatttattgcggtgcaggtacttctggtcgtttgggaattttagatgccagtgaatgtcctccaacctatggaaccccccatgatatggtgattggcttaattgccgggggacacaaagccattttacaagcggttgaaaatgcagaagataatgtccaattgggggcggaagatttacgccagcttaattttaatgccaaggatgtgctagttgggattgcagccagtggtcgaacgccttatgtgattggcgcattagaatatgcacgctcactaggtgcggtgaccggggcaattagttgtaatcctgatagtcccatagcgcaacgtgccgatattgccattacgccgattgtggggcctgaagtggtaactggctcatcacgtatgaaagcaggcacggcacaaaaactggtattaaatatgataaccacaggtgccatgataaagatgggtaaagtatttggtaatttaatggtggatgttgaagccactaatgccaaattaattgagcgccaaattcgtattgtgatgcaagcgacagagtgtgaacgagctactgctgaacaagcactagcacaatgccaacgtcattgtaaaacagcgattttgatgattttagccggcgtaaatgcacaacaagcaacacagttgttggcgcaaaataaagggtttattagacaagctctagcgaaa

SEQ ID NO: 32832 - DNA, 459 bp, Proteus mirabilis
atgaaatacggaaaactctatgccgtcattgcgatggtaggcattatcgtgggtagttattgggtgattaactggcaagctaataggattaattcactgacagatatcaacaaaaaactggccgtggctctcgaagaacagaagtctattaatactgactatcaagcacgcataatgcgattaaatcagttggatattcaatatacgcaggagctagcgaatgctcagaatgaaattagtcacttgcgtgatattagtgagcgtcatccagagcgggtgtacatcaaagccgagtgccccaaagtcaaaaccactccctccaccagcttggcttatgcaaccaccgcccgacctactgacaccgctatccgaaattattggttactcagagagcgaattgcagagtcagaacagatgattaaagggttgcaggattatatcaaacaagaatgcatggaa

SEQ ID NO: 32833 - DNA, 1539 bp, Proteus mirabilis
atgactgaacaatctgttatccaacgttgtcaacaaatcgtagaaaatccaaccctttcccccgaacaaaaacgtcattttctagcattagaagcggaaaatatgttgccatacccgacattatctaacgaggcgagccttgcgctaaatgaacgggttatctgcgatatgtatgaaggtcatgccccttataaaccacgttatgtattacctgattacgcgaaattcttagcacaaggctcgcgctatttagagcttgaacctgcccaagattttgatgatgcgctaaatatgctggctatcctttatcatcatgttccttcagtcacttcaatgccggtttatttaggtcgtattgataaaatcttactaccttatgtggggaatttgacgcaagagcaactctatccaaaattaaagcgtttctggcgctatcttgatagaacccttcctgatgcctttatgcacgctaatattggccccgaagactctatcattacacgtttaattcttaaagtagatgttgaacttcaacaagtagccccgaatctcacctttatttatgacgcggcactaacaccttctgatttattgcaccaagcaatcaccaatatttgtcatagtagtaaaccccatattgctaacggtacattgcaagatgctgtatttggtaaagatgaatacggtattgttagttgttataactctctaccgcaaagtggtggcggtagcactttagttcgtatcaatctcaaagaagtagcaaagcgcagccaaaatagtgccgactttctagagaatgtattgccgttttatatgcaaaaacaaatcgagatcatcaatgctcgttgcgaattcctctatgaaaaatcaaacttttttcaacaaagctttttagtagaagaaggtttgatctcacccgatcgttttgccccgatgtttggcatttatggtatggctgaagcagtttctctattacttgagaaagaaggtcatacagcaaactatggtcatagcgaagcggccaataaacttagctatattattagtgaaaaactggcccaatttgttgcacagactcctgtaaaatatggttggaaacagcgtgccatgttacatgctcaatcaggcataagttctgatattggtactacaccggcgacccgaattccttatggaacagagcctgatcctgttactcatttaatggccgttgccccccaccatcaattttatacttcaggtattagtgatattttaaccgtggatgaaactatcaaacaaaatcctgatgccttaatgcaactgtgcttaggggcgttttcttgcggattacgtgaatttaccgctaatgtgggtggcaatgatttagtccgtgtcactgggtatatggtgcggttatctgatttaaaaaaatataaagaagaaggctctcgcctaaatacaacttggttaggagatgaagcaacaaccaattgccatattgctgaacgaaaaccacgagtgattagccatgaacagcagatgcgcttcgataaa

SEQ ID NO: 32834 - DNA, 1368 bp, Proteus mirabilis
atgagagcgttatacgattctaaaagtaaaacaatcgatgatcgcggtattaaagcgctgttatccaatgaagctaaatattcaacttggttgatgtttgaggcgatgctcgctcaagctcaagctgaacacggttttattccacagtcagcggctgatgaaattaaagaaaaagcggttattgagaatatcgattttgaagaaatgaaccgcatttaccaaaaaatcggtcatggtttcgtgccctttttaaaagtgttagttaaggcatgttcccaagagagtggtaaatatgtgcactacggcattaccacgcagaatattcagcaaagttcacagctttatatgatgaagacagtgcaccataaatttatgttgctacttggggagatcatcgaaaatttagctaacttggcagaaaaaaccaaacatatggttatgcccggtagaacacatggccgccatgctattcctattacttacggctataaagtatcggtctggatcagtgattttatcgactgttatcagcgcatgagagagtgtgaaaaacgcgtctttactatcatgatgggcggtgctgtgggtgcatttaactcaatgccagaagtgggtatgaaggtgcaaaaacgtgtggctgaattagttggcatggaagcgatggaggtgccttctcgtaaccttagtacacataaattagagtatatggctaatttggcattgatggctaatatctgccataaaattggtgaagaagtttatagtacgacacttgaggaaattgcggaagtttcggaagggtttaccaaaggtacagttggcagtagcactatgccgcataaaattaaccctaaactggctaaagggatcatcgctaactcacaaaaactgtattctttacccagtgtgggtatgtattctgcggtaagaccttatgaaggggatagtagctcctatatgttatttgatgggttactggaagaggcattagagctgacaacagaaattctattaagaacagaagaactttccagaacaatagtaccgcatgaagagagaatgctacataacgtcatgagaaataaaggattagataatacagagtacgttatgatgaaaatggcagaaaaactaggcaaagataaagcacactctttattgtatgaagaggcgatcaaaacagcagcagatggcgaagatttctatactaacttgataaaaaatcccgttatctctgcggcatttagcccagaagaaattaaagcaatgcttgatccaagagcctatatcggtttatcggtggaaattgcggagaaagaagctaaacgcgggcatgtggctagccaagaaattaaacaaaactatcaa

SEQ ID NO: 32835 - DNA, 345 bp, Proteus mirabilis
atgttagatattgagaattgcgttgatagctcagcgacagatgatgaatttgaagaaattatcatggggttaattattaattcagggcaagcacgaagtatcgcttatgcagcgttaaaaaaagcgaagcaaggtgattttgcacaagccaagaaaatgatggaacaatctcgagcagcattaaatgaagctcataaaatacagacccgcttaattggtgatgatcaaggattgggtaaaacgaaagtgagcttggtactggtgcatgctcaagatcatttaatgacatctatgttagccagagagcttgtcacagagcttatcgagttacatgaaaaaataaag

SEQ ID NO: 32836 - DNA, 801 bp, Proteus mirabilis
atgagtgttcccgttttaggtcttggtacttttcgtttaaaagacaatgcggttataaattctgtaaaaactgcactagaactaggttatcgtgctattgatacagcacaaatttatgaaaatgaagctgctataggacaagctatttcagaaggtggtatatctcgcgatgcgctttacatcacaacaaaaatttgggtagaaaatttaagtaaagataaattaattcctagtttgaaacaaagcttaagtgatttacaaacagattatgttgacttaactctagtacattggccatcaccaaatgatgcagtttctgttaaagaatttatgcaagagttattagctgcgaaacagatgggattaacgcgagaaattggtatttcaaattttaccattccattaatggaacaagctattgctgccgttggtgttgaaaatatcgcaacaaaccaaatcgaattatcaccttatttacaaaatcataaagtggtaaattgggctaaacagcatggcattcatattacatcttatatgactctagcttacggcaaagcattaaaagatgaaacaatacaaaccattgctaaaaaacacaatgcaacaccagcacaaatcattttagcttgggctatgaatgaaggttattctgttattccatcttcaacaaaacgtgaaaatttagccagtaatttactcagcgtaaatatcaaattggatagtgaagataaacaagcgattgcaaagttagattgtcatgatcgtttagttagcccagaaggtttagcgcctcattgggat

SEQ ID NO: 32837 - DNA, 735 bp, Proteus mirabilis
atgacatttattaaatctatttcgacctttatcagtctaataacacttttttgctcattttctttacacgctaatttcgaagagcaagataaaaaattatttgaagatacccgcaaagaagcactaaaccataatgcactcgctcaatatcagttagccgaaatgtatttactgggggatggcgtagaaaaaaacctgctaaatgcacagctgtgggcaaatgaagcaataaaaagtggctatgccgatgcctatgcgctccttgctgacatttacctctttaatgccgacccttattttaaaagctattatgtcgaagcaaaagagttagccaccactgccgttaataaaggaagcatgagaggaaaaatcagcttagcaaccgcgcttattgcccctttatctggtgaagtagattatcagcaagcgatggtattacttgaagaagccacacaagcgcatcaacaagaacttgtttatgcccccatttggttaggtattttatatagtggtataggtaatattcctgtcgatatggaaaaaaccaataaattatttgcacaagccaatgaaatgacatttgaaggatttgctcaagcaatggcctcttttatgttctcaggtcaatatcatattatcgagcccaacaaacaaaaagcagatgcatttatgaaacaagcctgtgaagaagcgagaaaagttggcaatgaattttattgccaaccagaattaaat

SEQ ID NO: 32838 - DNA, 1290 bp, Proteus mirabilis
atgaaattatataatttaaaagataaccaagaacaagtcagctttgctcaagcggttaaacaaggtttaggaaaacagcaaggactcttctttcccaaagacttgccttcattttctcaagcagaaattgatgcgctattaaaattagactttgcaacacgcagtagccgtattttaagtgcttttatcggtgatgaaattcctgctgatgtgttagcaaaacgtgtgaatacggcatttgcttttcctgcgccagtgacacaagtagaagaggatattagttgccttgaactcttccacggaccgacgctggcttttaaagactttggtggccgttttatggctcaaatgttatcagaagtcgcgggtgaccagcctgttacaattttaacggcgacatccggtgatacaggagcagcggtcgctcatgctttctacaagttagataatgttcaagtcgtgatcctctatccacaaggaaaaatcagcccattacaagaaaagctattttgcacattaggggagaatattcatactgttgctattcaagatgactttgatgcttgccaagcattagtcaaacaggcatttgatgatgaatatttaaagaacaccatgcatttaaactcggctaactcgattaatattagccgcctactggcacaaatctgctattactttgaagcggttgcacaaattccagctgaaaaacgtcaacaattagtcatttctgtaccaagtggtaattttggtgatctcactgcaggattactggctaaatctatgggattgcctgttaaacgttttattgcggcgaccaatgtgaatgataccgttcctcgctatttagatagtggtaaatgggaaccacatcggacaatagcaacactttcaaatgcgatggatgttagccagcctaataattggcctcgtattgaagagttatatcgtcgcaaaggttggctgttatcggatctttcgcatggggctgtgagcgatgaaacgacggaagaaactgtacgtgaactggcacaaaaaggctatatttcagagcctcatgcggcggttgcttatcgtctattacgtgatgagctacaagaaggagaatatggggtatttttaggtactgctcatccggcgaaatttaaagaaaatgtcgaacgtattttaggtgatacattacctttaccaaaagaattagctgagcgtgctgataaaaaattactatcgcatcttttaccggcagatttttctcaattaagagcatttttgttagaacgagcacctaaa

SEQ ID NO: 32839 - DNA, 813 bp, Proteus mirabilis
atgatcgcgatggtatatggtgcaaaaggtgagatttgtattaatgggcaaactatcacagtcaccactaatctcacgttgattattcctaaatatagtcaagtttcttgtgatgtgacaaattttttcccgaccaaaccgattgaattacataccttagtactgtctgaaactgaattacaatctgtgttctctttacttaaaccattaataaaatcaggggcgccgattactcgtcatcttcctgattatcatctatcaacacctgaggtggttaaaactaattttacgttacttcagcaatgtctaccgcttgaacatggcaccccctctcaagagaccctgtttatgcaacagagcctcttttttattttgctggcggtttatcacgaaggggtcgatattcttaatatttttcgttttaattatgatgagccaaaaaaccaggcgattactcatctaataacacaagatccgcaacgtaaatggcatttagaggatgtagcaaaaacgctctatactacgccatcaacattacgtcgccatttaagtaaagagggcgtttcgttttgccaattactgttggatgtcagaatggggatcgcattaaattacctcaccttttctaactattctgtgtttcaaattagtcatcgctgtggttttggtagtaatgcttatttttgtgacgcatttaaacgtaaatatggtatgacaccatcgcaatttcgcactcaatcccgccaagcaaacgatccgaatgcaatagcaacaatggcgtcacaaaatgacgaatcaataaaaaaagtattt

SEQ ID NO: 32840 - DNA, 885 bp, Proteus mirabilis
atgacagaacaggcaacaactcgattaaagccgggtaaaatactcgatacgctaggcgctatgaaaaatagcttaactcgcgtatcgcaacgtattgcagactatatcctgttccatcctacggaagtgactcagttatctattgcccaactctctcaagcaaccaaagcaggtgaagcgacggttgtccgcttttgtcggacattgggttataaaggttttcaagactttaaaatggatttggcgattgaaatggcaacatcagataatgatgaatcgccaatccttgatgcagaagtcagtcatcaagatgatatccacactattggcctaaaattgcaagcaacaataaataatgtgttatcagaaacattaaatttgctcgatatgcagcaagtgcaaggggcggtcaatgcactattatcagcaaactatgtttttatctgcggcgttggctcttcggggatcactgcggaagatctgaaaaataaacttatgcgtattggttatcgtgttgatgccgtaactaataaccactttatgtatatgcaagcctcattattaaaatctggtgatgtcgctatcggtattagtcattcgggtaattcattagaaacggttcatgcattgaaattggctaaagaagcgggcgcaagcacgattgcattgacgcataatttaggctcacaaattatggaatatgcagatcatcatttaattaatggtaatcgacaagggaaattacaaggcgattctattggcacaaaaacagcacaactttttgttttagatttgctttataccttgttagttcaggctaagcctgaaacagtaaaagagcagaaattacgtactctcaatgcgttaaaacagacgcattcagca

SEQ ID NO: 32841 - DNA, 1350 bp, Proteus mirabilis
atgagcaaacattacgattatatcgccatcggtggcggtagtggtggcatcgcatcaatcaatagagcggctatgtatggccaaaaatgtgcattaattgaagcgaaagcgctaggtggcacttgcgttaatgtcggttgtgtcccgaaaaaagtgatgtggcatgctgcgcaaattgccgaagcaattcatcaatacggtcctgattatggttttgatactacagtaaaccgttttgattgggatacattaatcagtagccgtactgcttatattgatcgtatccaccaatcttatgaacgtgtattaggtaataataaagttgatgttatccaaggctttgcccgttttgttgatgcgcatactattgaagtaaacggtgaaaaaattaccgcagataatatacttatcgccacgggaggccgtcctattcagccaaacattccaggggctgaatatggtattaactctgatggtttcttcgaacttagcgcattaccaaaacgtgttgctgttgtgggtgctggctatattgctgttgaattagcgggtgtattaaatgcgttagggagtgaaacacacttatttgtgcgtaaacatgcaccattacgtagttttgatccactaatcgtcgatacgctggtggaagtaatggaagcggaagggcctaaattacacacccatgcagttcctaaagctgtggttaaaaatgccgacggtagcttaacgttacaacttgaaaatggcttagagcagacggtagatactttaatttgggcgattggtcgtgaacctgctacagataatatcaatttagcggctacgggtgttaagctaaatgaaaaagggtatattcaggttgataaattccaaaataccaatgtgcccggtatttatgccgtaggtgataacacaggtgcggtagaattaacccctgttgcggtagccgctggacgtcgtttatcagagcgattatttaataataaacctaatgaacatttagattataccaatattccaacagtggtatttagtcacccagctattggtactgtgggtttaacggaacctcaagctattgagcaatatggcgctgagcaagtgaaagtctataaatcttcttttactgccatgtatagtgcagtgacacgccatcgtcagccttgtcggatgaaattagtctgtgtgggtgctgaagaaaaaattgtcggaatccacggtattggttttggcatggatgaaatgttgcaaggttttgcagtggcattaaaaatgggtgccacgaagaaagattttgatgatactgttgctatccacccaacggcggcggaagaatttgtgacaatgcgt

SEQ ID NO: 32842 - DNA, 1635 bp, Proteus mirabilis
atgctaacactgcttcatttactctcatccgtggcacttttagtctggggaacacatattgttcgcaccggtattatgcgtgtgttcggctctgatttacgccgaattttaggtaaaagtattaataaaaaatcgaatgcttttcttgccggtgtcggtgttactgccttagtacaaagtagtaatgctacggcattgctagtgatttcgttcgtcactcaaggccttatttctattacacccgctttggtgattatgctaggggctgatgtgggtacagcgctaatggcgcgggtgctgacattcgatctttcgtggttatcaccgttactgattttattgggtgtcatgacttttttaagtcgtaaaaaagagcgtatcgggcaactgggtagagtgggaataggccttggtttaattatcttagcattacaactgattgtgacttctgctgagccgataacccatgccagtgcagtacaagctatttttacctctttgagcggggatacgattttagcactattggtcggcgctatttttgcgatggttagttattcaagcttagcggcggtattacttaccgcaacattaagtgcaacaggctttatgcctttatatattagtttatgtattgttattggttctaatattggtagtggattgttggcattaatcagtagtcgtggtcaaagtattagttcacgtcaagtcgtcataggaagtctgttttttaaattaattggcgccttgctggtattgccgtggatcaccatcattgcgacaaaaatccaacaatatgatttttcccctgcggaagtgattatctattttcatgtgatttataacttagtgcgctgtgtgttgatgttgccgtttgtggggccaatggcgaaattatgtcaaaaattagtgccggaattacccgttactggaacagaagttgcacctcgttatttagatccatccgccgttgatactccctctttagctattgctaatgcagtcagagagacattacggttaggggatgtggttgaacagatgttgcaacgttttcaagccttaatggaaggggatcgtctgcaaaaaagggagattagccagctagaagaggaagtggaattgctccatagcagtattaaattgtatatggcacaaattcagcagcatgatcttggtactgaagactctcgtcgctgggcagaaattattgataccgcgatgaatttgcaacaatcttccgctatcatagcgcgtatgtctggtgaggtggtgaataaaagtttagatcatcacttaaatttatcggaggaaggacgtcgtgaattacagacactccttgagcgtctgcaaagtaatctgaatctggcgatgtcggtgtttgtttccggcaatatggagcatgcgcgtaaattacgccgagcaaaacatcgattccgtttactcaaccaacgttactcgtttgctcatgtagaacgtcttcatttgcataatatgcaaagtattgaaaccagttcgctgcataccagtttgttgggtgatatgaaacggttgaactccttattctgtgcagtggcttaccacgcattagagcggagcggatcttcttcagaacaggttaatcttcaacaa

SEQ ID NO: 32843 - DNA, 420 bp, Proteus mirabilis
ttgtcgcgtcgtgattatggcaccactgagctaaaacgccgtttagcacgaaggatcaacgaagtcgataaagctaaacatagcacaaccgatgaaagatgtttagagcaagtgatcgagcgattattagaaggccaatatctggatgataatcgcacggtatatgctttttttcgtcgttatttaagtaaatcttatggcccgctgcgtattcgccaagagttacagcaaaaaggctttcctagtgaaattattgaacgggtactagaagaaacagaaactgattggtatgcactttgccaagatcttaaagagaaaaaatttggtacaggtaaacccaaagattttaaagagagagccaaacaaattcgctatctacaatatcgagggtttacttctgattatatcaatgcgttattt

SEQ ID NO: 32844 - DNA, 1824 bp, Proteus mirabilis
atgtgtggaatagtaggtgcagttgcacaacgcgatatcgcagaaatcttaattgaaggtttacgtcgtttagaataccgcggttatgattcagcggggttagctgttgtcgataatgattgtcatatgacacgtctgcgtgaagttggcaaagtacagatgctggcagaagaagcagaaaaaacacaagttattggtggtacaggtattgctcatacccgttgggcaacccatggtgaaccttgtcaagataatgctcatcctcatgtctccggcactattgccgtggtacataatgggattattgaaaactaccaagagctaaaagctgagttaattaaccggggctatcagtttgcctctcaaactgatactgaagttattgctcacttagtcaattgggaacagcgccaaggcggcacattacgtgaagtcgtacagcgtgtgatccctcaattacgtggtgcttacggtactgtcattatggatagtcgtacaccagagctattagtggcagcacgctcaggaagcccactggtggtaggtcttggtgttggggaaaacttccttgcttctgaccaactggctttattgcctgttactcgccgctttatctaccttgaagaaggcgatattgtcgaaattactcgtcgtcatgtgcatatttatgatgttaatggcgaagaagttaatcgtgatattatcgaatcaaatgtgcaatatgatgcgggtgacaaaggtatttatcgtcactatatgcaaaaagagatctacgaacagcctttagccattaaaaacacccttgaagggcgtttaaaagcagaaagtattgatcttagtgagttaggagctaaagcaccagagatcttatctcaagtggaacatattcaaatcgttgcctgtggtacatcttataatgcaggtatggtatcgcgttattggtttgaatctttagcggggatcccctgtgatgtggaaattgcatcagaatatcgctatcgcaaaccagcgactcgtcgcaatagtttactgataaccttatctcaatcgggtgaaacggcagatactctggcggcattacgcttatcaaaagagttaggttatttatcatcgctggcaatttgtaatgtggctggctcttctttagttcgcgaatctgaatttgtgttaatgactaaagcaggggctgaaattggggttgcatcaaccaaagcctttacaacgcaactggccgttttattaatgctagtggcctatatgggacgcattaaaggtgttgaagcccttgaacaacaagttgcaatggcgcttcatgcactaccgagccgtattgaaagtatgttgtcgaaagataaagtgattgaagctttagcagaagacttctcagaaaaaagtcatgcactcttcttaggccgtggtgatcaatatccaatagcggtagaaggcgcattaaagttaaaagagatctcttatattcatgcagaagcttatgcggctggtgaattaaaacatggacctcttgctttaattgatgctgatatgcccgttatcatcgtagcgccaaataatgaattattagagaaattaaaatctaatattgaagaggtgcgcgctcgtggtggtttactgtatgtgtttgccgatcaagatgctggctttgaagaaagtgaaacaatgaaactgatttctctgcctcatgttgaagagttaattgcgccaattttctatactgtaccattacagttactttcttatcatgtggcgttaattaaagggactgatgtcgaccagcctcgtaacttggctaaatcagtgactgttgag

SEQ ID NO: 32845 - DNA, 798 bp, Proteus mirabilis
atgggaggtagtatgtatcacgatcttcaaggaaaagttgctgtagtaacaggttcgtcacgaggaattggtgcagcagtagtgacgagattagctcaagaaggaatgaacgttgttatcaactatcactctgatgaaaatgaagctcaagcattagccgatagcctaaataaacatggtaaaggtaaagcgattatttttggcggtgacattagtgatgaaaaaattgctcataactttatttataaggcgattgaccactttggtcagctcgatcttctgatcaataatgcgggaattgagacacaaaccccttcccatgcagtgaatttagaagattggcgtaaaattattgatataaatttaaccagttattttctaacggctcgctccgcattgaaatatttcgttgagaataagatcaaaggcaatattattaatatgtcttctgttcatgaagtgatcccatggccgacttttgctagttacgctgccagtaaaggtggcgtgagaatgttaacgcaatcactggctcttgaatatgcacactatggtattcgtattaacgccattggcccaggtgctattaataccccaataaataaagaaaaaatgcaagatgatgcgttacgcaaagaattagaagagatgatcccaatgaaatatgccgcagagcctgaagcagtggctaatgttgctgcttggttagcatcggagcaatctacttatattactggacaaactattttcattgatggcggtatgacactttatccttcatttcaaggtggaaaaggt

SEQ ID NO: 32846 - DNA, 393 bp, Proteus mirabilis
atgaaacgtctacaagcctttaaattccagttaagacccaatggtcagcaagagcgtgagatgagacgctttgcaggggcttgtcgttttgttttcaatcgggcattagcacgtcagaatgaggagcacgaagcagggaataaatacattccctatacaaaaatggcttcatggctcattgagtggaaatctgacacagagacacaatggttgaaggaagccccatcacaaccgttacaacagtcacttaaagatttggaacgggcttacaagaattttttccagaagcgtaccgcttttcctcgattcaagaaacgcggtaaaaatgacgcttttcgttacccgcagggcgtgaagctcgatcaatctaatagtcgtatatcggggatccac

SEQ ID NO: 32847 - DNA, 333 bp, Proteus mirabilis
atgaaaccattacaactgtttaaaattttaggtgatcaaaccagactagatatcgtattgcttttaaaagcatctggtgagctatgtgtttgtgatatctatactgcgttaaatttatcgcaacccaagacatctcgacacttagctatgctgagagagtcgggtcttttgctcgattcgaagcaaggcaaatgggttcattatcgattatctcctgtattactgccgtgggtgaaaagtatcattgatataacttataccacagagaaaaatagagttgcagatttactcaagatcctagagaaaaaagagtctggtcatcgttgttctgtg

SEQ ID NO: 32848 - DNA, 1264 bp, Proteus mirabilis
atgcttggttcgttaactgcagcaacactggctgtcgcaatatggcggccagttgtgcttcacaccgaacaaagcagagaagttcctatcagtattcaaactcccctaacagcccaaggggaaaacaccgacgatattatcaccgacagtagtgatcagctaacagatgaaggacttgtaggtgctgatgatggtgtcgatactagcaccgcagtggcacaggttcctcatacttatattgtctccagtggagattcattaagttcgatattaacgcaatttggtatcgactcagccgatattgcaacgctctccaatcaaaataaagatctcagaaatcttaaaataggccaaccaataagttggaaacttgatgatgatggtttattgcaagagttaagttggggcgtttctcgccgagaaactcgtgtttatacgcgtacggaaacaggttttactgaagcgaaagagttccaaaaaggcgaatggaaaaatagtgtgaccacaggggttatccgtggtagtttctctgcaagtgcaacaaatgctggcttaactaacgcagaagctcgcgcagtgactaaagctttgcaatggcaattagactttagaaaattacaaagtggtgataaattttcagcccttttttctcgtgaagtattagatggtcgtaccgaacagagcgaacttattggtgtgcggttacgaagtggtggtaaagattactatgcttttcttgctgaagatggccgctactatgatagccaagcaggtggtttagaacgtggttttatgcgttttccaacggtaaaacagtttagagtctcttctcaatttaatcctcgccgtatcaatcctgtcacaggccgtgttgcaccgcataaaggggttgattttgccatgcctgttggtacgcctgttttagctacgggagatggtgaagtcattgtctctaaatacagtggtgcagcaggtaattttattgctatccgtcatggtagccaatagtaccactcgttatatgcacttacgccaactgttagtcaaaccgggacaacgtgtaaaacgaggtgatcgcattgcactatccggaaatacagggcgctccacagggccacacttacattatgaattatggatcaaccaacaagcagttaatccattaacagctaaattacctcgtgcagatggcctaacaggcaaagagaagcgtgaatacttagctaaagtaaaagagatcatgcctcaattaacgttagataat

SEQ ID NO: 32849 - DNA, 1197 bp, Proteus mirabilis
ctttctgctttttctactgtgaatacagggcagagccttctcaataaataatatacatggggatagaccatgagcttatcgtttaaattatctgcatgcgcactgacagtgactttagcaatggcgcctgtgatgtctcaggcatgggaaaaagataaaacttaccaaattaccatcctacatactaatgatcaccacggtcacttttggcacaatgatcatggtgagtacggtttagctgctcaaaaaaccgtcgttgacaatattcgcgatgaagtcgctaaaaatggcggtagcgtattgcttctgtctggtggtgatattaatacgggggttcctgaatctgatttacaagatgcagagcctgattttaaagggatgaatcttgtcggttatgacgctatggcgctgggtaaccatgagtttgataatccactcgaagtgctacgccaacaagaaaaatgggctactttccccttcttatctgcgaatatttatcaaaaaagtaccggtgaacgtttatttaaaccttatactatttttgataagcaaggagtgaaaattgcggtattaggtttaactaccgatgatactgtgcgtattggtaatcctgctaacttccctgatactgagttccgtaaaccggcagatgaagcgaaaaaagtcgttgaagaattacgtaccacagaaaaacccgatattattatcgctgctacccatatggggcattatgacgatggtaatcatggctctaatgcaccgggtgatgttgaaatggcgcgtgctttgccgaaaggctatttagatatgattgttggtggacactcacaagatccggtgtgtatgtctcaagagaataaaaattacaaacaagcagattatgttcccggcacgccttgcgctccagataatcaaaatggcacatggattgttcaagcccatgaatggggtaaatatgtaggtcgcgctgattttgagttccgtaatggtgagttcacattaaaacactatcagttaattccaattaacttaaataagaaagtgaaaaaagaagacggaaccactgagcgagtttactacacagaggagatccctcataaccctgaaatgatgaaattactgaccccttatcaagagaaaggtggtgagcaattgaatgtgaaagtgggggaagttgttggtaaattagaaggcgat

SEQ ID NO: 32850 - DNA, 246 bp, Proteus mirabilis
atgaaagaaaatattcatccacaatatcgtactgtcattttccatgacactagcgtagatgcttattttaaagtgggatcaaccattcaaactgataaaactattgagtatgaggggcaacgctatccttatgtcactttagatgtctcttctcagtctcatccattttataccggtaaacaaaaaacacattctcaagaaggtaatgtggcacgctttaataagcgttttggccgatttgttaat

SEQ ID NO: 32851 - DNA, 525 bp, Proteus mirabilis
atgaaattaaaaaaactgcatttagttttagggttaggcttatctatcattgcgggctctgcattagcggcagatcaagggcatggtactgttgaattctatggttcaattattgatgctccttgttctatcgatcctgattcaggtgctcaacgtattccattaggtcaagtgtcatctagcgcactgaaagacggtggccgtagtgcatcaaaaatgtttaaaatcaaattattacagtgttctactgagacatataaaacagtcaaaacaacctttaccggtgctgaagctcctgatgttttagagggggctttaggtattgaagggatcgccaaaaatgcagctgttgttatcaccaatgcaggtggtgaacaaatcaaattaggtcaagcaagtgccgcccaaacattgaatgacggtaacaatgacttaaattttgccgcttatttacaaggatcttcctcaaaagctgctattcctggtgattttacagcgatagccacttttgctttatcttatcaa

SEQ ID NO: 32852 - DNA, 1380 bp, Proteus mirabilis
atggattattttccaatattctgtcagctcaacaataaaccttgtttattagtaggtggcggtgaagtagcagagcgtaaggcacgtttactgatggacgcgggggcggttatatccgtcgttgcaccgacattcacaccacaatttatgcagtggcaaaacgagcaacgattacagtgtttcacggctgaatttagtgttgctgatttagctgacaaatggctagtcattgcggccacagataatgagcaagtgaatcaactcgtctatcagcaggccacagaacaacgcattttttgtaacgtggttgactcgcccaagcaagctagctttattatgccctcagtgattgaccgttcccctattatggttgcaatttcttcgggaggaaaagccccagtacttgcacgtatcttacgtgaaaaaatggaacagtggttgcccaactcgctaggcgctttagcgcagttagcagggaaattacgtgagcaagttaaacaacgttttgccaccatgggtgctagacgctatttttgggagcgtttttttgcagataaagcgctacaagcggaaattgatgcaggtagagataacggtattcaacaacgtatcagcacattgctagcggaaaataaccaaccccaagggagtgtggtgttggtgggagcaggccctggagatgctggattaatgactattaaagggctgcaacaatgtcagcaagccgatgtcgtggtttatgatagattagtctctgatgaggttatgcatttagtgcgcagagatgctgaacgtatttatgttggtaaacgagctggttttcattgtgttcctcaagaggagattaaccaaattcttattaatcacgctaaggcagggaaaagggtagtgaggttaaaagggggtgatccttttatttttggtcgaggaagtgaagagttagaagctttaattgagcatcaaatacctttttctgtggtgcccggcattaccgcggcatcaggctgtaccacttatgccggtattccgttaacacatcgggattatgcacaaagtgtgcgttttattactgggcatggaaaagggctgaacgacgcacaatggcaatgtatcgcacaagataaccaaactttggttttttatatggggctaagtaaagccgattacattcagcaaatgttacttaatcagcatatgcgtgccactatgccagtggcaatagtagaaaaaggtacactggcgacacaaaaagtggttgttggtcaattacagcaactggctgaaatggcaaactcaatgcaaagtcctgcattaattattgttggtgaagtcgtcagtttaaatcaaaagctacaatggtttggtacgactttagccaat

SEQ ID NO: 32853 - DNA, 210 bp, Proteus mirabilis
atgtctaattcaatgactggtacagtaaaatggttcgatgaaggtaaaggttttggttttattactccagcagatggcagcaaagatgtattcgtgcatttctctgcaatccaaagtgataacttcaaaacattagctgaaggccaacaagtttcatttaccatggaaaatggtatgaaaggccctgcagcaggcaacgtggtggctctc

SEQ ID NO: 32854 - DNA, 1281 bp, Proteus mirabilis
gtggcacaaaaaatccaagccattcgtggtatgaatgactacctacctgctgatacgcgggtatggcagaaaatcgaaaatacgctaaaacaaattttagccggttatggttttagtgaaattagaacacctatcgtagagcatacccctctatttcagcgagcaattggtgaagtgaccgatgttgttgaaaaagaaatgtatacttttaccgatcgaggtgaagacgcacaaagcttaaccttacgtcctgaaaataccgcaggttgtgtccgcgcaggaattgaacatggtttgctttataaccaagagcaacgcttatggtatttagggccaatgttccgttatgaacgccctcaaaaaggtcgttatcgccaatttcaccaattaggtgcagaagtatttggcctacaagggcctgacattgatgctgaactgattatgttaacggcacgctggtggaaggctttaggtattgcagagcacgtgactttagaactgaactctattggttcactcgaagcgcgggcaaaatatcgtgaagcattagtcgcatttttagagcaacacgttgatcaattagatgaagattgcaaacgtcgtatgtattctaacccattacgtgttttagactctaaaaatcctgaaattcagactttattgaatgatgcgcctgaacttttcgattatcttgatgacgaatcaagagaacactttgatggtttatgtgcattacttgatgctgtaggtattacttatcgtgttaatcagcgtttagtccgaggcttagattattataaccgtactgtttttgaatgggtaaccagtgcattaggttcacaaggaacggtatgtgcgggtggtcgctatgatggattagtgaaacaattaggtggacacccaacgcctgcggtcggttttgccatggggatggagcgcatgatcttattagttcaagcggttaatcctgagtttgttgctgatactcatgtcgctgatgtttaccttgcgtcttttggtgataatagccaaagtgcagcattaatgctggcagaagaaatccgtgatcaattacctacattgcgcttaatgaccaatcacggtaaaggtaattttaaaaagcaattaggacgtgctgataaacatggtgctaaaatcgcgttaattttaggtgaagatgaaattaacgctggcacagtagccgtgaaagatttacgttcaggtgaacagaccattgtatcgcgtagcgaactggcccaacaattgacgctgttattaggt

SEQ ID NO: 32855 - DNA, 1029 bp, Proteus mirabilis
atgaaaggttatattcaaacggtaacgggtccggttaaaaaagcggatatggggctgacactacctcacgaacatttatttaatgatttatctggcgttgttgatgaacctttttatgaattctcacacgttttagtagataaaaaagtcagtgcagatattcagtggggactaaaatacgatccatattgttgttgcgataatatggataaaaaacccattgaagacgttatttttgaattaaataattttaaagagcttgggggcaaaacgattgttgatgctacaggttcatcgtcaattggtcgtgatattagaaaattaaaacaagttgcagaattaacggggattaatgtcgttgcttcttccggcctttatattgagaaatttgaaggaaaacgcctagctgatgatattgatgcgatggcaaaaatgatcgatgatgaattaaatatcggcattgacggtacagatattcgtgctggtatgattggcgaaattggtgtatctcctttctttacagatggtgaaaaaaatagtttacgtgccgctgcactggctcaaaataataacccttatgcctcaatgaatattcatatgcctggttggcaacgccgtggtgatgaagtattagatattcttttaacagaaatggggtgtgatccagccaaaatatcgttagcccattcagatccttctggtaaagatatcgattatcaatgcaaaatgcttgatcgaggtgtttggcttgaatttgacatgataggtcttgatatttctttccctaaagaaggcgccgcacccagtgtgatggatacggttgaagctgtcgcaaccttaatagaaagaggttatggtaaccaaattgtattaagtcatgatgtgtttttaaaacagatgtgggcaaaaaatggcggaaatggttgggggtttgtgcctaacgtttttctttcattattagcacagcgtggcattgataagacgataatagataagctgtgtattgataatccagctaatttattagca

SEQ ID NO: 32856 - DNA, 3156 bp, Proteus mirabilis
atgcctaagttttttatagacagaccaatatttgcgtgggtaattgccataattaccatgcttgctggtcttttggcactcatcaaactgcctgttgcacaatatccaacgattgcaccgccagcgatttccatctctgcggtctatccaggagctgatgcaaccacggtacagaatactgtaacccaagttatcgaacagaatatgaatggtatcgataacatggtttatatgtcttcaaccagtgattctgcaggtatgatgaatatcacgctgacctttgaagctggtactgaccctgatattgcgcaagtccaagtgcaaaataaattgcaattggcaatgcctcttttacctcaggaagtacaacaacaagggattagtgtcgataaatcttctagttcattcttaatggttgcaggttttatctctggtgatggctcgatgtcacaagatgacatcgccgactatgtaggtgcaacaattaaagatccattaagccgtgtcacaggggtgggtgaaacgcagttatttggtacacaatacgcaatgcgtatttggttagatccagataaactggtgaaatataacatgaccacacttgatgttattaatgcgattaaatcgcaaaataaccaagtggcggcaggtcaattaggtggtacgccaccagtgcctggtcagcgtttaaatgtatctatcattgcgcaaactcgacttaatacacctgagcaatttgctgatattctgatgaaagtcaatcaagacggttcacaggttaagctaaaagatctgggtattgttgagatgggggctgaaaactacagcacgattgctcgctttaatggcttacctgcagcaggtattggtattaaactggcaacaggtgctaacgcccttgataccgcaacagcagtacgtgcggcactggctgatatggagccattcttcccttctggattagaggtcgtttatccttacgatacaacaccatttgttaagatctctatttttgaagtggttaaaacgctcgttgaagccattatgctggtgtttgtagtcatgtatctgttcttacagaacttccgtgctacattaatcccaaccattgctgtgcccgtcgtattattagggactttcgccatattgtccgcgtttggctattcgataaacaccttgacgatgttcgcgatggtactagccatcggtctactggttgatgatgctatcgttgtagtagaaaacgttgaacgtgtgatgcaagaggaaggactgtcacctaaagaagcgacacgtaagtctatgggacaaatccaaggtgcattggtgggtattgccctcgtgttatctgcggtatttattccaatggcattctttggtggttcaacgggtgcgatttaccgacagttctcagttactattgtatcagcgatggtgctgtctgttttcgtggcattgattttaacccctgcactttgtgcgacattgttaaaaccaatcccgaaaggcagccatggtgtacaaacaggtttctttggttggtttaaccgcgtttttgaaaaaagtagccaccactatacagacagtgtttctcgtacactgcgaggtacaggtcgttacttactgatctacgtcttacttgttgctgctatggcaattatgtttgtgcgtttaccggcgtctttcttaccagaagaagaccaaggggtattactgacaatggttcaattgcccgctggatcaacccaagagcaaactcaagacgtattagcacaagtcaatgactactttaatactaaagaaaaagatgtggttaagtcggtctttaccgtcagcggctttggttttggtggtcaaggtcaaaacatggggcttgctttcgtcgtattaaatgattgggatgagcgtaaatcagaccaagacaaagtccctgctattgtcggtcgtgctaaccaagctctttctcaaattaaagaagcctttgtttactcctttaatattccagcgattgttgagttaggctctgcaggtggttttgaattcgagttaatcgataatgccaacctgggacacgaaaaactcatggaagcaagaaaccaattgcttggaatggcagcacaagagccacaaatgttgacgggtgtgcgtcctaacggtcaagaagatacctctcagtatcgtctttatatcgacttagaaaaagcacaagctcaaggtgttgcggtcagtgatatctactcaacattaggtacgatgtttggtggtagctacgttaacgactttatcgaccgtggtcgtgtgaagaaagtttacgttcaagcagaatcacaattccgcatgttgccacaagatattgctaatctttatgttcgtaacaatgcgggtcagatggtgcctttctcatccttcattgatactagtaaagatccttggttatatggctcaccacgtttagagcgttataatggtttaccagctgtccagatccaaggtagtgcaacaccgggacaaagtagtggtgatgcaatgctaatgatggaacaactcgccagcaaattaccaagtggtattggctacgagtggacgggtatgtcataccaagaacgtctatcaggtaaccaagcgccagcactgtatactatttcattaattgtagtattcctttgtttggcggcactctatgagagttggtcagtgcctttctcagttatgttagtcgtacctttaggggtcattggtgcattagcatttactacattgagagggcttgaaaacgacgtttactttaaggttgggctacttaccaccattgggttatcggcgaagaacgccatattgattgtcgaattcgccaaagacttaatggaaaaagagggtaaagggctagtagaagcgacgttagactccgttagaatgcgtctacgtccaattctaatgacatcgttagcctttatgcttggggttattcctctggtattaagtaacggtgcaggctccggtgcgcaaaactcagtaggtacaggggtattcggtggtatgattgccgcgacatcccttgctatttactttgttcctattttcttcgttgtgatccgcagaaggtttgcgaagaaaaacgaagacttagagcacccaaactatccgcaccaaactaag

SEQ ID NO: 32857 - DNA, 963 bp, Proteus mirabilis
ttgcatttacttggcacattacaacgaaatatcgcgctaacacttagtttaatgttgctaagttttctattcagtgcacctgctttttcggcaaagttggccattgttattgatgattttggttatcgaaaaaaagaagataaccaaatcttacaactgccaacagccgtttctattgccatcttacccaactcgccccatggtaaagagatggcaacaaaagcccatgcccaaggacgagagattcttattcatatgccaatggcacccattagcaaacaaccattagaaaaagataccttaaagccttccatggatcaggctgaaattaatcgcattattcaaaatgcaattaatcgtgtgccttatgctgtgggtatgaataatcatatggggagtgcgatgacatcggataggcaagcgatggatagagtgatcaaagcccttaatcattctgatctctattttcttgatagtgtcaccattggcaatacgcaagcggccacagcagccaaagcggctggcgttccttctttacgccggcatgtatttttagataatgtgcaaacagaagcagaaacccgacaacagcttaatcgtgctattaatttagcgcgtaaaaatggttttgccattgctattggtcacccccacccttcaaccgtaagggcattacaacagcagttgccactactacctgccgatattcagctagtcgcacccagtggtttgttaaccccttcaccagacagcccaatggtacaagagccacccgctgttataccgccaacagaacaatctaaagagccaaaacctgcaacatggttaaaaccagcacaacaagccattatttcaatgaaaaaaagtactcttatgaaagtacttactaaaaaattaatgaccttcgaacaagataagcaattcccttcccagcatttagaaagcaacaaagataaagtcgaa

SEQ ID NO: 32858 - DNA, 1878 bp, Proteus mirabilis
atggagacggtagagaaaaagagtattgcagggcaacaaactgctatacaaacagatttttcaacacgtaatgcctttgctcgtatcattcgctgtctttttgcagaaaaattattggatgataataaactgcaagttttcaatgatgaaaataacgttaagtacccgctttctgatgggatacatatccttcaatttaatcaaacgaccgtttttcctgcaaatacagttattaattgcggtgatattatccttaaatcaatggatggccgccaccgaatggtgcaatcccatgaagaacttatggagatactgaaaaacgaacttagtttcacccctacaacggagggaatgacaaaattcaataaagatgtagcaaacagtatccataatgatcgattagctagagcacatcggtcaaagtggcgggatacgatttctaatgagatggcacaagagggaacatcttgttttattgaatggataactcgtcattacagtcggcgtgatggtgcaacttttctcgatcagtggggcgctcttgaaggtcattcttattacccaacttggaagtctagacccggtttaagcgatgatgatattgtcgcactatcagctgaatttggtgcacgagttaatctgcgtatcgcagccatacaaaccgatatggtttattgtgagaagatgccccatattcaggatatccatcaatggttttcatcggcttttccaaccgtttggaataaatggtgtgagtggcttacaagtcaacaccaaaacccacaaaaatggttacctattcctctgcatccttggcatcttgaacactggatcattgagcatttctcaaaagaaatagatgaaggcattcttctaccattaggccctcaacttgagaccgcggcatccatgtcgtttagaaccatgcttcctaccgcatctaaatcaccctttatcaaattacctgttgctatctggatgactagcgaaatgcgtagccttcaagccaaatctattcatatggggccacgtattagtacgattattgaggatattttgcgggtggataaggattttgatggcaagctggactttttccgagaagaagtggcgtggcatttttgtcataacgtgcgtatggatgacgccgaaggtaagtttctctcggtcgtatttcgtgatacgcaagcatgggaaagaaacgataatttaatcgctatcacagttgcatcattatttactgaactcccacataaaccccaaccccttatcagcgagctgatcgcattatcaggcgacttacctgaaacatggtttcgtaattataccaaagtcatactgaaacccgttttagcgatgtatttaatttatggcattgcccttgaggcacatcaacaaaatacgcaagttttatttgatgattccggtcatgcggtcaccatgcttattcgtgattttggtgatggacgcagttgggctccagcactgcgccagcaaggttatgagcttcaaccttatatctggcccggcattttacccacggtgtttgaagatgatattgaacctgtcagaaccttcgttgtagatgcttgtcttgtcagccatttacatgaaattgcgctttgtttaactcaactttatgacatccctgatacccgcatatggactgtgatcggcgaagagcttgaacttgtgtttaaagcacttcaacccagagtagaggcggatttttggcacaaagagcgtgaacattttctccaccacccttggtatacccgctcattaatgagcatgcatttacagcaatatactgattaccgtcttcagcatgggcttaacaatccgttagctggtgaacaagtagataactctaagatc

SEQ ID NO: 32859 - DNA, 726 bp, Proteus mirabilis
atggcaaccaatgcaaaacccgtatatcagcgaatcttattaaagctgagtggcgaagccctgcaaggcgcagaaggttttggtatcgatgcgagcgtacttgatcgcatggctcaggaaattaaagaactcgttgaattgggcatacaagtcggtgtcgtaattggcggtggtaacttgttccgtggcgctggtctagcagctgcaggtatgaaccgtgttgtgggtgaccacatgggaatgctcgccacagtgatgaatggcttagcaatgcgtgatgcattgcatcgtgcttatgtcaatgcacgattaatgtcagcatttccacttaatggtgtttgtgataactacagttgggctgaggctattagcttattacgccatggccgagttgttatcttctcggcaggtacaggcaacccattctttacgactgactcagctgcgtgtttacgtggtattgaaattgaagctgacgttgtattgaaagcgacaaaagttgacggtgtattttcagccgatccaaccaaagatcctgatgcagtattatatgaaaagctgacttatcaggatgtattagaacgtgaattgaaagtcatggatcttgctgcattcacattagcccgagatcataatttacctatccgcgtattcaatatgaataaaccgggtgcattacgtcgggttgtaatgggtgaaagtgaaggaactttgatttctcacgct

SEQ ID NO: 32860 - DNA, 807 bp, Proteus mirabilis
atgaacaatttactgacgcttaatcaagtctcaatctatgatcctcacagcgaaaaaaagcgggtagataatctctcctttagccttaaacaggggcgaacgttagctattgtcggtgagagtggtagtggtaaaagcttaatcagtaaagccattattggcttacttccaagtacacttgcactatcgggagaaattttttttgatgaaaagccccttcatttatattcagagcaacaacggcgtgccctattagggacatcgctaggtatgattgtgcaaaacggcatgagtgcttttgatccgttgataaaaataggcaagcaagttagccaaactttaatttaccatttttcttatactaaattgcaagcattcaatgccactaaacaagcattggatgaggtgtttgagcatcaatctttaatgattatgcaggcatttcctcaccaattaagtggggggcaattacaacgtgtgatgattgccatggctttggcgttatcaccaaggttattaattgctgatgaacctactaccgcattagacgctcccttgcgcagagaaatattacagctattgcaacgtatcacgatatctaaaaacaccaccttaatttttatctcccatgatctaggattagtcagtcagattgctgatgatattttagtgatgaaagagggaaaattaatcgagtttggtgacaaaaacagcgtattagatacacctaagcaagcctatacccgttatttaattgaggctagagctaagctttcccaacgttttgcacaggtgctttatgctcgg

SEQ ID NO: 32861 - DNA, 1872 bp, Proteus mirabilis
atgagcattgatatcgaaaaatatcccacattggcgttggttgaaacacccgaagatttacgcctattaccaaaagagagtttacctaaactctgtgatgagctaaggctatatcttcttaacagtgtcagccgctcaagtggtcacttcgcctcaggtttaggtgctattgagttaacggttgcgcttcattacgtttataaaactccctttgacaatctgatttgggatgtgggccatcaggcttatcctcataaaatattaacgggtcgtcgtgatcgcattgatactattcgtcaaaaaaacggcttacatcccttcccttggcgtgatgagagtgaatatgacaaactctgtgttggtcattcatccacctctatcagtgctggactgggtatggctgttgctgcagagcaagaaaacctaggcagaaagactgtttgtgtgattggtgacggtgcaattactgcaggaatggcatttgaagccatgaatcatgccggtgatattaatccagatatgctagtggtacttaacgataatgaaatgtcgatttcagaaaatgtcggggcactaaataaccaccttgcacaacttctatctggcaaactgtataccacgctacgtgaaggtggcaaaaaagtcttttctggtattcccccaattaaagaattactgaaaaagacagaagaacatattaaaggcatggttgtgcccggcaccatgtttgaagagttaggttttaactatattggtccagttgatggtcacgatgttattgctttagtacaaacgctcacgaatatgcgcgatctaaaagggccgcaacttttacatattatgaccaaaaaaggtcggggttacgctcccgcagagcaagatccaatcagttggcatgcggtacctaaatttgatccgaagaccggtactttacctaaaagcccgaatgcacgcccgacgttttcaaaaatttttggggactggttatgtgaagaagccgccactgatgaaaaattaatggcaatcacccctgctatgcgtgaaggctctggtatggtgcgcttttctaaagagtaccccgcacaatactttgatgtcgcaattgcggagcaacacgccgtcaccttcgctgctggattagccattggtggttataagccgatcgtggctatttactctaccttcttacaacgcgcttatgatcaagtgatccacgatgtggctatccaaaaactcccggtactctttgctatcgatcgtggtggcattgttggtgcggatggtcagacccaccaaggagcttttgatctctctttcttacgctgtatccctaatatgattattatggcacctagcgatgaaaatgagtgtcgccaaatgttgcacacaggttaccattatcaagaagggcctgtcgctgtacgttatcctagaggatcaggggttggtgcgccattacaaccgctgagcgaacttcctataggaaaaggtattattcgtcgccaaggtaaaagtattgcaattttaaacttcggaaccttattacccgaagccttagatgttgcagaaaaactggatgcaacagttgcagacatgcgctttatcaaaccactagataaagaactgatcctttctcttgccaaacaacacgacatactggtcaccttagaagaaaatgccattatgggtggcgcaggtagcggcgttaacgagttattaatgcaagagcgttgtttagtgcccgtactcaatttagggttacctgatctttttgtgccacaaggtggacaagaagagatcagagccgatttaggacttgatgcaacaggcattgaaaaatcgattaaagcttatcaggctcattctttgagc

SEQ ID NO: 32862 - DNA, 2385 bp, Proteus mirabilis
gtggaatttaacattcatatgctagacgcggaagatcgcgataatgtcgacctttcacgtttttctacctcaaattatatcattccgggtatgtactatttagatattcgtctaaatggtcgcgactttcctcgccaaaatattaattatattgaagtagcagataatcattccgtggcgtgtatcgaccccactcttttaaaaaagttaacaatcaaccaagaaaaccaaaaatatatcaaacaaatatcaccagattgttttgatattagccaattacccggtatctcgattaaaaatgatggtggtgtacttgatatcacgttaccgcgctcattaatgaaatatgaagaatctgattggacacctccggagctttgggatagcggggtctctgggcttatttttgattatacattaacaggaacgtcaactcgacctaataaaggcaataataacaataccttaactggttatggtcaagcgggattaaacttgggtgaatggcgtttaagagctgaatatcaaggcaattattcttctgaatattcatctaacaatcgttttgattggaaccaaatttatgcctataagccattaccagatctcgcagccaaactaacggttggggaaacttatttaaactctcaaatttttgatagtttccgttttacaggagccaatttacaaagcgatgagagaatgttacccccttctctccaaggctatgcacctgaaattcatggcatcgccaataccaatgcaaaagtgacggtaacccaaaatggacgtttaatttatgagacaaccgtacctgctggccctttcgtgattaaccatctacaaaataccgtacagggtcaactcgatgttagagttgaagagcaaaatggtaagattaacgaatttcaagtgcaaaccgctaatttgccttatatgactcgcccaggatctgtgcgttttaatacctcactgggacagtcatccgtgaacaaccataaaatgcaaggccctattttctatcaaggggatttttcatgggggatgaataatacatggtctctctatggtggtgctttacttaccgctaaagattataacgcatggtctttaggtatcggccatgatatgggacgttttggtaccctttctggcgatattacacagtcttatagcaaaacctatgataatgaaaagatcaatgggatgtcttttaaactaaactatgcaaaaacttttgatgagtaccacagtaccattacttttgcaggttatcgtttctcagaaaaaacatttcgctctttttctcagtatattgatgagcgttataacggcatcaataataatggctatgaaaaagaaatgtacaccattaccggtaataaaactttttgggctgatgatgcagaaaaatctaccaccctctatctctcttatcgccaccaaaattactgggataaaaatactcaagagcagtatggtgtcacagtaagtcgtaatttttccattatggggattgagcaaatcaataccaacttgtcagcatttcgtacccaatataaagggaatactgacgatacgctctcttttaatatttcactaccattaggaagtggtcgcaatattggttataacttgcaagataacaatggcaaagtgacacaaatggcctcttatgctgataatcgcgattataataatttatggcgcataagagcaggcttaagttcggataagaaagccaataccgatggttattatcaacatcgttcccagtatgcagaaatcaatgccaatgcaagctatcaacaagataattacttagccgtgggcgcaacgataaaaggcggttttactgctactcgttatggcgctgcattacacagtagcagtatgacctctagcaccgcaagaataatggtggatactgatggtgttgcaggggtgccctttaatggtcaaagcacgactacgaaccgcttcggcattggtgtactaaccgacttaacaagttataacaatgttgatgcacgtattgacgtcgataagatggatcaagatatcgaaacgcgtaaagccattgcttcaacaaccttaacagaaggtgccattggttattaccaatttccggttcgtcaaggtgaacgcttaatggctgtcttacagacaactgataataaataccctccttttggtgcggaagtcaccaatcaaaaaggggaaagtattggtatggtgatggaagaaagccttgtttatattgcgggtgttaaccttaatgaatcattaaatgtaatttggaacggtaaaacacaatgttcaattaccattcccgcggaaataacagatcccttaaaacatcaatcgctcgtttgtcaggatcgt

SEQ ID NO: 32863 - DNA, 453 bp, Proteus mirabilis
atgaacgaaccgacagtgactcccccaggtttcttcaaaaagttacgcctagggaacgagtatctaaaaacctggccggttgagaagcaattagccccagtttttcctgaaaatagaatgataaaagcaacgcgttttggcatacgttatatgcctcctatcgctatttttacattaacctggcaaattgcattaggtggcgatttggggccggcgatcactactgcactttttgcctgtagcctgccaatgcaaggattatggtggttaggaaaacgcgctgcaacgccattacccgctgtgttactcaattggttttatgaaattcgtgaaaaatttgagcaagcgggtattgcattagccccagtagaaaagacgccaacctatctctcattagcgcatttgcttaaacgtgcttttaagcaacttgatcgctcttttcttgatgatgtg

SEQ ID NO: 32864 - DNA, 1213 bp, Proteus mirabilis
atgaagctaacagccagacaagtagagacttccaagccaaaagagaaagcttataaactttctgacggagggggcatgtatttagaagttgctccgaatggttctaagtattggcgtatgaaatatagatatgctggtaaagagaaaaggctggctttaggtgtatacccatcaatatcactcgcacaagctagggcgaagagagaagaagccaagcgcatattagcgttaggtgatgatccatctttagtgaagaaagcagaaaagagagagaaagaatctcaagtaaataatagctttgaaaaaattacgcttgaatggcatgactataaaaagccgaattggtcaaaaggttatgcggatgatttactagaagccttccagaaagatatctttccttatattggtaaagttagcattacagaaattaaaccgttagatatgttagaagtgccttcggaagttagaaaaacgcggtgtgttggataagcttaaaaagataaggcaggcatgtaaccaagtattccgctatgcaattgtgacaggacgggctgagtataatcccgcatcagaattagccggcgcactgtctactccaaaagctaagcattttcctcacttaaatgtgaatgagttacctgagtttttacaggcactatctgtatgtagtggaagtaagatcactcagattgcgacaaagctattaatgataacaggtgttcgtactattgagcttagagctgctgaatggtcagaaattgattttgataaagctatttgggaaattccaaaagaacgtatgaaaatgcgtcgccctcacatggtgccattatctacacaggccttagaattattcaaagaaatacaaaccataacaggaaagtttaagtatatctttcatggtaggaatgatgcttctaaaccaatgagtgaagcggccataaatcaggttatcaagcgtattggttatgatggtagagccacaggtcacggattcagacatacaatgagcaccatcctgcacgaacaaggctataactctgcatggattgagacgcagcttgcacacgttgataaaaactctattcgtggaacgtataatcacgctcagtatattgatggccgtagagaaatgcttcaatggtacgctgattatatggatactttagagaacggggataatgttgtgcacggtaactttaaacgcgcttaa

SEQ ID NO: 32865 - DNA, 291 bp, Proteus mirabilis
atgttgtatacttactccgtctctatttaccaaagtgatttggacgcatttttgtctttattgacaaagcatgatgaagttttattaatccaagatggtgtgttagccgttcttgaagataatcctttattaatttattgtctggctcagcaaatttctgtttatgcattaattgatgatgttctcgcgcgaggcctaaaagatcaggtttctcatcagattaaacttatcaattatggtgattttgtcgatttaacggtaaaacacccccaacaaattcactggggcgcg

SEQ ID NO: 32866 - DNA, 762 bp, Proteus mirabilis
atgttgcaatatcaacccgatcatactgtattaagagataaaataattctagtaacgggggctggtgatggcataggtaaagaagctgctctcacatatgctcgctatggtgcgacattaatcttgttaggacgtaccttatctaagcttgaagatgtacaaaatgagattatcacttcaggcgggcaacaaccgatgctttaccctttagatctactcaccgcgagcgagaacgattatcaggaatttgctgatactatcgtaaaacgttttcctcatttggacggtgtattacaaaatgccggcctactcggtgtcgttgagccgataattaaccaaccaagtacactttggcatgatgtgatgcaagtcaacgttaatgcaacctttatgttgactaaagccttaatccccctaatgcttaaggcacctcatgcaagccttattttgacaacctccagtgtaggtcgccaaggccgttatggttggggggcttattctgtctctaaatttgccacagaaggcttaatgcaagtgttacatgaagaatataaagacagtagcttgcgtattaactgcatcaatccgggtggaacacgcaccagtatgcgagcaagtgctttccccgatgaaaatgcacaaaaacttaaaacgccaaaagatctaatgccgttatatctctatctaatgagtgatgacagcattgaagtgagtggtcaatctttagatgcacaacccgatcgtaaagccggacctgctgaa

SEQ ID NO: 32867 - DNA, 2202 bp, Proteus mirabilis
aggtaaagaaaaattaaaaatttaaagggatcaacagtgtctaaaaaaattattgctaccaacctattacttactctccccttcagtctgttatcgttacaaattcatgccgcaatgacacaaaattcacctgataaaatcattgttaccgcatccccctcacaacatccgcaaggaccaatttcaggtttagtggcaacaaaaacactatcaacaaataaaatacttagtgatatagataagacaccacaatcaatcagtgtcattacacgtgaccagatggatgcgcaagatgtcagttctgtctctcaagcattgcggtatacacctggcgttttcactgaatatcgcggcagttcaaaccgaaatgatgaaatctttattcgtggatatagctatgccccccgttttcttgatggacttagttatggtatgggagcctcatcttctacaggagctattgacccttggctattagagagagttgagctgatccgtggcccgtcttctgttctatatggtcaattaaatccaggtggtcttgtggcaatgaccagcaaaagacccacttcaacaaccattaatcatattcaagcacgtgtaggaaatgataaattagcagagacagcttttgattttgcaggctcattaagtgatgataatcgtattctctatcgccttaatggattagcaaaaacacaacatactcaaattaaagactataaagaagaacgatttgcccttgcccctgccatcacttttttgccaaatgagcagacacgtttaacgttattaagttttattcaacaagagcccgaagcgggataccgtaattttttgccagcttatggtacggtcaaaaaaacacccgaaggcaccattccatttgatttcaatgtaaataatgctgattatcaccaatcatggcgtcaacaatatggcgttggttatgaatttgaacatgaatttaatgatagattaaaattgatccaaaatgcccgttatagccatatcaaacaaaaatataaatatcttgtttttggttcattaagaaaagataacccttatattctggaacgccgagctcaacaggaaaaacgagaaacagatacatttggtattgatactcgactacaagctgattttgatactgaaaaattagcgcatacagtaattataggtattgattatcaatggagtaaaaataaagacaatttattgcaagcgatgggcccagaatatgatctggattggcgaaatcctaattatcattatcctattgatatcagtttacaaaaagcggtgacaaatcaattacaaaaacacgaccagttagggatctatttgcaagatcagatccaatggaaaaactggatcttattagggggattacgccaagattgggcgcaagttcgtacctatgatcacatcaaaaacagcaaagaccaacaagacgaccagaagctaaccggtcgagtgggtctactctatgcctttgataatggtatttcaccttatattagttatagcacctcttttgaacctaatttacagacacgaagagctccgggtagtgcaccatttgagccaagtgaaggacgtcaattagaagcaggaataaaatacctcaccccaaatgaacaaacattagcaacactctctatttaccaattacaacaacgtaatgtgactaactataacgctgaaaaagcctattttgagccagtaggtgaaattagaagccgtggtattgaagcgcaaattaatagccaattaactgaaaatatatcatttattagtagctatgcttataccgatactgaagtgagaaaaaccatcaccgcaggtacacaaggaaaagaattaccacgggttcctaaacatatggcatcattttgggggcagtatgatgaaacatcagggctatttaatggtgctaaagcgggctttggtgtgagatatatcggtgtatctcaaggcgatactaaaaatacgattagtgtacctgcagtcactttgtatgatgccatggtaggttattctttaggcgaattatcctcctctttaaaaggggctgaagttcaactaaatatgaataatattgccaacaaacactatgttgcctcttgtgctggtgaaactgcctgtttttatggcattggcagaaccatgacagcaacgataaattaccgctggtgatca

SEQ ID NO: 32868 - DNA, 165 bp, Proteus mirabilis
atggctaaaggtattcgcgagaaaattaaactcgtttcttctgctggtacaggtcacttctataccactacgaagaacaaacgcactatgccagaaaaactggaaatgaaaaaattcgatccagttgttcgtcagcatgtgacttataaagaagctaaaattaaa

SEQ ID NO: 32869 - DNA, 531 bp, Proteus mirabilis
atgtctgaaatagcaacggtagctcgcccctacgccaaagcagcttttgactttgctgtggaaaaccaggctgtcgataaatggcaggttatgctggcattcaccgctgaagttgcacgcaatgagcaggtaaccgaattactttctggttctttagcatcagaaaaactggctgacatctttatcgacctttgtggcgatcaaattgatgaacatgctcagaacttaattcgtgttatggctgagaatgaccgtttatcaacattgccggaagtattgagccaatttattcaattgcgcgcagtactcgagtcaacggttgatgttgaagtcacttctgccattgagctaactaaacagcagctagctaacatttctgcagcgatggaaaaacgtctatcacgcaaagtgaagctgaattgcaaaattgataagtccgttatcgcaggcatgattatacgcgccggtgaccttgtcatcgacggtagtgttcgtggccgtttagagcgattaactgacgtcttgcagtct

SEQ ID NO: 32870 - DNA, 138 bp, Proteus mirabilis
ttgctgaacttactgcgtgagcagttcaatctgcgtatgcaggcagcaagtggtcagttacaacagtctcatctgttgaaacaagtgcgtcgtaatatcgcacgcgttaagactttactgactgagaaggcgggtgcg

SEQ ID NO: 32871 - DNA, 876 bp, Proteus mirabilis
atgaatcaacctaatcgagcagcggtaacgacatccacactgtacatagtacccacacccattggtaatctgggcgatatcacccagcgggcacttgatgtgctgtctcatgtcgatttaatagctgcagaagatacccgtcatacagggcttctattacagcattttgccattaacgcacgtttgtttgcgttacatgatcataatgaacagcaaaaagcagatcaattaattagcaaattacaacaagggctaagtatcgcattagtctctgatgcaggtacaccattaattaatgatcccggctatcatttagtcaatcagtgtcgcaaaaacggtataaaagtggtgccattacctggggcatgtgcggcaattaccgcgctatcagccgccggattaccttctgaccgtttttgttatgaaggttttttaccagcaaaaacaaaaagtcgtcaagattgtttgcgtgatttagcacaagagccacgtactttaatcttttatgagtccacccaccgtttattagatagtttagcggatatggtgacggtttggggggaagcgcgctatgttgtattggcaagagaattaaccaaaacgtgggaaaccattcaaggaatgcccgttggggaattacttaactgggttcgtgaagatgaaaatcgccgtaaaggagaaatggtattaattgtggaagggtatcaaaagccacaagaagaccattttgccccagaagtattacgcacattggcgattttacaaaaagagttacctttgaaaaaggcggcagcagttaccgctgagatttatggcgtgaagaaaaatgcgttgtacaaacacgtcattgcgcaaaatgaagcggaacaagatcag

SEQ ID NO: 32872 - DNA, 642 bp, Proteus mirabilis
atgcgtatcattctactaggcgctccaggcgctggtaaaggcactcaggctcaattcattaaagaaaactatggtatcccacagatttcaaccggtgatatgttacgtgctgcggttagcgcaggcacggaattaggactgaaagcaaaagcattgatggataacggtcaattagtgactgatgaattagtaatagcattagtgaaagagcgtatcaaacaagacgattgccgtaatggtttcttgttggatgggttcccaagaacaattccacaagctgatgcaatgaaagaagcgggtatcaatgttgatttcgtactggaatttgctgtacctgatgaaattattgttgaacgtattgttggccgtcgagtgcacgcgccatcaggtcgtgtttatcacattaaatttaatccacctaaagttgaaaaccgtgacgatgtgacaggtgaagagttaacaactcgtaaagatgaccaagaagaaacagtgcgtaaacgtttagtcgaatatcattctcaaacagcgcctttagtttcttattaccaaaatgaagctaaagcgggtaacgcgcagtaccacaaaattgatggtacacagaaagtaagcgaaattaatgctgaactgaaaaacatcctcggt

SEQ ID NO: 32873 - DNA, 792 bp, Proteus mirabilis
gtggcacaacgagactatgtgggacgaggacagtcatctgctcgtcgtaaaaagacaacgaaaggcaaaggtaaaaaggcggccagtgggttgcctttaaccacacttattgtagcaattgcgcttgtggcgctatttgttggcggcctctattttattacccataataaaaaagaggttgtcgaaccaacgtcatcaagtgcagggcaacaaccaactaacaacttaccacctaaaccgcaagagcgttggcaatatatcaaagagctcgagaatcgacaggtggggaacccattacagccaccagcgacctcttcagggagccagattaatccgaaagcgacactttcaccggagcaattacgttttttacaacaaattgaagcggataaacgtcaaccggcggtagagttaccagaagtgccttataacggtgaagtaccacgttcacaggttgtcattaccccaccgacaaccaccgcaccttcggtacaaccttcgcaaccttcagcaccggtaaaacaggagcctgcacccgcgataacgacaccaaaacctgcgacgactgaagcgcgctttttagtccaatgcggttcatttaaaaccaatgaacaagccgaatctgtacgcgcaaccttagcattttccggtatcgaaagccgtgtgaccaaaggaaatgacggctggatccgcgttttatctggcccatttaataaagagcaagccaatacgctaagccgtcaagctgcaggcgcaggtgtatcaggttgtattcttcgtactgcggggggt

SEQ ID NO: 32874 - DNA, 699 bp, Proteus mirabilis
atggcgatactgaactgtaaagtctcactcgttgagccgataacagatacggtgtatcgggtaagattattacctgatggcccatttgattttcaggctggacaataccttttagcggttatggatgagcgagataagcgcccattctctattgcctctattcccgaaaataaagactttattgagcttcatattggcgcgtcagatctgaatctttacgcaatggctgtgctcgatcttattttagaaactcaacaattaaagattgatattccccatggtaatgcgtggtttagacaacagagccaacgtcctttgttgcttatcgcaggaggaacaggattttcttatactcactctatcttgctagcggcattacaagaaaatcctcaacgtgcgataacgctttattggggaggacgagagcaggtacatctttatgatcttaatgagttgcaagatttaacggaaaagtatccctcattatcagtcgtacctgttgttgaacaacctgatgatgcttggcgtggtagaaaagggactgtattaacggcaattagtgaagattttggcgatttatcatcctatgatatttatatcgcaggacgttttgaaatggctaaaatagcgcgagatcgtttttgtaatgagcgtaatgctgatagagaacgcttatttagtgatgcttttgagtttatt

SEQ ID NO: 32875 - DNA, 1329 bp, Proteus mirabilis
atgtcgcaaacaaaccaagtgcctaaaattggattcgtttctttaggttgtcctaaaaatttagtggactctgaacgtatcctcaccgaactgcgtacagaaggttatcaagttgttcctacctatgatgatgctgatttagtcatcgtcaatacctgtggctttattgatagcgcagtacaagaatctcttgaagccattggcgaagcactcgatgaaaacggtaaagttatcgtcaccggttgtttaggtgccaaagaaaatcaaatccgtgaagttcacccaaaagtgctggaaatcaccggccctcatagttatgaacaagtgttatcacatattcatcactatgttcccaaaccttcccataacccatttaccagcttggttcccgagcagggcgttaaattaacccctcgtcattacgcttatctaaaaatttctgaaggttgtaatcaccgttgtactttttgcattattccttcaatgcgaggtgatttagacagtcgcccaattggtgaagtgttaaatgaagcgaaaagattagtcaatgctggggtgaaagagttactggttatctcacaagatacttccgcttatggggttgataccaaacatcaaaccggtttttgggatggtatgccagttaaaaccagtatggtcagtttatgtgaacaactggcaaaattgggtatttgggtacgtttacattatgtttacccttatccacatgtggatgaggttattccattaatggcagaaggcaaaattttaccttatttagatattccgctacaacacgctagcccgaaagtgctgaaattaatgaagcgtccaggctctgttgaacgtactttagagcgtgtaaaacgttggcgagaaatttgtcctgaattaacgttacgttcaacctttattgtcggtttcccgggggaaacagaagaagatttccaaatgctattggatttcttgaccgaagctcgtttagatcgcgtgggttgttttaaatatagccccgttgaaggtgcgaaagcgaatgaattacctgatcaagttcctgaagagataaaagaagagcgttaccatcgttttatgcaactacagcaacaaatttccaccgagcgtctgcaagagaaaataggtaaagttttaccggttatcattgatgaagtggatgaagaaggtgctattggccgtagtatggcggacgcgccggaaattgatggtgctgtttaccttaatgagcagtttgatgtcgagccaggacagatcgtacgtgtgctgattgagcatgctgatgaatatgatctgtggggtaccatcgtcgaacaa

SEQ ID NO: 32876 - DNA, 1266 bp, Proteus mirabilis
atgaaaacgtcatacaacttacgcagtattgcagcaaaggcaatagctcaagttttagatcaaggcttatcattaagttcggtgatccctgaattacaaaaaaacatttcagataaagacaaagcgctcttgcaagagctctgctttggtaccttacgtaccttaccccagctagaatggatcatccaacaactaatggataaaccactgaaaggtaaacaacgaattttacattacctcattatggtcggtttatatcagctcctttatactcgagttcctgcccatgcagcactcgctgaaactgttaatggtgcgatcgcactgaaaaaaccacaattaaaagggttaattaacggtgtattacgccaatttcagcgtcaacaagatgtattaatggaacgtttccaaaataatgatagccgctatttgcacccttcttggttactcacacgaataaaaaacgcctaccctgagctatgggaaagtattattgaaggaaataaccaaaagccaccaatgtggttacgggtaaatcaaatacatcattcacgtgaacagtacttagcgctgcttgaaaaagaagggatcagcgcgttctccgatgaccaccatcccaatgctattcgtttagaaacaccttgtaatgttcacctgttaccagggtttaatgagggctgggtcactgttcaagaccgcagcgctcagcgttgtgcagaattattagcgccacaaaataacgaacaaattcttgatttatgtgcagcccctgggggaaaaacaacccatatcttagaaatagcccctaaagcgcatgttctcgccattgatatcgatgagcaacgtttagccagagttaaagaaaatctaaaccgcttaaaactacatgccacagtcaaaagtggtgatggacgttatccagagcaatggtgtgcaaatatgcaatttgacaggatcttacttgatgctccttgctcagcaactggcgttatacgtcgccatccagatatcaaatggctacgtcgtaatgaagacatagctcagttagcgcaaattcaaaaagaaatattacatgctatatggccatacctaaaatcaggcggcacattagtttatgctacttgttctattttaccggaagaaaatagccaacaaattgcagccttcttatcgtcaatgcaagatgctcaatgtgactatcagcatcaatgcttaccggagcaatatagcggtgatggcttcttttatgcgctgatcaacaaaaaa

SEQ ID NO: 32877 - DNA, 210 bp, Proteus mirabilis
cgacccttggtttacaggccttcaaacgccggaacaagtccaagcgctcccgcgaacagtgttgttaacgcacaccctgttaatcctttaaccacgacaaccacggataaggattacggagtgctcctgcaagttgtggccttcaccaccgatgtaggaagaaacttcgaaaccgttagtcaaacgaacacggcatactttacgcagtgc

SEQ ID NO: 32878 - DNA, 1131 bp, Proteus mirabilis
atgaatgcccctttacgattagccattgttagacaaaaataccgtccagatggcggtgctgagcgctttatcgcacgtgcacttgatgccttatctagtgatgcactagaacttaacgtcattactcgacaatggcagggtgatacccatcctgattggcatatacatctatgcaaccccaaaaaatatggtcgtattagtcgggagtctggttttgctaaagcggctagagcatgctggcaagaaaaccactttgatattgtacaaagccatgagcgtatcgcgggatgtgatatttttcgtgcaggtgatggcgtacatcgtcgttggttattacaacgacagaaaatattacctcgttggaaaggacgttggttactttatgatagataccaccgttatgtgatgaatgcagaacaacagatgtatgctgatccagcgttaaaacaagttatttgtaactcacagatggtgaaaaaggaaattattgcggattttggcctctctgccgataaaatatctgttatttataatgcaattgaccataatgtttttgtaccagcaacaaattctcaaaaacagcgcttaaaaacacagtataatatccctcaagataagccttgttttatttatgtaggatcgggatttgaacgaaaagggttagctgcagctatttcagccattgccaatacatcgtcaatcttacttgtcgtaggtagtgataaaaatcagccaaaatatgaacaacttgcaacacaattaggctgtagacagcgtatcttctttttgggtatgcaaaaaaagacgctcgacttttatcaaatagccgatgccttattactaccaacgctttacgatccgtttcccaatgttattcttgaggcgttatcatgtggtttgcctgtgatcacttcaaccagttgtggtggtgcagaatttattcaaaatggtaaaaatgggtttgtttgtgatgcgttagatattcctgcattaacagaggcaattgtgcaaattccaacaaactcagcatggtctgaaatgtcgcaagtggcgcgagaaactatcctcccctatacaccgaagcgattatcagacgagcttatttcactttataaacggatattaactttg

SEQ ID NO: 32879 - DNA, 489 bp, Proteus mirabilis
atggatcaggacattaccttgtcaaatttatgcccctgcaatagccaattgccttatagtgagtgctgtgagccttacttattagggacaaaaaatgcccctacagctcaagcgttaatgcgctctcgctatagtgcttttgtgactcataatgcagatcacctaatcaaaacatggcacccttcgtgtcgtacaccttctttacgggatgagttaatcgccacgtttcccaatacacaatggctagggttacatattatatcggcacaagaaaaccctcgtgataacgaagcctttgttgaattctcagcttgctttattgaaataaatgctgatgataagcagtatctacatgaacgctctcgttttctaaaaatagacgactgctggttttatattgatggtgtacagcctaaagtaggacgaaacgatccctgtccttgtggctcaggccgtaaatacaaaaaatgttgtgaacacaacagaaaa

SEQ ID NO: 32880 - DNA, 966 bp, Proteus mirabilis
atgtcagtcccttcacaggaaaatatcacactaaccaaagaagacttacgccaactgcatgtttcaagttcactttatcgttggtttttgcgttattttccccatggaggtacttaccgtgctatccataatgaattgataaaacaacgtcaaacacaatggatagaaagcttaattcaatatatttatctgcgtcattttagtcagtcctcttttgccaaacaggaacaagaagtgatagaaaacatcttgtccctgttaggcaatgaaaaacaaaccggtgtgacattacaacgtttaccctatcaccaaccgcaatctagcgacgaaaacattcagttttctaccgaatggcatcaactgattgtcaaaagccaacaatttaataccgccctcgcattatgtggtcgtgataatattgtcgccttttccggtgatgaaaacagtattgctaacactggttatagtaaccaattaatcaacagcggatttgctggaaagatcagtaatacggcagatcaatgtcgtattggtagcttaggaggacgctctcgtatttgtaatagtggcaacgatgttaaaatttacgcttctggtcaaggggcgcatattgccaatagtggtataagaaactttattaatgcgactcaatcccgtacaaaagtcaccaatactggtgatttagcacatattactgttactggcgataacgccattgctatcaacacaggtgataactgcacactctctgtatctggggataacagcgtgtgtatctcaacagggcatcttcagcaattttgcttaggaaaaggcggtagcgctgtgattgcctatcacgatggaaaacgtacccgctttaacgttttctatgaaggtgaagataatattgaggccggcattcactactacttagatgaaaaacagcgccctgttgcaatggataatattactgaactcaataat

SEQ ID NO: 32881 - DNA, 1083 bp, Proteus mirabilis
atggcgggaaacagtatcgggcaattatttagagtaaccacttttggtgagtctcatggcacagcgttaggttgcattgtggatggtgttcctcccggattacctttaacgcaagcggatctacaagttgatttagatagacgtaaaccgggaacttcacgttataccacacaacgtagagagcctgatcaagtgcgtattttatcgggtgtttttaatggtgtaacaacgggaaccagtattggattattaatagaaaatacggatcagcgctctcaagattatagcgaaattaaagatgtattccgcccagggcatgcagactacacctatgaacagaaatatggtttacgtgattatcgtggcgggggacgctcttctgctcgagaaaccgccatgcgtgtcgcagcgggtgctattgccaaaaaataccttaaacaaaaatttggtattgaagtaaaaggttacttatctcaattagggccgattagttgtgagttagttgattggtcaattgtagaaaccaacccattcttttgcccagatccttctcgcctagatgcccttgatgaatatatgcgagcgctaaaaaaagagggtaattctataggtgccaaagttaccgtggttgcagaaggtgtacctgcaggattaggcgaacccgtttttgatagacttgatgccgatttggctcatgcgttaatgagcatcaacgcagtaaaaggcgttgaaatcggagatggttttgatgtggtgaccttaaaagggactgaaaaccgcgatgaaattaccaaagaaggttttagcagtaatcacgcggggggcgtattaggtggcattagtagtggtcaacctattattgcacacattgctttaaagccaacttcaagtattactattgctggtaagacacttaatcgacaaggtgaagaagtcgatatgatcaccaaagggcgacatgatccgtgtgtcggtatccgagctgttcctattgcagaagctatgatggctattgtgttacttgatcatgcgttacgtcaacggggtcaatgtggtgatgttattcctccattaatgcaatgg

SEQ ID NO: 32882 - DNA, 657 bp, Proteus mirabilis
atgaaaaagaatatttccctaatattatttttactattttccctcataacggctagccaagctgctggaataagtgtgggaggaacacgttttgtctatgacgataatctacgtgaaatcagtattccaattatgaatacggataaggaaaaaccctatttaattcaaagttgggtttcagcttatcaaggtgatgaaaaaacaccttttattgcaacacctccactatttcgtattgagccagatagttcaggcacggcgcgaatttcatataccggagcacctttggcatcaaaccaagaagtggtttattggctcaatatcaaatccattccaccgatggaaaaaagtccagagaatcaactccaattagtgattaactctcaatttaaattgtttctccgtgcccatgatattgaaccacttgattttgataaggtgaaattatctaaacaaaataaagggttagtaataaataacgatacgccgtatcacctgacaattaaacatatcttagtgggtgataaacgctacccatttaatgattttgttaatcctcaccaagaagtggtcttgctaaaagaaaatcatattccgcagaaagttaccgttcaatttatcaatgattacggtgcgactgtagataaagtattaaat

SEQ ID NO: 32883 - DNA, 576 bp, Proteus mirabilis
atgtttaagaaggcgttattgagtttaactgcaggtgcattattatttaatgctagttcagcattagcggctgattatcaaattgataaacaagggcaacatgcttttgtgcaatttcgtatccaacacttaggttatagctggttatacggcacatttaaagattttgatggaagcttcacttacgataaagaagatccttcaaaagataaagtcgatgttgtgattaaaacgggtagtttagatactaatcacgctgaacgtgacaaacacttacgtagtgctgatttttttaacgtcagtaaatatcctgaagctaagtttgtctcaaccaaagtgactcgtgatggtgaaaattatacggtgacgggtgatttaacacttaatggcgttacaaaaccaatttcactaaatgcaaaattaattggtgaaggtactgatccgtggaaagggtatcgcgctggttttgaagcaacaggtaaagttaatctgaaagagtttaactttaaatcagatttaggaccaaaatcgcaagaagcagaattaatcatctctgttgaaggtgtgaaaaaaaat

SEQ ID NO: 32884 - DNA, 669 bp, Proteus mirabilis
atggaaaacgcaaccatagagacactcttaccgagagaaaaactgctgttgcatggtgtagaatcgttaacggatgcagagttattggccatttttttacgtacaggcacctatgaaaaatcggtattagaattagccgacttcttacttagaaagtgtggttctctctatcatgtgatcaatgcggattatgaaacattaggctgttttaaggggataggcgtgggtaaatttacccaattacaagccattaatgagatggctcaacgctttattaaaacaaagtttatgcataaaaatatcctctcctcatccgcagaaaccaaaagttatttgcaaaaacgacttaattggcgtgatagagaagtatttgtcgtgctatttttagataaccaaaaccaaatgatcgattgtgaggaaatgtttaaaggaacggtggatcgtgttgaagttcaccccagagaaattattcgccagtcgattaaaaagaacgctgcatcgattattttagcccataaccatccttcaggtctgtctgagccaagtcttgccgataagcagataacagaaaaaatttttacagcctgtcaattagtcggtataaaagtgcttgatcaccttgtggtagggcatgataactgtgtttcttttgctgagcgaggttggtta

SEQ ID NO: 32885 - DNA, 4731 bp, Proteus mirabilis
atgaaatcaaaaaactttaaactttcaccctccgggcgacttgctgcgtctttagcaataatttttgtctctcttaatgcttatggcaatggcatcgtgcccgatgcaggccatcaagggccggatgtctctgctgttaatggtggtacgcaagtgattaatatagtcacgccaaataacgaagggatttctcataaccaataccaagacttcaatgttggcaagcctggggctgtatttaataacgcattagaagcgggacaatctcaacttgcgggtcatttaaacgctaacagcaatttaaatggtcaagctgcctctttaattttgaatgaagttgttagccgcaacccatcattcttattaggtcagcaagaggtctttggtatcgctgctgaatatgtgctttctaacccaaatggtatcacatgtgatggttgtggttttataaataccagccgctcttcattagttgttggtaatccgctctttgaaaatggtcagctaaaaggctatagcaccctcaacaacaccaatttactatcgcttggtaaaaatggcttaaatacaacagggttgttagacttaattgctcctcgtattgatagtagagggaaaatcactgccgctgaaatttcagcctttactggacaaaacaccttctcacaacattttgatattctctcttcacaaaaacccgtttcagcattagatagctatttctttggtagtatgcaatcgggtcgtatccgcattattaatacggctgaaggtagtggagttaaattagcaggtaaatttaccgcagataacgacctaagtgttaaagccgataatattcaaacagatagtcaagtccgttatgacagttacgataaagatggcagtgaaaattaccaaaactatcgtggcgggatcacggttaataatagtggctctagtcaaacactcactaaaaccgaattaaaaggtaaaaacatcacattagtagcgagtagccataatcaaatcaaagcctctgatttaatgggggatgatatcactttacaaggtgctgatttaactatcgatggtaaacagctacagcaaaaagagaccgatattgataatcgctggttctactcgtggaaatacgatgtgactaaagagaaagaacaaatacagcaaattggtagccaaattgatgctaaaaataatgcaacattaaccgcaattaaaggagatgttaccttagacgcggctaaaattaatgcggggaataaccttgcaattaatgccaataaaaatatccatatcaatggattagttgagaaagaaagtcgtagtgaaaatggcaataaacgtaatcatacttctcgcttagaaagtggtagttggagtaacagccaccaaactgagacgttaaaagccagtgaattaacggcaggtaaagatcttggtttagatgctcaaggctcaataacggcgcaaggtgctaaactgcatgcgaatgaaaatgtgctggtcaatgccaaagataatattaatttaaacgtccaaaaaaccaataatgataaaacagtcaccgataatcatgttatgtggggaggtattggtggtggtcagaataaaaataataataatcaacaacaagttagtcatgcaacacaattaaccgctgatggtcaattgctccttgctgcagataacaatgtcaacattaccggtagccaagtaaaaggtaaccaaggtgcttttgttaaaaccacacaaggtgatgtcgtcattgataatgcgatgagtgaaaccatcagtaaaatcgatgaacgcacaggaaccgcgtttaatatcactaaaagttcacataaaaatgaaactaataaacaaacatctacaggtagtgaactcatttccgatgcacaattgaccgttgtcagtggcaatgatgttaatgtcattggtagtttgatcaaaagcgctgataaattaggtattcattctttaggtgatatcaacgttaaatcagcacaacaagtcactaagattgatgatgaaaaaacatcattagccattactgggcacgccaaagaagttgaagacaagcaatatagtgcgggctttcatatcactcataccaccaataaaaatactagcactgaaacagaacaagctaactcaaccattagtggcgccaatgttgatctgcaagcgaataaagatgtgacttttgcgggatctgatctaaagactaccgcagggaatgcctctattacgggtgataatgttgcctttgttagtacggaaaataaaaaacaagcggacaacacagataccactatttcagggggttttagctacacaggaggtgtagataaagtcggttctaaagccgattttcaatatgacaaacaacatacacaaacagaggtaacaaaaaatagaggcagccaaacagaggttgcaggtgatttgactattaccgcgaacaaagatttgcttcacgaaggggcttctcaccatgttgaggggcgttatcaagagtctggtgaaaatattcagcatcttgccgtcaatgatagtgaaacatctaaaactgacagcttaaatgttggtatcgatgttggcgttaatcttgattatagcggtgtaacgaagccagttaagaaagcaatcgaagatggtgttaacacaaccaaaccgggtaacaataccgatttaactaaaaaagttacagcaagagatgcaattgctaatttagctaaccttagcaatttagagacccccaatgtcggtgttgaagttggtattaaaggtggtggtagtcagaaatcacaaaccgatagccaacccgtttcaacctctatcaatgcaggaaaaatcaacattgatagtaataataagttacatgatcaaggtactcactatcaatcaacccaagaaggtatttctctcacagcaaacacccacacaagcgaggtcgcgcaagataaacatcaaacgacattccatgaaacaaaaggcggtggacaagttggtgtcagtactaaaacgggcagtgatattaccgttgctattaaaggtgaaggccaaacaactgataacgccttaatggaaacaaaggctaaaggtagccaatttacctcaaatggcgatatttcgattaatgtaggtgaagatgcccattatgaaggtgctcaatttgatgcacaaaagggcaaaacagttatcaatgcggggggtgatctcactcttgcacaggcgactgatactcatagcgaaagtcaatctaatgttaatggtagtgcaaatctgaaagtgggcaccacgccagagagtaaagactatggtggaggtttcaatgcagggaccactcatcacagcaaagagcagactaccgcaaaagtgggtgctatcactggctctcaaggtattgaattaaacgctgggcataacctgactttacaaggtactcatttaagtagcgaacaagatattgcattaaatgcaactaataaagtcgacctacaatcagcgagctctgagcgtactgaaaaaggcaataatttatctggaggagtacaagcaggctttggtaaaaaaatgaccgatgatgcttcatctgtgaatggtttaggtagtgcccaatttgctattggtaaacaagatgagaaaagcgtatctcgagaaggaggaacgattaataactcaggaaacttaacgattaatggcaatagcgtccatcttcaaggagcacaagttaatagtaaagatactcagttaacatcacaatccggtgatatcgagatcacatctgcgcagtctactgattataaaaacaattggggaacagatattggctttaatggcaaaaaaaccagtaccaccccaaaagaagttacagaggagaaacctgctacctctattcataacatagggggtaaattactggttaacgtggaagatcaacaaaaaacgagccaccaaaatgcaaccttagaaacaggtacattaacgattaatagtaataaagatctgacactatctggtgctaatgtgactgctgatagcgttacgggtaatgtcggtggttcactcaatattgctagccaaaaagagagtgatcgccatgtcactgttggcgtcaatgttggctataaccacaccaatgatcctaaatcaagccaagtgaataaaacggctaaagccggagggtcattattagagaaaactatcaaagatacgattgattcaggaattaaatcatcaaccgatgctatctctgataaatataactccctctcttcaactattgcagataaaacaggtatcagtgatgaaactaaagccaaaattgatcaaggttttggtaaagtcggtaatggtattaagaatatcgtcacaggtgctgagggtcatactgctaatgcagatatcaaagtcactcatgtagataatgatgctgtcactaaaaccacctccttaactagcaacaacgacctatcattaaatgtgaatggctcgacaaaactcaccggagcagaaattgcgagtaaacaaggccaagttgatttagggggaagtagcgttaaattagaaaatattgaaggacatcattatgaagccggcgctgatcttgatctgaaatcctctgtggtggatttagcaaaacaactggtaggtggagatatttcttttaaatcccccgttaaaacgaatgaaaccgtcaatacaaaagcatctatttctgaaaaa

SEQ ID NO: 32886 - DNA, 594 bp, Proteus mirabilis
atggctcagctttacttttattattcagctatgaatgccggaaaatcaacatctttattgcagtcttcttataactataatgagcgaggaatgcgaactttgatttttacggcagcgatagacacacgttttgccaagggaaaagtaacctcaaggatagggttaagtgctgatgcattgcttttcagtgatgatatgaatattcgtgatgctattttagctgaaaataataaagagcctattcattgtgttttgattgatgaatgccaatttttgactaaagcacatgtagagcaactttgtgaaattaccgatagttatgatatacccgttttaacctatggcttaagaacggattttagaggtgaattatttaccggtagtgcttatttgcttgcatgggctgacaagctcgttgagcttaaaacagtttgttactgcgggcgtaaagcaaataaagtattacgcttagcggcaaatgggaaagtactttcagacggcgcacaagtggaaataggtggtaatgaaaaatatgtttcagtgtgccgcaaacattatacagaggctacgttaaaaggacgaattgaacagtta

SEQ ID NO: 32887 - DNA, 1395 bp, Proteus mirabilis
atgcaacattctcatttcgatgcaattgtaatcggttcaggtcctggtggtgaaggcgcggccatggggctggttaaacaaggaaaacgcgtcgccgtcattgaacgttatgatcaagtcggtggtggttgtactcactggggaactatcccttcaaaagctctacgccacgcggtcagtcgtattatcgagtttaatcaaaacccgctctatagcgaccaatctcgcctgatcaactcctctttttctcaaatactacgccaagccagcacggtaatcagtcaacagactaaaatgcgtcaaggcttctacgagcgtaatcattgtacgatgtattcaggcgaagctgcttttattgatgatcatagaattagcgtacgttatcctgatggtacttgtgatattctcagtgcagataattttattattgccacaggctctcgcccttattgcccaccggatgttgatttctcacactctcgtatttataacagcgataccatactcgaccttgagcatgaacctcgccatgtcattatttatggtgctggggtcattggttgtgaatacgcttctatttttagaggtctaagagtaaaagttgatttaattaatactcgtgatcatctactgtcattccttgatcaagaaatgtcagatgcactctcttaccatttttggaataacggtattgttattcgacacaatgaagagtacgacaccatcgaaggcgttgatgatggcgttattgttcatctaaaatccggtaagaaagtcaaagccgattgtctgctttatgctaatggtagaacgggtaataccgatacgcttggtttagaaaatgttgggatcaaaaccgatagccgtggacaagtggcagttaatgcgcattatcaaaccagttgtgaacatatctatgcagtaggtgatgtgattggctatccaagcttagcctctgcggcttatgatcaagggcgcattgcggcacttgcgcttaccacaggcacctcggaaacgcatttaattgaagatattccaacgggtatctataccattccagaaatcagctctgtgggtaaaacggaacagcaactcaccgcaatgaagatcccctatgaggtcggtcgttcacaatttaagcatcttgctagggcccaaattgcaggtatgaatgtcggtagcttaaaaattctttttcaccgtgaaaccaagcaaattttaggtattcactgctttggcgagcgcgctgctgaaataattcatatcggccaagcaattatggagcaaaaaggagaaggcaatactatcgaatacttcgttaataccaccttcaactacccaaccatggcggaagcctatcgtgttgctgctttaaatggtttaaatcgcttattt

SEQ ID NO: 32888 - DNA, 1437 bp, Proteus mirabilis
atgtctctacgttatcaacgttctgcgttatctgtagtcgtcgcaacactctttacaagcgtgagtttctcttcttttgcagcccccgtcactgccgatactattttggcgcaagatcgcgcagcaaaaggtaatattacggaatttggtggtgctcgtcgtataacctcagatcaaactgaagcattaaaagcagcacttaataatcatcaagctaaaaatgtgatcctatttatcggtgatgggatgggggattctgagataacggtagcacgtaactatgccgaaggggctggtggcttctttaaagggattgatgcgttaccggtgaccggccaatatactcattattctttagatagaaaaacacaaaaacctaattatgtaacagattcggccgcatcagcaacagcatgggcttcaggagttaaaacctataatggggcattagggattgatgtgtttggtaaagatcaccaaacgattttggaattagcaaaagcgaatggtaaagcgacggggaatgtcactacctctgaaattcaagatgcaacaccggctgcgctattttcacatgttaccgggcgtaagtgttatgggcctgtagaaacgttagcaaaatgctcaacgaatgcgctagaaaatggcggtagaggttcaatctctgagcaattgttagtgactcgtgcagatattacactgggaggaggcgcgaaaagttttgctcaaacagcaacggccggtgaatataaagggaaaacgctcgagcaacaagcaatagagcgtggctatcaaattgtgaaagatgctaaatcgttagaggcgattacgctagcaaatcaagataaacctgtgttaggtctatttcatgacggtaatatggccgtcgcttgggaagggccaaaagccacttatcaaggtaatttaaagaatcctcctttagagtgtaaaccgaattcaaaattagacccgaatgcaccaacattagcgcaaatgaccaaaaaagcgattgatttgctgaaaacgaatgaaaatggtttcttcttacaagtcgaaagcgcctccattgataaacaagatcataatgctaatccttgtggtcaaattggtgaaacggtggcattagatgaagcggtacaaattggtttagatttcgctaaacaaaatggtgatacgcttattatagtgaccgcagatcacgctcactctagtcaaattattgaagctgatgtgaaatcaagcggcttaacacaagcattgattaccaaagatggcgctgtcatggtggtgaattatggtaactcagaaacggattcacaagagcatacaggcgcgcaattacgcgttgccgcttatggtccacatgctgctaatgtcgtagggttaacagaccaaacagatcttttctttactatgcgcgatgcgatgggattgaaa

SEQ ID NO: 32889 - DNA, 1161 bp, Proteus mirabilis
atggaaaaggttgtcataattgatggtgttcgcaccccaatgggacgttcaaaaggcggggcatttcgccatgtaagagctgaaaatctctctgcgcaattaatgcaagctttgcttaagcgtaaccctgatattgatcccaatgatattggcgatgtgatttggggctgtgtgcaacaaactttagagcaaggctttaatattgcacgtaatgccgcactattagcagaattaccgcataaagttccggcagtaaccgtcaatcgtttatgtggctcttcgatgcaagccttgcatgacggtgctcgccaaattatgttaggagagagccaagttgccttaattggtggcgttgaacatatgggtcatgtaccgatgacctataatgctgactttaacccagcattaaatctttctgtggcaaaggcttcattctcaatggggttaactgcagaaatgttagcaaaatcatttcaaatatctcgcgaagaacaagacaaattcgcctatcgctcacaccatttagccgccctcgcgacccaaaaaggctattttgacaacgaacttgttgccattaatggtcatgatgcagcaggagattttatacgcgtcagcacggatgaagttatccgttataacccaagtcttgatgaattagcacaacttagacccgtatttgatcccgccacaggctccgtcactgcggggaattcatcggccgtctctgatggggcatccgcgatgtttatcacgagcgaaagttatgctaagcaacatcatttaaaaccccgtgcaattattcgttcgatggcggtaacaggttgtgatccggcaatcatgggatatggtcccgttcctgccactgaaatagcgctaaagaaagcaggattaaccctcagtgatattgatatctttgaacttaacgaagcctttgcagcgcaatccttagcttgcatgaaaaaaatgaatttactcgatagcattgatgacaaaatcaatcttaatggtggtgctattgcacttgggcatccattaggttgttctggtgccagaataaccaccacgctattaaatattatggagcgtaaagatgcacaattaggattagcgacaatgtgtattggattaggccaagggatagcaaccattattgagcgagtt

SEQ ID NO: 32890 - DNA, 624 bp, Proteus mirabilis
atgagtgacttacttaatcggttaaaaaagctggcaaagcaagccaatattgagttaactgatgttcaagctcaaaaattaaccgcttatgttgctatgctcgataaatggaataaagcatataatttgacctctgtcagagatcctcaacagatgcttattcgtcatatcttagacagcatagttgtgagtcaataccttaaaggaaacaacttcatagatgttggtaccgggccaggattgcccggtattcctttagcaataatgcgtcccgatcaccactttgtgttacttgatagcttaggtaaacgcgttcgttttatgaaacaagttcagcatgaattagctctgcataatatcgaacctgtgcaatatcgagttgaagagtatcaagtagaaaaaccatttgatggtgtgattagtcgtgcttttgcctcgatgaaagatatgctttcttggtgttcacatttagtcactgaagaacacgggcgtttttatgcattaaaagggcagattcatcaagaagaacttgatgagctttctgaaaatggtttaaagatgcctgaaaaggtgattaatttagcgatccccgaattgaatgaacagcgtcatctggttattttt

SEQ ID NO: 32891 - DNA, 2706 bp, Proteus mirabilis
atgttaggtaaaattgtaaccaaaatttttggtagtcgtaatgaacgcgctattcgtcgtatgcgtaaagtggttgctcaaatcaatcaactagagccagaatttgaaaaattaaccgacgatgaattgaaagccaaaacagatgagtttcgtgagcgtttaaaaaaaggtgaaaaagaagaggatattttacctgaagcttttgccactgtacgtgaagcaagtaaacgtgtttttggtatgcgtcactttgacgtacagcttattggcggtatggtactaaatgatcgctgtatcgcagagatgcgtacaggggaaggtaaaaccttaactgcaacactgcctgcttatttaaatgcgctatcaggtaaaggggtgcatgttgttaccgtcaatgactatttggcgcaacgggatgcggaaaataaccgcccactatttgaattcttagggttaagtgttggtatcaacctccctaatatggcaccaccagcaaaacgtgaagcttataacgcagatatcacttacggtacaaataacgaatttggtttcgactatttgcgtgacaatatggcgtttagccctgaagagcgtgtccaacgtaaattacactatgcattagtggatgaggttgactccattttaattgatgaagctcgtactccactgattatttcagggcctgctgaggatagctctgaactttatattaaaatgaataaagttattcctcatttagtgcctcaagaaaaagaagattcagataccttccaaggagaaggggattactctgtcgacgaaaaaacgcgtcaagtgaatattactgagcgtggcttagttaaaattgaagggctattagccgaagcaggtatgatgaaagagggcgagtcactttactcacctgctaacatcatgcttatgcaccatgtaacggcagccttacgtgcccatgcattatttacaaaagatgttgattacattgttaaagatggcgaagttatcattgttgacgaacataccggtcgtaccatgcaaggccgtcgttggtcggatggtctacaccaagcggtagaagcaaaagaaggtgtgaagatccaaaatgagaaccaaacattagcgtccattacattccagaactatttccgtttatatgagaaattagcggggatgaccggtactgcagataccgaagcttttgaatttaactctatctaccgtttagaaactatcgttattccaactaaccgcccaatggtacgtaaagatttacctgatttagtttatatgaatgaaaaaggtaaatttgccgcgattattgaagatattcgtgaacgtactaaaaatggacaaccggtactggtggggaccatctcgattgaaaaatctgaagagatctcccaagcactcacaaaagcgaatattcatcataatgtcctgaatgccaaattccatgctatggaagcagatatcattgctaatgcggggctaccatcagcggtgactatcgcaactaatatggctggtcgtggtaccgatatcgtattagggggaagttggcagactgaagttgcgaagctggaaaatccaacagaagagcaaattgaagagatcaaagcacaatggcaaaaacgccatgatgcggtattagcttctggtggtttacatattattggtactgaacgccatgaatcacgtcgtatcgataaccagttacgtggtcgtgcggggcgtcaaggggatgagggttcttctcgtttctatctgtcaatggaagactccttaatgcgtatttttgcctctgataaagtatcaggcatgatgcgtaaactgggaatgaacgaaacagaagctattgagcatccatgggtaactaaagcgattgctaatgcacaacgtaaagtagaaaaccgtaacttcgatattcgtaaacaattacttgagtatgatgatgtagccaatgatcagcgtcgagctatttatactcaacgtaatgagttgttagatgttgctgatgtcagtgaaactatcgacagtattcgccaagatgtgtttacttcgatgattgataactatattccacctcaatcattagaagagatgtgggatattgaaggtttaacggcctgtctgcaaaatgactttgatttaaatttacctatcaaagagtggttagataaagagcctgaactacacgaagaaacactgcgcgaacgtattttagaaaaatcaatcgaagtctataaagcaaaagaagagattgtcagtgctgaaatgatgcgtaactttgaaaaaggtgtcatgttacaaacactggattcactgtggaaagagcacttagcggcgatggattatctgcgtcaaggtatccatttacgtggttatgcacaaaaagatccaaaacaagagtacaaacgtgaatcttttgctatgttcgctaatatgttggaatcactgaaatatgaagtgatcagcacattaagtaaagtacaagttcgtttacctgaagaagttgaagagttagagcgtcgtcgtcgtgaagaggcggagcgtttagctaaacagcaacaacttagccatgaagtgacaaaagaatcacaaatgtctgccgttgatggtcaagtggcatcaggcaaaaaagtgggtcgtaacgaaccttgcccttgtggttcaggtaaaaaatataagcattgtcacggtaaattaggt

SEQ ID NO: 32892 - DNA, 906 bp, Proteus mirabilis
atgagcgaagaacaaacctattgcggatttattgcgatagtcggtcgccctaatgtagggaaatcaacattactgaaccaattattggggcagaaagtttctattacttcacgtaagccacaaaccacccgtcaccgtatcatgggtattgatactgatggtgcatatcaggctatttacgtggataccccaggcttgcatattgaagaaaagcgagccattaaccgtttaatgaaccgtgcagcaagtagctctattggtgatgttgaactggttattttcgttgtcgaaggaaccaattggacgcctgatgacgaaatggtattaaacaaattagaatcactacgttgtcctgtgctattagcgattaataaagttgataacgttacagataaaaccaagttactgccacatattggttttttaagtcaacaaatggattttctagatgtagtgccgattagtgctgaaaaaggcatgaatgtcgatactattgctaaaatagtgcgtaactgtttacctgaagccattcatcatttcccagaagattatattactgatcgctctcaacgttttatggcgtcagaaattattcgtgaaaaattgatgcgctttttaggtgaagaattaccttattctgtgacggttgaaattgaacaatttgttactaacgatcgcggtggatatgatattcacggtttgattctggttgaacgtgaaggccagaagaaaatggtgattggtaataaaggcgctaaaatcaaaaaaatcggtacggaagcccgcatggatatggaagatttatttgaaaacaaagttcatcttgaactttgggtgaaagtaaaagcgggttgggcggatgatgaacgtgctttacgtagccttggctatgtggacgatttaaaa

SEQ ID NO: 32893 - DNA, 2952 bp, Proteus mirabilis
atggcaaaaactacgctactcgcactacaagggctttcatgctcccactgtgttaacagtgtaaaaaaatcacttgatgcccgcaatgatatagaacagtccacggtgactattcaatacgctaaaattgacagcgacgcaactgttgaaagcttaatcaaaaccattgaagaagccggatatgaagctcatctagccactcaagctgatgtaaaactaaatttgagtggacttaactgtatgaaatgcgttggtaaaacagaaaacgcgttgttagccgttgacggtgttgttgcggtcaatgtagacaaaacatcggctgaaatttttggtacagcaaacgcaaaagatttaattgccgccgttgttgctgaaggttttgaagcctcattagcaaacgaagaagaaaataaaccaaaaacgattgaactgactttatcaggcttaaattgtggtcattgtattaattcagtgaagaaagctcttgaagggactgatggggtagaaagtgcacaagtggaattaactcatgccacagtaacaggtacggcaaacacagagagtgtgatcacagccattcaagatgctggttatgatgcaaaattagcaggagccaaccacccaaaaactgagccgctgacgcaaacggatgcaccactggaagcatcgtcagcggcgatttgtgatattccagtagaagaagccatccttgataataataatgctgatatcagtatcgatgatgatagcactcagctattaatcgacggtatgacttgtgcaagctgtgttagcaaagtacaaaaagccttacaaagtgtttccggtgttgaaaatgcacgtgttaatttggctgaacgtagcgcacttgtaacgggtcatgttaatcatgatgacctgattaatgcggtcgaaaaagcaggctatggggcagaaattattcaagatgatgtaaaacgtagagagcgtcaacaagaagtcgctgttgctaatatgaagcgttttcgctggcaagcagccttagccttagtcgttggtattcctgtaatggtatggggaatgatcggcgataatatgatgttaacggaagctaatcataatatctggttaactatcggtattattacgcttattgtgatgatagctgcaggtgggcacttttatcgtaatgcgtggcaaagcctaaaaaacggcagtgccaccatggacacgctcgttgcgttaggtacaggggctgcttggctctattcaattagtgttaacttatggccagaggtgtttcctgcccaagcaagacatctctattacgaggccagtgcgatgatcattggtttgataaaccttggtcatatgcttgaacaaagagcccgtcagcgctcctctaaagcattagagcgtctattagacttaacaccaccaacagcaagagtagtaacggataatggcgaagttgaaatgccattagcggatgtgaagcaaggtatgatcttgcgtttagcaaccggtgataaagttcccgttgatggtgaaatcacccaaggtgaagtatggatggatgaggcgatgttaactggtgagccaattccacaacaaaaaagccttggtgatactattcatgcaggtactaccgtgcaagatggctcagtgctgtttaaagctgcagcggtaggcagtcaaactacccttgctcgaattatcaaactggtacgtcaagcacaaagcagtaaacccgaaattggccagttagcggataaaatatccagtgtatttgttcctatcgtcgtcgttattgcgttaattgctggggctatttggtacttttttggcccttcaccacaaattacttatgcactcgttattattacaacggtattaattatcgcttgcccttgtgctctaggattagcgacccccatgtcgattatttcaggtgtgggacgtgccgcagaatatggcgtattagtgcgtgatgcggatgcattacaacaagcaagccaattagataccttagtttttgataaaacaggtaccttaacagaaggcatgccacaagtgactgagatccacacattcaatcagataagtgaaactcaagcactagcattagctggcgcactagaaagtggctctaatcatccattagcaaaagcgattttaaccaaagctgaaggtattaaattaccgcaaataagccaatttagaactcttgcaggtatggggttaagtggtgaaattgacggcaatattgtgctgttaggtaatcctaaactaatggaagaatctggcattgatataagtgagataaacgccttaatagaaaaccaatcagcgaaaggggtaacccccgtcttattggcacaaaatgggaaaatagcggccctactttctattcgtgacccactgcgagaagataccgttagtgcattacagcgtctacatcatcaaggttatcgtttggtcatgttaactggagataaccctattacagccaatgcgatagctaaagaagcgggtattgatcaagtgattgcaggcgttatgccagaaggtaaagcgcaagcgattagtcaactacaggcagaaggtcgtcgcgtagcaatgattggagatggtattaacgatgccccagcactggctaaagcagacgttggtattgcgatgggtggtggcagtgatatcgccattgaaaccgcggccattaccttaatgcgccatagcttacatggtgttgctgatgcggttgagatctcaaaaggcacactgcgcaatatgaaacaaaacttgtttggtgcatttatatataacagtttaggcattcctattgctgccggtatcttatatccttttaccggtacattattaaaccctgtggttgcgggggctgccatggccttatcatcaatcactgtcgtcagtaatgccaaccgattattacgttttaaaccgaaaaaa

SEQ ID NO: 32894 - DNA, 186 bp, Proteus mirabilis
atgcttattctaactcgtcgagttggtgaaacgcttatgataggcgatgatgtaaccgtaaccgttttaggggttaaaggtaatcaggtacgtattggcgtaaatgcccccaaagaagtatctgtccatcgtgaagagatctatcaacgaattcaggccgagaaaactcagcccacagataactac

SEQ ID NO: 32895 - DNA, 2886 bp, Proteus mirabilis
atggaaaataaatccgcaccgaaagagccatcgctcgatacaacttataatccgacagagattgaacaacctctgtatcaacattgggaaaaaaatggctactttaaagccaatggtgatacatccaaagaaagcttttgtattgtgatcccaccacctaatgtgacaggtagcttgcacatgggtcatgctttccaacaaaccatcatggacaccatgatccgctatcaacgtatgcagggtaaaaataccttgtggcaagcgggtactgaccatgcaggtatcgcaacacagatggttgttgagcgtaagattgctgctgaagaaggtaaaaaccgccatgattatggccgtgatgctttcatcgataaaatttgggagtggaaagcagagtccggcggtaatatctctaaccaaatgcgccgtttaggtaactccgtagattgggatcgcgaacgctttaccatggatgaaggtttatctaaagcagtaaaagaagccttcgttcgtttacacaaagaagatcttatctatcgtggcaaacgtcttgttaactgggatcctaaattacacactgccatttccgatctcgaagttgaaaaccgcgaagtaaaaggctcaatgtggcatctgcgttatccattagctgatggcgttaaaacggcagagggtaaagattatctgattgttgccacgactcgtcctgaaacactgttaggtgatactggcgttgcggttaacccagaagatccacgttataaagatctgattggcaaagaggttattctacctttaatgaaccgtcgtattcctattttagcggatgaacacgcggatatggaaaaaggcaccggttgtgtaaaaatcacccctgcccatgactttaatgactatgaagtaggtcgtcgccatcaactaccgatgattaatatcatggattttgatggcaacattcgtgttagcgcagaagtattagacactaacggtgttgaatctgatgtatatagcacagagatcccagaagcctaccaaggtatggaacgttttgcagcacgtaaagctattgttgctgaatttgaacgtttaggattattagaagagatcaaacctcacgatttaacggtaccttacggtgatcgtggtggtgtggttattgaacctttattaactgaccaatggtatgtccgtgcagcacctttagcgaaacctgcggtagaagcggttaaaaatggcgatattcaatttgtacctaaacagtacgaaaacatgtatttctcttggatgaatgatattcaagattggtgtatttctcgtcaactgtggtggggtcatcgtatcccggcttggtatgataacgaaggtcatgtttatgtcggtcgtgacgaagaagaagtgcgtcgtgaaaataacattgctgccgatgtagcattacgccaagatgaagacgtactcgatacgtggttctcttctgcactgtggacattctcaaccttaggctggccagaaaacaccgaagcactgaaaacattccatccaacgaatgtattagtgagcggtttcgatattatcttcttctggattgcccgcatgatcatgatgaccatgcactttattaaagatgatgaaggtaaaccacaggttccatttaaaaccgtttatatgacaggccttatccgtgatgaagaaggtcagaaaatgtcaaaatctaaaggtaacgtacttgatcctttagatatgattgacggtatcacattagataaactgttagaaaaacgcactggtaatatgatgcagccacaaatggctgagcgtattgctaaacgcaccaaaaaagagttcccagaaggtattgaagcacatggtactgatgctctgcgctttactttagcggcattagcttctacaggacgtgatattaactgggatatgaaacgtctgtcaggttaccgtaatttctgtaacaaattatggaatgccagtcgttttgtgctgatgaatacagaagatcaagactgtggctatcaaggtggtgagatgacattctcattggctgatcgctggatcttagctgaattcaataacaccataaaagcctatcgtgaagcgttagataattatcgctttgatattgctgccggtattttatacgaattcacttggaaccaattctgtgactggtatcttgagttatcaaaaccggcggttcataaaggtaatgatgctcaaaaacgtgctgctcgtcataccttgattgaagtattagagggtctgttacgtcttgctcatccaattattccatttattacagaaactatctggcaacgcgttaaagaggtgaaaggcattgaaggcgaaaccatcatgctccaagctttccctgaatttgatgcgtcattagtcgacgagcaagcacttaacgatctggaatggatcaaagaggttatcgtcgcagttcgtaatatccgtgcagaaatgaatattgcgccaggtaaaccactggatgttattttacgtggtgcggatgaaacggctaaacgtcgcgtcagtgataacattggtttcttaaaagcaatgggtcgcttagcggatattcgcccattagcggaaggtgaagaagcaccattatcggtaactaaactggtgagcggtgcagagctgttgatcccaatggctggctttattgataaagatgcagagcttgcccgtttagataaagagcttgaaaaagtagagaaagatatcactacattagacagcaaattatcaaacgaaggctttgttaatcgcgcacctgaggctgttgtcgccaaagagcgtgagcgtttagcatcttgtttaaatgctaaagagaagctgattgcccaaaaagtctctattgctgcgtta

SEQ ID NO: 32896 - DNA, 654 bp, Proteus mirabilis
atgtatcaacatagagattgggaaggttcgttgcttgattttcctgttaataaagtgatttgtgtgggcagtaattatgcaaaccacataaaagagatgggctcggtgcgctctgaagagccggttatctttattaaaccagaaacggcgatgtgtgatattcgccaacctattgcgatccccaaagagatgggggcagtgcatcatgaaatagagttagcggtattaattggtcagccactgaaacaagccaatgaagatagggttgatcgtgctattgctggttttggtgttggtttagatctcactttacgtgatttacaaagtcaattaaaaaaagcgggacaaccttgggagaaaagtaaagcgtttgatggttcagcgcctttgtcgggatttattccggtgaactcttttggtgatccccaaaatgttgacttaatgttgaaagttaatggtgaaattcgtcagcaagggaacagtcgtgatatgctaacgcctgttttaccccttatcagttatatgtcgcgcttttttacccttcgcccaggtgatgtcattttaacgggaacaccagaaggtgtcggtcccttagcatcgggtgatatgttggtattaagtgtcaatgaacatcagctgaccacacgggttatt

SEQ ID NO: 32897 - DNA, 642 bp, Proteus mirabilis
atgaaagcctaccagcgccactttatcgaacttgcattagcaaaaaatgtattaaaatttggtgagtttacgctgaaatcaggtcgtgttagtccttacttttttaatgcaggtttatttaatactgggcgtgacttggctttattgggacagttttatgcacaaacattaatagataatcatgtgccttgtgatgtgctgtttggaccggcttataaaggtattcccatcgcgacaacgaccgcagtggccttagttgaacatcatgatatggatgttccttactgctttaatcgtaaagaagctaaagatcatggtgaaggagggacattagtcggcagtccattaacagggaatgtggtgattgttgatgatgttattaccgctggaacggctattcgtgaatcgatggaaataatcaaacaacatgatgcgacgctgtcaggggtattgcttagtttagatagacaagaaaaagggcgtggttcgctttctgcaatacaagaattagagcgcgattatcaatgccaagtttattcaattattactttggatgatttaattagctacttaactgaaagtgagacattatcggcacatttgccagcagtaaaagcctatcgtgaacgttatggcattaat

SEQ ID NO: 32898 - DNA, 165 bp, Proteus mirabilis
atgcccattattgccagtgggaaagcgttacaaactgatactcacagtataacggtcggtagcaaagttaccgtttcaggattcattagtagccatcaggcgagaaatggattgtttaaactggtattgcatgccgaacagattgaattgatagattctggagac

SEQ ID NO: 32899 - DNA, 1095 bp, Proteus mirabilis
atgagacgctttgcaggggcttgtcgttttgttttcaatcgggcattagcacgtcagaatgagaattacgaagcagggaataaatacattccctatacaaaaatggcttcatggctcattgagtggaaatctgacacagagacacaatggttgaaggaagccccatcacaaccgttacaacagtcacttaaagatttggaacgggcttacaagaattttttccagaagcgtaccgcttttcctcgattcaagaaacgcggtaaaaatgacgcttttcgctacccgcagggcgtgaagctcgatcaatccaatagtcgtatatcattgccaaagttgggatggatgcgctaccgcaacagtcgtgaagtcgtcggagaagtgcgaaacgtcacggtcagtcagtcatgcggtaaatggtacgtcagcattcagactgagtatgaagcgacagaaccacaacatggatcaacctcaatagtagggcttgatgcaggcgttacaaaactggccacgctttcagacggtacggtatacccgcccgtcagcagttttaaagtcaaccagcgaaagctggcaaggcttcaacggaaattaagccgtaaaatcaaattcagtgccaactggcaaaaacaaaagcgcaaaattcaacgtctgcattctcatattgccaatatcaggaaagactaccttcacaaagtcaccagtgaaatcagcaaaaaccacgcaatgattgtcattgaggacttaaaggtcagtaacatgtctaaatcggcaaaaggtacgacagaacggcctggacggaacgtaaaagctaaatctggtttaaaccgcgcaatactggagcagggctggtatgaaatgcgccgtcagcttgagtacaagcagctctggcgaggtggtcaggtactggcaataccacccgcctacaccagtcagaagtgcgcttgctgtggtcatacagcaaaggaaaaccgccagtcacaaagtcaattcgagtgccttgaatgtggatatacagcgaatgctgatatcaacggggcacgtaacattttagcggcaggacatgccgtgcttgcccgtggagggagggtgcag

SEQ ID NO: 32900 - DNA, 219 bp, Proteus mirabilis
atgtgcgaacccgaatgtcctaacgatgccatttcaatggggaatgatatttatgaaatcaatcctgatctttgcactgaatgtgtaggacattatgataaaccgacttgtcagtcggtatgccctatcacgaatacaattatcatcgatcctgctcatactgaatcgcaagatgaattatgggaaaagtttgtactgatccaccacgctgacaaaatc

SEQ ID NO: 32901 - DNA, 1251 bp, Proteus mirabilis
atgttagaacaaatgggaaaagcggcgcgagaagcttcttggcacttagctcagctatcaaccgaacaaaaaaatcaggcactgttagtcatcgctgatttattagagcagcaagaagccattattcttgctgctaatgaaaaagatatggtggcggcacgagagtctaatattaatgctgcaatgcttgatcgtttattactcacatcagaacgtttaaaagcgatcgctgatgatgttcgccaagtttgtcatctagaagatcctgtaggtcaagtgatagatggtcgtttgttagacagtggcttacgtttagaacgccgccgagtccctttaggggttgttggcgttatttacgaagctcgtccaaatgtgactatagatgtagcatctttatgcttaaaaacagggaatgcggctattctccgtggcggaaaagagactcaccatactaaccaagccgttgtcgcggtgatccagcaagcactagaaacatgtgctattcctgcggctgctattcaagctatcgataagccagatcgcgaattagtcgcaaaaatgctaaaaatggatgagtatattgatatgcttattcctcgaggtggtgcaggattacataagttatgtcgtgaacaatccactattcctgtgatcacgggggggattggtgtttgtcacacctttgttgacgaaagtgctgatttagaccaagcattaaatgttattattaatgctaaagtacagcgtccaagcgcatgtaattcgttagaaacgttattggtacatgaagctattgcggagagtttcttacctcaattaagtgatgcgatggcagcacaaaaggttactttgcatgccagtcaacgcgctataactgcattgaaaaagggacgtgcgacggtcgtcgatgtgactgaagcagattattgtgatgaatggctatcactggatctgaatgttgaagtcgttaatgatttaacggcggcaattgctcatattcgccaatatggtaccgcgcactcagatgctattttaacgcaatctatcagtcatgctgatcgctttgtacgccaagttgattctgctgcggtatatgtgaatgctagcacacgttttacagatggtggacagtttggcttaggtgctgaagtagcggtgagtacacaaaagctacatgcacgaggccctatgggattagatgctctaaccacctataaatggattggttacggcgacaatacattacgtcgc

SEQ ID NO: 32902 - DNA, 2574 bp, Proteus mirabilis
atgcgtctggataaattaaccaataaattccagcaagctctcgcagacgcccagtcattggcacttgggaacgataatcaatttatagaacccatacatttactgagtgcgttatttaatcaacaaggtggctctattcgcccactattaacatccacaggggttaatgcctcacaatttaatgaaagaattaatgatgcattatctcgattaccaaaagtggaaggtgctggtggagaagttcacccttcaaacgatttaattaaacatcttaatttatgcgataagttagctcagaaaaaaggtgatgaatttatttcatcagaactttttcttttagctgccatggaaagcggtggtcaggttgcggacatgctaaaagccgctggagctaacaaagccagtttagaattagccattgaaaaaatacgtggtggagaaacagtgaacgatcaaaatgcagaagaccaacgtcaagcattgaaaaaatatactgttgatttaacagaacgagcagaacaaggcaagcttgaccccgttattggacgtgatgaagaaataagaagaacaatccaggtattacaacgtcgtactaaaaataacccagtattaattggtgagcctggtgtaggtaaaaccgcgattgttgaaggtttagctcaacggatcgttaatggagaagttcctgaaggtttaaaaaataaacgtgtgctttcacttgatatgggatctttattagcaggggctaaatatcgtggtgaatttgaagagcgtttaaaagcggtattaaatgatttatctaaacaggaaggtagtgtcattctgtttattgatgaattacatactatggttggtgccggtaaagctgatggtgcgatggatgcagggaacatgttgaaacctgctttggcacgtggcgaattacactgtgtcggcgccactacattagatgagtatcgccaatacattgaaaaagatgcggctttagagcgtcgtttccaaaaagtttatgtggcggagcctacggtagaagataccatcgccattttgcgtggtttaaaagagcgttatgaattgcatcaccatgtacaaattacggatccggcgattgtagcagcagctactttgtctcatcgttatatttctgatcgtatgttgccagataaagcaattgacttaatcgatgaggctggtgcaagtctacgtatgcagatggattcaaaaccagaagcattagatagactggatagaagaattattcagctaaaacttgaacagcaagcactgcaaaaagaatctgatgatgcaagtaaaaaacgtttagctatgttaaatgaagaacttgcagaaaaagagaaagagtattctagcttagaagaagagtggaaagcagaaaaagcagagcttactggtactcagcatataaaagcagaattagagcaagcgcgtattgcactagagcaggctcgccgtagtggtgatttggcaaaaatgtcagagatccaatatggtcaaattcctactttagaaaaacaacttgctgaagccaataaaactgaagataagcatatgaaactgttacgtaacaaagtaacagatgctgaaatcgctgaaatcttagcacgttggacaggtatccctgtgtctagaatgttagaaggggagcgtgaaaaactgttaagaatggaacaggaattacatagacgcgttatcggccaagatgaggcggtaaatgcagtctctaacgcaattcgtcgtagccgtgctggattatcagatccaaatcgcccaattggttcgttcttattcttagggccaaccggggttggtaaaactgaattgtgtaaagcgctcgctgatttcttgtttgatagtgatgatgcgatggtgcgtatcgatatgtctgagtttatggagaaacactctgtttcacgtttagtgggggcgcctccaggatatgtgggctatgaagaggggggttacctaacagaagctgttcgtcgccgtccttattctgtcatcttattagatgaggtagaaaaagcgcatcctgatgtgtttaatattttattacaggtattagacgatggccgcttaacagatggacaaggtagaaccgttgatttccgtaataccgtagtcattatgacatcaaacttaggctcggatttaattcaagagcgcttcggtactcttgattatccggcaatgaaaactattgttatggatgttgttggtcaccactttagacctgaatttattaaccgtattgatgaggtagtggtattccatccattaggtaaagagaatattgccgctattgctcaaattcaattacgtcgtttgtatcagcgtttagaagagcgtggttatcacgtgactattacgggagcagcattagaaaaactgggtgaagttggattcgacccaatctatggtgctcgtccattgaaacgtgctatccagcaagaggttgaaaacccattagcgcaagatatcttgtcgggtaaattagttccgggtaaagaaattatcttggacggagatgacaatcagatcattgcaaaacagtca

SEQ ID NO: 32903 - DNA, 3759 bp, Proteus mirabilis
atgagtaaatttctcgatagattccgctattttaaacagcttggtgatacgttttcacaagatcacgggcaagagttaaatgttaatcgcgactgggaaaatagttatcgtagccgttggcaacatgacaaaatcgtgcgttctacacatggtgttaactgcaccggatcatgtagctggaaaatttatgtcaaaaacggcttagtaacatgggaaacccagcaaacagactatccacgaactcgtcctgatctgcctgatcatgaaccccgtggttgtccgcgtggtgcgagctattcatggtatttatatagcgctaaccgcgttaaatacccaatggtgcgtaaacgtctgatcaaattatggcgtgaagccaaagcgcaacacgctgatccagttgatgcatgggcatcgattgttaatgctcccgaaaaaacgaaaagttataaacaagctcgtggtcgtggtggttttgttcgctcttcatggtctgaagtgaatgaaattattgctgcttctaacgtctataccgctaaaacttttggcccagatcgtattattggtttctcacctattccggcaatgtcaatggtgtcttacgccgccggtgcccgctatttatctcttattggtggtgcttgcttaagtttttacgattggtattgtgatttaccacctgcctcaccaatgacttggggggagcaaacagatgtgccagagtcagctgactggtataactcttcttatctgattgcatggggttcaaacgtacctcaaacccgtacgccagatgctcacttttttaccgaagttcgttataaaggcaccaaaacggtagcagtaacacctgattatgctgaaattgctaaactgtgtgaccagtggttaaacccaaaacaaggtacagatagcgccatggcaatggcgatgggacacgttattcttaacgaattccacgttaaacgccaaactgaatactttagtaactatgtgcgcacttacactgacatgccaatgttagtgatgttagataagcatgattctggcaagttagttgcgggtcgcatgctacgtgccgctgatttagtgaacaatctcgatcaggagaaaaatccagaatggaaaaccattgctattgatgagaaaacacagcaattggtcgctcctcaaggttcaatgggttttcgttgggaaggcgctgccaaatggaatctagagcctaaagacggtaagagtggcgaagaagtcactttacaattgggtcttttagaaaaccatgatgatgtggttgacgttgcatttccttactttggtggcatcaagagtgaatactttgaaggtgttgcccttgatgatgttctcgttcatagactgccagcaaaacgcattactcttgccaatggcgaagaaaaatatgtcactaccgtttatgacttattactggctaactatggtgtcgatcgtggtttaaatgatgaaaactgtgcgacaaactatgatgagatcaaagcctattcacccgcatgggctgaacaagtaacaggggttagccgtcaagatattatccgcattgcacgtgaatttgctgataatgcagaaaaaacacatggtcgttcaatggtgattgtcggtgcgggcattaaccattggtatcacatggacatgacctaccgtggcattatcaatatgctgatcttctgtggttgtattggccaaagtggtggtggatgggctcactatgtgggacaagaaaaactgcgtccacaaacaggttggttgccattagcttttggtctggattggcagcgtccacctcgtcatatgaatagcacgtcatttttctataatcattcaagtcaatggcgctatgaaacggtatcaccgacagaattactatcacctttagcagataaatcacgctttagcggtagcttaattgatatgaatgtgcgttcggagcgtatggggtggttaccgtcagcaccgcaattaaacgttaacccattgtctattaccaagaaagctcaacaagctggcgtcagtgcaacggattataccattaatgctctgaaatcaggtgagatccgttttgcatcagagcaaccggataatccgcaaaacttccctcgtaacttatttatctggcgttctaatttattgggatctgcaggtaaagggcatgaatatttactgaaatatctattagggacggaaaatggattacaaggtaaagatttaggtgaacaaggccaagttaagccacaagaagtggaatggcaagataaaggcggtgagggtaaggtcgatttagtggtgactttagactttcgtatgtcaagtacctgtctgttctccgatatcgtgttaccaaccgccacatggtatgaaaaagatgatatgaatacctcggatatgcatccatttattcatccattaaccgccgcggtagatcccgcttgggagtctaaaaccgattgggaaatttataaaggtattgctaaaaccttctctaaattgtgtgtcggtcatttaggggttgaaaccgatttagtgacacagccaatacaacatgactccgcggctgaaatggcacaaccatttgatgtcaaagattggaaaaaaggtgaatgtgaccttatcccggggaaaactgcaccgcatcttattcctgtggagcgtgattatccaaatacctatgctcgttttacctcacttgggccgttaatggataaattaggtaatggcggtaaagggatcggttggaatacacagacagaagttgatttcctgaaaaaacttaatcgcgttcgtcatgacggtgtggcaaaagggcgcccggcgattgaaaccgcaattgatgcagccgaagttatcctctctttagcacctgaaacgaatggtcaagtggcggtaaaagcgtgggatgcactaagtaaagtaacaggacgcgatcacactcatttagctaaagtaaaagaagatgagaaaattcgtttccgcgatatcgttgctcaacctcgtaaaatcatttcaagtcctacatggtctggtctggaagatgagcatgtctcttataacgcttgttataccaatgttcacgagatgatcccttggcgtactttaagtggccgtcagcagttatatcaagatcatgagtggatgcgtgcttatggcgaaagtttagtggtttatcgtccacctattgatactaaggcaatcgaagccgtgaaaggtaaaaaaccgaacggcttcccagaaaaagcgctgaacttcctgacgcctcaccaaaaatggggtattcactcaacgtatagcgataacttactgatgttaaccctcggtcgtggtggccctgtggtttggctgagtgaagatgatgctaaagagatgggtattagtgataacgattgggttgaagcatacaacagtaatggtgcgttaaccgcaagagcgattgtgagccaacgtattcctgatggcatgatttatatgtatcacgcacaagagcgccaaataaacctaccaggctctgaaataactggaatgcgtggcggtattcataattccgtgacgcgtgtttgccctaaaccgacccatatgattggtggatacgctcagttggcttatagctttaactactatggaactgtgggctctaaccgcgatgaatttgttgtggtacgtaagatgaaacagattgattggcttgatggtgaaggcgatgcttatcaacaaaccctgaatggacaggagaaggca

SEQ ID NO: 32904 - DNA, 690 bp, Proteus mirabilis
atgcatttaatatctaaacactttattgcgttattttttctcttcagtttttcatcgctatcatatgcgggaggtgttgcattagctgcaacacgcatagtctatcctatggatgcaaaacagacgtcaattactcttaataatacagataaaagattacgctttttagtgcaatcatggattgatgatagccaagatcaaaaaagtaatgaatttattgttacaccaccactgtttgtcagcaaaccagaaagtgaaaacaagctaagaataatttatgctggtaaggcattaccaaatgatagagaaagtttgttctggttaaatacaaaagcaatccctgaaattgagcgagaagaaataaaagataaaaatatattacagctagcagtattatctagaataaaaatttttattagacctcaaggattaaattttaacatagaggatgtacctaatagtcttgagtttaaaaaatcacaaggaaacataatagtaaataatccttcaccttattatgcgacattaattaatttagaagctgataatgaacagctaaatagtattatggttcctcctatgggaacagtaatgattaaagtcagcaagcctaactatagtcaaatatcttatcaaactattaatgattatggtgctagtacacccaaagtaacgaaacagattggtaag

SEQ ID NO: 32905 - DNA, 171 bp, Proteus mirabilis; identical to SEQ ID NO: 32384

SEQ ID NO: 32906 - DNA, 1371 bp, Proteus mirabilis
gtgacctcatttgctgatcttcatgcacttcctgctgagcaacttactaatcttaatgagcttggctatttaacgatgactcccgtccaagaagcgtctttacctgctattcttgccgggaaagatgttcgagcccaagcaaaaaccggaagtggcaaaacagcagcttttggcttaggtttattgcaacgtattgatgcaaaacaatttaatactcaatcattagtattatgtccaacacgagaattagctgaccaagtcgctaatgagttacgtcgactggctcgttttctgcctaacattaaaattctgactctgtgtggtggtgtgccttttagcattcaacgggattcattaattcatgctgctcatattattgtcgcgactccggggcgtttgttagatcatttaaacaagcagactgtcacacttgctgatgtaaaaacattggtacttgatgaagcagatagaatgctggatatgggattttttgatgatattagcgacatcatttctcaaatgtcgacacaacgtcaaactttgctcttttctgcaacttggccggatgaaatcgctaaaattagtcgaaaaattcaacaagatcctgtcactattgagattaattcaccggatgaattgccagcggttgaacaacaattttatgagatctcccgttatggcaaattgggattattacaaaagcttttgagtcatcatcaacctaattcttgtgtggtattttgtaataccaaaagagattgccaagatgtgtatgaagctttgaccgaaagcaaccaaagtgtccttgcgttacatggcgatatggagcaaaaagagcgcgaccaaacattgatccgttttgctaatggtagctgtcgagtgttagtcgccacagatgtcgctgcgcgaggcttagatatcaaagcgctagaaatggtgattaattatgaattatcacacgatccggaagttcatatacatcgaattggacgaacagccagagcgggagaaagtggtttagcgattagtttttgcgcaccagaagagatccctcgcgccaatgctctggaagaaatgttgaatataaaactggattggcaatcagccccttcaggtttatcaatcacaccattggttgcgacaatggcaacactatgtattgatggcggtaaaaaagcaaaaatgcgtccaggggacatccttggtgcattaactggagatttagggtttagtggagaagatattggtaagataaatatccatccaactcatgcctatgtagcggtaaaacagtccattgctaaacaggtatggaaaagccttcaacaaggtaaaattaaaggtaaatcagtaaaagtcagactgtttaga

SEQ ID NO: 32907 - DNA, 492 bp, Proteus mirabilis
atgagactgacatcaaaagggcgttatgcagttactgctatgcttgatgttgcattgcattcgcagcaaggccctgtccccctcgctgatatttctgagcgtcaagggatttccctttcttaccttgagcagcttttttcacgtttacgtaaaaatgaattagtcgcaagtgtgcgtggcccgggtggtggttatttactcggtcgtgaagcggggcaaatttttgttgctcaagtcatttcagcagttgatgaatctgttgatgctacccgttgtcagggtaataaagaaggatgtcaaggtggcgatcgttgcctgactcatactttgtggcgtgatttaagtgatcgtattaccagtttccttagcagcattagccttgaagagttagttaataacgaagaggttatggatgtcgctgatcgtcaagacaatgaaaaacgtcatgctatcaatggtcgtttacaagaaaccattgttaatatgcgagtt

SEQ ID NO: 32908 - DNA, 1130 bp, Proteus mirabilis
atgtcttataccactttttcacaagttagaaatgatcagcttcaggagcccatgttttttgggcaacctgttaacgtagcgcgttatgatcagcaaaagtaccctatttttgaaaaactaattgaaaagcaactctctttcttctggcgtccagaagaagttgatgtttctcgtgatcgtattgactacaatgcgcttcccgatcacgaaaaacacatttttattagtaatttaaaatatcaaactctgcttgattcgatccaaggtagaagccctaacgtggcatttttacctttaatttcgattccagaattagaaacttgggtagaaacatggtcgttctctgaaactatccattcacgctcttatacccatatattcgtaatatcgtcaacgatccgtcggtcgtttttgatgatattgttgaaaatgaagagattttaaaacgtgctcgtgatatctcatcttattatgatgagttaatcaatttaactaacctttaccatatgtttggtgaaggtacgcatcaaataaaaggtaaaactgttgaagttactttacgtaagctcaaaaaacagctttacctatgcttaatgagtgttaatgctttagaagcgattcgtttctatgtcagctttgcctgttcatttgcctttgcagagcgcgaactgatggaaggtaacgctaaaatcattaaattgattgcccgtgatgaagcattacacttaactggcacacagcatatgctcaatttactgcgttcaggtcaagatgatcctgaaatggccgaaattgctgcagaatgcgaacaagaatgttatgacctatttgttgaagcagcagagcaagaaaaagagtgggcagaatacctattctcagaaggctctatgatcggtttaaataaagagatcctttgccaatatgttgaatatattactaatattcgtatgcaggcagtaggacttaaattgccgtttaaagcacgttcaaaccctattccatggattaatgcttggttagtatctgataatgtgcaagttgcaccacaagaagttgaagtaagctcatatctagtaggtcaaatcgactcacaagtagatactgatgatttaagtaacttcgaactgtaa

SEQ ID NO: 32909 - DNA, 1395 bp, Proteus mirabilis
atgggtcagaatgtgtatcaatttatcgacttaaatcgcgttgaaccgactaaaaaaccgttagctgtgcgtaaaattgagtttgtcgagatttatgaggcattttctgctgagcaagcctctgcacaagccgatcgctgtttagactgtggtaatccttattgtgaatggaaatgcccggtgcataactatatccctaattggctaaaattagccaatgaaggacgaataatagaagcagcagagctttctcatcaaaccaatagcttaccggaaatctgtggtcgtgtttgtccacaagaccgattatgcgaaggcgcttgtacgttaaatgatgaatttggtgcggtcactattggtaatatagaacgctatatcaatgataccgcctttgcgctgggctggcgcccttccctgtctcaagtcaccatgacagataaaaaagtcgccattattggtgcaggccctgcgggattggcttgtgctgatgtgctgatccgccaaggagtaaaacccgtagtctatgataaacaccctgaaatcggtggattactcactttcggtattccctcttttaaacttgaaaaatcgctgatggtaagacgacgcgagttatttagcgaaatgggaataaccttttgtcttaatacagaaataggcaaagatatctcactaaaaacactgacggagcaatatgatgctgttttccttggcttgggtacttatcaaagtttgagtggtcattttgcccatgagaacgcaatgggggtttataatgccttaccttatttaattggtaatactcgccatttaatgggttatgcagaagatccccaatcaccttatatcgacctcaataaaaagcacgtggtggtgttagggggtggggatacggcgatggattgtgtacgaaccgctattcgccaaggtgccactaaagtaacttgtgtttatcgtcgcgatgaaaataatatgcccggctctaaacgtgaagtaaaaaatgccaaagaagaaggtggcgaatttttatttaatcgccaaccccttgatattgaagtagatgctaataataacgtcatcggtgttcgtgtaataaaaacacaaaccaacggggaattaaaatatatagaaggcagcgaacatatattatccgcagatgcggttattcttgcatttggttttaaacctgcacactatccgtggttagatgaaaataatattcaatacgcatcatcgggtagaattattattaatgatgatccactattacctttgcaaacgaccaatcctaaggtatttgctggaggtgatattgtaagaggctccgatctggtggtcaccgcgatagcacaaggaagagaagcagcggaagggatcttgcgttatttatcttgt

SEQ ID NO: 32910 - DNA, 1179 bp, Proteus mirabilis
atgtcgagtcatgatcctcgtccacttggcggtaagttatttactttagctgttagagtgtttttaccgcttgctgtgcttggttttattcttattggtaagcgtttggtattgggtcttggggatgtttccgatctaaatggcggttatccttggggtatttggatagcctttgacttacttatcggaacaggctttgcgtgtggtggttgggcactggcatgggctgtttatgtttgtaataaaggtgaatttcatcccttagtacgtcctgcattattagcgagcttgttcggctattcgttaggtggattatccatagcaatcgatattggtcgttactggaacatgcctcacttctttatgcctcaatactttaacgttaactccgtattgtttgaaacagcaacttgtatgaccatctacattatggtgatggcattagagtttttacctgcactactggaacgtttaggttggaaagtttcgttaagacgccttaataaagcgatgttctttattattggtctaggcgccttattgccaaccatgcaccaatcctccatgggatcattaatgatttcggcaggttggaaggtgcatcctctgtggcaatcttatgaaatgctaccgctgttctctttattaaccgcctttatcctcggtttcactattgttatttttgaaggttctttattaaaagcgagccgtactattaatgacgatgaaacaccgctatttaccaagttaactaaaatcatagaagtacttctgatcaccttcttggtattacgttggggtgaagtgatctggaacggtaagctgagttatatcgctaaaggggatatgttctcttggttattccttgcagaaagtgccttgttgtttattcctctggtattgatgcacctgaaaaataatcgtcgtagcccaagaatgttatttgtctgcgcattatttatgttagtgggtgcggcaatgtggcgtatgaactattcattagtcgcttataacccaggcaacggctatcactatttcccaacagcaagtgagttgttgatttctattggcttcgttgcattcgaagttactgcttacattcttattatccgtttactgccggtactaccagcacaaacagagtcaaatatacaattaaaaaaggctgaggttaaatca

SEQ ID NO: 32911 - DNA, 189 bp, Proteus mirabilis
atgagagatatgcaggaagttttatcacgctggggggcgtggtcagcgaatgagggtaatagtgtggattactcatcaatagctgcagggtttaaggggttagttcctagctctagacgttctagagatgaatgttcagattctgatgggttaaaaataaataaggctgttttgcaccttagaaaaaag

SEQ ID NO: 32912 - DNA, 939 bp, Proteus mirabilis
atggagctaattcgcggtatacagaatattcgagcacaacatcatggttgtgttctaacaattggcaattttgatggtgtccatcgcggtcatcaggcattattaaaacacttgaagcaagaagcatcacgtcgtggcctacctactgttgtgatgacatttgaacctcaacctctggagttttttttgccagagaaagcacctgctcgtctaacgcgcctacgcgataagataaaatatttggcagagtgtggtattgattacctgttatgtgtcaaatttgataagcaatttgcagcacaaacaccggaagagtttgtttcatcactcttagttgataaattaggtgtgaagtttttagccattggcgatgattttcgttttggtaaaaatagagcaggtgattttcattttttacaacaagccggtgctcgatacggatttgaggtggcaaataccgaaagttattgtgacaaaggattacgtattagcagtacggcggtacgagaagccttattcaatgacgatttagcattagctgaatcattgcttggacacccttatagcgtttgtggacgcgtggtacatggtaatcaattaggcagaactattggttttccaaccgccaatattcccatgaaacgcttagtggcacctgttgctggtgtttatgcggttgatgtttatttagccgaccatcaatcgcctttagcgggggtggctaatattggcagtcgtcctaccgtaaaaggtaagggtgtacaattagaagttcatttaatcgacgttaatatggatttatatggacgtcgtattgatgttgtgttacgaaagaaattacgtaatgaacagcgatttgcatcattggatgcgttgaaacagcaaatcgcaaatgatgtggctgctgctagggattttttattgcagcggtcggagtca

SEQ ID NO: 32913 - DNA, 4455 bp, Proteus mirabilis
atgctctatcaaaaaacagcggaaaaagagaattgtggttttgggttaatagcccatattgaggggaaagccagccataaaattgtcagaaatgcgatccatggccttgcccgtatgcaacatcgtggcgcgatcctttctgatggaaaaaccggcgatggttgtgggttattattacaaaaaccaacgcgtttttttcagttaattgccgaggaaaatggctggcatttagcgaacaattacgcagtaggcatgctgtttctaagccaagataatgctatcgctgcacagtgccgtcaaattgttgaagaagaattgcaacgagaaacactctctatcgttggctggcgtaaagtaccaactaacacagatattttaggcagtatcgccctctcttctttaccgtcaatagaacaaatttttgtcaatgcacctgccggatggcgtattaatgatattgagcgccgcttatttgtcgctcgtcgccgaattgaaaaacgtattaccgataatgatttttatatttgtagcctctctaatttagtgactgtctataaagggctgtgcatggcaattgatttgcctcgcttttttactgacttagcggatttacggatggaatcgtccatctgtctttttcatcaacgtttttccaccaataccaccccaaaatggccgcttgcgcaaccttttcgctatcttgcccataatggtgaaatcaataccattaccggaaatcgtcaatgggcaagagcaagagcctataaatttcatacgccgctgatccccgatttacaaactgcggcgccttttgtaaatgagagtggctcagactcaagctcactggataatatgctcgaactctttcttaatggggggatggatattgtccgcgctatgcgcctattagtgccgcccgcatggcaaaataatccacaaatggatgatgatctacgtgctttttttgattttaactctatgcatatggagccttgggatggacctgcggggatcgtgttatctgacggtcgctatgcagcctgtacactagatagaaatgggctacgtccagctcgctatgttatcacgaccgataatattattacctgtgcttctgaaattggcatttgggattatcaacctgatgaagttctagaaaaagggcgtgtcggccctggcgaactaatggtaatagatacttatcaaggtcgcattttacattctgctgaaactgacgaagatttaaaaaggcgacacccgtataaactttggttagaacgtaacgttaaacgtctgatcccttttgagcaattgcctgagccacaagcgacaggtgagcgcgcttttgatgatagcttactggcgacataccaaaaacagttcgcttatagccaagaagagctggaaacgattttgcatgtactggctgaaaatgggcaggaagccaccggctcgatgggagatgacacgccttttgccgtactttctcagcgcccacgcttaatttatgactattttagacaaaaatttgcgcaagtgaccaatccgccgattgatccattaagagaagcgcatgtgatgtctttagcaacctgtattggtcgcgaaatgaatgtctttagtgaagcggaaggacaagcccatcgcctcagttttaaatcacccattttgctttatagtgattttcaacaattactcaatcaagaaagcccttattattcatccatcacgctagatatcacctatcaaccgactgaaaataatttagaaaccgcactacacatcttatgtgaaacggcgcaacaagcggttaatcgtggtgcagtattactggttttatccgacagaaatatcactcaagcgcgattacctattcctgcgcctatggcagtaggcgcggtacaaaaagccttggtagataataatttacgctgtgatgccaatattattgttgaaactgcaagcgcccgtgatccccaccacttcgctgtactattaggttttggcgcaaccgctatttacccttacttggcttatgaatccttagcgcaacgagtcgataaaaaaatattgtcgggtacttatgcgcaagtcatgctcaattatcgtaatgggatcaacaaaggtctgtataagataatgtccaaaatggggatctccaccgttgcctcttaccgttgctcacaactatttgaagccgtagggttgcatgataatgtcgttaaacgttgcttcgatggggttgataatcgtattaacggtgcagattttagcgattttgaacaagacttatttaatctatccaaacgtgcttggctaactcgctatcctctagacgctggtgggttattaaaatatacccatcaaggagaatatcacgcctataatcctgatgtggttcaagcgttgcaaaaagcggtaaatagtggtgactacgctgattaccaacattattcccaattagtgcaacaacgccctattaccaccttacgtgatctattagctctcaatgacacaacccctattgcaattgaagatgtcgaagcagaaagtgaactgtttaaacgctttgatactgcggcgatgtcaattggtgcattaagtaaagaagcccatgaagcccttgcgcaagcaatgaataccttaggcggattttcaaactctggagaaggtggtgaagatccggcacgctacaacaccaacaaagtttcgcgtatcaaacagatagcttcaggtcgtttcggtgtcacgccgtcttatctaatgagtgcggatgtattacaaatcaaagtggcacaaggggcaaaacccggtgaaggtggccagttacccggtgataaagtcacgccttatattgcgcaactgcgttatgccgtaccgggagtcacactgatttccccgcctccccatcatgatatctactctattgaagatttagcacaactgattttcgatttaaaacagattaatccccgtgcgcttatttctgtcaaactggtctctgagccgggtgttggtacaatcgccaccggagtcgctaaagcttatgcagacttaattactattgcaggttatgacggcggtactggtgccagcccattaacgtcagttaaatatgcaggtagcccttgggaattagggctagtagaagcgcaacaagcattagttgccaacaatctgcgtcataaagtgcgcttacaagttgatggtggattaaaaacgggggttgatattataaaagcggccattttaggggctgaaagttttggttttggtacagggccaatggtggcgttaggctgtaaatatctgcgaatttgccatttaaataattgcgctatgggggttgcaacccaagatgaaaccctacgccgccaacattttcatggtttacctgagcgcgttatcaactatttccgttttattgcccaagaaacccgtgaacttatggcacaacttggcgtaaggaaaataaccgatttaatcggcagaacggatttgctttcttgcttagagggaataaccagtaagcagcaaaaattatcgctcacaggattattagaaactgcgacctctcctacaggtaaagcgctctattgtcaggagcacaatgatacttatgataaaggagaattaaatcaacgtattgttgcgcaaaccattacgggcgtcgaacaaaagataagccaaacccactatttcgccattcgtaacacagaccgttcagtgggagccacgttatccgggctcattgccaaaacctatggtgaaagtggtttatctgctacaccaataaaacttcactttacgggtactgctggtcaaagttttggcgtttggaatgcgcaaggggtggaattaaccttagtgggtgatgccaatgattatgtcgggaaaggcatggcgggtggacgcattgttatttcaccgccagtaggttctgcctttaaagcccatcagaccacgattatgggaaatacctgtttatatggcgcaacaggtggaaaactctatgcatctggattggcgggtgaacgttttgcagttagaaactctggcgccattgcggtgattgaaggggttggggataatggctgcgaatatatgaccggcggtattgtctgtattcttggtaaaacagggattaactttggtgcagggatgacggggggctttgcctatctgttagatgaagataccacactatcacaacggatcaataacgcctctattgagcttcttcccgtggctaattatgcgattttggcagagcatcttcgcggtatgatcgcagagcatgtacggctaactggctcccaacaaggagaaaaactactttctcaatgggaatattggtcacaacactttaaattagtcaaacctaaatcgagtgatgttcatgccttattaggtcatcctcgccgttcagtcgctgaattacgcgttcaggcacaa

SEQ ID NO: 32914 - DNA, 1666 bp, Proteus mirabilis
atgcaaaaattaaagtttttacgattttcaaaagaaaaagtttctctttttttagctgtctatattggtttatttcttaatctttccgtttacattggccgttatggcacacagaattctcacaattccctcattgaaagtttatatatactgggtgaagttgcagtaaacattgcctttactttcttcttattacgacttatttctttttgtggcacactattttttaaaatagtcgcttcttttattctgctcattagtgtttgtgctagttactatatctctttctttgatgtagttattggctatggcattattatttctacgctcaccacagatatcgatttatcaaaagagctgattagccctaatgtgattatttggattattgggttatctattttacccctagcgctaacttggttatgtaagaaaccagaaaaaaatataactcagcagcaaaagaaaaaaatctggatcaaaaatacggtcaaaatgctcgtaattgctcttgcggtatttgcctatcttaaaaccttagattcgaaaccaaaaagcctatgaaatcaagaataacttagatttgccaagctacagtggtggtttaagttacgcctatttaccgaccaactggattattcctttatttcaatatgcgataacacagtacgacgaccactttaatagccagaatatctttgatcccgcggataactttacctatataccgtcaaaagccaatgaagatgtctatgtggtctttattattggcgagacagcaaggtgggatcatatggggctattcggttatgaaagacaaaccaatcccttattaagccaagaaaaaaatctgattgctctgaaaggtatctcttgcgatacagcaacaaaactttcgctaaaatgtatgtttgtgcgtgaaaatggtacagaaaataacgatcaacgaacgttaaaagagaataatattttctcagtattacatcagctaggaatgacatcagaactcttttcaatgcaaagtgagctttggttttacaataagcttgatttagataactatgccatgaaagagatgatgaccgccaaaaatagtaattttggcaaagaattagatgatactttgcttattaacgaagtcgcagattccgttgctcactattctaaaggtaaccacttagtgattttacacactaaaggttcacactttatgtactcgcaacgttacccaaacgcatttaaaaaataccaacctgaatgcttaaacgttgacgatgagtgcaccaaagagcagctcgtcaatgcttatgataactctattctttatactgattactttattgatggtgtacttaataccttgcgtgataaaaaagccattgtgttttatacctcagatcacggcgagtcaatttcagaaaaaggtggcttacacggcacaccaaaagaaattgcaccaccagaacaatttaaagtgcctttcttagtgtggatgtcagatagctatttagctgagcctgaaaataaacagttatttgataatctcaaacgaaatcaagataataaccggactttctatcatcataatatttttgactcgatattaggctgtctaggttactcatcacccgatggggggattaataatcaaaataatctctgtttt

SEQ ID NO: 32915 - DNA, 456 bp, Proteus mirabilis
atgcctaatattaaacctttttcattattcccaactttatctgacaatctactttcaaaccgttttgatcagatagatcgcctgtttagtcagttaacaggcagtaaaccaatttcatcaccgactcagacttataatctgaaacagattgatgataaccattatgaactaacagtgagtgtgcctggatatcaagaagatgacttatcggtttcattgaaaggaagtcgcttattgattgaagggaaaaaagaagaaaaattagaagaagacaatgataaatggatccaccgaggtatatctcaagggcagtttacattgcagtttgacctcggtaaaaatgtcaaaatagaaaaagccgatttatcaagtggacttctgaccattgctattgagtatgagttacctgaagaagaaaaacggcaaacaatagcgatagaaaataaagataaaagc

SEQ ID NO: 32916 - DNA, 1389 bp, Proteus mirabilis
gtggcaaaagcagccaaaagagcctttgtatgtaatgaatgtggggccgattacccgcgttggcaaggacaatgttctgcgtgtcatgcgtggaataccattacggaagtgcgccttgcggcgacaccttctgcccgtaacgatcgttttagcggttttgccggagatgcgaaaggaataagccgtgttcaaaagctctctgaaattagccttgaagcattacctcgcttttctactggatttaaagaatttgatcgtgtgttaggcggaggggttgtgccgggaagtgccattttaattggcggaaatccgggggcaggtaaaagtacactattactgcagaccatgtgtcgtttagccactgaaatgaaaaccttgtatgtcacgggagaagagtcattacagcaggttgccatgcgggcgcaccgcttaggtttaccgacaaccgaattgaatatgttgtcagaaaccagtattgaacaaatttgtttaattgccgctcaagagcaacctaaattaatggtcattgactcgatccaagtaatgcatatggccgatattcaatcttccccgggcagtgtggcacaggtacgagagacagccgcttatctgactcgttttgctaaaacgaatgatattgccattattatggtgggtcatgttaccaaagatggcacattagcgggacctaaagtattagaacactgtattgactgctcagtgatgcttgatggtgaaacggactcacgttttagaacattgcgtagtcataaaaaccgctttggtgcggtgaatgagttaggtgtttttgccatgacggaacaaggtttacgcgaagtgagtaatccatcggctatctttttaagtcgtggtgatgaggtgacttcaggcagttctgttatggtggtgtgggaaggaacgcggccattactggtggagatccaagcattggtcgaccactctatgttatcaaatcctcgccgtgttgcggtgggattagagcaaaatcgcttagcaatattattagcggttttgcatcgtcatggtggtttacagatgtctgatcaagatgtctttgttaatgtcgttggcggtgtcaaagtaaccgaaactagtgcagatttagctttattactatcattagtatcgagttttcgtaatcgtcctttaccgcgtgatttagttatttttggtgaggtaggactcgcgggagaaattcgtcctgtaccaagtggacaagagcgaattgcagaagcagcaaaacacggttttaaacgtgctattgtgcctaatgcgaatatgccaaagaaaaatccacctgatatgaaagtgtatggagtgaagaaactatcagatgcgttatctgtacttgatgatttggacgacttc

SEQ ID NO: 32917 - DNA, 2532 bp, Proteus mirabilis
atgaattttaataaccaattacacctcatttcctatcgttattctcttccgttttgtgtcgctttagggattggggtgataacaacttcttcattcgctgctgaagaagctgaatttgatcctagctttttgcattcagtgcaaggaaagaatgcgattgatatacgtcgctttaattatggcaaccctattcctgagggcaagtattacgctgatatctatctcaataatgaatggaaaggaaaagctaatgtacagtatttatatactgacaatgcgaatacgtcgacgttatgtctaacgccggaattactttcattaattgatgtcgtcaaaggcactgttcctgaaaacagttataaagccacttgttatcccgcctcagaaggactcccctcagcaaaatttcattttgatttatccactttaaagctgaatatagaaattcctcaggcacaagtgaatactcgacctcgaggatatattgcccctgcacagtggcaaagtggagtccctgccgcatttgtcaactatgatgttaactattatcaatacaatactccggatataaataatgagcagacttaccttgggttaaaagcgggactcaatttatggggatgggcttttcgtcaccgtggtggtgaaagctggaataatggtcattctactgggtatcagaatatcgaaacaaatgtgacgcatgatattgctcggttacgggcacaattcacattaggtgatttttatacgaatggcgagttaatggatagccttagcttacggggaattcgattagcatcggatgaacgaatgttacccaactctttacgtggctacgctccgatcgtgcgaggcattgctaatagtaatgctaaagttacgatttatcaaaatgctcacatcctttatgaaacaactgtgcctgctggcccctttgtcattaatgatttgtatcccagtggatatgctggcgaccttcttgtgcaaataaccgaatctaatggacaaacaagaacatttacggttccttttgcttctgttgcccaacttattcgtcccggatttagccgttggcaaatgtcagtgggacgctatcgttatgcaaatgagacatatcatgatttaattgcacaaggcacatatcaatatggtttgacaaatgatatcactttaaatagtggactgaccacaagctcaaaatataccgcaggattggctggtgttgcttttaacacgccgattggggcaattgcatctgacattacattgtccagaacaacatttaatcactctaacgtaacgcgtaaaggctacagtttacatactagctatagcgtcaatattccgaccacgagtacaaatatcacgttagcagcctatcgttattcatctaaagatttttaccatttgaaagatgcgctattggctaatcacagtgaatttattgatgatgtttccataaaaagtgccgcattttatcgccctaaaaatcaattccaagtttcaattaatcaagaattaggtgaaaaatggggaaatatatttttaactggtaccacttataattactgggagcataaaggaagtcgtaatgagtatcagatgggatatagccatttttggaaaaaacttggttatcagattggcttttctcaatcacgagataatgagcaacaacgccgagatgacagattttatgtgaactttacgcttcctttgggagagcgtgttcaaagccccattttttctactgtcttaaattataataaaggcgagaaaaacagcattcaaacatccatcagcggtatcgctggggaagataatcaattctcttatggtatttcaggtaatagtcaggaaagtggaccttccggctatgcgatgaatggaggctatcgttcaccttatgtaaatgtaaccgcaaccgtcgggcaagatactcaacataatcgtcaaatgtcattgggtgcgtcgggggccgttgtcgtacatccttatggagtgacgttaagtaatgatttaagtgatacttttaccattatccatgcaaaaggagcacaaggtgcggtcattaataatgcaccaggtagccgattagatttttggggaaatggtattgtgccttatgtcacgccttatgaaaaaaatcaaattagcatcgaccccactaatttggatttgaatgttgagttatcagcaacagaacaaaaaatcattcctcgcgctaatagtgccacgttagtgacatttaatactcaaacagggagaagcctactatttgatattcgaatgccagatggtagtactcctccaatggcttccgaggttttggatgagcataagcagttagtcggatatgtggctcaagctggacgcttatttacccgcggtcttcctaaacaaggtcaacttgatgtgatatggggaccaaatcatgacgataaatgctcatttacatatcatgcgacacgcaatgaaactgacatgcgacctcaaaccattcctgttcagtgtataccgcactctaat

SEQ ID NO: 32918 - DNA, 549 bp, Proteus mirabilis
atggatgcattaacactgcttttaaatcgacgttcagcgtctcgactgactactccagccccaaataaccaacagcttgaagctattttacaagcaggtatgagagcccccgatcatggcgcccttaaaccttggcactttgtcgtgatgaaagaggatggtattgagcgttttagtcaattattacataaagcggcggtggtgagtcaactaggtgctgaggtagaagaaaaagcaaaaaacgcaccttttcgtgcacctttaattattaccgtgattgccaaagttaaagcgcatcctaaagttcctgaatgggagcaaattgttgcggcaggctgttgtgttcaggcgatgcaaatggctgcagtggcacaaggttatagtggtatttggcgttcaggctcttggactcatgatccagtggtaagagcgggattaggttgtggtgaacacgaccatattgttggtttcttatatcttggtactcccgcattgaaagcacctacaacggtttctcctgctgatttaactgattttgtgacttatttt

SEQ ID NO: 32919 - DNA, 663 bp, Proteus mirabilis
atgcttttaggaagtggattgcttttgattgtacctattgtggtgcttattctgggatggcaatggcaaccatcagcacatcctctgggaggcgaaagcactttatggatagccaatagtgcggctaaaccttggggagctttaactatattactttgccttgttttgctcttttttattcttaaactacctaaaaaagcatttattcagttagcaattattatggtcgcgactttgatgttggggcagttgatcaaagtggctgtaaaaaatagcgttaaagagccacgaccttatgtggtttgggtcagtaaccaactatcaatatcaccagaacatttttaccaagtgtctcgtcctgagcgtgagcaactgttgcataatggattatctcattcgtcgctgatccctcaatggcaattaagccattggcgagcagaaaccggttatgcctttccttctggacacagcttattctctgcaacactggctttatttgtgtttgtgctgtgtatgttacgacgccactattttttagccagcttagggatattatggggtattgatgtgactgtcggacgaataatattaggtatgcactgggcatctgatgtgattgtcggtattctgattagtgctggctggtgtggtgtgcatttcgga

SEQ ID NO: 32920 - DNA, 1635 bp, Proteus mirabilis
atgaaaacgaattatatttttgtgaccggcggggtcgtatcctctctgggtaaaggcattgccgcagcctctttagcggctatactagaagcccgtggactcaatgtcaccatgatgaagttagatccgtatattaacgtcgatccaggtacgatgagcccaattcaacacggagaagtcttcgtcactgacgatggagctgaaactgatcttgacttaggccattacgagcgctttattcgcacgaaaatgacgcgtcgtaataactttacgaccggccgtgtatactcagaagtgctacgcaaagagcgtcgtggtgactatcttggtgctactatccaagttattcctcatatcactaatgaaatcaaagaacgcatcatccgtggcggtgaaggtcatgatgtcgtgttagttgaagttggtggtactgtcggtgatatcgaatcacttcctttcttagaagctatccgtcaaatggcggcggaagtagggcgtgagcatactttctatctgcacttaacattagtgccttatttagcggcttcgggtgaagtaaaaaccaaaccaacgcaacactctgtaaaagagttactctcgattggtattcaaccagatgcattaatttgtcgctcagatcgcgttattccagctaatgaacgcgccaaaattgcactgttttgtaatgttcccgagaaagcggttatctcattaaaagatgtcgattccatttataaaatccctgcactcttgaaatcgcaaggattagatgattatatctgtaaacgattcagcttagattgcccagtggcaaatctgtctgaatgggaacaggttatctacgaagaagccaaccctgaaggcgaagttaccattggtatggttggtaaatatgttgaattaccagatgcctataaatcagtgattgaagcattaaaacatggtggtttcaaaagccgtgttgcggtaaatatcaaattaattgattctcaagatgtggaaactcgtggtgtagaaatcctaaaagggttagacgcaatcttagttccaggtggttttggtgaacgtggtgttgagggcaaaattatggctgctcgatatgcacgtgaaaataaaatcccttatttaggcatctgtttaggtatgcaggtggctatgattgaatttgcacgcaatgttgccaatatggaagatgctaactccacagagtttgcacctgattgtaaatacccagttattgcgcttattactgaatggcgtgatgagaatggcaatcttgaagtgcgtacagaaaatagtgacttaggtggaacaatgcgccttggtgcacaaccttgtcatttaagtggcgatagtttagtgcgtactctgtatggtaaaaataccattacagagcgtcatcgtcatcgttatgaagtgaataatctactgttaaaacgtatcgaagatgcgggtttacgtattgcaggtcgttcagttgataacaagctggtggaaattattgaaaatccaaatcatccttggtttgttgcttgtcaattccaccctgagtttacctcaacgccacgtgacggccatccgttatttgctggctttgtgaaagcagcctttgactaccaaaaaggcttgctaaaa

SEQ ID NO: 32921 - DNA, 822 bp, Proteus mirabilis
atggaaaaatatgtagtgatgggcaatcccattgaacatagtcaatctccttttattcatcagcttttttcgaaacagtcagggattgattatgaatatgggcgtttactggttccattaggcgaatttgataaagtagcaacgcaatttttttctcaaggtggacgtggagctaatgttaccgttccttttaaggaagatgcttttcgctttgtggataaattaacacaaagagcacaagcctgtggtgctgttaatactattttaaaattagatgacggcacgttattaggtgataatactgatggtcagggcttaattcttgatttagctaggttggattttattatccccggaaaaatattatcggttcttgttattggggctggtggtgctacacgagggatattattaccattattaaattataattgtgatattactttgactaatcgcactgttgaaaaagcacaacaattagcacaagaatttagccaatttggtacaattagagctagtgctccacaaaatgttacagataaacattatgatctaattattaacgcctcttcatctagtatgacggacgatattcctcctatacctgatagtgcttatggttttaaaactgcttgttatgatttgtattataaggcaggtatgacttcttttttataccatgcattaaaaaatggtagtacacgcttatctgatggcctaggtatgctggtagggcaagccgcttatgccgttgagttatggtatgagcgagtacctgatattaatccaacaataaatattttaagagaaaatttgaataaa

SEQ ID NO: 32922 - DNA, 1230 bp, Proteus mirabilis
atggaccatgaaataatagataatatgaaacgtctacaagcctttaaattccagttaagacccaatggtcagcaagagcgtgagatgagacgctttgcaggggcttgtcgttttgttttcaatcgggcattagcacgtcagaatgaggagcacgaagcagggaataaatacattccctatacaaaaatggcttcatggctcattgagtggaaatctgacacagagacacaatggttgaaggaagccccatcacaaccgttacaacagtcacttaaagatttggaacgggcttacaagaattttttccagaagcgtaccgcttttcctcgattcaagaaacgcggtaaaaatgacgcttttcgctacccgcagggcgtgaagctgggtcaatccaatagtcgtatatcattgccaaagttgggatggatgcgctaccgcaacagtcgtgaagtcgtcggagaagtgagaaacgtcacggtcagtcagtcatgcggtaaatggtacgtcagcattcagactgagtatgaagcgacagaaccacaacatgaatcaacctcaatagtcgggcttgatgcaggggttacaaaactggccacgctttcagacggtacggtatacccgcccgtcagcagttttaaagtcaaccagcgaaagctggcaaggcttcaacggaaattaagccgtaaaatcaaattcagtgccaactggcaaaaacaaaagcgcaaaattcaacgtctgcatactcatattgccaatatcaggaaagactaccttcacaaagtcaccagcgaaatcagcaaaaaccacgcaatgattgtcattgaggacttaaaggtcagtaatatgtctaaatcggcaaaaggtacgacagaacggcatggacggaacgtaaaagctaaatctggtttaaaccgctcaatactggagcagggctggtatgaaatgcgccgtcagcttgagtacaagcagctctggcgaggaggtcaggtagtggcaataccaccagcctacaccagtcagaagtgcgcttgctgtggtcatacagcaaaggaaaaccgccagtcacaaagtcaattcgagtgccttgaatgtggatatacagcgaatgctgatatcaacggggcacgtaacattttagcggcaggacatgccgtgcttgcctgtggagggagggtgcagtcagaccgcccgtcgaagcaggaacccgccgaggtgattcagacatcagtc

SEQ ID NO: 32923 - DNA, 1512 bp, Proteus mirabilis
atgagcaaagataataaaaaggcaggaatagaaccgaaggttttttttccgccattaatcattgttggtattttatgctggttaacggtacgcgatcttgatgcttcaaatgaagtgatcaatgccgttttcagctatgttaccaatgtctggggttgggccttcgaatggtatatggtgatcatgttagggggctggttctggttggtttttggacgttatgccaaaaaacgcctgggcgatgagaaaccagaatttagtacggcaagctggatctttatgatgtttgcttcttgtacatcagcggctgtactgttttggggctcaattgaaatatactactacatttcaagtcctcctttcggtatggaaggttactccgcgccagccaaagagatagggttagcttacagcttattccactggggcccgctaccttgggcaacctatagtttcctgtctgtcgccttcgcttacttcttttttgtacgcaaaatggaagtgatccgcccaagtagcactttaacgccattagtgggtgaaaaacacgttaatggtttatttggtactgtcgtcgacaatttctatttagtcgctttgatcctagcaatgggcaccagccttgggcttgcaacgcctttggtaactgaatgtattcaatacttatttggtattcctcacactctacaattagatgccattattatctcttgctggatcttactcaacgctatttgtgtggcatttggtctacaaaaaggggtaaaaatcgctagtgatgtgcgtacttacctgagctttttaatgttaggttgggtatttatcgtgggtggtgccagctttattgtcaattacttcacagattctgtgggtacattgctgatgtatatgccacgtatgttgttttacaccgatcctattggtaaagggggttttcctcaagcttggactgtcttctattgggcttggtgggttatttacgccattcaaatgagtatcttcttagcgcgtatctctaaaggtcgtactgttcgtgaattatgtttaggaatggtatcaggtttaaccgcggggacttggctgatttggactattctggggggtaacactttacaactgattgaccaaaatatccttaatattccgcaactgattgatcaatatggtgtgccacgcgccattatcgaaacatgggccgctttacccctcagtacagcaaccatgtggggcttctttattctctgctttatcgccaccgtcactttaatcaatgcctgctcttacacactagcaatgtcaacttgtcgctccatgaaagaaggggctgaaccaccattattggtacgcatcggctggtctgtattagtcggtattatcggcattattttactagcattaggcggcttaaaaccgatccaaaccgccattattgccggaggatgcccactatttttcgtcaatatcatggtcaccttgtcctttataaaagatgccaaagtgcactggaaagat

SEQ ID NO: 32924 - DNA, 411 bp, Proteus mirabilis
atgagtcaaccatcgcaagaaagcgctgtccgtttagataaatggctttgggctgcacgtttttataaaacgcgtgccattgctcgcactatgattgaagggggtaaagtccattacaatggtgtgcgaggcaagccaagtaaaaatgttgaagttggtgctgaaatacgcttacgacaaggtaatgatgaacggacagttacagtcttaatggtgagtgcacagcgcctaggggcggctcaagcacaattgctctattgtgaaacaccagagagtattgccaagagagaaaaaatcgctctagcaagaaaaatgaatgcgttaacgatgcctcatcccgaacgtcgacctgataaaaaggaaagacgcaccttacttcgcttgaaacagacaaatttaccaggatcggat

SEQ ID NO: 32925 - DNA, 417 bp, Proteus mirabilis
atgaaaaaaggtgtattacttaatagttcaatttctagcgtaattgcacgtttaggacatactgacaaaataacgattgcagatgctggattacccataccctcctctgttgagcgtatcgatcttgctttaactcaggggatccctgactttatgtcagtgttacaaacgatcacccatgaaatgcaagtcgaagccgttatgcttgccatagaaattaaaaatataaacccacttctttttagtgagataacccgttatttgcatttattagaacaacaacaaaaaaaacctatcgagatcatttatgtcactcatgaagaatttaaaacacaacttccagataataaagcggtgataagaacaggtgaatgctctccttatgccaatatcgtgctgttttctggtgtgactttc

SEQ ID NO: 32926 - DNA, 1539 bp, Proteus mirabilis
atgcaactgaattccactgaaatcagcgaactgatcaagcagcgcattgctcagttcaatgtagtgagtgaagctcacaatgaaggtacgattgtttccgttagtgacggtatcattcgtatccacggtttagccgaagttatgcagggtgaaatgatcgcactgccgggtaaccgtttcgctatcgcattaaacttagagcgcgactctgttggtgcggttgtgatgggtccttatgctgacttagcagaaggcatgaaagttaaatgtacaggtcgtattctggaagttccagttggccgtggtctacttggtcgtgtagttaacacactgggtgaacctattgatggtaaaggtgctgtagagcatgatggcttctcacctgttgagatgattgctccaggtgttatcgaccgtcaatcagtcgaccaacctgtacagacgggttataaatccgttgacgccatgatcccaattggtcgtggtcagcgtgaattgatcatcggtgaccgccaaacaggtaaaactgctctggctgtcgatgcgattattaatcagcgtgactctggcattaaatgtatttatgtcgctatcggtcagaaagcatcgactatttcgaacgttgttcgtaaattagaagagcatggcgcgttagaaaacaccattgttgttgttgcttctgcatcagaatcagcagcgttgcaatacctcgctccttatgcggggtgtgcaatgggtgaatacttccgtgaccgtggtgaagatgctctgattatttatgatgacctgtctaaacaggctgtcgcataccgtcaaatttcactgttacttcgtcgtccacctggacgtgaagcttaccctggtgacgttttctatctgcactcccgtttattggagcgcgcagcacgcgttagcgctgagtatgtagaaaactttactaacggtgaagttaaaggtaaaaccggctcactgactgcgttacctattatcgaaacgcaagcaggggacgtttctgcattcgttcctacgaacgtaatctctattaccgatggtcagatcttcttagaatctaacctgtttaacgcaggtatccgtccagctgttaacccagggatctccgtatctcgtgtaggtggtgcagctcagactaagattatgaagaaactttctggtggtatccgtactgcacttgcgcagtatcgtgagctggcagcattctctcagttcgcttcagatctggatgatgctacccgtaaacaattgaaccacggtcagaaagtgactgaattgctgaaacagaaacagtacgaaccaatgtctgtcgcacaacagtctttatctctgtttgctgcagaacgtggttatctggaagatgttgaaatttcaaaagttgtgccatttgaagcggctttattagcttatgcttctcgtgaacatgctgatttactgaaagaaatcaaccagaccggtacttataacgaagaaatcgaagcgaagctgaaaggcgtgctagacaacttcaaagcgactcagtcctgg

SEQ ID NO: 32927 - DNA, 846 bp, Proteus mirabilis
atgcaacaccaaaatactcaaaagaaaatactacgtactatttgtccagatgcgaaagggcttatcgcaaaaattactaatatttgttataaacatcagctcaatattgttcaaaataatgagtttgttgatcatcgcactggccgcttttttatgcgcactgagctagaaggcatttttaatgatgaaacctttttagccgatttagatgatgcacttccacaaggctcacagcgagagcttaatactgccggtcgccgccgtatcgtcattatggtcactaaagaagcccattgtattggtgacctcttaatgaaaagcgcttttggtgatctggatgttgaaattgcagcagttattggtaatcacgacacgctaaaacaccttgttgagcaatttgggatccctttccatctcattagtcatgaagggttaacccgtgatcagcatgatgaaaaactgatagcacaaattgaccaatacaaacctgattatgtggtattagctaaatatatgcgtgtattaacccccgcatttgtacaacattacccaaatcaaattattaatattcatcattctttcttaccggcatttattggcgcccgcccatatcatcaagcctatgaacgtggtgtaaaaattattggcgccacagctcactatgtaaatgataatctagatgaaggccctattattactcaaaatgtaataaacgtagaccacactttttcagcagaagatatgatgcgcgcaggacgggatgtagagaaaaacgtactaagccacgccctctattgggtgctctcgcaacgtgtttttgtctatggcaacagaacaattattttg

SEQ ID NO: 32928 - DNA, 1125 bp, Proteus mirabilis
atgttcaaatattcgttcatcgcggtgattgtttctactgttttgctatctgcttgtgcagatagccatcagaagagtgcagaaaaaaaacctgtaacaagtgaaattgccaatattgcgacatcggcaccggctcgctggaaacagattgatgttgtctcacttgaacaggcgtttccaaaacagtcacggacacctgcacaatttcctgcttatgtagatgctttaaaacaaaaagcggctgaattgggttataaacctgaaactatcaattttgccttttcggaaattcactttattgacagagtggtgaagtcagaccgtaatcagccagaaaagaaaattactttagatgtgtatttacctcgagtggtgacgaaaggacgtatcgcagaaggggcgaaactttatcaagctaaccaacaaaccctagcgcagatcagcaatcaatatggtgtgcctgcaaattatattgttgccttatggggattagaaagtggttttggtcgagtacaaggaaaagaagatgttatctcagcactggccacattagcttttgaaggtcgccgtgaggccttgtttagtcgccaattaatggccgcacttgagataatcgaaaatggacatttacctgtaggccagcgtttaaaaggctcttgggcaggcgcaatggggcagacacagtttatgccatcttcatttttgacttacgctgctgatggcaatggtgatggcaacattgatatatggaatagccgtgaagatgcgtttgcttcagccgctaattatttagcaaccgagggatggcaacgcgatctcccttggggggaacaagtcagtttacctgctaattttaatcaacagttggaaggtataaaaacagagcaacaaaaaacggtcgcacaatggaaggcgctaggggtgcaattacccgctaatagccaattaagtgatgatatgaaggtatggctgataattcctgatgatgatttgcatagaagttatttagtcacccaaaatttccgtactatcatgcattggaatagctcttacttttttgctttgagtattgtgacgatggctgatggcgttgccaataaaataaatacactgccaactcaacac

SEQ ID NO: 32929 - DNA, 1191 bp, Proteus mirabilis
atgaaacatacattgttaaaaacgactgcaattgctatggcattaagtgtgggagttgtgcaagcgactgaatataaagcgagtaccgcagaacatccaatcaaaatagttaatttagatgctcttgaaaatcaagtaaaagaaaatatggataaaggcgctttcggttatattcgtggtggtgctgaagacgaaaataacttgcgttctaatacaaatgcatttaataaaaaatatattatgcctcgtgcattacaagggattgaattttccgatctgaatttaaaaacagaatttttaggtattaaattagatacgcctattattcaggcaccgatggcagcccaagggcttgctcatcaacaaggcgaagttgccacagcaaaaggtatggcgaaagcgggctctattttctcattaagtacttatggtaataaaaccattaaagaagtcgcgcaagcacaaccgggttatccgttcttttttcagctatatatgagtaaaaacgacgcgtttaatcagtatattttatcgcaagcaaaacagtatggcgcgaaaggtattattttaacggttgattctcctgtggggggatatcgtgaagatgatattaaaaatagttttcaattcccattaggttttgccaatttggaagcattcgccaaaatcagtgatgataaatcaaaaacaggtaaaggttcgggtattagtgagatctatgctcaagctaaacaagcatttactcctgcggatattcaatatgtgaaaaagatgtcaggtttaccagtcattgtgaaaggtattgaatcacctgaagatgccgatactgcaattaaagcgggtgctgatgcgatttgggtgtctaatcatggtggtcgtcagttagatagtgcacctgcaaccattgatgtattgccagccattgccaaagtcgtgaataaacgtgttcctatcgttttcgatagtggagttcgtcgtggctcacatgtctttaaagcgctagcgagtggtgcagatgttgttgctgtggggcgtccaattctttatggattaaatttaggcggtgctgaaggtgttaattcagttattgagcaattaaataaagagttaagaattaatatgatgttaggtggtgcaagaaacgtcaaagaaattcaagcaacgcacttgtatacagatgctgactttaaa

SEQ ID NO: 32930 - DNA, 981 bp, Proteus mirabilis
gtgaaaacaccgattatttctgttatcgttcctatgtttaatgaggcatctcgcattacgcgattattagagagcctactttgccaaacctttcacgactttgaagtgatcattataaatgatggctcaacggataatagtgttgacatcgctatgctctattgccaacaagataatcgttttcacctttatcaccaaactaaccaagggttatctagcgcgagaaatactggcttaaaatatgctcaaggtgattggatagtcttttttgatagcgatgattttattaaacctcaattactggcacattggcatcaattagcctgcgaacaacatatcgatgtattaataggcaatggtgaacgctatgatgtacataatccacaaaagcatcaaactaccatccaccaacgtcaaccttatcaacaagtgatcagcggtcaagagtgggtgatccatgccgttacgcaacatcaatggccacattttgtttggttacaatttattcgccacgaaataatcaaaaaacatcacctacgctttattgatggcctttatcatgaagatattttgtggacgacacaacttgcactggtcactcaacgtatcggctttgatgatcaacctctttattactattgcgctaaccctaactctattacgcgtaaacctaatccacaaaaagaagccaaacgcgcacaaagttatttgcaaattgttatacaactcttgcaacttgcagataaacaacatcaaccactattagccaacgcgttgcgccaacaagcactacgtgaatttggcagtttctttattctttttcgtaaacgctgtgatacaaaaaaccaaaccatcattgcacagcaatttaggacttatcacctttttccagcccttaataaaggcgcccaaaattggcgtcaacgttggtttatttgccgtgtttattgcgttctttattggcatcgttggaaaaaaaga

SEQ ID NO: 32931 - DNA, 2544 bp, Proteus mirabilis
atgagcaagaaaacactcgcaatcatcggtaacggcatggttggacaccgttatatagaagaattgattgataagggcggcaatgaaacgttcaatattatcgtcttttgtgaagaacctcgtattgcatatgatagagtccatctctcttcctatttttctcatcacaccgctgaagagctctcgttagttaaacccggttattacgagaaacatcatattgaagtattagtgggtgagcgtgtgatcaccattaatcgtgaagaaaaagtggtgcacaccaataccgggcgttgtgttagctacgacaaattgatcatggcaacaggctcctacccatgggttcctcctattaatggaaacaactcaccagattgttttgtttaccgaactattgaagatttaaatgcgattgaagcttgtgctcgtttaagccgtaaaggggcggttattggcggcgggctgttaggtttagaagccgctggtgcgctaaaaagtttaggtattgaaacccatgtgattgaatttgcgccaacgctaatggcagaacagcttgatagcatgggaggagagcaacttaaacgcaaaatagagcgcatgggggttaaagtacacacagcgaaaaacacccaagcgatcttatcgacaggggaaaatgcgcgtaaaacattacagtttgccgatgactcctcacttgaggttgattttgtcgtattttcaaccggtatacgtccgaaagataaattagcacgccaatgttctctcgatatagcaccacgagggggaattgtgattaatgactattgccaaacctcagatgcggatatttatgccattggggagtgtgcttcttggcataaccaaacatttgggttagttgccccgggttataaaatggctcaggtggccgttgatcatctattaggtcaacagactgcattccaaggggcggatttaagtgcaaaattaaaactactcggggttgatgtagggggaattggtgatgctcatggtcgccaagaaggttgtcgtagctatatttatcttgatgaaggtaaagagatttataaacgcctgatagtgagtgaagacaataaatacctattaggtgcggtattggttggggatacggaagattatggcaatctgttacagttagcattaaatacaattgaattaccagaacatcctgacacattaatcttacctgctcatgctggaagtaaaccggcaatcggggttgattcattacctgaaacagcacaaatttgctcctgttttgatgtaagcaaaggcgacattattcaagctattgaacgaggttgtcatacggttgcggcgattaaagcagaaacaaaagcgggaacggggtgtgggggatgtattccgcttatcactcaagtattaaatgcggaactcacaaagcaaggtattgaagttaaccatcacctttgtgaacactttcactattctcgccaagagctttatcatcttattcgtgttgaagggctgaaaagttttgatgaactattgaaaaaacatggtcaaggctatggctgtgaaatttgtaaaccaaccgtcggctctctgctggcttcgtgttggaacgactatatcttgcgtgatgacttagttgcgctacaagatacgaatgataacttcctcgccaatctgcaaaaagatggcacttactctattattccacgctcccccggcggtgaaattacgccagcgggtattattgcgattggacaaattgcacaagaatacaatttatacaccaaaatcacaggctctcaacgtatggcgatgtttggtgcacagaaacaagatttaccagcgatttggcagaaattaattgccgcgggttttgaaacaggccatgcctatgccaaagcgatccgtatggtaaaaacttgtgtaggaaacagttggtgtcgttttggggttggcgatagtgttggattaggtgtctttttagaacatcgttataaagggatccgcacgccgcataaaatgaaatttggggtatctggttgtacccgtgaatgctccgaagctcaggggaaagatgtagggattattgccacagaaaaaggctggaatctctattttggtggtaatggaggcatgaaaccgcgtcatggcgatctattcgcggcggatttagatgaagaaacgctgatccattatattgaccgctttatgatgttctatatccgtactgcagacaaattacaacgaacctccgtttggttagaaagcttagaagggggcgttgaatatttacgtgaagtcattattcacgacaagttaggcttaaatgcacagttagaaaaagagcttaaagttttacaagagcgcgtagcctgtgagtggcaagaaacccttgattcaccacaagcattgaaacgttttgcgcactttattaacaatccgatgcccgatcctaatatacagatggtaaaagagcgtgctcagcatcgtcctgcccgcgtgcatgaacgtattgatatcaaaatggtaacagaggagacgcaatca

SEQ ID NO: 32932 - DNA, 1276 bp, Proteus mirabilis
atgagtaaggtcattggttcacttgaaaaggtactccttccttttgcggttaaaattggaaagcaacctcatgttaatgcgataaaaaatggttttatccgtttaatgccattaacacttgccggggcaatgtttgtacttatcaataatgtttttctcagttttggtgagggctcctttttttactctcttggtattcgtttagatacctcaacaattgaaacacttaatggtttaaaagccataggtggtaatgtctataacggtacgttgggaataatgtcattgatggcgccgttctttattggtatggcgctggcggaagagagaaaagtcgaccctattgcggcgggattactttctatcgccgcctttatgacggtaacaccttatgacgctggtggcgcttatgctgtgggggcgaactggttaggaggtgccaatattatttcagggattattattggccttgtggttgccgaaatgtttacctttatagtgcgtcgtaattgggttatccgtttgcccgatagtgtacctgcctccgtttcgcgctctttttctgccttaattcctggttttattattttatcaattatgggaattatctcttggggattagcgcattacggtacacatttccatcaaatcattttagattctatttcaacgccattggcttcgttaggatcggttgttgggtgggcttacgttatttttacctctttgctgtggttctttggtattcatggttcactggcgctggcggcacttgatagcggtattatgacaccttgggcattagaaaacgtctctatttataccgagtatggttcagttgaagcggcacttgcagcaggcaaaacgttccatctttgggcaaaaccgatgctagattcgtttatcttcttaggaggaacaggggcgacgttaggtctgatattagctatctttattgcatcgcgtcgagcagatcaccgtcaagtggcgaagttagcattacctgcaggtctattccaaattaatgaacctattatttttggtttacctgtgattatgaatcccgtgatgtttattccttttattcttattcagccaatccttgctgctattaccgtaaccgcttattaccttgggattattccgccggtcacaaatattgcaccttggacgatgccaacagggttaggggcattttttaataccaatggcagtattgccgcattgttattagcactctttaacttagctgttgcaacactgatttatctgcctt

SEQ ID NO: 32933 - DNA, 1365 bp, Proteus mirabilis
atgggaactagtgtgtttgattctgttttattaaaaaacttatggtcaacagaagaaatgagaactattttttctgacaaaactagaatgcaaaattggcttgattatgaagcagcattagcaatagaacaagctgagcttggtttaattcctcaaaaggcggctgaggttattgtacagagtgcaaaacttgaaaaattagatatggattatgtattagaacaagttcgtcttactcgacatccattagtacctactattcgaggcttagaatatgcttgttctgaacattatggagaatatgttcattttgggccgacaacacaagatgttattgatacaggcttagtgctacaacttaaagctgctcatcaaacttttttacgtgatattaaaatattaggtcgttcattactttctttaagtgaaaaacaccgcaatacacctatggttggacgcactttagcgttacaagcgttaccaatcacatttgggcataaaacagcaatttggttgacagagttagcgcgtcattatcaacgacttaaagaggtggaacctcgtctatttgttggcagtgtagtcggtgctgtcgggactaaagcttctttaagcgataaagctgatgaattagaaaaacgcgtattaaaacgcttaggattaggtataccggaaatctcatggcaaccagcacgtgatagatttagtgaatatggtatgttaattggattaattagtggaacgttagggaaaatagctaacgagatcttaatattagcacacaatgaaattgatgagctttcagagccttttggtaaagggcaagttggctcttcaactatgccacataaacgcaatccagctattgttgaaaatgccgcctgtgtaagtaataccttaaaagctaatctttctgtattaacggatatgatgaaacatcaacatgaacgtgatggtgctatctggaagatggagtggaagattatgccagaaatgtgtctgatgttatctgttatcttggataatatgaaaacagtactaggtgggctaaatgttcatgttgaaaaaatgcgtcacaacatggatatcttaggtgggtttatgttagcagaacgtgtgatgtttgctctgtccgataaagcaggcaaacaaactgctcacgaaattgtgtatgaagcgtcaatgtctggacaagaagaggggattactttcgtagaagctattaatcgtgatactcgtattcgtgaccatatttcacaagaagagttaaatgctttgctagatccaactacctatgttggtaatgctcctgagcaagttgatcgtgtagtcgctcaaacaaaagcttccggctggttaaatgat

SEQ ID NO: 32934 - DNA, 591 bp, Proteus mirabilis
atgcaaaaagtggttcttgctactggaaaccccggtaaagtaacagagttagcctcattactcgctgattttggtttagatattgtcgcacaaactgagctaggtgttggctcagttgaagaaacaggtcttacttttgtagaaaacgcactaattaaggcgcgtcatgctgccaaagtaacaggcttaccggctatagctgatgattcagggatctcggttgatgcattaggtggtgctccgggcatttactctgctcgttatgctggtattgaggcaaccgatcagcaaaatgtagataaattactcgaagcaatgaaagatgttcccgcagagaaacgtcaagctcagtttaactgtgtgttagtttatctacgccatgaaaacgatcccactccgctaattttccatggtatttggcaaggtgtgttaactcaagaaatgcaaggtgatggtggatttggttatgatcctattttctttatccctgagctaaattgcactgcggcacagttaaccagagagcaaaaaaatcaatactctcaccgtggtaaagcactaaaactaatgttggatgcacttaagaatgct

SEQ ID NO: 32935 - DNA, 960 bp, Proteus mirabilis
atgaatactgaaaacaaaaccgaagaagtgaaattaacagcgggtcaacttttacgtcaggcacgtgaaaaagcggggctaactcagcagactgttgctgatcgactttgtttgaagttaacaacagtatgtgaaattgaagctgatactatctcttctggtattgcaccgacatttttacgtggttatatgcgctcttatgcaaaacttgtcggtgttcctgaaagcgcaattctaggtctaattgatcaacaagccccaataaaacaagttaaagtcacaacaacacaaaattactcattgggtaagcgtcataaaaagcgtgaaggctggttgatgaaattgacttgggttattgtaatagcaatgatagctttagtcggtttatggtggtggcagggtcatcaagccgatcaacaagaattagtctctatggcttcgcaagacataggacaaaatagtccgcaagaaaacaccaatacgatagaatcgcctttatcaaccttagataataatagcccatcatctgagggtgaaaatgtacaagtgcctgcttctccattagtagataatcaggctaataaggttgccgagccatcagtaacaaatgccacacctgaggcagaagttaaaacagttccattaccggtgtcaccattaaccacatcaacgacttctcgtgctgattctgctgaaggcaattcaacacccgcaccaattgtggaaaatcaactggtcttgatgtttgatggtgaatgctggttagaaattcgtaatgctcaaaataaagttttatttaatggtattaagaaagccggtgaccgtttggaatttaatggtgagcaaccttataaactaaaaataggcgcaccttctgttactcgtttacagtttaatggtgaagctgttgacttaagccgttttactggaaaaatagcaaaaataacagtaccgagcgct

SEQ ID NO: 32936 - DNA, 408 bp, Proteus mirabilis
atgagtgatactcaaagaccacagggccccgcatccggggttctgaattctcttagtcgtattggcgctgttatcgttggcatggttgaaacccgcctaaaattaatcgccatcgaactagaagaagaaaaaattacacttattcagcttattttaatggcggggatcaccttattactcaccgcctttggcttaatgagtctacttattctcctcttttgggtgatcccacctgaatatcgtattcatgctttagcgattacaacggctattttgctagttggtgccttaataggtgccatcatgacattgagaaaagcccgcaattcaacgctgttaggtgatactcgccaacaactagaattagataagcgtcttttggagcaatatcgcgatgagcaaacaaaa

SEQ ID NO: 32937 - DNA, 1554 bp, Proteus mirabilis
atggccaagaaaaaattcagcgaatccatacagcgctttggtaggaccctactcctgccaatcggtgttttagcgcctatcggtatgatactgggtatcagtggcgctttagttcagtcttatatgattgcacgctttcctttcctggggaatgaaacagtcaatgcattattagtgagcatccgctctattgcaggggtcgtgtttgataatattccactgctatttgctatgggtgtggcttatggtatgagccataaagacaaggggatcgccgtgtttgcctccgttgtcggctatttaaccttgattagcaccattaatatttggctcgttttgacggggaaactcgctgatcctgccgtaatgactcaagtggggcagatcaaggtgttaggtattcaaaccatgaatatcagtgccgcaggggggattatcaccggattaattgccgcttgggcgacagataaattctataaccttgaacttcctaccgcttttgccttcttctccggtaaaaaatccgttgccattattatggtgggattaatgattggcgtaggggcattactaccctttatctgggaagtcttggtgatgggattaacaaaactttccgcggtcttcctgagtcctgtcggaccattctttacagcaggaggagagcgactgtttattccatttggtttacaccatgtatggaacgtgttgtttagatttaccgaagcaggtggctcttacgttattgatggacaaacctatgtgggtgttgttcctgccatgacagaagtgttgtttaaccaagggccaagtagtgaatattggttaatgatgccaagcttaacgcgttttatggcacaacaacaaatgctggtcactctgttcttattcccagcaattgccttagcaatttatagaacgtcgaaaaaagagaatcgcgcagaagttaaatctatgttggtgaccatggtattaaccgccatgttaggtaacgtcactgagccactcgaatttacctttgtgtttattgcgccacttttatatctgatttacgccattattgttggtattggtgcggttttactctcttttgctggcgtggcgattggctatatccgaggtacggtatttgacttcaccatctttggtctgctctatgaacataccaactggatctacttagtgattattggtttaggtctggcggttgtcacttacttcattttctactgggccattattaagtttgatatcaaaacaccgggtcgtgaagaatcaagcaatatgaaaaatacgcttattaaagagaagcgttatggcgaaattgcggagatcttaattcgcgctttaggcggaaaacaaaatattcgtaacgttgataactgtattactagactccgtgtcgatatcggtgaagtaaatcaaattgataaagagttaatgttggaatcaggttgtacagcattctttattcctgcagcgaaccatgtccatattgtttatggaccaaaagttgagtttgttcgcaatgctgttgatgaagcaatgaagaaa

SEQ ID NO: 32938 - DNA, 846 bp, Proteus mirabilis
atgaattataaacaatggctgcatcaagcagccttgcaattaattgatagtgacagcccaaagcgggacgcagaaattctattagggcacgtaacaaaacgtgctcgtacttatttgattgcttttagtgaaactgtacttttagaagatgaactagtgcaattgtcatccctccttgctcgacgtataaagggcgagcctatcgcttatttagtaggagagagagaattttggtcactacctttaaaagtctctcctgcaacacttatccctcggcctgataccgaatgtctagttgaaaaagcattagagaaactctctgcacaagcaagccgaattttagatttaggtacggggacaggggctattgctttagcgatagcttcggaacgttctgactgccgtgtccttggtgttgattttcaaccagaagcggtagcattagcgatagaaaatgcacaacatttggcacttagcaacgtagaatttacggaaagttgctggtttagttcactctctggttatcaatttgatatgataatcagcaatcctccttatattgatgaagaagatgagcatctttatcaaggagacgttcgctttgagccattaaccgcattggtcgcggcagatcatggttttgctgatattgagcttattattacaaatgcccgtcagtttttagctaataacggttgggtattaatagagcatggttggcaacaaggtgaaagagtacgtaatatttttattgataagggttactgctgcgtggaaactttccgtgattacggcggtaatgagcgagtgacagtaggtcgttggaatgatgatagaaaccatagc

SEQ ID NO: 32939 - DNA, 927 bp, Proteus mirabilis
gtggttaaagtttatgcaccggcgtcaattggcaatgtgagtgtcggttttgatgtgttaggagccgcagtttcgcctattgatggtcaattattaggagattgcgtaaccgttgaagcggcgcaagaatttcaacttcacagcaaaggacgatttgttagcaaattaccttctgatactaagcaaaatattgtttatcaatgttgggagctattttgtgaaaaattaggtaaacaattacctgtctcgatgacacttgaaaaaaacatgccgataggctcaggattaggatcaagtgcttgttctgttgtggctgcacttgttgcattaaacgaatttgctcacaaaccatttagtgaaagccacttattattaatgatgggagagctggaaggccgtatttccggtagtgtgcattacgataatgtcgcgccatgttatttaggtggtttacaacttattttggaacaaaacgacattatttgtcagcctgtgccagcttttgacgattggtattgggtgatggcttatccggggatcaaagtctcaacggcacaagcaagggctatcctccctaaacaatacgataaagctgatattattaatcatggtcgttatttatctggatttattcatgcttgtcatacacaacaaccaaaacttgccgcaagcttaatgaaagatgtgattgcagagccctatcgaacacagttgctccctggttttgataaagcgagagaggctgcattacaaaaaggcgcgcttgcatgcggtatttcaggctcagggccaacgctgttttctattactgattcattggctattgcccaagatgtggcgcaatggttacaacaacattatgtacaaaacgatgaaggctttgtacacatctgccgtttagatactcgtggcgcaagagagataggg

SEQ ID NO: 32940 - DNA, 642 bp, Proteus mirabilis
atgaaaaacagcaaatttattgttattgaaggattagaaggggctggcaaaaccagtgctattcaaacggttgttgatacattaaaacaacaagggatcaccgatttggcctttacgcgcgagccggggggaactccgcttgcagaaaaattacgggaattgattaaacaaggtattgaaggcgaaaaagttaccgataaagctgaattgctaatgttatatgctgcacgagtgcaactggttgaaaatgtgataaaaccagctttagcccaaggtaagtgggtgataggggatagacacgatctctcttcacaagcatatcaaggtggtggtagaggaatagacaaagccctgatgaagtcactacgtgatacggtattagcagattttaaacctgatcttaccctttatcttgatttagatccggccgttggtctagccagagcacgagcacgaggtgaattggacagaatagaaaaagagtctatggactttttttaccgcactcgtgaacgttatcaagcattagcaaaagaagatgcctcgattattaccattgatgcatcacaagatattgataaagtacaagcggatattcgcgatgtactcaatcagtggctgactcaggaaaatagcgcatta

SEQ ID NO: 32941 - DNA, 723 bp, Proteus mirabilis
atggcaactgtttcaatgcgcgatatgctgcaagccggtgttcacttcggtcaccaaactcgttactggaatccaaaaatgaaaccattcatctttggtgcgcgtaacaaagttcatatcattaacttggaaaaaactgttccaatgttcaatgaagctctggttgaactgaacaaaattgcttctcgtaaaggcaaaatcctgtttgttggtactaagcgctctgccgttgaagctgttaaagaagcagcagaaagctgtgaccagttttatgtaaaccaccgctggttaggcggtatgctgactaactggaaaactgttcgtcagtcaatcaaacgtctgaaagatttagaatctcaatctcaggacggtacttttgacaaactgaccaagaaagaagcgttaatgcgttctcgtgaacttggtaagttagaaaacagcctgggtggtatcaaagacatgggcggtttacctgacgctctgtttgttatcgatgctgagcacgaacacattgctatcaaagaagcaaacaacctgggtatcccagtatttgctatcgttgatactaactctgatccagatggtatcgactacattatccctggtaatgatgatgcaatccgtgcggttaaattatatctgaccgctgcagcaacagctgttcgtgaaggtcgttctcaagatctggctgttcaggctgaagaaggcttagtcgaagctgaa

SEQ ID NO: 32942 - DNA, 1062 bp, Proteus mirabilis
atgctagagatgaattttaaacagacactgggctctttgtgtctggaagtgaatactcaattaccaacagaaagtatcacggcggtatttggcttatctggcgcaggtaaaacgtcgctcattaatgtgattggtggtttaaccaaacctgattcaggacatattgtgttaaataatcacacattggtggatattgagaagaaaatttatctgccacccgaaaagcgcaaagtaggctatgtatttcaagatgcacggctatttcctcattataccgtaaaaggaaatttactttacggtatgtcaccaacaatgaaagtacagtttgatagaattatttatctattaggtatcgaacatctactttcgcgttttcctattacgctatctggtggtgaaaaacaacgtgtggctattggacgtgcattattaactgcacccgatattatgctaatggatgaaccattggcctctcttgatttaccccgcaagcgtgaattattaccctatttagaaaaactttcacaagatgtacaaatacctattttgtatgtgagtcatagtctagatgagattattcgacttgctgataatgtgattgttatggatgccggaaaaattaaggcaatgggtaagttagaagatgtttgggccagtagcgcattacgcccttggttacaaaaagagacgttaagcagtgttgcaaatgttatggtcgttgaacatcatagccattatgcgatgacggcgaccgcctttggtaatcaagtactgtggttgccacaaatcgaggcaaaaataggtcgcgatgtgcgcgttcgtattgatgcttcagatgtatcgttaactaccactcgcccatcaaatagtagtatccgtaatatattacatatgaaagtggtcgaaatgatcaaacatgatgatcaggtagatgtgaaactggttaatgatggcaattatttatgggcgcggatcaccccttgggcgagagatgaactcaatattcaagaagggcagtggctctatgcgcaaataaaaagcatttcactaagtcgccatctt

SEQ ID NO: 32943 - DNA, 756 bp, Proteus mirabilis
atgatggcatctaaacatttatttatggtaactaccaccttattaactggaatggtgtttacgtcgcaagttggtgcgacaatcgctttagatcgtacacgtattatttttaatggtgctgataaatcagtaagtctgagtataagtaatcaaaacaaagaattaccttatttagctcaaggttggctagagaacgagcaaggagaaaaaatagaaacacctcttattgtattacctcctattcagcgtattgaacctgggaataagagccaagtgaaagtgcaatcattacctgatattgcacaactacctcaagatagagagagtgttttttattttaatttacgtgagatccctccacgtagtgataaacccaacgtattacaaattgcactacaaacgcggataaaattgttctatcgaccaaaatctatttatgccacccaaactgatttaagtaatccatggcaggaaaaaattaccttaacaaagcagggggagagttatgttgtgcataatcccacaccctattatatcactattgttgatggtctaacggatctgaaaggggaaagcttagaaggatttacccctatcatggtagcgcctcgagggcaggaaaaactcaatttaacggtttctacgctgggggcttctccggtattaagttacatcaatgattacggtggtcgtccaagattgaaatttagctgcgatagtcgtgaatgtaaggtgatagaaacagaccaaggaaat

SEQ ID NO: 32944 - DNA, 903 bp, Proteus mirabilis
atgtcatcagtggtgcgtaaagtaagaaaagcggtgatccctgttgcagggctaggaacaagaatgttgcctgccaccaaggctatcccaaaagagatgctacctgttgttgataaacctttaattcaatatgttgttaatgaatgtatagcagctggcatcaatgaaattgtgctagttacacactcttcaaaaaattctattgaaaaccattttgataccagttttgaattagaagctattttagaaaaacgagttaaacgtcagttgttggaagaagtacaaggtatttgtccaagtcacgttactattatgcaaactcgccaaggaatagcaaaaggattaggccatgccattttatgtgcaaaacctttggtgggtgatgagcctttcgctgttatcttgccggatgttattttagaccgatatagtgctgatctgactaaggttaatttaaaagagatgctttctcattttgaacaatctggcgcaagtcaaattttagtagagcctgttcctgaagaggaagtatctaactacgggattgttgactgcatgggagaacatttacagcctggcgacagtaaacccattactcgtgtggtagaaaaaccgaagaaagaagaagcaccttcaaatttatctattgttggtcgttatgtgttgtctgaaaacatttggcctttattagccaaaacggcaccaggagcaggggatgaaattcaattaactgacgcgattgcaatgttaattgaaaaagagcctgtagaagcttatcacctacaagggaaaagccacgattgtggtaataaattaggctatatgaaagcttttgttgaatatggtttacagcacgaagagtttggcgaagagttcacgaaatggataaaatcactgcaagct

SEQ ID NO: 32945 - DNA, 1251 bp, Proteus mirabilis
atgttaaaacgtgaaatgaatattgctgattacgatccggaattatggaatgcaatggaaggtgaagtgactcgtcaagaagagcacatcgaattaattgcttctgaaaactatactagtcctcgtgttatgcaggcgcagggatctcagctgaccaacaaatatgcagaaggttatccaggtaaacgctactacggcggttgtgaatacgttgatgttgttgaacaattagctattgatcgtgccaaagcactatttggtgctgattatgcaaacgtacaacctcactctggatcacaagcgaatgcggctgtgtatatggcattacttaaaccgggtgatacagtattagggatgaatttggcccaaggtggtcacttaactcacggctctccggttaacttctctggtaaactctacaatatcgttccttatggtattgatgaagcaggtaaaattgattaccaagatatcgctgagcaagctaaaaagcataaaccaaaaatgatcattggtggtttttcagcttattcaggtttggttgattgggctaaaatgcgtgaaatcgcagatagcgtaggggcttacttatttgtcgatatggctcacgttgcaggtatgattgcagcgggtgtctatccaaacccagtaccacatgctcacgttgtgactacaacaacacacaaaacattagcgggtcctcgtggtggtcttatccttgctaagggtggcgatgaagagttttataagaaattaaactctgccgtattccctggctctcaaggtggtcctttaatgcatgtgatcgcgggtaaagccgttgcattaaaagaagcaatggaacctgagtttaaagtttaccagcaacaagttgcaaaaaatgcgaaagcaatggtagacgttttcttagcgcgcggttataaagtagtatctggtggcacagagaaccacctgtttttattagacttagttgataaagatattacaggtaaagatgctgatgctgcactgggtcgtgctaatatcactgtgaacaaaaatagtgtgccaaatgatcctcgcagtccatttgttacatctggtattcgtattggttctccagcgattacacgtcgtggttttaaagaagcggaagcaaaagatttagccggttggatgtgtgatgtccttgataatatcaatgatgaagcgaacattgaaaaagtgaaacaaaaagtcttggatatctgcgctaaatttccagtttacgca

SEQ ID NO: 32946 - DNA, 1881 bp, Proteus mirabilis
atgagtatgaaagatcaggaaacgagaggatttcagtctgaagttaagcaacttctacaattaatgatccattctctttactctaataaagaaattttccttcgcgaattgatttctaatgcatcggatgcggcggataagttacgttttcgtgcattatccgatgcagctctttatgaaaatgagggtgagcttcatgtccgcattgccactgataaagaaaaaagaacactgactatcagtgataacggcataggtatgacccgcgatgaagtgattgataatttagggactattgcgaaatcagggactaaagcatttttagagtctattggacaagaccaagcgaaagatagccaattaattggtcagtttggtgtcggtttttattccgcatttattgtggcagacaaagtgacggtacgtacccgtgccgcggggcaacctgctgataaaggtgttttctgggagtcacaaggtgaaggtgattatacggttgctgatattgaaaaagcggatcgtggtaccgaaattaccctgcatctacgtgaaggtgaagacgaatatttagatgattggcgtctgcgtagtattatcagcaaatactctgatcatatttccctacctgtcgaaatagaaactaaaaatgaagaagacggcactgttacatgggaaaaaataaataaagcccaagcgttatggacgcgtaataagtcagaaatcagtgatgatgaatataaagaattttataagcatctttctcatgattttgctgatccgctgtgctgggcacataaccgggttgaaggtaaacaagagtacaccagcctgctgtatgttccttctaaagcaccttgggatttatggaaccgtgaacatcaacatggtttaaaactgtatgtacagcgcgtctttattatggacgaagctgaacagtttatgcctaactatttgcgttttatccgcggattagtcgattctaacgatttaccgttgaacgtttctcgtgagatcttacaagatagctctgtgacacgtaatttacgtagcgcattaactaaacgtgcattacaaatgttacagaaactggctgacaataatcctgaagagtatcaaactttctggaaagagttcggtttagtgttaaaagaaggtcctgcagaagatcacgctaatattgaagccattgctaaattactgcgctttgcttctactcataatgacagcgatgcacaaactgtttcattggcagattacgtgagtcgtatggttgaaggtcaggataaaatctattatatcactgctgatagctatgctgcggccaaaaatagccctcatctagaattattccgtaaaaaaggtattgaagttctactgctatccgatcgcattgatgagtggatgatgaactatctcactgaattcgatggtaaatcattccaatctgtgagcaaagcagatgaatctttagataaactggctgatgaagagaaacaagcgcagcaggaggagacagataaacaactggcaccttttgttgagcgtgtaaaaaccttactgggtgataaagttaaagaggtgaaattaactcatcgtttaacggatacgcctgctattgttactactggcgcggatgaaatgagtacgcaaatggcgaaactttttgcggctgcaggtcaacaagtccccgaagttaaatacaactttgagttaaaccctaaccatccattagtcaaacaaacggctgagttgaccgatgaaacacagttcgcggactggatcaatttattacttgatcaagcgttatttgctgaaagaggaactttagaagatccaaaccagtttattcgtttagtgaatcaactattggctaaaaacgcg

SEQ ID NO: 32947 - DNA, 501 bp, Proteus mirabilis
atgctcaatatcgtcttatttgaacccgaaattccaccgaatacgggtaatattatccgcctgtgtgccaacacaggctttcatcttcatttgatccaaccattgggttttacttgggatgataaacggctacgtcgtgcagggcttgattatcgtgagtttgctgatatcaaacagcatcacgattattatgcttttttagaaagtgaaggtttaagccctgataatgcacaatccccgacaggtgcacgattgtttgcattaaccactaaaggtactcccgcccatagtaatgtaagttatcaagatggggattatctgctatttggccctgagacacgaggtttaccaccttatgtgttggataatatgccaacacaacaaaaaatccgtgtgccaatgttagcagatagtcgcagtatgaatctttctaatacggttgccgtggttgtttttgaggcatggcgccaattaggctatccgggtgcattattaagagat

SEQ ID NO: 32948 - DNA, 1224 bp, Proteus mirabilis
atgaatatcaccacacccaatagcattaatgaagtaagccgtaagacggcgtggatcagggtaattattctatcatttgctgctttcgtatttaatacgacagagtttgtacctgttgcattgttaagtaatatttctgaaagttttgccatggtgccggctcaaacagggttgatgatcactatttatgcttgggttgttgccctaatgtctttgccattaatgataatgaccagcaaagtagagcgacgtaagctactgattattttgtttattgtatttattctaagccatgtcttatctggcgtggcatgggattttaattcgctaattgtaggtcgggttggagtcgcctttgctcatgctgttttttggtcgattactgcctcattagcaataagaatggcaccccatggtaaaaaagcacaagcattaagtttattagcaaccggtgttgcactagctaccgtgctgggtttacctctgggaagggtggttggacaatggttaggatggcgagctacctttttgggtataggtgtactggcgctgataaccatgcttgctttaatgcgctatttacctttattacctagtgaacattccggctcgttaaaaagtgtcccaatattgctaaaacgagcaccattagtgggtattttcttactaacggtgatcgcagtgaccgctcattttactgcttatagttatattgagccttttgttattgatattgcaaaattagatgaaaattttgccactattgtattactgatttttggcggtgcaggaattttggggagtgtgttatttagtcgctatagtaccaaaatgccaacctcattcttattctttgcacttattctcttaaccgtatgcttaagtacgctgatgatgagtagccaacatacactcacatttattgccttaatcatcttttgggggataggctttatgtgtattgcgttaggattgcaggttaaagtgattgacttagcacctgatgcaacagatatcgccatgtcgatctactcaggtatctttaatatcggtattggggcaggggctttgttaggtaatcaagtaatattgcacgcgggaatgccaaatatcggctatgcaggaacagccttaagtattattgcactagcgtggtgtggctttatttttacccgttatcgtgttgcgatgggaggcaaacctcgcgaaaaaaaccggctccat

SEQ ID NO: 32949 - DNA, 1035 bp, Proteus mirabilis
gtgagtacgttaaaacgttggacattaaaagaagctagggcactgtttgatatgccatttttagatttggtttttcaagcgcaacaagtgcatcgtcaacattttgatccttcacaaattcaagtcagcaccttactgtcgataaaaacaggcgcttgtcctgaagattgtaaatattgtgcccaaagtgcgcgctataaaacagggttagaaaaagagcgcttaatggaagtacaacaagtgattgaatcagccaaaaaagcaaaagcagctggttcaacccgtttttgtatgggcgcggcttggcgtaatccacatgagcgtgatatgccttatcttgagcagatggtcaaagaagtgaaagcgctaggtatggaaacctgtatgacattgggtaagcttgatgattcacaagcctcacgcttagcacaagccggactggatttttataaccataatcttgatacatcacctgagttttacggtagcattattaccacccggacatatcaagaccgtttagataccttagataaagtacgtaatgcgggcattaaagtgtgctctggaggcattttaggtttaggggaagaggtcaaagatagagccgctatgttagtgcaattagctaacttaccgcaaccgccggaaagtgtacctatcaatatgttagccaaaattaaaggtacgccactggctgataatgaagatgtcgatccctttgattttattcggactattgctgttgctcgtattatgatgcctcgctcttatgtgcgactttcagcagggcgtgaacaaatgagtgaacaaacgcaagcattctgttttatggctggcgcaaactccattttttatggttgcaaattattaacgaccacgaatcccactgaagataaagatcaccaattattccgtaagcttggtttaaatcctgaaagattatctgtctcaatgggcgatcagcaacaagaagacgtgttgctacaagctgttgctgaaaaaggcaccgaacaattttataacgcggcactg

SEQ ID NO: 32950 - DNA, 2341 bp, Proteus mirabilis
atggaattaacaccaagagaaaaagataaattactgctttttactgcaggccttgttgcagaaagacgtttagctaagggattaaaacttaattaccctgaagctgtcgccttgattagctgcgccattatggaaggcgcacgagaggggaaaacagttgctcaattaatgagtgaaggacgtactgttttaaccgcagagcaagtaatggaaggggtgccagagatgataaaagatgttcaagtagagtgcactttccccgatggcaccaaattggtttcaattcactcacctattgtgtaggtaataacatgatccccggtgaaattagagttaatgcagcattaggcgatattgaactgaatgctggtcgcgagacaaaaaccatacaggtggctaatcatggcgatagacctgtacaagtcggctctcattaccacttttatgaagttaatgaggcactcaggtttgcacgagaagagacattaggttttcgtttaaatattcctgctggtatggctgtgcgcttcgagcccggtcaaagccgcactgttgagttagtggcttttgcaggaaaacgtgaaatttatggttttcatggcaaagtgatgggtaaattggagagtgagaaaaaatgaaaactatctcacgtcaagcttatgcggatatgtttggcccaacaacaggcgatcgtttgcgattagcagataccgagctgtttcttgaaattgaaaaagatttcaccacttatggcgaagaggtcaaatttggtggtggtaaagttattcgtgatggtatggggcaaagccaagttgttagtgctgagtgtgtcgatgttctgatcaccaatgccattattttagattattggggcattgtaaaagcagatattggcattaaagatggccgtattgtcggtattggcaaggcaggtaatccagatgttcagcccaatgtggatattgtcattggccccggaacagaagttgtcgcgggagaaggtaaaatagtcactgctggtggtattgatacccatatccactttatttgtccacaacaagcccaagaaggtctcgtttctggcgtaaccacctttattggtggaggaacaggccctgtggcaggtactaatgcaaccacagttacccccggtatttggaatatgtaccgcatgttagaggcggtggatgaattacctattaatgtggggttatttggtaaaggttgtgtcagtcagcccgaagcaatccgcgaacaaataacagcgggtgctataggtcttaaaatacatgaagactggggggcaacgccaatggcaattcacaattgccttaatgtcgccgatgaaatggatgtacaggtggctattcactctgacaccttaaatgaaggtggtttttatgaagagacagtaaaagccattgccggtcgagtgatccatgtattccataccgaaggcgcaggtggtggtcatgcccctgatgtgatcaagtcggtaggagagcccaatattttacctgcatcaaccaacccaacgatgccttataccattaataccgtggacgagcatcttgatatgttgatggtctgtcatcatctcgatccctctattcctgaagatgtggcatttgctgaatctcgtattcgtcgcgaaaccattgctgcagaagatatcttacatgatatgggggcaatttcggtgatgtcgtcagactcacaagccatgggacgagtcggagaagttatcttacgcacttggcagtgtgcacataaaatgaaattgcaacgaggcacattagcgggtgatagcgcagataatgataataatcgtattaaacgttatatcgctaaatacacgattaacccggcactggcacatggtattgctcatacggtgggatcaatagaaaaaggtaaacttgcggatatcgtgctatgggatcctgctttctttggcgtcaaaccggcacttatcataaaaggtggtatggtcgcttatgcgccaatgggggatattaatgcggctattccaacaccgcaaccggttcattatcgtccaatgtatgcctgtttaggaaaagccaaatatcaaacgtcgatgatctttatgtcaaaagcgggtattgaggcgggagtgccagaaaaattaggcttaaaaagcttaattggtcgtgtggagggctgtcgtcatatcacaaaagcttcgatgatccacaataactatgttcctcatatcgaattagatccacaaacttacattgttaaagcggatggtgtaccactggtttgtgagccagcgactgaattaccgatggctcaacgctatttcttattttaacca

SEQ ID NO: 32951 - DNA, 798 bp, Proteus mirabilis
atgtattcgatagttgcttctgatcttgatggcaccttgttatcacctaaccacttattaactccctataccaaagaaacgttacatctgcttattgaaaaagggatccattttgtgtttgccacaggacgtcatcatatcgatgtggcacaaattcgtgatgggcttggtattgacgcgtatatgatcacttcaaatggggctcgagtacacaatacgcaaggcactcttattttcagtcaagatcttgaacctgaaatcgtttatgacttagccctaatggtgtttgatcacccagatattgcaacgaatatttatagcagtgatgactggtatatcaataaagaaacgcctgaattaaaagaattttttaaagaatcggtatttaattaccgtctatttgagaaaacaggcttcccaacaacgcaggtgtgcaaagtcttttttacctcagaagatcatgaattgttagttgagttagaaaagaaaattaatcaacgttggggcaataaaattaacgcaagtttttcgttgcgtaattgcctagaaattatggcgggtggggtatcaaaaggagaggcactacaaaaagtcgctaagttgatgcaacattcagtaaaagatgccattgcatttggtgatggtatgaatgataaagagatgctacagatggcgggtaaaggctgcattatgcaaaatgcccaccagctactaaaagatctattaccggatatggaagtgattggctcaaatgttgatgatgctgttgcacactatttacgtaagttgtatcaggtt

SEQ ID NO: 32952 - DNA, 663 bp, Proteus mirabilis
atgaagtctattattctattttttatttctttatttattattaatatatcttatgcaggtgttattattagtggcacaagggtaatttataatgaaggcaataagaatgtcagcattaacgtgaaaaacccagacaaaatgccttatttgatccagtcatggatagatgattttgaggaaaaaaaacagtcaaaatttacgatcacgccacctttatttagattgaatccagataaagagaatacattgaggatctttttaacagaagaagggctaccaagtgatcaagaatctcttttttggttaaatataaaaacgatccctgctacagaaaaaacagaaaattcattacaaattgcatttaaaacgcaaatgaaattgatctatagacctaaaagtctaaaagacgttaattttgaagaagaacaaaagaaattatcttggtcaaaggaaagagggaaagtcatagtttataatcccacaccttattttatgaattttcaaacaataaaatttaatggaaaattggttgatgatgtttcttatgctaaacctttttcaactaaatcatttgatataaatgataataatgaacatggtcttataagctgggaacttattaatgattatggggctaatgtggatttatccgaagttagaata

SEQ ID NO: 32953 - DNA, 1302 bp, Proteus mirabilis
atgtcgattaaatccttcagtacgcttgccatagcaatagcattatttacttcaccaacctacgcaaaaaccgaaatagagtggtggcacgctatggggggcgccttaggtcaaaaagtcaatcaaattgcctcagactttaatgccagccaatcagaatatgtgatcaaacctgtctataaagggacttatccagaaacgatgaccagcgctgttgctgcatttcgagccaaaaaccaacctgcgattgttcaagtgtttgaggtgggaacagcaagtatgatgggagctaaaaaagccgtttttcctgtttaccaattaatggaaaaaaccaacgagccatttgatcctaatagctacctctcgacagttaccgcttattacaccaccagcgatggtaagatgatatctctaccttttaatagctcaacgcctgtgctttattacaacaaagcactatttaaacaagcaggcatagagcaacctcctaaaacatggaaagagatgggggctgtctctcagaaactacttgatgctggcgtgaaatgtggttttaccaccacttggcaatcatggacccaaatagagaattttggcgctcgtaataacttacctatcgccaccaaaaataacggctttgatgggactgatacctcatttttatttaatcaggcaccgtttgttgctcatatccaacgcatggcggattggtctaaatccggtatttttaaatatggtggccgccaatctgatgctatgccgctattttatactcaagaatgcgccatggtgatggagtcatctgcaggctttgcgggtattaaagagaatatgaaaggcattgatattggtgttagccaattgccttatgacgatactttagttgataaacccgctaatagcattatcggaggtgcctcattatgggtaatggcaggtcgtcctgatgctgaatataacggtgtcgctaaattctttacctatctttctagtcctgaagtacaagcagattggcatcaagcaaccggttatttacctgtgacgaaagccgcttatgcattaacacaacaacaggggttctatcagcaaaatcctggtgctgatacggctattttacaaatgaccacctctgactctacagcaaactcaaaaggcttgcgctttggtaactttttacaaacgcgagaaatcgtcgatgaagaattagaaaaagtgtggtcaggcaaacagagcgcacaagccgccttggataatgcggttaaacggggaaatgaacaactacgccgatttgaacgcactcag

SEQ ID NO: 32954 - DNA, 3386 bp, Proteus mirabilis
ttattcgattaaatcattttatttcgacaatatttattgtctctatcctctttgttttgttaggaaatatactttttaccccggctaaagcagaaacagtcagcaataatttacccaccaaagaaagtattcaaaaccagcttaatttattaaataaacgtagtgacttaagtgccgaagataaactcactattggtgatctagagcaggcattgctacttcttgataatattcaacaactagagaaaaaagcagacgactataataagacagtagagcaattaccagaaaagctacgcagtattcaaaatcaattaagtcaattaaaacagaaaatagcaaacaaagaagttgatgactaccgtcaatctttagagagtctaccgcttgcaactttagagtcgcaattagaagaggttttacaatccttagcgaaagcacaggaagatttagccaattacagtaatgagcttattgttttacaaacgcaaccagaaagggcgcaatctgttttatttaataactcagaaagattgcaacaaatacgaattgcattaaataaaagcagtgcagataaagctcaaatgcgatcttcttctgtgcaacttttacaattagaacaatattatttgcaacaacaaaacagttttcaaaaacgaacactgcaatctaatgtacagctacaaagcttattacaattacagcgtgattatagttcagcctatattgacctctctcaagagcatgctcaactactgcaagagatcttaagtgataaacgtttagacagttcagaagaggttgccaaagaggcgcagacggcagagctgagtaatcaggcgattaaaaataacgctttttatttagctcaagctgatattaataaaaaactcagcgataagctgattattactacacaaaataataatgagttaaatcgccatagtttaatggtcaaaaaccgcctagatagagctatccaatcagagcgcaatcttaaagagcaaattgatgtattgaaagggagtctgttgctctctcgtattctatttgaagagcaaattgagctacctgatgatatctttatcaataagttaccggataaaattgctgacttacgtttagaacagtttgaaatcaataaacaaagagatcagatttttcagccgaatctctatatcgaccaattaatgcaagagtaccaagccgcacatccggaaattactgataaaaatgagctaaaagagctacataatgcattattacaactgattgatgcgcgacgagatctactggataagctcaataatcaactgggtagccaaatttctgaatctattaatttacagatggatcagcaacagctacgtagtgtggtgagttcattagaaagcaccttagcgcaacaaatattctgggtaagcagtaataaaccgattaacctcagttggttctcaacctttccagagcaggcagtggctgaatttcaaagttttaaactcaactggtcaaatgaaaatctgttgaccggggctaaaaaatcatatcctgtgctgattgcgctagttttgttcagtagcatactgatttggcaacgtaaaaaatttgataagcagtttgataaattaagtgctgatattaataagcttaataaagatacgcagttacatactccattggctttagggattgttttcttaaaaacattacccctttcttgtattgtgttagcgataggatattggctaattaatagctttaatgtgcaacaagagtttatctggtcttttacttggcagtttgcggtattttggctgatgtttgagtggtcttatcgtttaatgtcggataatggagtggccgttaatcactttaagatccccctagagcgagtacaacaaaatcgtaaacgtttattacgtttatcgcttcccatgttgccaattattttactttccgcttatggtattaataacccattattgttagttggcgatgtgattggtcaattagtgacaattatttcactcttttttattagtctgtgtgcattacctttttgtcgtgaaatgtggcaagaaaagggtaatcatgttgtgagaacagtggttatcaccttattaactttctcgcctttacttttaatggggttagttatttttggttattattacaccgcactacgtttagccaatcgttggattgatagtttatatctacttatgttgtggtttattgcttaccacgcgagtttacgcggccttactgttgctgcaagacgactggcgtatcgtcgagcgctagagcgccgacaagcgatgcttaaagagaaaaaagagggagacgataacactctcgagccaatccaagagccaccgatggatatggagcagataaaccaacaatcattaagattaaccacaatgatcttatttattatctttgcttccagtttttatggtatttggtctgactttattacaatctttacttacttagatggtattacgctttggcattataatttgcctacagagttaggtaatgtggttaaagcagtgacggttgcggacttactcctctcttttgccattatggctatctcttggtttatgataagaaacctaccgggtttactcgaagttcttattctttcaagaattaaattacagcaaggcgcttcttacgccattacgactattctgacctatattatcattgcgataggtacaattgtttcgctggggatattaggcgtagcatgggaaaaactacaatggttggcggcagccttaacggttggtttagggtttggtttacaagaaatattcgctaactttgtttcagggataattatcttatttgaaaggccggtcagaattggtgatacggtgacaattggctcttattctggaacagtgagtcgtattcgtatccgagcaaccacggtaacggactttgatcgcaaagaggttattatcccgaataaagcctttgtgactgaacgactgatcaactggacattatctgatactgtcacacgtattatcattcaagtcggtgttgcttatggttctgatctggataaagtgaaaaccattttaatgaaagcagcaaaagataatcccaaagtgatgactgagccagagcctgtggtgctgtttaccgaatttggggctagcacgctaaatcatgaattacgtttttatgttagaacgcttggggataggaatactgctatcgacgaagtcaaccgcgctattgataaactttgcaatgaaaatgatatcaatatcgcgtttaaccaattagaagtgtatctgcataataaacaaggggaagaagtgcaagaaataaaaaaaggccctcttgatggttcaacacct

SEQ ID NO: 32955 - DNA, 1479 bp, Proteus mirabilis
atgattaaattaaataatgttccatccgaatttcgtcccttagaaagctacaaaatgttaatcggcggcgaatgggtatccagtacatcgcaacaaacgaccaaaacctatagtcccgcaaccggtgagttattaagtgaatatccatcaggtacagctgaagacgttgatcttgctgtaaaagcggctcgtaaagcttttgatcattggcgtaaaacctctcctgctcaacgccaagcgctattattaaaaattgctgaccgtttagaacaagagcaagaacgttttgcttggattgagtctcttgataacggtaaaccactcaatgaatcgaaaaacatcgatttacccgcctctattgaccattttcgatattttgcaggcgtgatacgctctcataccgatgaaagtgctgtcttagacgaaaataccctgagtcttgttattcgtgagcccattggtgtcgttggacaaattattccatggaattttccattattaatggctgcttggaaattagcccctgccatcgccgctggagataccgttgttattaatccagccacactcacctcactttcattattagagctaggtcgtattttaaatgaaatattaccagccggtgttataaatattgttactggtcgtggatctgttgctggacaagctattctagaacaccaagacattgataaactagcatttaccggttcaaccaatgtaggttataccgttgcagctgcggcggcgaaaaaaatggtaccagccactttagaattggggggtaagtcagccaatatcgtcttccctgatgcaaatatgaaaaaagccgttaaatattccgcactagcgatattgatgaaccaaggacaggcctgtgaatctggctcccgtttattcttacatagagatattcatgacgcattcttaaaagagttaaaagcagaatttgagcgtatccgtgttggtgatccacttgatcctaatacacaaatgggtactcaagtcagccaagcgcaaatggataccattttagggtatgttgagctggccaaaaaagaaggtgcaaccatactcacaggaggtgagcgtattacgggtgaagggtttgatgatggcttttttgttcgcccaaccattattatcaatgccacaaaccaaatgcgtgtcgcacgtgaagaaatttttggccctgtattatgtgtgatcccatttgataatgaagaagatgttattgaaatggctaatgactctgaatatggccttggtggtggtgtctggactcaagatattaaccgcgcactacgagttgcaaaagccgttagaactggccgtatgtgggtaaatacttatcatgaacttcctgctcatgcaccatttggcggttataaaaaatcaggcttaggtcgtgaaacgcataaaatgatgttagatgcctacagccaagtgaaaaacatcttcattagtactaaagaa

SEQ ID NO: 32956 - DNA, 2874 bp, Proteus mirabilis
atgacacaaactttaactcaattagaatatcgtgatgaatttattcgtcgccatattggctcatcgccagaacagattaaagagatgcttgatgttgttggcatctcctcattaaatgaattaacacaaaagattgttcccgataatatccaattagcaacgccgcctaatgtcggagggggggctactgaacaagaagcattagcagaactaaaagcgatagcccgtaaaaataaacgttttacctcttatatcggtatgggatatgcgccttcggtattgcctcctgttattttacgtaatttgctagaaaatccaggttggtatactgcttatactccttatcagccagaagtttctcaagggcgtcttgaatcattacttaactttcaacaagtaaccattgattataccggcatggatttagcctctgcttcgctattagatgaagctactgctgccgctgaagctatggcaatggcaaaacgtgttagtaaactaaaaaatgcggagcgtttttttgtcgctgatgatattcatccccaaacactagacgtagtaaaaacccgagctaacacctttggttttgaagtgattgtcgataaagctgaaaaagtgttagagctagaaggtgtctttggtgtgctattacagcaagtcggcacaacaggtgaaattcacgattatggtcagctcattagtgaactaaaagcacgaaaaattattaccagtgtagcggctgatctaatggcattggtgttattaacggctccagggcaacaaggagcggatattgtattaggctcagcccaacgctttggggtgccaatgggatatggtggtccacatgctgctttctttgcctgtcgagatgaatataaacgagccatgccaggacgtattatcggtgtctcgcgtgatgctgcaggtaacagagcgttacgtatggcaatgcaaactcgtgaacagcatattcgccgtgaaaaagctaactcgaatatttgtacttcacaggtattactggccaatattgctgccatgtatgcggtatatcatgggcctgaaggtctaaaaaatattgctcagcgtattcatcgcttaacggatattttagccgcgggtttaattcaaaatggcatgacattacgccatcagacatggtttgatactttaaccgttgaaacagcggataaagcgggtgtattacaacgtgctaaagatgctgaaattaacttacgaaccgatattgttggcgcagtaggtgtcactttaagtgaagtgacgactcgcgaagatgttgtcagattgattgagattatcagtggtaaagctttctctgatgacattgatacattagatgcactggtagcttcttcatcgacctcaattccaacggcaatgttgcgtaaagatgcggtgttaacccatgaaaacttccatctttatcacagtgaaactgaaatgatgcgctatatgcatcgtttagaaaataaagatttagcgcttaaccaagcaatgatcccgttaggctcatgtactatgaagcttaatgctgcggctgaaatgctgccgatcacatggcctgaatttaccgaaatgcacccattctgcccaccttatcaagcgcaaggctaccagataatgattgagcagctatctaattggttggctgccataacgggttatgatgcgatgtgtatgcaacctaactcaggggcgcaaggggagtatgctggcttgttagctattcgtcgttaccatcaaagccgaggagaaggaaatcgccatatctgtttaattccaagctcagcccatggtacaaaccctgcatcagcccatatggcgggtatgacggtggttgtcgtggggtgtgatgaaaatggtaatatcgacattgcagacttaaaagcgaaagcagagaagcaccaagctgagctttcttgtgtgatggtgacttatccttcaacccacggtgtttatgaagagggtatacgtgaagtttgtgagatcattcatcaatatggcggacaggtttatcttgatggcgccaatatgaatgcgcaagtggggatcacgacgccaggctttatcggctctgatgtatcacacttaaacttacataaaactttctgtatcccccatggcggtggtggcccaggtatgggacctattggcgtaaaagcacatttagcgccatttgtacctggacatagtgtcgttgaaatggacggtgttacgacccaaggtgccgtgtcagcagcacaatttggtagtgcctcaatattacctattagctggatgtacatccgtatgatgggctcagaagggcttaaacaagcgagccaagtagcgattttaaatgctaactatattgctcaacgcttaaaagatgactatgacatcctctattctggggcggaaggttatgttgcccatgaatgtattattgatattcgtccactcaaagctaactatggtatcagtgaaatggatgtggcgaagcgtctaattgattacggcttccatgcgccaaccatgtcattccctgttgcggggacattaatgattgagccaacagaatctgaaagcaaagttgaaattgaccgctttattgatgcgttactctcgattcgtgctgaaattgcacaagtcgatgacggggtatggccgattgatgataatccgctagtgaatgcaccacatacacagtatgaattagtgcaagaatggtcacatagctatagccgtgaatgtgcggtattcccaagtgaagcaacgaaacgcaataaatattggccggcagtaaaacgccttgatgatgtttatggtgatcgtcatttgcattgttcttgtgcgccaataagtgattatgaa

SEQ ID NO: 32957 - DNA, 165 bp, Proteus mirabilis
atgaaaaactttgtcaaaattgcacttattgcttcttttgttaccgtaatgactggttgtactggtagtgtttacaacaaagaaaaagattgtaactacgactatttattacacccagcagtatctatctctaaaattatcggcggttgcggcgatactaataaa

SEQ ID NO: 32958 - DNA, 1923 bp, Proteus mirabilis
atgggtaaaattattggtattgacctgggtacaactaactcttgtgttgctgtaatggacggtaagaatgcccgggttattgaaaacggtgaaggcgatcgtaccactccttcgattgttgcatatgcacaagatggtgaaattctagttggtcaaccagcaaaacgtcaggctgtgactaacccacaaaatacattatttgccatcaaacgtttaatcggtcgtcgtttcgaagacgcggaagtacaacgtgatgtttctatcatgccttacaaaattattaaagctgataatggtgatgcatgggttgaagcacgtaacgaaaaaatggctccaccacaagtttctgctgaagtattgaaaaaaatgaaaaaaacagcggaagattacttaggtgaaccagttacagaagctgttattacagttcctgcttactttaatgatgcgcaacgtcaagcaactaaagatgcgggtcgtatcgcgggtttagatgttaaacgtattattaacgaaccaacagctgcggcattggcttatggtttagatcgtgaagtgggtaaccgcactatcgctgtttatgacttaggtggtggtacattcgatatctctatcatcgaaattgatgaagttgatggcgaaaaaacctatgaagttctgtcaaccaatggtgatactcacttaggtggtgaagatttcgatagccgtttaattaactacttagttgatgagtttaagaaagaacaaggcattgacctgcgtaatgatccattggcaatgcaacgtctgaaagaagctgcagaaaaagcaaaaattgaattatcttcagctcaacaaacagatgtgaacttaccttatgttactgctgatgcgacagggcctaaacacttaaatatcaaagtgactcgtgcaaaactggaatctttagttgaagacttagtaaaacgttcaatggagccagtaaaagttgcattagaagatgcgggcttgaaagtcagtgaagtaaacgacgttattctggttggtggtcaaactcgtatgcctatggtacaaaaaactgtggctgagttcttcggtaaagaaccacgtaaagacgttaacccagatgaagctgttgctatgggtgctgctgttcaaggtggtgtattagctggtgatgttaaagacgttctgttacttgacgtgactccactgtctttaggtattgaaactatgggtggcgtgatgacttcgctgattgcgaagaataccactatcccaactaaacatagtcaagtattctctaccgctgaagataatcaatcagctgtaactattcacgtattacaaggtgagcgtaaacgtgcgagtgataacaaatcactgggtcaatttaacttagatggtattcaacctgcaccacgtggtatgccacaaattgaagtgacttttgatatcgatgctgatggtatcttgcatgtatctgcaaaagataaaaacagtggtcgtgaacaaaacatcaccattaaagcttcttcaggtttaaatgaagaagaaatccaaaaaatggtacgtgatgcagaagctaatgcagaagcagaccgtaaatttgaagagttagtgcaaacacgtaaccaagcagatcaattagttcacggtacacgtaaacaaattgaagaagcgggtgacaaattagcggctaacgataaagaagctatcgaaaaagcgttaagcgaattagaaattgcttctaaaggtgaagataaagctgctattgaagcaaaactgcaagcgttagttgaagcttcaaaacctctgttagaaattgcacaacaacaagctcaagcgggtgcaggtaatactgccgatgcaactgatgcaggtgcgaagaaagatgacgatgttgtcgatgcagagtttgaagaagtagacggcaaagataaaaaa

SEQ ID NO: 32959 - DNA, 864 bp, Proteus mirabilis
atggctatcgcacgccaggacgtgaatatttcctcaccggaagctacaacttctgatgcacaatctaccgctaatcccactgtcttagtttttgactcaggggttggcggtttatctatttatcgagagatccgtgaaaaactgccggatgctcactatatctatgttttcgataatgaagcatttccttatggtgagaaaccacaagagtttattattgagcgtgtcgttcgtatcgtcagtgctgtcgcgcaacagcatgagttagcagcgattgtgatcgcttgtaataccgcaagtacagtaagtctgcctgctttacgtgctaaatttactgatatccccattgttggtgttgttcctgcgattaaacctgcagcaaaacttacctgtaatggtgtggtcggtctattagccacaagagcaacggttaagcgaccttatactcatgaacttatcgaacgctttgcgacggagtgtaaagtgcatctattaggttcagcagagctggtggagttggctgaaaaaaaactgcatggcgaaaaggtgtcatgcgatgagctacgtagaattttagccccttggcttaaaatgaaagagccaccagatacggtagtattagggtgtacccatttccctctattagaagaagagttactttctgttttgcctgatggtactcgaattattgattctggtggtgcaattgcaagaagaactgcgtggttagttgtaaatcaagataaaatcagaggttcaaaagaaattagttttgcttactgtcttaaagaagatgagtatagtgaattattaaaaccggttttagccgattttggctttaaaacgctcagaaaattggcgctt

SEQ ID NO: 32960 - DNA, 546 bp, Proteus mirabilis
atgaaaaacagcataataaagtcagctataacttgcttgttattgctctctcctagcacttttgctgccactgatattattggtggagagatggaatttaaaggtgttgttgttgcacatggctgtacgattgttgcgggagatgaaaataaagttattgatttcaaacaaatatctgcaaaagatctctattcactacaaaaaagcaaccccgttgcttttagtatcagtttagaaaattgtagccaagatatttataaaagtgtcactatcacattagatggtcaagcgcattcaacaatgcccaatcatatagccgttactgggagtggctcagaagatccgaaaagtattggtatcgcttttaccgacaaggcacataatattattgaattaaaaaaaccaagtgctcctcaacagcttaataataaacgggtacaatttgattttatggcctatgttgaagcaacatcatcagctattcaaaatcaaacgatactcacaggaccatttcaagcacaagcaacctatacactcaattaccaa

SEQ ID NO: 32961 - DNA, 1017 bp, Proteus mirabilis
atgctgcaatttatccttcagcgtttggggctcgtgatcccaacgtttatcggaattacgttattaacctttatttttgtccatcttattccgggtgatccggtcatgattatggcgggagagcgtggattatcaccagagcgtcacgcttatttaatggcggaattaggactagataaaccgctatggcaacaatatttaaattaccttaacggcattatgcacggtgatttaggtatttcactaaaaagtcgtattcctgtctgggatgaatttttgccacgatttaaagcaaccttagagctaggtatttgtgccatgatttttgctgtttcagtgggcattcccgttggggtgcttgcggcagtaaaacgaggttctatttttgatcatacggcaatcagtgtgtcacttgcaggatattctatgcctatcttctggtgggggatcatgctgattatgctcgtttcagtgaagcttgatctaacacctgtatcaggccgattggcggatagtgtctttctagatgatagctatccactaacgggatttatgttgattgatacgctcttttggggggaagaaggtgattttcttgatgcgctacaccatattattttaccggccattgtgcttgggactattccattagcggttattgtgcgcatgacgcgttcggcaatgttggaagtattgggagaagattatattcgcactgccagagcaaaaggattaagtcgtgcacgagtgattttgatccatgcattacgtaacgcaatgttacctgttgtgacggtgattggtttacaagttggtacgatgctagccggagcgatactgacagaaactattttttcatggccgggtttaggtcgctggttaattgatgctctacaacgtcgagactaccctgttgttcaagggggagtattgctcattgccactatgatcattttcgtgaatctattagtggatgtgctatatggcattgttaacccacgtatccgtcataagaaa

SEQ ID NO: 32962 - DNA, 1665 bp, Proteus mirabilis
atgaatgaggcagatgcccgcccaacgaactttattcgtcaaattattgacgaagatctggctaccgggaaacataatagtgtccatacccgtttccctcctgaacctaatggctatcttcatattggccatgcaaaatcaatttgcttaaattttggtattgcacaagattatcaaggtaaatgtaatttacgttttgatgatacgaatccagtaaaagaagatgttgaatatatcaactcgattcaaaaagacgttcagtggttaggtttccaatgggatggtaacgttcattactcctctgactattttgatcaactgtatcaatatgcgattgagctgattaacaaaggcttggcttatgttgatgagttgagtgctgaagaaattcgtgaatatcgtggcacactcaaagagccaggaaaaaatagcccttatcgctctcgtagtgtagaagaaaacttagcgctatttgaaaaaatgcgtgcgggtggctttgaagaggggaaagcgtgcctacgtgcgaaaattgacatggcatcaccatttattgtcatgcgtgatcctgttctttaccggatcaaattcgctgaacaccatcaaacaggtaacaaatggtgcatttatccaatgtatgattttacccattgtatttctgatgcattggaaaatatcacacattctttatgtactttggaattccaagataaccgtcgtttatatgattgggtgttggataatatcactattccttgccaccctcgtcaatatgagttctcacgtcttaatcttgaatataccgtcatgtctaagcgaaagctaaatcagcttgtgacagaaaatattgttgatggttgggatgatccgcgtatgccgacaatttctggcttacgtcgtcgtggctatacggctgagtcaatccgcgaattctgtcaacgtattggtgtgaccaaacaagataacaacgtggaaatggcatcattagaagcttgtattcgtgatgatttaaacgaaaacgcacctcgtgcaatggctgttatcgatccggtacgtttagtgattgaaaatatgccagaaggtgaagagattttaactgcgccaaatcacccaaataaaccagaaatgggaactcgtgaagtaccatttagccgtgaaatttatattgatcgtgcagactttaaagaagaagccaatcgtcaatataaacgtctggtattaggtaaagaagtccgtctgcgtaatgcttatgtcattaaagcagaacgagttgaaaaagatgaacaaggtgaaataaccaccatttattgtacttacgatccacagacgttaaataaagatccggctgatggtcgtaaagtaaaaggggtgatccactgggtcagcattccacatgctattccagcagaaattcgtctttatgatcgtttatttagcgtacctaatcctggtgctgaagaggatttcttatcaaccattaaccctgaatcattagtgatccgtcaaggttttgtggaagcaagcttaaaagatgcggctattgaaaaagcgtatcaatttgagcgtgaaggttacttctgtgctgataagctttcgacagcggataaactggtctttaaccgtactgttggtttacgtgatacttgggcgaagatttcgaaacaaggt

SEQ ID NO: 32963 - DNA, 1926 bp, Proteus mirabilis
atgccaattattactcttcctgacgggagccaacgtcaatttgaaaatgcagtctctgtcatggatgtcgctgcagatatcggtcctggacttgccaaagcctgcattgcagggcgcgttaatggtgagctggtggacgcttgcgaattaatcgagcaagattcacaactggcgattattaccgcaaaagacgatgaaggtcttgaaattattcgtcactcttgtgcccacttattaggacacgcaattaaacagttatggccacaaaccaaaatggcgattggtcctgttatcgaaaatggtttctactatgatgtggatttagatcattctctgacgcaggaagatttagaaacgttagaaaaacgtatgctagagttggcgaaaacagattacgatgtcattaaaaaacgcgtaacttgggcacaagcacgggaaacttttgttgctcgtggtgaagattataaagtcgctatccttgatgaaaatatcagtcaagatgcacacccagcactttatcatcatcaagaatatattgatatgtgccgtggcccccatgtgccaaacatgcgtttctgccatcactttaaattacagaaaatcgcaggtgcatactggcgcggtaatagcgataacaaaatgctacaacgcatttacggtaccgcttgggctgataagaaacagttaaaagcttatttagaacgtttagaagaagccgctaaacgtgatcaccgtaaaataggtaaacaacttgatttatatcatatgcaggaagaagcgccgggtatggctttctggcataatgatggttggactattttccgtgagttagaaacatttgtacgttgcaaattaaaagaatatgattatcaggaagtaaaaggtccatttatgatggatcgtgttctttgggaaaaaacaggtcactgggaaaactacaaagagaatatgttcactacttcttcggaaaaccgtgaatattgtatcaaacctatgaactgcccaggccacgtgcagatttttaaacaaggtctacgttcttaccgtgatttaccattacgtatggctgaatttggtagctgtcatcgtaatgaaccctctggtgcattacacggtttaatgcgtgttcgtggctttacacaagatgacgcacatatcttctgtacagaagaacaaattttaagtgaagtaaataactgcatcaaattgatttatgatgtatattctactttcggatttgaaaaaatcgttgttaagctgtctactcgtccagaaaaacgcaccggtgaagatgctttatgggatattgcagaaacagacttagcaaaagccttgactgataacaatattgaatttgaatatcagccgggtgaaggggcgttttatggccctaaaattgaatttacactttacgactgtttagatcgtgcatggcagtgtggtacagtacagctggacttctcattgccaggtcgattaggcgcttcttatgttgctgaaaataatgagcgtaaagtacctgttatgcttcaccgagcggtgttaggatcattagaacgttttatcggtattctaactgaagaatacgcaggattcttcccgacttggttagcaccacagcaggttgtcgtgatgaatatcacggatggacaggctgattatgtacaaaaactcgtcaaagaattgcaagatgccggaattcgtgcaaaagcagacttgagaaatgagaagattggctttaaaattcgtgaacatactttacgtcgtgttccgtacatgcttgtttgcggtgataaagaagtcgaatcaggcaaagtagcggttcgtactcgtcgaggtaaagaccttggcagtatcgacgttaacgattttaaagaaaaacttctgcaagaaatcagaagcagaagtcttcatcagttggaggaa

SEQ ID NO: 32964 - DNA, 387 bp, Proteus mirabilis
atggcaaaagcacctattcgtgcacgtaagcgtgtaagaaaacaagtctctgacggtgtggctcatatccatgcttctttcaacaacacaatcgttactattacagaccgtcaaggtaacgcgttgggttgggctactgccggtggttccggtttccgtggttctcgtaaatctactccgtttgcggctcaggttgcagcagaacgttgcgctgaagctgttaaagagtacggaattaagaacttggaagttatggtaaaaggacctggtcctggtcgtgagtcaactatccgtgcattaaacgcggctggtttccgcatcactaatattactgatgtgactccgattcctcataacggttgtcgtccaccgaaaaaacgtcgcgtt

SEQ ID NO: 32965 - DNA, 822 bp, Proteus mirabilis
atgaaaacagataattatcagattggtattgaaattaatatcaatcatatcaatgccgttttagtatttcagcagaataagcaatggaagatcaatgcattttggcaattccctttacctcttaatgataatatagatgatataaatttaagaactatcttaaaacgatggcaacaatctctaccgccaatcaaccgtgttgcactggcattacccgatacagtggcaagttatcataccattgctttatctaacctgatttccctgacaccagcagcctattatcgattagcacaactccgagccacatctcatcaacaagtcaccaaacaagcggtacaattcgattatcggcaacataaccaacatctcgccatccatttacataacaagacactgatagagacttatattgccttattcgccaaaataaacttaaccatcactgcgattgatattccagcttgtgcgttgcgttatgttgccacacatctcaacatatcgcctcacaacatattaattttttgtcaaaataatcaattgctttgggtttgtgcagataaagagatgccccattacggtactctttcttatcaagaccaccaagagcaagaaaaacaattacagcaattactcatcaagcatcattggccacaggagcaatgttatttctcaggtgacaatgcagaatactttcgccaacaaatgcctatttggccaacccaaaaagagcggctatttatgtctataccgcccaaaaagacgctacctctaattgccattggtttagctttgcgtccttgggagacagcatgtatcaaa

SEQ ID NO: 32966 - DNA, 2129 bp, Proteus mirabilis
atcatgcaaacctgggaatactgtcatcgtactgttctgggccgtgaagatgcgcaactgttgctatggcgcggtgttgagatggttgaacttctttcgacactcagtatggataaagatagcatgagggcagcacttctcttcccacttgctgaagaagatcttattaaccaggaagttatcactgaacattttggtgaggcgatatggaatttagtgcgtggcgtaatggagatggatgctattcgccagcttaaagcgacacataccaacgaaactagctcagtacaagtcgataatgtacgccgtatgttattgtctatggtagaagattttcgttgtgtagttattaaactcgcagagcggattgcccatttacgtgaagtgaaagatgccactgaggatgaacgagtcttagcggcaaaagagtgttttaatatctatgcaccattagccaatcgattggggattggacaattaaaatgggagcttgaagatttctgtttccgttatcttcatcctgatgaatataagcaaattgcaaatttactgcatgaacgccgtattgatcgcgaacagtatattgataatttcgtcagtacggtgcgtggttatatgcagcaagagaatattgaagtcgatatctacggacgtcccaagcacatctatagtatttggcgaaaaatgaagaaaaaaaatctcgcctttgatgagctatttgatgttcgtgcggtacgtattgttgtcgaacgcctacaagattgttatgccgctttaggtattgtacatactcattttcgtcatttacccgatgaatttgatgattatgttgccaatccaaaaccaaatggttaccaatctattcatacggtagtacttggccctgaaggtaaaaccgttgagatccaaatacgtactcgtcagatgcatgaagatgctgaattaggtgttgcagcgcattggaaatataaagaaggtgctactggtgcaacaacaaaggcgggacgggaagttatgaaaatcgtattgcgtggttacgtaaattaattgcatggcaagaagagatggctgattctggtgaaatgctagatgaagtacgtagccaagtatttgatgatcgcgtctatgtctttacgccaaaaggggatgtgattgatttacctgcaggctcgacaccattagattttgcttatcatattcatagtgatgttggtcatcgctgtattggtgctaaaatcggcgggcgcatcgttccatttagctatcagctacaaatgggcgatcaaattgaaattattactcaaaaacaccctaatccaagtcgagactggctaaaccctaatcttggttatgtgacaaccagtcgtggtagagcaaaaatccacaattggttccgtaaacaagatcgcgataaaaatattattgcaggccgccaaatcttagataatgaattagcgccgcttgatatcaatatgaaagaagcagaaaagctgctgattgctcgttataacgtccatagtcttgatgaagtgctggcaggtataggcgttggtgatatccgtatcaatcaattagtcaatttcttacaaagtaagctgaataaagccacagcggaagatgaagacaaagaggcgttacgctcattagaaaataaaacggctacaccaaaaacaaccacgtcaggtggtggcagtattgtggtcgagggtgtcgggaacttaatgcatcatatcgcacgttgttgccaacctatcccaggcgataatatcgttggatttattaccaaaggacgtggtatttcaattcaccgtgcagattgtgatcaattagctgagctactttctcacgcaccagagcgtattgttgatgcggtgtggggtgagaattactcaagtggttattcattagtggtgcgggttgtggctaatgatcgtagtggtttattacgcgatatcaccactattttagctaatgaaaaagtgaatgtgctgggagttagtagccgcagtgatgtgaagcaacaaatagcgaccattgatatgaatattgagatttataatctccaagtattagggcgtattttagcgaaactcaatcaattacctgatgtcatagaagccaaacgcttt

SEQ ID NO: 32967 - DNA, 2595 bp, Proteus mirabilis
atgggtaaagctcttgttatcgtggagtccccggctaaagccaaaacaatcaataaatatcttggcaatgactacgtagtaaaatctagcgtgggtcacattcgtgatttgccaaaaagtggttctggcagccagaagagcgaaaactcatccgccacgaaaggcgtgaaaaaggttaaaaaggatgagaaatcagccttagtcagccgtatgggtgtcgatccttataatggttggcatgcaaactaccaaattctgccgggtaaagagaaggtagtcgctgaactaaaagcattggctgaaaaagcagatcatatctatctcgcaacggaccttgaccgcgaaggagaagctatcgcgtggcatttacgcgaagtgatcggcggtgaagatgatagatttagtcgtgtcgtatttaatgaaattacgaaaaatgccattacacaagcattccaaacaccgggtgagctgaatattgaccgtgttaacgcgcaacaagcacgtcgttttatggatcgtgtggttggctatatggtttctccgctgttatggaaaaaagtggcgcgtggtttatctgcggggcgtgtacagtcagttgcggtacgcctactcgtcgagcgtgaacgtgaaattaaagcatttgtgccagaagagtattggcaattacacgcttcactgctgacacccgatgaacaacccttgcgtatggaagtgacgcactatcaagataacgcctttaaaccagtctcctctgaggaaactcaggtggcggttaaggcgttacagaatgccactttcatcgttaaaaaccgtgaagatagaccaacatccagtaaaccaagtgcccctttgatcacctctacattgcaacaagcggcaagtactcgcttaagctttggggtgaaaaagaccatgatgttggctcaatgtctttatgaagcaggttatatcacctatatgcgtactgactctaccaacctgagtcaggatgcaatccaaatggcacgtgattatattcacgataaatttggtgcaaaatatctgcctaaagagccgaatgtttattcaagtaaagagaactcacaagaagcgcacgaagctattcgtccttctgatatcaatgtgacggctgaatctttaaaagatatggatagcgacgcgaagcgtttatatcaactgatttgggatcaatttgtcgcctgtcaaatgacaccggcaaaatatgactcaaccacacttacggttgtatcaggggattataaactacgcgctaaaggtcgcacattacgttttgcgggttggacaaaagtcatgccagcaatgcgcagtaaagatgaagataaaacattaccagcggttgatgtcggggcgcaattagcgttagctgagttatcgccaacgcaacactttactaagccaccagcgcgttttagtgaagctacattagttaaagagctagaaaaacgaggtattggtcgaccttcaacttatgcttcaattatctctaccattcaagatagaggttatgtcaaagttgaaaaccgtcgtttctatgcagaaaaaatgggtgagattgttaccgatcgcttagaagaaaactttagtgatttgatgaactacgatttcacggctcaaatggaagatcatctcgaccatgttgccaataaccaagaaaactggaaagcggtattagatgcattcttcacagattttagtcagcaactagaagtcgctgaaaaagatccagaagaaggaggaatgcgacctaaccctatggttattacttctattgaatgtcctacttgttcccgtcatatgggaattagaacagcgacgacaggggtattcttagggtgctcgggctatgctttaccaccaaaagagcgttgtaaacaaacgataaatcttattcctgaagatgaattacttaatatcttggaaggagatgatgcggaaactaatgcattacgtgcccgtcgtcgttgtccgaaatgcggtacggcaatggacagttatcttattgatactcatcgtaaattacatgtttgtggtaataatcctgcatgtgatggttatgaagttgaagaaggtgaattccgcttaaaaggttatgaaggcccagtgattgagtgtgataaatgtggcgctgaaatgcatctaaaaatggggcgttttggcaagtacatgggttgcaccaatgaagagtgtaaaaatacacgtaagatcttaaagagtggtgaaattgcaccaccaaaagaagatccggttccactacctgagttgccttgtgaaaaatcggatgcttactttgtgttacgtgatggcgcggcgggtattttccttgcggccaatacgttccctaaatcaagggaaacccgtgcaccgaaagtggctgagttagtacgttttaaagatagattatcggaaaaaatgcgctacttagcacaagcacctgtaaccgatccagaagggaatccaaccatagtacgttttagtcgtaaaactaaacagcaatatgtctcttctgaaaaagaggggaaagcaacaggttggtcagccttttatattgatggcaaatgggttgaaaaaagtaaa

SEQ ID NO: 32968 - DNA, 618 bp, Proteus mirabilis
atgaatcgctttgttattgcagagccacaacgatgcatagggtgtaatacctgtatggcagcttgttcggaagtacaccaagctgtgggattacaggcgcatccgcgtcttacagtggtaaaagtggaggatcagaccgccccgatgctttgtcggcattgtgaggatgctccttgtgctagtgtgtgcccagtcaatgccattactcatgaagataatatgatctttcttaatgagagcttgtgtattggctgtaagttatgcggtttggtatgtccttttggtgcgattacaccatcaggcagtaaacccgttaacttaccggctgtgtttgaccattttgtgcctgaagagatgctggcagatgtgcccgcaagtcttcctactaccaatccattccttgcatggaatgcgggtattcgcgcaatagcagtgaaatgtgacttgtgtgctttctcagatgaggggcctgcttgcgtaaaagtctgtccgacagatgccttacatctagttgaagaagatagccttgaagagcagatgaaagcgcgtcgtttagactctgtgatggaacctatgacaagtcttgatgatctatctacgttgacacaggagcgcaag

SEQ ID NO: 32969 - DNA, 672 bp, Proteus mirabilis
atgaagtataatgtctatattttatttatcataattctgtgttctactttttttacacaagcaaatgtaatttatagtggaacacggtttatctataatgaagacgataatgatattattattaatataaaaaataaaaactccgctactgattatttaatacaaagctggatcacaaaggatgaaaatgataaaaatacaccttttatgattaccccacctttatttaaattaaataaagaacaatctgcaattttgcgaattgccaaaatcacatcaatagctcaaacagatcgtgaaagtcttttttatataaatagcaaagcgatccctatagctgaatcaaaacataatagtattcatatatcaattaagtcagtgtttaaattattttaccgaccacatggcttaacagaaacagttgaagaagcgacaaaaaaaattattttttctataaataataaaaaagaaatgataataaaaaacaactctgaatactacttcactattataaatattttttctaatggggaaaaaaaagagatctcagtcatgctatccccttttagtgaaattaatataggaaaaaatcattttggtacagctaaagtaggctggagctatataaatgattttggtaatgaagttaatatcaacataaaaaatagcgaa

SEQ ID NO: 32970 - DNA, 999 bp, Proteus mirabilis
atggctaatgttaatccgaatactgcagtgcctttattaaaagcggttaatcttgccaaatattacagcgttaaaggtggactttttgcgaaggaaaaaaccgttaaggcactagatggcgtctcttttgagctcgagcgaggaaaaacgttagccgtggttggggagtctggctgtggtaagtcaaccttagggcgattattaacgatgattgaagtaccaacctcaggagagctttcatatcaagggcaaaatttattagttaaagataaatcagcggaaaaattacggcgccaaaagatccaaattgtctttcaaaatccttatggatcattaaatccacgtaagaaagtggggcaaatattagaagagcctctattaattaataccacgttaagtgcacaagatcgtaaagaaaaagtactttctatgatggcgaaagtaggtttaaaggctgagcactatagtcgttacccgcatatgttttcaggaggacaacgccaacgtattgctatcgcccgtggtttaatgcttgaacctgatattgtggttgctgatgagcctgtatctgccctagacgtttctgtgcgagctcaggtgcttaatttaatgatggatctccagcaagagatgggactttcttatgtttttatttcccatgatctttccgttgttgaacatattgcagatgaagtggtggtgatgtatttagggcgctgtgttgaaaagggcactaaaacacagatatttgaaaacccacaacatccttacacccaagcgttattatcagcaacaccaagattaacaccgacattaaggcgagagagaattaaattaacgggtgaattacctagtccgttaaatccaccaccaggatgtgcttttgctgctcgttgtcggcgcgcatttggaatgtgtacacaattacaaccgactttaaaagagtatcatgggcagttgattgcttgttttgccgtagagcaagatcacggcgagttt

SEQ ID NO: 32971 - DNA, 777 bp, Proteus mirabilis
ttgcttttattttacggggcagaaaaaactgccccatttccttctagaggtattatgttaaagttcattcttattttcttgactctgtttgtatccacagtggctcaagccagtgtggttattatggggacccgcgttgtttatcccgcaacgcaaaaaagcattaatgttcaattaaataataacgatgaatcccccgcattaattcagtcttggttagataccggaaacgcagctgcagcaccagattcaattcacgttccttttatcattactcctcccatatttcgtatggagccgaaatcagggcaaaccatccggattgtctataccggtgaatcattaccacaagatagagagtctcttttctatctaaatgtcttagacattccagcaaaacctaaagtggaagaaaattcggaaaactcagagggaaataacaattacttacaattagccgttcgtagtcgcattaagtttttctttcgccctgataatctcaacgtaacgcctgatgatgcttaccaaaaagtgacttggcatcaggaaggagcactacgcattaaagcgattaacccaacaccttattacatcacttacaacaaaatctcagtgggtcaggataaacagctaacgcctgttgaacaaagtgggatgatagctcctttttcttcaaaaatattttcacttaaagagaagccaatattaacaaataaagtcacttgggttgttgttaatgattatggtggataccaacaaggtgaatctactttggaa

SEQ ID NO: 32972 - DNA, 585 bp, Proteus mirabilis
atgaatgaattacgtataggactggtttctgtttctgatcgtgcatccagtggtgtttatgaagataaaggcctgcccgctttagaagcttggctaaaaaaagcaatcacaaccccttttcatatcgaatcacgtttgatccccgatgagcaactgatgattgaacaaacattatgtgaactggttgatgaagcaggatgtcacttggttttaacaacgggaggcacagggcctgctcgtcgtgatgttacgcctgatgcaacattggcgattgctgatagagagatgccaggcttcggtgagcaaatgcgccaaatcagtttgaaatttgttcctacggcgattttatctcgtcaagtgggagttattcgtaatcaagccttaattttaaatttaccgggacagcctaaagcgatcgcagagacattagagggattaaaagacagtgagggacaggtgattgtcagtggtatttttgccagtgttccttattgtattcaattattggatggcccttatatcgaaactaacgaagaaattgtggttgcctttagacctaaatcagcacgccgttctacatctgct

SEQ ID NO: 32973 - DNA, 1629 bp, Proteus mirabilis
atggttaactttttattctatatggaaaaaggtgataatgataaaagcatgtctcaagtaataaacttttctcttttatttattttatctatagtacctgcactattagcgggttcaaccctgcatattgaacaaaagttctctatggtgattatcggttggctcctgatgttgctctgcgcaggtatctatcggtttactataggaaaagtgattacttttattgttgcagctttatggtctttaaacctctccatctcactgtttttttatcgtgaacatgatattcccttttcatcatcaatagcagaaactttcattaatactaatggaagtgaaactgttggtatgctctcttataataaatattatgtactcttttatattgttatatttaccagttttttctatttaatacatattagcgcccgttatttaaataacaaaactaataaaagatgtttaattgctatttttatattaataattcttatttctctatacaaaaacttagcaataagatcagagagtaaaacccaattacttgctgagtattatctacttaatacccctttttacaatgcagcagctttagtgcggactttccacgaaaatagacaaatcaaaaagatcacatcagaaaaagttaattttaactatgataaagtggatcaaaaaacagaaatttatattcttttgattggtgaatcagtacgacgtgatcatttaggaatttatgggtatccgtacgatactacccctaatttagagaaagaaaaaaataatattttattatttaagcaagcttattctcctgcgcctgtgaccatattatcagtacccatatccctttctaatatcaacctaacagagttatatgataagaaacactacgctgataatatcatttctcttgccaatcatgctggcttcaaaacatattggttaagtaaccaaggtaaaggaaatccaaaaacgagtgtgatttctgttattgccaatatggcccaacataaaaaatggaatgaatttattggctatgatgaagaattattgccatttttagataatgcgcttaatgataactcatcaaataaaaagctcattgtcctacatacttatggtagtcatgagccagcatgtaatcgttttcctagcacttaccttaaaaccttttcccaacaagaagatgataactgctacgatagctctatcgcttatactgacaaacttatcagccaaattattgaaaaaatacaagataaacccgcatctatactctatttttcagatcacgcattacaacgattagataaaaatagagaagtacgttatcaccatggcgtgaacagtcctcgccaagaagcttataatataccgctctttatttggtatagcgcatctgcaacgcgaccaaatatcaatgaagaaaatttgaataaacctttttctaccgcagataattattggctattaagccaatggctaggtattgaacataactcagcgaaaaaatgttactcacctttaagcgaatgctatcaaacaaaaacgtcaatgatggtcatcgatggtaataagaagttattaaactacgcactattagaatcagaagaacaagcgcctcaa

SEQ ID NO: 32974 - DNA, 756 bp, Proteus mirabilis
gtgaacttatccagtgacgattcatccgcatcaaaaccaaagcatgttgccatcattatggatggcaacggacgttgggcaaaaaaacaagggaaactccgagttacgggccatcgcgcgggaattaaagcagttcgagatgcggttagcttttccgtcaaacataaaattgaatcactaacgttatatgcatttagcagcgaaaactggaatcgccctgaacaagaggtgagttctttgatggagttgtttgtttttgcattagataatgaagtgaaaagcctacacaaacacaatgtcagattaacaattatcggtgatatcagccgctttagtcgtcgtttacaagatagaataaaaaactctgttgcactgactgcaaataataccggactcaatttaaatattgctgccaattacggtggacgatgggatattacacaaagtgtacaacaattagcgagttccctcgcaaaaggggagttagctatcgaagatattaatgaaaatgcgatatcctcacacttgtgtttacatgatcaatcgcctgtagatcttgtgatccgtacaggtggagaacatcgtataagtaatttccttatctggcaaattgcttatgctgagttatattttacacaggttttatggcctgattttgatgaacaagtttttcagaatgcacttgatgcttttgctaaacgggaaagacgtttcggtggtactacatcggaaacagatactgtaaatctgggagga

SEQ ID NO: 32975 - DNA, 597 bp, Proteus mirabilis
atgttgccactggttcttgcgtcgacttcgcccttccgagctcagcttctgaaaaagcttggaatgccctttatacaggcctccccaaacattgacgaaacccctttgcccacagagtgtgcacaagcgttagtcactcgtttatcctatgaaaaagcgcgtgctttagaggtacaatacccaaatcacttaattattggttcagatcaggtttgtgtactcaataaaaaaattacgggtaagccccttaactttgaaaacgcttttgcacaattaaaacaagcatccggtcaatgtgtatcattttatactggattaactttatataatagctcaacattagcctatgaaagtcattgtgaattatttcaagttcactttcggcatttaaccgatgatgaaattatcggctatttaaataaagaaacgccgttttattgcgcaggaagtttcaaatctgaggggttaggaattactctgttcgataaattaagcggtgatgacccaaattctttaatcggattaccacttatccgattgaataaaatgttactctcacaaagaattaacccattactttccacagataatcaggaa

SEQ ID NO: 32976 - DNA, 1467 bp, Proteus mirabilis
ttgaacaatataaggattaactatttcgttatcgttatcatagcgctattttcagctgcgattattgcactgaatattacttggcctgacaggcaaaaagcgcagataaataagattttatctcgtggtgagcttagagtgagtactatcccttcaccactgataacgataaatgataaaaaggaccccgtaggtttcgattatgaattagtgaaacgctttgctgattatcttggcgtgaaacttgtcgttaatatgcggacgaatatcaaccaactctttgatgatctggagaataataaagcagactttattgccgctgggttaatttataataaagaaaggctagatacgacacgaagtgggccagcctatttctcagtttctcaacaactgatctatcgtaaaggcacattgaggcctcgtcgttttgatgagcttaatgggcgccttgtcgtcgtagccggttcagctcatgccagcttattaaaaacattaaaagaaacgcaatatcctgaactcgaatgggaagaatcagagactaaaacgacttcacagctacttgaagagttatctgaaggtaaaataacttatgtactggccgattcaatcagcgtcgcggtacaacaacgcattcaccctaatgttgcagtcgcttttgaggtgacggaaagtcgtccattaacgtggtatttaccaaatcaagatgataatagtctgtatgcagccatgttggattacttcaatcaactttcccaagacgatgtgctcgcaaggctagaagagaagtattttggtcatgttggttcatttgactactttgatacactctcttttattaccgccattgactcaatattacctaattatcaacctctgtttgaaaaatatgccgagacttttgattggcgtttattagcagcaatggcttggcaagaatcacattgggatccccatgccacgtcaccgacaggtgtaagaggcttaatgatgctaacacgtccaactgcgtcaagtatgggtataacagataggttagatcctgaagaaagtatcaaaggaggtgcacaatatttaaaacatcttctttctcgcctaccagatactatccctgatgatgaaaaaatctggtttgcacttgccgcttataacatgggatatggtcatatgttagatgcaagaaagctaaccgaacagcaaggcgccaatcctaatagctggttagatgtaaaagcgcggttacctttgctcagccaaaagaaatactatttagatcttccctatggttatgcgagaggacatgaagcttatcgttatgttgaaaatattcgtcgctatcaacttagtttagagggatacctacaagcaaaagagagtaaaaataagatcctatcgaaagacgaaaaagacgattcagccaatactgctttattaccgcctcgctccgtaggctccccctcttcatct

SEQ ID NO: 32977 - DNA, 2148 bp, Proteus mirabilis
atgaacaaaaatacatttcttaagcacataccttgggtgatcctagggattattggtgctttttgtctgtcagtggttgcactacgccgtggtgaacacgtcagtgcattatggatagttgttgcttctgttgcggtctacttagtcgcttatcgttattacagtctttatattgctcaaaaagtaatgaagctcgatcctactcgagccactccttcagtaattaataatgatggtttgaactatgttccaactaatcgttatgtcctctttggtcaccactttgccgctattgcgggtgctggaccacttgttgggccagtattggctgcccaaatgggttatttacccggtacactgtggttattagctggggtggtgcttgctggagccgtacaagactttatggtgctgtttatttcgacgcgccgtaatggtaactctctcggtgagatgataaagaaagagatggggcctgtaccgggaactatcgcgctgttcggttgtttccttatcatgatcatcattcttgcggtgctagccctgattgtagtgaaagcattagcagaaagtccttggggagtattcaccgtctgttcaacagtacctattgccctatttatggggatctatatgcgctatattcgcccaggtcgtgtgggtgaagtttctgttattggtattgttttactgattgccgctatttggtttggtggcgttatcgcgagtgatccttactggggaccagcattaacctttaaagacaccactattacttttgggttgattggttatgcgtttatctctgctttactaccagtatggctgattttagcccctcgtgattatttagcgactttcctaaaaattggtgtaattgttggtttagctatcgggattgttattcttaatcctgagttaaaaatgcccgcgatgacccaatatattgatggtacaggaccattatggaaaggggctctattcccattcttatttattactattgcttgtggtgcagtttctggtttccacgcactgattgcatcaggtacaacgcctaaattgatcgccaatgaaatggatgcgcgttttatcggttatggtgcaatgttaatggaatcatttgttgcgatcatggcattagtggctgcctctattattgaaccgggtctctattttgcgatgaatacaccgcctgccggattaggcattacaatgccaaatctgcatgagttagggggtgaaaacaccgcaatgattatggatcaattaaaagatgtcaccgtacacgcggctgcgacagttagctcatggggctttgttatctcgcctgatgagattttacaaaccgccaaagatataggtgagccttctgtactcaatcgtgctggtggtgcacctacattagcggtgggtattgctatggtgttccataaaattttacctgcggcagatatgggcttctggtatcactttgggatcttatttgaagcactctttattttaacagcattagatgcaggaactcgttctggtcgttttatgctgcaagacttgttaggtaattttatcccatacttgaagaaaacagactcttttattgctggtgttatcggtacagcaggttgtgtcggtttatggggttatctattgtaccaaggtgttgttgacccactgggtggtgttaagagcttatggccactgtttgggatctccaatcagatgttagcggctgttgcacttgttttaggtacggtcatcttaatcaagatgaagagaacgaaatacatctgggtaaccgttattcctgcagtatggttattaatttgtacaacatgggcgctaggattaaaactgctcagtaatgatccgcaaatggaaggtttcttctatcttgctaatgagtacaaagcgaaaatcttagccggtggggcagatcttactgccgcagaaatcaccaatatgaaccacattgtgattaataactacaccaatgcaggtttaagtattctgttcttagtggttgtttacagcattattttctacggtatccgtaccgcaatgaaagcacgtaaaaatccgaaagagtcagcacaagaaacaccatatgtacctatgccaaaagatgtgaagatatcttcaggtcat

SEQ ID NO: 32978 - DNA, 474 bp, Proteus mirabilis
atggaacagaaaataattgttatgggggcagatccttcaggttatgaacttaaaaatgccgtcaaatctcatctacaagcaaaaaattacacaataaaagatattaccgaatcagggcctattggttattgtgatgttggtgataaagttggcgctattatttcagaacatcctgaatatattggttttgttttttgtggcacagggatgggagtaagtattagtgctaataaacataaaaatgtttattgcggggtttgtgagagtgttaccactgcgcgtttttgtaaagtgattaataattgcaatatgctagccatggggggtttactgattactccctttaaagccaatatgatggtagatgcttatttatctgcaacctttacacaagggttttctgaagcgaccccagatgatttacaatgtggcttacagaccatgaaagaagttgaaaagcgcatttatactgac

SEQ ID NO: 32979 - DNA, 1647 bp, Proteus mirabilis
atgaatggagcacagtggttagttcaagcattacgaaaacagcgagtggaaacggtctttggttatcctggcggtgcgattatgcctgtgtatgacgcactctatgatggcggtgtcgaacatgttttgtgtcgtcatgaacagggagccgctatcgctgctattggatttgctcgttctaccggtacaactggtgtctgtatcgcgacatcaggcccaggcgctactaatgtcatcacaggtcttgctgatgcattgttagattctgtgcctgttgttgctatcacagggcaagttgcttcaaatttaatcgggacagatgcttttcaagaggtggatgtacttgggctctctttagcatgcaccaaacatagttttctggtttctgatgtgaatgaactgccaagagtcgtatcagaagcattttcgatcgctaagcaagggcgtccaggccctgtgttaattgatattactaaagatgtgcaattagcagatgcttcacatttagctgattatccattgccacaagagcaagagtttccctatcccgaacatgaaatcgcgcaggctctgcagatgttagcacaagcgaaaaagccgattttgtatgttgggggcggtgtagcaatgagccaaggtgttgaggcgctaagatcttttgtaaaacagacgcaaatccccgttgtttcgacattgaaggggttaggttgtgctaatgcatttgatgccaattatttaggtatgttgggtatgcatggtacaaaagctgctaattatgccgttcaacgtagtgatttattaattgctgtaggcgctcgttttgatgatcgcgtaacgggtcgtttaaatacttttgcacccaatgcaaaagtgatccatatcgatatcgattacgcagagcttaataaattaaaacaagcccatattgctttgttaggtgatgccaaagtgttattacctaagttatctcaaccgttagctattgaggcatggcaagaagaggtacagcaattaatcgctgaatatgcttggcgctatgatcatcccggtgaagcaatttatgctcctttgttgttaaaacagttatctgatgctaagcctgaaaatagcattgtgacaacagatgttggacagcaccaaatgtggtcagcacagcatatgacatttgatgcgccagaaaattttattacttctagtgggctaggcacgatgggatttggtatccccgcggctattggtgcgcaaatagctagacctgatgcgtgtgttatctgtgtctctggtgacggctcttttatgatgaatgtgcaggagttaggcaccattaaacgtaagcaattacctattaaattggtgttattggataaccagcggcttggtatggtgcgccaatggcaagagctgttttttgagcaacgttatagtgaaaccattttaacggacaaccctgattttgttgctttggcaaaagcttttgatattccggggcagcgtattacagaaaaagcacaggttgctgaagcaattaaatgtttattaaccagtgatggcccttatttattacaggtatctatcgatgatgcagagaatgtctggcctttagtcccgccgggcgcaagcaatgatgagatgatggagaaatcaaaa

SEQ ID NO: 32980 - DNA, 903 bp, Proteus mirabilis
atgaaaacaattgttattgctttaggcggaaatgcattattacagcgcggcgaaattttatctgctgaaaatcaatataaaaatattgaattaatgtcagagacaattaataaattagcgcaagagtaccgtgttgttttagtacatggtaatgggcctcaggttgggttgttagcattacaaaatcttgcttatcaagcggttccagcctatccgttggatatcttggtcgcggaaagccaggggatgattggttatatgatgatgcagaaaatcaatcaaaataatcctacgcaagcaattactacagtaatgactcgtgtttctgttgatattaatgatgaggcttttagagagccgagtaaatttattggccctatttatgaggaagcagaaaaagaagaattaataaataaatatcaatggacatttaaaaaagatgggcaatattatcgccgtgtcgtaccttcaccagcacctcaaaaaataattgatatagaggcagtaaagcttttattagataaaggtcatattgttatttgtggcggtggaggaggtattccagttaataatataaataatgaatttattggtagtgaagccgttatagataaagatttaacagcagctttaatttctcgtgagttaaatgcagagcactttgttattttaacagaggctgatgccatttataaaaattggggaacaccagaacaagctgctattcgtgaagcaacaccagaagaacttgcaccaatggcagtcgctgatggcgcaatgggaccaaaaatcatggctgtcagtgattttgtaaatgccacaggacaacaagctcatattggcgcattacaaaacattcaacaggttattgaaggtcagtctggcactttaatttataagtct

SEQ ID NO: 32981 - DNA, 969 bp, Proteus mirabilis
atggctagcacgtttgccttgatcctaacgttggcaacgctaattacgggtattttttggtgtatagatcgttttaaattaaagccagcccgtaaagcgaagttaaaacgtttacaagagttaacgcagggaagtgaggatcagcaagagttagcaaaatcgattaataaaccaagctgggcagagacattaggctctctgtttcctgtattggcgattgtattgattttgcgttcctttgtgtatgagccgtttcagatcccatctcgttcgatgatgccgactttattagtcggtgatttcatcttggttgaaaaatttgcttatggattaaaagatcctattacacaaacaaccttgattagtacgggtaaacctaaacgtggtgatattgcggtatttaaatacccacgtgatccatcaactgactttattaaacgggtgattggtctaccgggggataaaatagtgtatgacatgacgtcgaagaaattacacatttacccaaattgtaataaagcaatatgtgatgatgaaatagcggtaacctatggtacagcgtatcctagtgaatggacattactgttacaaagtgtacctggtggtcaacgtattagcggtatgaaatcgattccgattgaagagccaatttctacagctacgcaatttcgccaagaagagagaattgaaacgattggtgatgtctctcatcgtattatgactattccgggagatgttactgtacctgaatttattcaaccgggattacctcaaggtacgtggattgtccctgaaggtcagtattttatgatgggtgataaccgtgatggtagttcagatagtcgtttctggggctttgtgcctgagcaaaacttagtcggtaaagccacaacgatttggatgagcttcgagaaacaagaaaatgaatggcctacaggtgttcgtttcagccgtattggtggcattaag

SEQ ID NO: 32982 - DNA, 957 bp, Proteus mirabilis
atgaagcgggtactgattgttaaaacctcttccatgggggatgtactacataccctaccagcattaactgatgcaagagcagcatatcctgagatctgttttgattgggccgttgaagagggttttgcacaaattccaagctggcacccagctgttgataccgttattcctgtcgcaatacgccgttggcgtaaaaactggtttagtgcgcctattcgcgctgagcgtgcacaatttcgtcacgcgatacaagcacatcactatgatgcggtgattgatgcccaaggtttactaaaaagcgcttttttagttacacgctatgcgaaaggcactaaacacggctattctcgtcaaagtgctagagagcctttagcgagttttttctataatattcgccacaatgtcagtaaaaaaatgcatgcggtagagcgtatccgccagctatttgccctcagccttaattacccactccccactactcaaggggactatggtatagcacagcattttctctcattacccgctattgataaacgcccttatttagtcttcttacacgccactacccgtgatgagaaacattggcccgaagcccattggcgagagttaattgcattattggcgaattcagatttgcgtatcaaactaccttggggcgcagagcatgaacatcagcgtgcaatacgccttgcacaaggttttgactatgttgatgtattacccaaaatgtcgctcgcagaagtagctcaagtgattgctggagcgcaaagtgtcgtttctgtcgataccggattaagccatttaaccgcagccttagataagccgaatattaccctttttggccctaccgatccgggattaatcggcggttatggtaaggaacaaaggtcgttaaaagcagcaggtggggatattggggagatcacgcctcaaaaggtttttaatatacttaagatt

SEQ ID NO: 32983 - DNA, 543 bp, Proteus mirabilis
atgcaaaatgaattaaaccataaagaggatgccgcgaagattgaaatcgttgatgtaactcattcaaagaaaaacacgtttgttttaacgcaagaagagcgtgctgaaattgaacaagaaaaacatcactatgaagatccccgtgctgcatcgattgaagcgctgaaaatagtgcaaaaaaatcgaggttgggttgaagacggtgctatctatgctattgccgatgtgcttggtataccggctagcgatgtagaaggggtagcaaccttttatagtcaaattttccgccaacccgtcggccgtcacattattcgtttttgtgacagtgtggtttgccatattacaggttatcaaggcattcaggcagctattgagaagcacctcaatatccttcctggccaaacaacaccagatggtcgttttaccttactgccaacctgttgtttaggtaactgtgacaaaggtcctactatgatggtagatgacgatactcacagttttgttaaacctgaagagattgaaacgttactggagcagtatcca

SEQ ID NO: 32984 - DNA, 822 bp, Proteus mirabilis
atgtctgcatcaggagaagcattaaccactagagactacataggtggacatctgaataaccttcagttggacctacgtactttcgagttggtcaatccccatgctgaaaatacgccatcattctgggtgttaaatattgactcacttttcttctctgtactcatggggcttttgttcctatggatatttagaaaagtagcagtaaaagcaaccagtggcgtaccgggaaaattccagactgcagtagaaatggtcattggtttcgttgatagcagcgttcgtgatatgtatcacgggaagagcaaagtcattgcacctttggcattgactgtgttcgtttgggtgctgttaatgaatgccctggatttattaccaattgattttatcccatatatcggtgaacacatcttagggttaccagcgttacgcatcgttccgactgctgacgtgagtatcactctttcgatggcaattggtgtatttatcctgattctcttctacagcattaagatgaagggcgtaaaagggtttactaaagagctgacgttacagccttttaatcaccctgtatttattccaatcaacttaattctggaaggggtaagcctgctatcaaaacctgtttcactcggtcttcgactgtttggtaacatgtatgcgggtgaactgatctttattcttattgctggtctgttaccgtggtggtcacagtggttattaagcctaccttgggcgatattccacatactgattattacgttacaagcctttattttcatggttctaacgattgtttatctgtcgatggcatctgaagaacat

SEQ ID NO: 32985 - DNA, 378 bp, Proteus mirabilis
atggctattgttggtataggcatggatatcgttgagatatcacgtattgaagagataatagggcgttcaggagaacgcctcgcgcgacgtattcttactgataatgaatggattatatatcaatcacataaacaacctgttcgttttttagctaaacgatttgcggtaaaagaagccgcagccaaagcattaggtacaggcattcgcttaggattggcatttaaccattttgaagtcgctaatgatgaattaggtaaaccaacattgcactttttagctgtggcaaaagagatggcgcaaaaagcgggaataaatgctattcacgtgacactggctgatgaacaacgttacgcctgtgcaaccgttattttagaaaaa

SEQ ID NO: 32986 - DNA, 1017 bp, Proteus mirabilis
atgaatatggaaaaattaattatatatagtgtaaagcataatgcttccgatctgcacctttgttgtggcgatgtgccacgattacggatcaatggcgtactttatcaacaaaatcaatgtaaacctattacttctgatacgctactcaaatggataacaccttatctgaccacagcgcaattgcaattttttggtaaggaggggcaagttgatacggcgataactcttgctgaggggcagcgcttacgagtgaatttatttcgccaacaattagggatatccgcagtactaagagtgataaattcacaactcccgacattaacatcactacgcgtaccaaaatcaatcactgcattattagataatgtttctaatggacttattttagtgacgggagcaacagggagtggtaaatcatccacattagcggcgatgattgattatctcaatcagcataagcgtcagcatattcttactttggaagcgccaatagagtttatttacaccaataagcaaagcattatccaacaacgtgaaatagggcgcgatgtacaaaatatagcgagtgcaatagaagctgcattacgtcaagatcccgatgtaattatgctaggggaattaagagatctagaaagtattaaaatggcattaattgcggctgaaacggggcatttagtactagcaacattacatacgcaaggcgttgttcaaacgttagagcgtgtcactaatgtattttcatccaatgaacgaaaatggatctcggcacaattagctgggagcttaaaagcaattatttctcagcaattggttccagcaacacaaggcgggcgtgttgccctgtttgaagtgatgtatatgacgcaggggattgcacatctgatcagagaagggaaatatcatcaagtgacgacattaatgcaaactgggtttgaatatggcatgcaaaccttcactttaagtcgccaacaacgtcaatatgaaggtttgctcaatgagcacatcaatgaagaaaat

SEQ ID NO: 32987 - DNA, 840 bp, Proteus mirabilis
catttcaatcctaaaaattcaatatttgataaggttgattgctttgcagaattatattctatgacaggggaacaatataaagataattttcatttatatttaaaagatggttatgatttaaaaatgaaatttgttataaaaaacgtttataatggtgaggtatcattagataatttaattaaagacatgatagatcggatacataataaaaatccaagtataaaagaagacatagaaaacataagaagttatataaaaaaaagactgcatgaaattcctaatgaagccaattatgatattaatcaatacaatgtctatttatcccagataaaaaacgacttactaccaaataattattttaacgtagagcgttatttggatggtgtaacagattttgttcgtttatataatataaataattctagaattaatgtagacgataaaattgaagaccgttgtaaattacaaaaacttatgaatataatacagcatattgatatagaatatagaaaaaatattcaaataaaacttgtgaagaatactgttgctttaaatataaaagataaaaattcaaaagagtttttgaatttaattaaaatcgaattattgtcattgtacaatcctcatgtaggtataatagaaggatttataaaacatggaatggaaactttatttaaagatgaagacaaaaaagaaaaagcctgtggatcattaaggaaagctattattgattataactttccatttattagaacacttgaattcaatgttactgatgagactataaataatatttatataaataatatagtaccaagtgagtatatctccttccgccaa

SEQ ID NO: 32988 - DNA, 153 bp, Proteus mirabilis
atggaattaaaagatgcccctaaatcagttcagttagcggttgatttgatttacttatttgaaaccaatcatattgatcccaacaccgtacttgaggcactggaaattgtgcgagttgattatgagaaaaaacgagataatcaaaccgctaac

SEQ ID NO: 32989 - DNA, 696 bp, Proteus mirabilis
atgaatactattaaacagaatctcgtcaatgtcaggtctcacattgacaccgcagcgcaaaaatgcgggcgttctccagacgaaataactctacttgcagttagtaaaactaagcctgtgagcgatatcgaaaaagcaattgcatgtggacaaactgaatttggtgaaaactatgtgcaggaaggtgtagataaaatcagctattttgctgaaaacaaaaatttagtttggcactttattggcccattgcagtccaataaaacacgtcttgttgctgaacattttgcctggtgccataccatagatagattaaaaatagcgcaaagattaagtgatcaacgtccaactacgttaccgccactcaatgttttgatccaaataaatattagtgatgaaaacagtaaatcagggatctctcttaccgagcttgatggccttgcagcacaaatatccattctgccagggatcaaactgcgcggactaatggctattcctgccccagaaaatgactataacaagcaagtcgaggtactagagaaaatgcatcaggcatttaaacagttacaaaatcagtaccccgatattgatacattgtcgatgggaatgactggtgatatggaagcagcaattgcctgtggctcaacactggtacgcattggaacggccatttttggcgctcgtgattacgccaataaa

SEQ ID NO: 32990 - DNA, 1167 bp, Proteus mirabilis
atgtataaaatcaccatctccggtaccggctatgtcggtctatctaatgggatactcctttcccagcacaacaaagttgttgcattagatatcaataaagaaaaagtcgaactattaaacaaaaaaatctctcctatctcagataaagaaattgaagagtttttagccactaaagagctcgactttacggcaactttagataaagaattcgcttataaagatgctgaattcgttatcattgctactcctaccgattatgatcctaaaactaactactttaacacctcttctgtagagtcagttattcgtgatgttttagaatataatccaaacaccactatgattataaaatcaaccattccagttggttttactaaacagatgagagaaaaatatcataccgataatattatcttctctcctgagttcttacgtgaaggtcgcgccctttacgataacctttatccatctcgtattgtgattggtgagcaatctgcaagagcagagaaatttgctgagcttttacaacaaggggcattaaaaaaagatattgatgttctctttactgattctacagaagcagaagccattaagttatttgctaatacttatctcgcactgcgtgtggcttattttaatgaactcgatagctacgcccaagcttacaatttaaatgcaagacaaattattgaaggtgtctgtttagatccgcgtattggtaatcactataataacccctcatttggttatggcggttactgcttaccaaaagatacgaaacaactgttagccaactacgaatccgtacctaataatattattggtgccattgttgaagctaatcgtactcgtaaagactttattgctgattctattatcgctaaatcgccgaaaattgttggtgtttatcgtttaattatgaaatcaggctctgataatttccgctcatcttcaatccaaggcattatgaagcgtattaaagcgaaagggattgaagtggtgatttatgagccagaaatgaaagaagagactttctttaactcaaaactcattcgtgatttagatgagtttaaagcaatgtctgatgtcattattactaatagaatggcttctgcactaaacgatgttgaagaaaaagtttatactcgtgatctctttggtaacgat

SEQ ID NO: 32991 - DNA, 636 bp, Proteus mirabilis
atgagctatcaggtacttgcccgaaagtggcgcccacaaacttttaacgatgttgtcggtcaacgtcatgttttgaccgcattggctaatggtcttgatcaccaaaggttacatcatgcttatcttttttctggcactcgcggtgttggaaaaacgacgatcgcccgtctatttgctaaagggctgaattgcgaaacaggcataaccagtaaaccttgtggtaaatgtgctaattgccttgagatagagcaagggcgttttgttgatttaatagaaatcgatgcggcatcaagaacgaaagttgaagatacacgagagctactcgataatgttcaatatgcgccggctcgtggtcgttttaaagtctatcttattgacgaagtgcatatgctttctcgtcatagttttaatgcgttacttaaaacgttagaagagccacctgaacacgttaaattcctgttggctaccacagatcctcaaaaactacctgttactatcttatctcgttgtttgcaatttcacctgcgggcacttgatgttgaccaaatagcgacacagcttgagaaagtagtatccgcagaacacattgaaaatgatgtgcgagcacgccaattaattgcccgtgcagcagatgga

SEQ ID NO: 32992 - DNA, 246 bp, Proteus mirabilis
atgaacatggttgagaatatgctcgatcaggcattcaaaaagcttaatcctcacgagcatcctgttctgcactctgaccagggatggcagtatcgtatgagaagatatcaaaatatccttaaagaacatggtattaaacaaagcatgtccagaaaaggcaattgtctggataatgctctggtggagtgtttctttggaaccttaaagtcggagtgtttttatcttgatgagttcagtaatataagg

SEQ ID NO: 32993 - DNA, 2350 bp, Proteus mirabilis
gcgggtggattatctctcccctttagccaagccatggcttcggagcaaacagcgccgacatctaccaataaagaaaaagtcgtctggagtgcatgtaccgtcaattgcggtagtcgttgtccattgcgtatgcatgtcgttgatggcgaaattaagtacgttgaaacagacaataccggcaatgacgtttacgacgagttccatcaagtacgagcttgcttacgtggtcgctctatgcgtcgacgtgtttataatccagatcgcttacgttatcccatgaaacgcgtaggtaaacgtggtgaaggtaaatttgaacgtatctcttgggatgaagcctttgatactatttccgacaccatgaaacgcttgataaaagactatggcaatgaatctatttatctaaattacggtacaggcaccctcggtggcaccatgacaaaatcttggccaccaggagcaacccttattgcccgtttaatgaattgctgtggtggttatctcaatcattatggcgattatagtactgcgcagatcgcggcaggcttaaattacacctacgggggatgggctgatggcaatagtccttcagacatcgaaaatactaaattggttgttatgtttggtaataatcccggcgaaacacgtatgagtggcggtggtgtaacttattatgttgagcaagctcgtgaaaaatcagatgctcgcatgataattattgatcctcgctatactgatacgggtgcaggtcgtgaggatgagtggatccccattcgtccaggtactgatgcagctttagttaatgcgttagttatgtcatgatcaaagaagatttagtcgataaacccttcttagataaatactgtgtaggttacgacgaaaccacgatgccagaaggggcacctaaaaacgcccactataaagcctatattttaggtgatggcgcagatggtcaacccaaaaccccagaatgggcagcacaaattaccggcattcccgcggcacgtattgtcaaattagcccgtgaaatcgccggtgctaagccggcttatattactcaaggttggggccctcaacgccgttcaaatggcgaattagcctctcgcgctattgcaatgctcgctatcttaacaggtaatgtgggaataaatgggggcaataccggtgcccgtgaaggctcttacagcattccttttgtccgtatgccaaccttaactaaccctgtcacgaccagtatttctatgtttatgtggacagatgccattttacgtggccctgaaatgaccgcaacacgtgatggcgtgcgaggtaaagataaactggatgtacctattaaaatggtctggaactatgcggggaactgcttagttaaccaacattcagaaataaaccgtactcatgaaatcctacaagatgataaaaaatgcgaaatgattgtggttatcgataatcatatgaccgcatcggcaaaatatgcagatatcttactgccagattgcacggcatcagagcaaatggatttctgtatggatgcttctgcggggaatatggcttacgtgattttcgctgaccaagcgattaagccacgttttgaaagtcgcaatatctatgagatgaccagcgaaattgctaaacgtatgggggtgggtgagaaatttaccgaaaatcgtcccaagaagagtggttacgccatctttatgagcaatctcgtcaaaatttaccagaactgcctacctttgaagaatttcgggcacaaggtatctttaaaaaacgtgatccacaaggccatcatgtggcttaccgtgaattccgcgctgatccactcaacaatccactgacaacgccgtcaggaaaaattgaaatttattcttcgcaattagctgaaattaaagcgacatgggaattagcagcagacgatgtgattgatccactgccaatctactccgcaggttttgaaagctatggcgaccctgctatggataaatacccattacaaatgacgggttttcactataaagctcgtacccactcaacttatggcaacgtggatgtattaaaagcggcttgtccacaagaaatttggataaaccctgttgatgctacaaaacgtggtatcaaacacggcgatttagtccgtatttataacgatcgcggtgaagtacgtatcaacgctaaagtgacaccacgcattttgccgggcgttgtgggattaagtgaaggggcttggtataacccagacagtaaccgtattgatcatgcaggttgcattaacgtgttaacgacccaacgcccttcaccacttgctaagggtaatccttctcacagtaatcttgttgaagtcgtcaaggcgtaa

SEQ ID NO: 32994 - DNA, 1272 bp, Proteus mirabilis
atggcgtggaatcagcccggtaacaacggacaagaccgcgacccgtgggggaaccgaaacggcggtaataataacggcgacgggaactctaacggtaatcaaggaggtcgggatcgtaaagcatcagatctcgatgatttgttccggaaactgagtgcaaaacttggcggtttcggtggtaaaaaaggaggaaactcctcttctgggcaaaatggcggacctcgtggtaatgctggaaacgtattagtttctcttgcattaggtgctgtggttgtcgtttgggctgccagtggtttttataccattaaagaagccgaacaaggtgttgtgactcgtttcggtaaattttaccaaatcgtcgagcctggtttaaactggaaaccgactttcattgatgaagttcagcctgtcaacgtaaaaaccatccgtgatttaactacgggtggcatgatgttgacatcagatgaaaacatggttcaagttgagataaacgttcaatatgttgtctcagatccagaagcatttctctttaatgtcacaacgccaatgaatagcctaggacaagcgacagacagtgccgtccgtggtgtcattggtcgttcagaaatggaaaagatcctgacatcgaaccgttcagaaattcgtgatcaaacccgtcaagaattagaagagacgatccgcccttataaaatggggatctccattgtggacgtcaacttccaagttgctcgcccaccagaagcggtaaaagcggcattcgatgacgtaattgcggcacgagaagaagagcagaaaaccattcgtcaggctgaggcttataaaaacgaagtgttaccattagcgaaaggtaacgcacaacgtatgattgaagaagcaaccgcttataaaacgagtgtggtgatgaaagcagaaggtgaggtggcgagtttcgccaaaatcttacctgaatatcgcgcagcaccggaaattactcgtgagcgtctgtatattgaaacaatggaaaaagtgttgtcgaaaacacgtaaagtcattgccaatgacaaaggtaacagtatgttggttctgcctttagagcaaatgttacgccagcaaccaaaagcgccaacgtcatttaatagtgtcacagaggcacctgcgcgtatttcaacccctacgccaagtaccaacacaacacctactcagaaaccagcaacaacttatggtaacggtggatatggtagcaataatagtggtggttatggtcagccttatggctctaatcaaggaggacaa

SEQ ID NO: 32995 - DNA, 1648 bp, Proteus mirabilis
caatttttctatttggtttcacctttttggggggcggcgtaccgccctttactgctggttcctattaattctctctttaacgttaaccctctcatctgtttggtttaacgtcaaaatgaatgaatggaatggcagcttctataacgccctacaacaactcgatgggcaagccttatataaactgcttcaacagtttgtgattattattgccggattaattaccgtagtcgtgatgggtgatttcttacgccaaaaaatgatcattcgctggcgtgaaggtatgacagagcaagtgcttgagcgctggctatcaaaaaatagtaaacactatatgttgcggttaacctcgcaagagccagacaaccccgaccaacgaattgctgaagatattcgtttactgattgaatcgacaatgcgcttaacagtgacctttttacattcactgttaacgcttatctcttttgccactattttatggtcactctctggtgcgctctctttctctttagcaggcaaagagtggaatataccgggttatatgttctgggcctgtattatttatacccttatcgggatcaccatcacccagctcattggttctccattacgtaaaatcaatatggataaacagcgtaaagaggcggattaccgtactgcgcttatcacacgtaaacaacatggtgatgctattgccggtcaacggggtgaaatgagcgatcgtcatgaactgatgggacgctttttaggggtgatccgcaactggaataaccttatccgttatgaaagaaaccttgctttctttactgtgggttatcagcaagccacggcaatggcgccaattatttttgctttgccaaaattcctcgccggcgaattaatgctagggggattaatgcagttacgacaagccttctccagtgttgctggggcattaagctggtttattttctcctataaggaaattgctgcatggcaggcaacggttacccgtctttatcattttgtggtgttgttagagcatgatcaccagcctgagatcaccgagttagatgataaacaaactaagctgacagccaatttatcgctatttatgcaagacgatagattattaattaacaatattcactttgctctcaaagcgggtgaattggcagtaattgaaggtagctcaggtatcgggaaatcaacgctgttacgtgcgttaagcggccactggccttattttaaaggagatattcaacgggtaaccaatatcagttggctcccacaacgtatgtatctgcctgttgcccgattagataacttattggcttatccttgccaagcatctcagttctcacaacaagagtaccaagaagtgcttcattgggtggggctagataaaataaaaaatcagctttcactggaaacagattggacaacacgcttatccggtggtgaacaacaacgtcttatctttgcccgtttattactcaataaacccgatcttattttattagatgaaaccacatccgctcttgatgaacaaaatgccctacatatgttgttattacttaaacagcatctaccaacctcgggcattgtcttagtcagtcatcagcgtttcactcacgctattgccgagcaagtaatttcattacaagcgccg

SEQ ID NO: 32996 - DNA, 2487 bp, Proteus mirabilis
atgaatacacctacaacattatcctcagcaaataggctgagcttacctgtagaaggtatgacatgtgcttcatgtgtcggacgtgttgaacgagcattaaaggcagtacctgaaataaaagatgctgtcgtgaatcttgcaacagaacgtgctgatattacatttagcagtacccccaatcctgtacttgctgtaagcgcgattgaaagctctggctataaagttcctgaagagatcactgaattggctattgaagaaatgacctgcgcttcctgtgtcgggcgtgttgagaaagcattagctcaaattcctggtgtattagaagccaccgtgaatcttgccactgagcgtgctcgtgtgcgtcatttatccggcgtagtatctattactgatttagaagtggcggttgtccatgccggttataaaccacggcgactatcagataatccagccaatactcgtgatttaagtgaagagcgtcgtgaaaaagaagcccgctcgttacgccgagcattacttattgccactatcttcacattaccagtgttcgttattgagatgggctcacattttatccccggagtccatcattgggtaacgcaaacattagggcaacagctcaactggtatattcaatttgttcttgccaccatagtgatgtttggccctggcttacgctttttcaaaaaaggaatacccgcattattacgcggtgctcctgatatgaactcattagtatcagtcggtacagtagccgcttacgggtattctgtcgtttcaacctttataccccaagtcttacctgcaggtacggcaaatatctattttgaggctgctgtcgtgattgttaccttgatcttattagggcgaaatcttgaggcaaaagccaaaggaaatacctcacaagcgattaagcgtttagtgggtcttcaagccaaaacagcacgtgtttcacgtcatggtgaaatactagaaattccattagatcaagttatgatgggcgatatcgttgttgttcgtcctggtgaaaaaatccctgttgatggtgaggttgtagaaggccattcttatgttgatgagagcatgataaccggtgaacccgttcctgtagcaaaagagataggggctgaggttgtcggtggcaccatcaataaaacaggcgcttttagttttaaagtgaccaaagtgggtgccaatacgatactcgcacaaattattcgcttagttgaggaagctcaaggttcaaaattaccaatccaagcgcttgttgataaagttaccatgtggtttgtgcccgcagtaatgataggtgcaacgatcacattctttatttggctcgcatttggtcctgagcctgcactaacctttgcgctcatcaatgctgttgcggtactcattattgcttgtccgtgtgcaatgggattagcgacaccaacatcaattatggttggcacaggacgagctgctgaattaggaatacttttccgtaaaggtgaagctttgcaagccttacgtgatgttagtgtggtcgcactcgacaaaactggtacattgacaaaaggccgccctgagctaactgatctgatcccagcagaaaaatttgaatataacgagatattaagtcttgtcgcttcaattgaaacttattcagaacaccctattgcacaagcaattgttaatgcagcaaacgaggcaaaattaacgcttgctagtgtggataattttgaagctattcctggttttggtgttagtgcaacagttgatggaagatctgtctctgtgggtgccgaccgctttatgaaacagcttgggttagatgtcagtcagttcgcttcatccgctcaaaaattaggtgagcaaggtaaaacaccactgtataccgccattgatggccgtcttgctgcgattattgccgttgcagatccaataaaagaaacaacacctgaagctattaaagcattacatgcattaggtttgaaagtagcaatgatcacaggtgataacaaagcaacagcaaaagcaatagcaaaacaacttggtattgatgaaatagttgcagaagtccttcctgatggaaaagttgcagcattaaaacaacttagtcagaaaggagataaagttgcatttgtcggagatggtatcaatgatgccccagcgcttgcacaagctgatgtaggattggcaattggtacaggaactgacgttgccattgaagctgctgacgtagtactaatgtcaggtgatttacgcggtgttgttgatgcgattgcacttagccaagcaaccattcgtaatatcaaacaaaacttattctgggcatttgcttataacgcattattaatccctgtcgctgcgggcatgctttatcctatcaatggcatgttactttcgcctatattcgctgccgcagcaatggcgctttctagtgtatttgttttaggaaatgcactacgactaaaacgttttcaagcgcccatgaaaacacat

SEQ ID NO: 32997 - DNA, 975 bp, Proteus mirabilis
atggaacctattgcagtaacaatattgactggctttttaggatcgggaaaaacaacgcttttacgccatatgctcaatgaggagcatggctataaaattgcggtgattgaaaatgaatttggtgaagtgcctatcgatgatgaaattattggtgatagagcaacacaaataaaaacactcaccaatggttgtatctgttgtagtaaatctaatgagcttgaagatactttgctcgatctctgcgatagtcttgatcgtggtgacattgtgtttgatcgcctagtgattgagtgtacagggatggctgatccggggcctatcacacaaacatttttttctcatgaagtgatctgccaacgctatttattagatggcattattacactggttgatacaatccatgctcagcaacagttagatcaatttgctattgctcaatctcaaattggttatgcggatcgcattctattaactaaaacagatattcaacctgcgagccaacaattacttgctcgtttaagacgtattaatgctagagcgcctacctatacggtgatcaatgggcaaatagatttagcactattatttaacgtaaaaggctttatgttgaatgatactttagaggtcaagcaacccctgtttcgttttcagccagaaaaacaagatgatattcagtctattgtactaaattttgattatcccgttgagttacaagcagtctctgatgttatggagtctttgttattgagctttgccgataacttattacgttataaagggatattaaatattaaagatagtcctaaccggttgttattccaaggagtgcaacgattatatagcgctgattgggatagaccttggcaagagaatgaaactcgtcaaagcaccttagtctttattggtattcatctgcctgaagaagaaataaaagccagtttcgatgcgttaatgcataacactaaagaatatgag

SEQ ID NO: 32998 - DNA, 807 bp, Proteus mirabilis
atgaaggatataatacagaaaatcaagaaatggatcggtatacagaaaacatcttattacccctatcctgctattgatatttcactccctaatcatgtctctttacatcttgttggtagtatccatatgggcgtgccaacgatgtcaccattatccaatgtgctgattaataaaatagcaacagcggatgcggttattgtcgaagcggatatttcaaccgaaactcagccctttgatcagctatcgttattgcgagagccattagaaaagcgagtaaatgaaacacaacttgccactatcatcagccattgtgatcttctttctattccacgttaccaaattgatgataaaccactgtggcaaatcgcgctgatattacaatcaacccaagcgatgcaacttggattacaaccacagcacggcattgattatcaagttatccaacaagccaataaacaacaaaaagcgattatagagctagaaggtattgagcgtcaggtcgcattattattagattttccacaagacggcgcacaattactcgaagatacgctaaaaaattggcatgaaaatgcacgggcattgcaaattatgatcaattggtggttaaattataccagtgaaaagcacccttctcctttgccaaatacttttagcaaagcggtatttgatattttaatggaaaagcgcaatcaagtctgggcaacaacgctttctaatcttccagcaggccactatgttgtcaccgtcggtgctcttcacttatttggtgaagataatttagttgatcgattaacttatcaagca

SEQ ID NO: 32999 - DNA, 861 bp, Proteus mirabilis
atgatccgtagtatgaccgctttcgctcgtcgagatatcaaaaaagagtggggtagcgccgcatgggaactgcgttccgttaatcaacgttaccttgaaacatatatccgtttacctgagcaattacgtagtttagagcctgttattcgtgaacgtctacgtaatcgcttaacacgcggtaaaatagaatgtaacttgcgttttgaactcaatgctcactcacaaggtgaactgactttggatgaaaatttagcaaggcaactgattgtttctgctaactgggtaaaaagccaaagtcatgaaggtactatcagcccatttgatattttacgttggcctggggttatctcagcccaagagcaagatttagatgccattggtagcgaactattagcagagcttgatgtagctatcgatgcctttattgcaagtcgagaagctgaaggccaagcactcaaaacgctgattgagcaacgtttagatgccgtaagtgctgaggtcgtaaaagtaagagcacagatgccagaaattctccaatggcaacgtgagcgcttaaccagcaaattagaagaagcacaagttcaagttgataataatcgtttagagcaagaattagtgatgttagcgcaacgcttagatgtcgctgaagagcttgatagattagatgcccacgttaaagaaacacgcaaaattctcagtaaaaaagaggctgtcggccgtcgccttgattttatgatgcaggagtttaaccgtgaatccaatacactagcatccaaatcaattaatacggatgtcaccaattccgctattgaattaaaagtattaattgaacagatgcgagagcagatccagaatattgag

SEQ ID NO: 33000 - DNA, 1428 bp, Proteus mirabilis
ttgtcaaattcagctaacacccccactttctatatccatgactacgagacctttggtacgcatcctgcgatggatcgccctgcgcaatttgccggtgtcagaacagatatggattttaatatcattgaagatcctctggtcatttattgcaaaccgaatgatgattacttacctcagccagaagccgtcatgataacggggatcacaccacaaatagcactaaagaatggtgtatcagaagctgaatttactcgccaaattcatcaagcctttagccagcctaatagttgtattatgggttataacaatttacgctttgatgatgaagtcaccagaaatatcttatatcgtaatttttatgatccctatgcctatagttggcaaaaaggaaattcacgttgggatttacttgatgttttacgtgcatgttatgcattgcgtcctgagggaattaattggcctgagaatgatgatggctttccgagttttcgccttgagctattaactaaagcaaatgggatctcccacgaaaatgcgcatgatgccatgtcagacgtttatgcaactattgctatggcaaaaaaactcaaacaagcgcaacctcgtatgtttgattatttctttaatttacgtgataaacgtaaagtacaagcattgattgatatcccaaccatgacgccgcttgtgcatgtctctggtatgtttggtgcagcgcgttctaatttaagccttatagctcctttagcttggcatccagataatcgtaatgcggtaattgtttgtgatttagctgcggatatttctcctttattaaccctcacttcagagcaattgcgtgagcgcttatatactcctcgcagtgagttatctgccgatgagccaccagttccgataaaattactgcatattaataaatgccctatcgttgcacctaaaaataccctcagatctcaagatgccgatagaattgggttagatattgataattgtttaaataaccaagcaatattgctgtctaatcctgagatccgcaataaagtcgtcgagatttttgctcagcaaacaccatttacccctgcagatgatgttgatgctcaattatacaatggcttttttagcgataatgatcgtagcgcgatggaaattattcgctcaacacagccacaaaacttaccagcacttaatttaacttttgaagatccacgtatggagccgctgtttttccgttaccgtgcgagaaacttcccagccacattaacttatgatgaacaacaacgttggttagcgcatagaaaagagcaattaacgccagaaaagctgactgaatatatcaatactattcagctgttagcagaagaacatagcgataacgaagaaaagctaaaacaactgcaagagctatatttatatgctcaagaaattgcgagt

SEQ ID NO: 33001 - DNA, 2017 bp, Proteus mirabilis
atgcgcaaaaaagaaacaatgtctctttaccctcttttgttaacgactttttgacatagtattaacaacagtaaggagaacaattatgacaaaaataaaccaacatcacattcctgcaaacattgcagagcacgccctgattaataaagagcaataccaaaaagattatgcattatccatcgaaaaccctgaggccttttgggcagataaagggaaaattgttgattggataacctcctatactattgtgaaaaatacctcctttgatccaggccatgtccgtattcgctggtttgaagatgggcaacttaacattagccaaaactgtcttgatcgccatttagaaaaacgcgcggatcaagttgctattatttgggaaggtgattcccctaatgaatcgaaaagcattacctatcgccaacttcatcaagatgtttgtcaattcgccaatgtattaaaaaaactgggtatcaaaaaaggcgatgtggtggctatttatatgccaatggttcctgaagcggctgttgcgatgttggcttgtactcgtattggggctattcattctgttatttttggtggtttctcaccagaagcagtggcagggcgcattattgactctaaagcaaaattagtgatcactgcagatgaaggcttacgtgctggtagagcaatccccttaaagaaaaatgttgatgatgccctcactcatgtggatatcccgcctattgaacatgttgtggtcttacgtcgaacagggcaaacagaacaatggattgaaggacgcgatttatggtgggatgaaattgttcaaggcgtcagtacagaatgtgatgtggaagtcatgaacgcagaagatccactctttattctctacacatcaggctctacggggaaacccaaaggcgtattgcacaccactggcggttatcttgtttatgcctcaatgacctttaaatacacctttgactatcatgatggtgagatttattggtgtacagcggatgtcggttgggtaactggccatagctacttgttatatggcccgctatcaaatggtgccacaacagtgatgtttgagggcgtccccaattacccctccgtcaatcgtatggcccagattgttgataaacaccaagttaatattctctataccgcacctactgcgatccgcgcattaatggcggaaggagacaaagccattgaaggtacacaacgaacctctttacgcattttaggctcagtaggagagcctattaacccagaagcttgggaatggttttatcaaaaaatgggacgtagccaatgccctattgttgatacatggtggcaaacagaaacaggaggcttcatgataaccccattgccaggagcaatggatctaaaaccaggctcagcgactcgtccattctttggtgtacaacctgcgattgttgacaatatgggggaaatacaagacggtgcttgtgaaggtaatttggtgatcgtagattcatggccgggccaagcaagaacattatttggcgatcatgaccgttttgaacagacttacttttcgacctttaaaggcatgtacttttcaggtgacggtgcccgtcgtgatgaggacggtgattattggataacaggccgtgttgatgatgttttaaatatctctggtcaccgtttaggtactgctgaaattgaatccgcacttgtcgcccatcctaaaattgcagaagcggctgttgttggtattccccataatataaaaggacaagctatttatgcttatgtcacgctaaatcatggtgaagacgctacggcagagctttatacagaagtgcgcaattgggtacgtaaagagataggcccaatagcaacacctgatatccttcattggacagatgccttacctaaaacacgctctgggaaaattatgcgtcgtatcttgcgtaaaattgcctctggcgacacaactaaccttggagatacctcaacactcgccgatccaggcgttgtagaaaaactgttagaagaa

SEQ ID NO: 33002 - DNA, 1605 bp, Proteus mirabilis
atgagaagctccaaaaaacagacagggttgctaaccgctacaatcggcttactcgctttggctatttcagcgggtgtgcaagcgaaaacattagtgtactgttcagaaggctcaccggaaggatttaacccccaactatttacctcaggtacgacttatgacgcaagctcagtaccgctttatgatcgcttagttgagtttaaactcggcaccactgaaattactcccggcttagctgaaagttgggaagtgagcgatgatggtaaggtgtatactttccatttacgtaaaggggttagttggcatagcaacaaagagtttaagcccactcgtgaatttaacgcagatgatgtgatatatacatttatgcgtcaaatggatccaaatcatccttatcataaagtctctggtggaagttatgaatatttcactgggatggatatgaataatatgatcgagaagatcgaaaaagtggatgacaatacggttcgctttgtacttacccgttcagaagcgcctttcttggctgatatggcaatggacttcgcatctattctttctgccgagtatgcagataatatgatgaaagcagggactcctgagaaagtggatctcaatcctattggtacgggacctttccaactgcaacaatatcaaaaagactcacgtattctttataaagcaaatgataaatattgggggaaaaaacctgatatagatcgtttagttttctctattacgccagatgcctcagttcgttatgccaaattacaaaagaacgaatgtcaggcaatgccttacccaaatcctgctgatatcgccaagatgaaacaaaataaagatatccagctactggaacaacccggattaaacgtggggtatatctcttttaatgtggagaaaaaaccgctcgataaccaaaaagtacgccaagcattaagtatggcggtgaataaagacgccattattgaagctgtctatcaaggcgcaggccagaaagcgaagaatcttattccaccgacaatgtggggttataacgatgacatcgtcgattatgaatataacccggaaaaagccaaagcactgttaaaagaagccggccttgcagatggctttactatcgatttatgggcgatgccagtgcaacgaccatataaccctaatgcccgccgtatggctgaaatggtacaagctgactgggaaaaaattggtgtgaaaaccaagatcgttagttatgagtggggtgaatatctgaaacgtgctaaatcaggtgaacaccaagcagtaatgatgggctggacgggagataacggtgatcctgataacttttttgccacactgtttagttgcgctgcgaaagagcaaggctctaactactcgaaatggtgttataagccgtttgaagatctgatccagcctgcgcggatcacggcagatcacgataagcgtgttgagttatataagcaagctcaagtggtgatgcatgaccaagcgccagcattgattattgctcactccacggtatatgaaccaatcagtaaaaaagtagagaactatgtggtcgacccattaggtaaacaccactttaataatgtctctctaaaa

SEQ ID NO: 33003 - DNA, 2016 bp, Proteus mirabilis
atggcacactattcttatttatttactccccttgatttagggtttactacgcttaaaaatcgtattttgatgggctctatgcataccggactagaagaagatccacatgatgcacctaagcttgctgaattttatgctcaaagagctgcagcaggggtggcacttattgtcaccggtgagatctcccctaataagcaaggtgtattgttgccacatgcagcaacgctaatgtcagaagatcaactcgcttctcatcaattagtcactgatgcggtacataaacaggatgggaaaatcgctttacagattttacatactggtcgttatagttatcagcctaatttagtcgccccttcagcgatccaatcgcctatcaccccttttatgccccaagcaatgagtcatgagcagatagaacagactattgaagattatattcattgcgctaagttggctcagaaagcaggctatgatggtgttgagatcatgggatctgaaggctatttaattaaccagtttttagtaagtcatacgaatcaacgcgatgatcaatggggtggctctattgaaaatcgttgtcgttttgcattacgtattttagctggcataagagaagctgtaggtgaacactttatcattatctatcgtttatcaatgttagatttaattaccgagggagctaatgcctcagaggtattttatcttgctcaagcagtagaaaaggccggagcaaccctaatcaacagtggtattggttggcatgaagcccgtatccccactattgccactatggtaccaagagggcaatttgcttatgtcactcgccaattgatggggaaaatcaatattcctcttatcacttctaatcgtatcaatacacctcaagtggctgaagctattttagcggaaggctgtgcagatatggtgtctatggcccgtccttttcttgccgatccgcaattcgtattgaaagcgcaacttggtcgcgaggatgagataaacacctgtattgcctgcaaccaagcttgcttagatgagatattcagtggtcacccagcatcttgtcttgtaaacccttttgcctgtcgagaaacagagcttattttaaccccgactcaagcccctaaaaaaattgctgtcgttggcgcaggcccggcaggattagcatttgccattacagcagctaaacgtggtcatcatattactttatttgaaaaagaagaccgtattggtggacaactcaatattgccagtcaaattccgggtaaagaagaatttaaagagacattgcgctactttaagcggcaattgcaaatcacaggggtgatcgtaaaaaataatacggaagcgacactttcccatctgcaacattttgatgaaattattttagccagtggtgttatccctcatattccagagattgatggccatgataatccgatagtaaaaacctatcttgatgtccttaaataccatcaaccaaccggcgaaaaagtggtgattattggcagtggtggtattggttttgacactggcctttatcttacccaaacaggccaatgcagtagtttaagcccttgtgcatttaataaagagtggggaattgacccaacacttacgcatcgcggagggatcacctcagcccatccttttattaaaaaagacaaacagattgttatgacgcaacgtaaaagtgggaaatttggcttaagtttaggcaaaacaacaggctggatacatcgcttaacattgcagaaaaaaggggtcaaatggctaacgggctgccattatcaaaaaattaccgagcaaggggtaataattgaacataatgaacaacagcaactgctcgcggctgatagcgtgattttatgtaccgggcaacaatcttatcgtccgctactgcaagcgttacaacaagaaaataaaaccgtccatcttattggcggggcaaaagaggctaaagcattagatgccaaacgagccattaagcagggaacagaattagcacttactatt

SEQ ID NO: 33004 - DNA, 1206 bp, Proteus mirabilis
atgaaacgtctacaagcctttaaattccagttaagacctaatggtcagcaagagcgtgagatgagacgctttgcaggggcttgtcgttttgttttcaatcgggcattagcacgtcagaatgaaaaccacgaagcagggaataaatacattccctatacaaaaatggcttcatggctcattgagtggaaatctgacacagagacacaatggttgaaggaagccccatcacaaccgttacaacagtcacttaaagatttggaacgggcttacaagaattttttccagaagcgtaccgcttttcctcgattcaagaaacgcagtaaaaatgatgcttttcgctacccgcagggcgtgaagctcgatcaatccaatagtcgtatatcattgccaaagttgggatggatgcgctaccgcaacagtcgtgaagtcgtcggagaagtgagaaacgtcacggtcagtcagtcatgcggtaaatggtacgtcagcattcagactgagtatgaagcgacagaaccacaacatgaatcaacctcaatagtcgggcttgatgcaggcgttacaaagctggccacgctttcagacggtacggtatacccgcccgtcagcagttttaaagtaaaccagcgaaagctggcaaggcttcaacggaaattaagccgtaaaatcacattcagtgccaacgggcaaaaacaaaagcgcaaaattcaacgtctgcattctcatattgccaatatcaggaaagactaccttcataaagtcaccagcgaaatcagcaaaaaccacgcaatgattgtcattgaggacttaaaggtcagtaacatgtctaaatcggcaaaaggtacgacagaacggcatggacggaacgtaaaagctaaatctggtttaaaccgctcaatactggagcagggctggtatgaaatgcgccgtcagcttgagtacaagcagctctggcgaggtggtcaggtactggcaataccaccagcctacaccagtcagaagtgcgcttgctgtggtcatacagcaaaggaaaaccgccagtcacaaagtcaattcgagtgccttgaatgtggatatacagcgaatgctgatatcaacggggcacgtaacattttagcggcaggacatgccgtgcttgcctgtggagggagggtgcagtcagaccgcccgtcgaagcaggaacccgccgaggtgattcagagatcagtc

SEQ ID NO: 33005 - DNA, 1015 bp, Proteus mirabilis
atgggtcctgtaatgcttgatgttgaaggatatgagctcgataacgaggagcgtgaaattttaaagcatccccttgttggtggtttgatcctctttacccgcaacttccacgacgctgagcagttaaatgaattagtgcgccaaatccgtgatgcttcccatgagcgtttagtgattgccgttgaccaagaaggaggacgagtacagcgctttcgtgatggttttactcgcttaccctgctgcgcaatcttatgctgcgcttaatgagcgctatcaagctagtcgcttagcacaagaggctggttggttaatggcatcagaaatgatcgcaatggatattgatattagctttgctcctgtcctagatcttggtcatgactgtattgctatcggtgagcgctctttccatgagtgtccagaaatcgctatggatatggcggaaagctttattaaaggaatgcgctctgcaggtatgaaatcaacaggtaagcatttccctggtcatggtgccgtcagagccgattcccataaagaaacgccacgtgatgagcgctctttaaacgatattcgtcaacgtgatatggctatctttaaagattttatccaacgtcaattattagatgccattatgccagctcatgttatttattctcagattgatgagcgtccagcaagtggctctccttattggttgaaatcaattttacgtgaacaactcggtttccaaggcgttattttctctgatgatttatctatggaaggtgccgctattatgggaagttatgcgcagagagcacaacgttcattagatgcgggttgtgatatgcttttagtgtgtaataaccgtaaaggggcggtaagtgtgttagataacctgtcctttgtcaaagcagaacgcatttcggcgttgtaccatcaccgaggtcgttacacattaagtgaactgcaagcatctgatcgttggaaaaaagcgaatcaaatgctgacccaattacaggagcaatggcaggagcgc

SEQ ID NO: 33006 - DNA, 1308 bp, Proteus mirabilis
gtgtattttgaaatgagtaataacgttgtcgtattaggcacccaatggggtgacgaaggcaaaggcaagatcgtcgacttgctgacagaacgtgctaagtatgttgttcgttaccaaggcggacataacgcaggtcacaccctagtcattgacggtgaaaaaaccgttctccacttaatcccatcaggcattcttcgtgaaaatgttgtcagcatcatcgcaaacggtgtcgtattatcgccagaagcactgatgaaagaaatgacacagctcgaagagcgtggtattcctgttcgttcacgtctactgctgtcagaagcttgcccattaattctgccttatcacattgcattagataacgcccgtgaaaaggcgcgtggtgagaaagcgattggtactacgggtcgtggtattggtcctgcttatgaagataaagtcgcacgccgtggtttacgtgttggtgatctatttgataaaaaagcattcgctcagaagcttaaagagatcatcgaataccataatttccaactggttaattattacaaagttgagcctgttgattaccaaaaaaccttagacgatatcatggcgatcgctgatatcttaactgggatggttgttgacgtttctgacttactttacaaagcaacacaaaaaggtgagttagtgatgtttgaaggggcgcaaggtactctattagatatcgatcacggtacttatccgtatgtcacctcttcaaataccaccgcaggtggtgttgcaacaggttccggcttaggtcctcgttatgttggttatgtattaggtatcattaaagcctattctacccgtgttggtgcaggtccattccctacagaattatttgacgaaacgggcgatttcctacgtgaaaaaggccaagagttcggtgcaacaacaggtcgtagtcgccgtactggttggttagatattattgctatccgccgtgctgttcaaatcaactcattgtcaggcttctgcatgaccaaacttgatgtcttagatggtctgaaagaagttaaagtgtgtgtaggttatcgcttaccaaatggcgaagtgattgaaactacaccattagcagcagatgattgggaaggtattgagcctatttatgaatctatgcctggctggaacgaaagcactttcggcgttaaagataaagcacagttaccacaagctgcgttaaattatattaaacgcgttgaagagttaactggtgtgcctgttgatattgtttctacaggtccagatcgttcagaaacgattattctccgtcatccatttgatgca

SEQ ID NO: 33007 - DNA, 459 bp, Proteus mirabilis
atgaaacactggaaactttacattgtcgttgtgatggtggggattgttgctggtggttgcgcgctgattaatgcacaagcgaaaagaattaacacactgacagaaaacaacaaagaactgactaccgcactcgaagagcagaaggatatcaatattgactatcaagcacgcatagagcgactaaatcaacttgatacaaggcacacacaggagcttgttaatgcaaagaatgaaattagtcgcttgcgtgatattagtgagcgtaatcctgacagggtgtacatcaaagccgagtgtccaaaaagcaccaccacttccaccgccagcatggatgatgcaaccaccgcccgacctactgacaccgctatccgaaattattggttactcagagagcgaattgcagaatcagaacagataattaaagggttgcaggattatatcaaacaagaatgcatggaa

SEQ ID NO: 33008 - DNA, 1233 bp, Proteus mirabilis
atggccctaaaagaagatgtttctatcaacaccacttctaaaccaaacagtccgaaacactatatccagcgtgatgacgcgctttatataaaagtgacagtgtcattttttatggttggtttagccacttttgcattactctactttgtgcaacctatcttacctatcctatcaaaagaattttcagtcaccccagcaaccagtagtcttgctttatcgctttctacaggtcttatggcttgtggtctattgattacagggcctctttctgatgcgtttggtcgaaaaaatgtgatggttattgcgctattttgtgcggcttttttcacactattaagtgccatgatgaatagctggacgggaattttaattacacgagcactcgtagggctatcacttagtggtgttgcagccgttgcgatgacctaccttagcgaagagatccatcctgcttatctagccttatcgatggggctttatattagcggtaactctattggtggtatgagtggccgtgttattactggtgttttgagtgattattactcttggcgtgtgtctgtgattattttaggtatttttgcccttgttgctgctatcattttttggcgaatattgccgacatcacaacattttaggccagcaaccttaaaaccacgtaatcttcttatcacaactaaattgcattttagagataaaggactccctcttctttttattgaaggtggcttgttaatgggagggtttgtaactttatttaattatattggttatcgcctattagatgcaccttattcattaactcaaacaaccgttggtttaatttcaattgtttatttgagtggaacttatagtgcatcgaaagcaggcttattaaccaataaatatggattaggtaaagtgtttattgccggtgtttctatgatgctagcgggtatattaattacactatttgactctctagcaattatttttataggtatgcttattttaactacaggtttttttgctgcccatgcggtagcaagtagttgggttggacgtcgagctaaacgaggacgtgcgcaggcctcttccctttatctatttacctattatgcaggctcgagtattgcgggaacactaggtgggatcttctgggtcaattttggttggcttggtgttggtttgtttattgcttttttaatgttaaccgcactattaatcgcactgcgccttaatcaaatagcacaa

SEQ ID NO: 33009 - DNA, 942 bp, Proteus mirabilis
atggaattaaaggattattacgccattatgggggtaaaaccctctgatgacatgaaaacaattaaaactgcttatcgccgtttagcgaaaaaatatcacccagatgtaagtaaagagccagatgctgaggagcgttttaaagaaatagcgcaagcttgggaaattcttggtgatgaacagcgtagagctgaatatgacgaactttgggctcaccgcaatgatccgaaatttaaacaatttacacagcacaacaattcacattcaaaccaacaaagttttagtcaggaagattttgacgatctttatgcttctttctttggtcaaggttcaccttttgaagggcgccattcacgtcaagcacctagacaacgtggacaagatctagaaattgaattaccggtttttcttgaagaagcacaagaagagcataagcgtaccattagctatcatttaccggtttataatgtctttggcatgatagagaaagaaattcctaagaccttgaatgtcaaaattcctgccggtgttgttgatggacaacgtattcgtttaaaaggccaaggtactgctggggagaatggcggagaaaatggtgatttatggctaactatccgtattgcacctcatccattatttgatgtaaaagggcatgatcttgaaattgtggttcctattgcaccttgggaagccgcattaggtactaaaattgctattcctacacttaaagataaaattttacttactattcctcccgctagtcaggcaggtcaacgcctgagaattaaaggaaaaggcttagtaagcaagcaaaaaagtggtgatctctatgccattttgaaagtcgtcatgccacctaaagtggatgaaaaaacacattcattatggcaacaactcgccgaagcccaagccgattataatccacgcaaaaactgggagaataaa

SEQ ID NO: 33010 - DNA, 978 bp, Proteus mirabilis
atgaaattaaatgatgaattaactaattctatcgcatcagtcacagaagctgctgctattgcggctatgccatgggtaggtaaacaagataaaaatgcggcagatgctgccgcagttgccgccatgcgagagcgccttaatagccttaatatcaatggccaaattgttattggtgaaggtgaaattgatgaagcacctatgctctatattggcgaaccagtaggcaacggccaaggtgaaaaaatagaaattgccgttgatcctatcgatggaactcgcatggtcgctaccggtgaaaataattctttggctattttagctgcaggttttgaaggtagttttttacaagcacccgatatgtacatggaaaaactggttgtcggtaaaaaagcagcaggtgtgatcgaccttaaccattgccttgaatataaccttgatgctattgcacaaacattaaataaatcattaagccagttaacactagcgattttagataaaccacgccatcacgatattatcattgatttgcgtaatagaggtattaatgtcatcactttgccggatggcgatgtgcttgcttctttatatgccacaatgcctaataatcctattgatgttatgtacgggattggtggtgcgccagaaggtgtaattagtgccgctattgctaaagctttaggtggtgatatgcaagcacgccttattacccgcgatattgctaaaggtaataatgcaacaaatagagaaattgcagcacaagaaatctctcgatgccataacatgggaactgatgttaatattacattgccacttgaaatattggtgcgccatcaggatgttatgtttgcagcaaccgcaattactgccggtgacctattatccggtgtcactgaacaaagcgattatttgcgtacacactcgttagtgattaatggctccacacactcattacgttatatcgaaaactatcatttacgc

SEQ ID NO: 33011 - DNA, 2796 bp, Proteus mirabilis
atgtatcgtaagttactgattatctcagtcagtttatcacttctgggttgtgcaacaggcacctcgtctgagcataccaataataccctttcactgcgccccgatattcgccattttacgcttgataatggcttaaatgtctatttgctacaacgcccacaaacgggggttgaaatgcgtttactggtgaaaagtggctcggtacaagaagatgaaaaacaacttggctttgcccactttaccgagcatatggcctttaaaggcacgactcattttccgggaacaactgggtttaaacagcttgaaagcctaggaatgaagttggggagtcatgttaatgcggcaacgagcttaaactcaacaacctataaattatccctgcctaatgccaatccgacccaaataaaaacagggttgaggatcttatccgattgggcctttggcatgacatttgatcccgttgagtttgataaagagcgtccggtgatcgtcgaggagtggcgattacgccaaggtattggttttcgtattaatcgccaacttgaagagttacgttattatggcagtcgttatctagatcgtgatcccattggggacttagatatcgttaagcatggtgatgtcaaagaagcaaaacgttattacgatacttggtatcagcctgaaagaatggcattggtgttagtgggcaattttaatcaaggcgatgcgattgctgatattacccaaatgttcaatgcaaaaaatagtgaaaacaaaggcgttgactctccatcatggcaccactttatcgacaataaagatttattagtaaagacgatttttgataaagagcaaggctcacgcattgtgcaattcactctacagcgtacactgcctgcaccattaaatagtcgccaaggtcaatatgatgatttaatggactcgttgtggctctccatcttaaaccagcgcttttcaaccattgttgataatgggttagtgccttccgtcagtgccaatacacaaggtgcgatgttagatgcccgtcgctcacaacaattgatgattgcccatcctaaaggggatgattatcaaggtacattagatattctatttactgaggtacagcgtttagcctcacaaccagtatctcagcaagagttagataatgcccgcaatgcgctgttaaaacgtcttagccaacaagctgctggtgaagagcgctatgagcatggttatttagctaaccaaattactacggcacttgaattagaaatgccaatccaaagcaaaaagcaggcgttaaacttaagttatcaactaataaataacgttacacctgataccttaaaacactattttgcccaatacctaacacaagcttcaccacgagtggcaattatcggcccagatagtgatagtcaggtatttagtgccactaaagcctcgcaacgctggcaagagattagacaatctgatcccggtgcgtttacattgaaaacccatgcggtggtattagatattaaacctgagcaaaccggtactattgtcaccacacaaacacttccgattgaaaaaacacagctgtggacactgagcaataacgtaaaagttattattaaaaatgaccagtggctaaaagacaatatccaagtatcactgcgtattcccggaggtgtttctctggaaacaggacaaagtttaggcttggttcagtgggcattaaacttaccagaagtgagtggatatgggcattacaacgcaagagagttagcgttatttagtaaacagcatcaaatcagtttgcgtccatacagtgagttgttattccacggcttgcgtggcgaagcgcctattgatgagttagacaccttgttggccttattgcatttaaaagtgacagcaccacaatttaatgggcaaaaattagagcaacaaaaacaagcaacggcattagggatcgccaaaacaccagttgaacgtattttcttagatcatattaataaagagagctatcaaaacggcgagcgcttagtgatttcgccacaaggcccttggcaacagtttaccgcccaacaattacaacaaacgaatcaatcacttctaggacagcctgccgatatggtattggtgattagtgggcctattaacctaaatcaggtcaaaccgatgatcgaacgttggatagcaacgctaccgacacgttcatcgcaacgtctattttgggctgatccggcgattaatcccaaattaagctcatttaataaaacctaccctattgccagtagcgataagagtatgatcagtattcaatacgcagccaaagcccaatggtcacaacagcaactgttagcacttaacttgcttgataccgttgtcagccaacgtttaaggcttaatcttcgtgaacgagcgggcgggatctactcgctaggcttttctgagtcattaaccaagctaccaagtagtttttataccggacgtttaaactttaccgcatcaccacagcgggcagatgaattaattgcacttgcgcgtaaagtggtcaatgacgtaaaacaagcgggtattaccgataaagaattacaagaggcaaaaaatatttggttaactgaatatgggcaagccaaagagagtgctagctattggactgatgcacttgctcaagtggcaacagatgaccaacaatatcaacgactattaactgagactgcgattgtcaacggaataagtgtcagtgatgttaatcaagttgctcgtcagtggttgggtgaaaatgaaaaaatcttcaaactaacaccgccaacaaagcaa

SEQ ID NO: 33012 - DNA, 828 bp, Proteus mirabilis
atgcgtttcttaaacacttttgcactgttgctaagcctgatattgacaccttgttatgttatcgcagccactcccgcacaacgtgttattactttatccccgtctgccacggaaatggcttatgccgcaggcatgggagagaatatggttgcggcgagcgcttattctgattatccacaagcagcaaaagatctcgtacaagttgccgactggcaaggcattaatgtagaacgcattttgctattaaaacctgatttaattattgcatggccaagcggtaatcctcaacgaccgctcgatcagttaaaatcattgggtatccctattatttactctgatccacacagtatcgaagaaatcattgacgatcttacccgactttcttcttatagcactcatcctgaagtcgctttagcaagtgcacaaaaattacgtcagcaatatcaagaattacagcaaaagtacgcctcaacgacgcctcatcaagcgaagaaaaaagtctttattcagtttggtatgcaacccctatttacgacatcaaaacattcattacaaaatgagattaccgaactttgtggcggcgaaaatatttttgcgaatagtgcagttccttggccacaagtcagccgcgagcaagtgatcagtaaaaaacctgatttgattttatttagtggtaaaccaaaccaaattgccgcaatacaacaattttggcaacctcaactagatattcctattatcgctattgatgaagatagttttagccgaccagcaccacttattatttatgcggctcaacagatttgtgaggctattaaagataataataag

SEQ ID NO: 33013 - DNA, 330 bp, Proteus mirabilis
atgaaacgtatcattattcccacaaactatattcatatacgaacaacgcctttttggacaagggagacagcccctaaatcaatctgggagagacatttagacaaaggcacccagcaaggggtataccctagattatccgtgatgcaaggcactattatttattatgcctatgccgatcaatatagcccaaagcctaccgaaaccttagtgattaaggagggtgagtttggtgtatttccaccagaaacttggcacagaattgaagcacaaactgaagacaccgtgtttaataccgacttttatgttgaccccaaaatacttgctgaaggt

SEQ ID NO: 33014 - DNA, 435 bp, Proteus mirabilis
atgctgcaagaagtaatgcaattttttagccggcacaccctgttaagttttatctggattgcgctgctggtggcggtcattgtattgacctttaaaggccttttttctaaaacgaaaaatatttcccgtacagaagcgatttctttgataaacaaagagaatgcggtttgtgttgatatccgtagccgtgatgagttccgtaaaggacacatcatcgattctatcaatttaacgccttctgagatcaaaagtaacaatattgctgagctggagaaatataaatcacagccggtgattgtggtatcaccatcaggtattgagggtgcaaaacctgctgaaagccttatcaaattaggttttgaaaaagtctttattttaaaagatggtctttcaggttggagtggtgagaatttaccactggcaaaaggtaaaaag

SEQ ID NO: 33015 - DNA, 939 bp, Proteus mirabilis
atgagacgtcgagtcgctaccattacattaaatcctgcttatgatcttgtgggattaagtacccctattgaattgggtgaagttaaccgagtgacaacagcgggatttcatgctgccggtaaaggtatcaatgtagccaaagtattaaaaagccttggtattgatgtcactgttggcggttttttaggtaaagagaatcaagatggctttcaaaaagagtttagtgaagccgggattgctaatcgcttccaaatggttgaaggtcgcacacgtatcaatgtcaaactcactgaacccagcggtaaagtaactgattttaacttttcagggtttgaaatcactaaacaagattggactcgttttgtaaatgacacactcagctgggcgggtcaatttgatatgatttgtgtcagtggaagtgtaccaccaagtattgatttaaatgattttactgcttggatgaagcgactacgtagcgaatgtatgtgccttatttttgatagtagcagagaagcatttgtcgcggggttaaaagcgttaccttggttagtaaaacccaatcatcatgaactagaaatttgggcaggtagacccttacctgagctctctgacgtggtacaagctgcccatgaattacgccagcaaggtattgctcatgttgttatctcgttaggtgaacaaggcgctatgtgggttaacgcctctggtgcgtggatggcaaaaccgcctaaatgtgatgtggtcagcacggtaggtgccggtgactctatggtgggtgggttgatttatggtttgatgatgaggcaaaccagtgaacataccttacgtcttgctacagcaatttcagctcttgccgtcagtcaaactaatgttggaataactgatcgtgaacaattggcaagaatgatgaccgaagttgaattaacgccactaaaaatc

SEQ ID NO: 33016 - DNA, 294 bp, Proteus mirabilis
atggcagacgcaattaatcgttgtaatgcagaagaaacagctgcttgttgttgtgttgatgttggtactattatcgacaacaaaaattgtaccgcatcttatcagcacgtttttgccgataaggctcaagctgaagcgatgttaaatgagctaacagctaaagctaatgccactgcatctgaaccttgccaaattaaacatcaatttgctgatgttgaaggtggcgttcaattaaccgctgattttactttctcttgtgaagcagaaaatctgatcttccaattaggattacgt

SEQ ID NO: 33017 - DNA, 459 bp, Proteus mirabilis
atgtcgattagtattgatatagctaatgcctctgaagcaaaagaacttacaacaatcgctctggaatctaagcaatactggggatacagttctgactttattgagatgtgccgtgatgaactcacattgaaagaagccgattttgttaactctttaattttggtcgcaaaaaataatgaaaaatattgtggttttgttcaactcaagtttaatgataacgcaggacaaggggagctagaaaagctatttgtcgccccctcttttattggccaagggattggtaaaaccttgtatgaacgagctgtggaacatgcacgaaagatgaatgtaaaagagctagtacttgatgcagatcctaatgctgaaaatttttataaaaaaatgggcgcaataacgatgtacaatacaccttcagagtcaatccctggacgatttataccaaaaatgaaaataacatta

SEQ ID NO: 33018 - DNA, 933 bp, Proteus mirabilis
atgcgaaatcgcacgctaagtgatttagatcgtgttgtagcccttggtggaggtcatggccttggacgtgtgctttcagcactctcctatttaggaactcgccttacggggattgtcacgacaacagataatggtggctccacgggacgtattcgtaaagacgaaggcggtatcgcgtggggagatatgcgcaattgtattaatcaattaatcacagagccttccgttgcttctgcgatgtttgaataccgtttctcaggcacaggagagcttgctggacacaacttaggtaatcttatgctaaaggccttagataacttaagcgttcgtccattagaagcaattaatcttatccgcggtctacttagagtcaatgctcatcttattcctatgtcagaacaagcggttgatttaatggccattgatgatgaaggaaatgaaatatatggcgaggtcaatgtagataatttaccgaggatgcctcgtcaattaaaactctatccagacgtcaccaccacacgagaagccattgaagccattgagcaagctgatttaattttaattggcccgggcagtttttttaccagtttgatgcctttattgttgctacctgatttagctaaagcattacgtcgtagcagtgccactactatttatattggtaatttaggtaaagagcttagccctgcggctgcaagtatgacgatgtcagataaaatcgccatgatggaaacctatattggcttacaaactattgatgccgtgattattagtccagaaacacaatatgaatcaatgaaaggacgattgattgttcaagcgcaattagaggcgaaagatattccttaccgtcatgataggcacctattaagtaaagctattgaattaacacttcagcaattaggtcaacgtaataccgcttgtacagcgagt

SEQ ID NO: 33019 - DNA, 825 bp, Proteus mirabilis
atgtattgggtaaatggacaacagcaacaaagcatcaatgtgagtgatcgcgcggtacaatttggtgatggctgttttacaacacttgccgttgaacaaggtaaacctattctattatctgctcaccttaagcgtttacaacgcggttgtgatgcactgtttttgccctcaccagactggcaatggttggccagccatcttctacaaatagcgtccacaatcactgaaaaaagtgttattaaggtgattattagccgcggaagtggtgggcgaggctattcatcgaaaggctttgacacacccacagtgatcacatcctgctcaacttacccgttttattatcatgacttacaaaagcaaggggtttctttagccattagcccagtgagattgggacaaaatagtttattagccggtatcaagcatcttaatcgcttagagcaagtgctgattaaacaccatttagaaacaaccccatttgatgacatgttagtgtgtgacaatgaaggatatttagttgaagcgaatgccgcaaaccttttctggcgtaaaggaaatcaattatttaccccggatattagcctttcgggtgtgaatgggatcatgcgccagcaggtattagattttgcgcaacaattggagtgggatattcacattgtgcgagaaaaaccgcaaacgctctatcaagcagatgaaatttggttaaccaatgcactgatgcccattattcccgtaaaacagatctatttttcagatgataagcactatcaatatcgcgatagagacgcttaccatgttgttttacaacactgtttgtcactgact

SEQ ID NO: 33020 - DNA, 291 bp, Proteus mirabilis
atgaaaatgatttgtgcaatttaccgtagtaccaagcgtgatcaaacttatttatacatcgaaaaaaaagatgatttctctcgaattcctgaggaattattacaaagttttggtgaaccacagtttgcaatgttgctagatctcgcgcaaagacagcgtttagcgaatgcagacatagaaaaagtcaaacaagcgttgactgaccaaggtttttatctacaagtgccacctcccgtcgaaagtatgttaaatgcttatttagatgaattaaaaaattcagaaaaaactgaa

SEQ ID NO: 33021 - DNA, 1965 bp, Proteus mirabilis
atgagattatttattgcagaaaaacccagccttgctcgagctattgctgatgtattaccaaaaccgcataaacgtggtgatggttttattgtttgtggtgataaccagtatgtgacgtggtgtgttggtcatttacttgagcaggctgagccggatgcatatgatccgcgctatgcgcgttggtcgttagatgatttgcccattattccgaataaatggcaactcaaaccgcgcgctgatgtgaaaaaacagctagatacgatcaacacattactaaaacaagccgatgaagtgatccacgcaggagaccccgatcgcgaagggcaactgttagtagatgaagtacttaattaccttaatattagtgatgctcaaaggaaacaggcacgccgctgcctgattaacgatttaaaccccgccgcggtatctcgagcaattgataagctccgctacaatcatgaatttattccattatgtgtttctgccttagcaagagcgagggcggattggctatatggcattaacatgacacgcgcttacacgttattaggacagcgcaatggttaccaaggcgtactctctgttgggcgagtacaaaccccggtgctaggtttagtcgtacgccgtgatgaagaaattgaaaactttgtaccgaaagatttttttgaagtcaaagcgcatatcgttactcctgcagatgagcgatttaccgctatttggcagccgagtgaacactgcgagccttggcaagatgaagaagggcgtttattacatcgcaaattagcagagcatgttgttgatagaatagctggcaagcctgctaatgttaccgattatcaagataaacaagagtctgaaatagcacctttgcctttttcattatctgctttacaaattgaagcggcgaaacgctttggtttaagcgctcaacaagtgttagacacatgtcaacgcttatatgaaacgcataaacttattacttatccacgctccgatagtcgctatctccctgatgaacactttgctgggcgtcatgcggtgatgaatgccattagtgtgcatgataatagtcttttaccacaagaaacattagatattgataaaaagaaccgttgctgggatgacaagaaagtagatgcgcaccatgccattattcctactgcgaaaacaggtaatatttcattaagtgaaaatgaaaagaatatttactatttgatcgcccgacaatatctaatgcaatttatgccagatgcggtgtaccgcaaatgtgtgattgaactcgatattgagaatggaaagtttattgctaaggcacgatttttagcacaagccggctggcgtaccttattaggtagtaaagagcaagatgcggaaaatgatggtagcgccttacctattgtggctaaaggtgatgagttactttgtgaaaaaggcgaaattgttgccaagcagacccaaccaccaagaccttttacagatgctacgctactttcggctatgaccggtattgcacgttttgtgcaagacaaagagctaaagaaaatcctaagagcgacggatgggctaggtactgaagcgactagggccggtattattgaattactgtttaaacgcggctttctgcaaaagaaagggcgagctatcaactcgacaccagcgggaagagcattaattcatgttttgccagatatggcgacattacccgatatgaccgctcattgggaatcaatattaacgcaaattagtgagaagcaatttaagtatcaagattttatgatgccattaagtaacacactatttgaattaattactcaagctaaacgtcgtcctaatattcaagcgtttagaaacctgcctgcgcctgcgcagaataaaaaacgtaaaggtgcgatgaaaaaaagtgcacaagggaaaagtcgttcagcgcagtctcaatctacgaatcgcaatataaagagtgatgct

SEQ ID NO: 33022 - DNA, 1159 bp, Proteus mirabilis
atgtctgtaattaagatgaccgatttagacctggccggtaaacgagtactaattcgtgctgacctgaacgttccagtgaaagatggaaaagtaacttcagatgcacgtattcgtgcttcattaccgactattgaagcggctttaaaacaaggcgctaaagttatggtaacttcacacttaggccgtcctactgaaggtgagtacaacgaagagttctctttaaaaccagttgttgactatctgaaagagaaattatctgcacccgttagcctagcaaaagactatttaaacggtgttgatgttaatgcaggtgaattagttgtacttgaaaacgtccgttttaataaaggcgaaaagaaagacgacgaaacgctgtctaaacaatatgctgcattatgtgatgtctttgtcatggatgcattcggtacggctcaccgtgctcaagcgtcaacacacggtgttgctaagtttgcggatatcgcttgcgcgggtcctctgttatcagcagagcttgaagcattaggcaaagcattagataaaccagagcgtccaatggtggctatcgttggtggctctaaagtatctactaaattaacagttttagattcattatcaaaaattgctgaccaattaatcgttggtggtggtattgctaacacctttatcgcagcagaaggtcattctgtaggtcgttcattatatgaagcggaccttgttgacgatgcgaaaaaattaatggaaaaatgcgatattccagtaccaacagatgtccgtgtcgcgacagaattctcagaaacagcgccagctgtacgtgaaatcagcagatgacatcaaagatgatgaacaagtattagatatcggtgatgtgacggctgaacgtttagctgaaatcctgaaaaatgccaaaaccattctgtggaatggccctgtgggtgtctttgaattccctaacttccgtaaaggtactgaagtgattgctaaagcgattgctgatagtgatgctttctctatcgctggcggtggtgatacattagcggctatcgatttatttgatatcgcagataaaatctcttacatttcaaccggtggtggtgctttcttagaattcgtagaaggtaaaaaacttcctgcggttgctatgctggaagaacgcgctaaa

SEQ ID NO: 33023 - DNA, 1361 bp, Proteus mirabilis
gtgattagcgttttcgacatgtttaaagtgggcattgggccatctagctctcacaccgtaggccccatgaaagcggggaaagaatttgtcgatgatttagtcagccaggatctgattgcgtctgtcactcgcgtagctgttgatgtatacggctcattgtcattgacaggcaaaggtcaccacactgatatcgcaattattatgggcttagcaggtaatgcacccgctactgtcgatattgacagcattcccggttttattcgtgaagttgaagaaactggccgtttaccattagcaaatggattaaaagttgtcgattttccagctgaaagtatgcattttagcaatgataatctttcattacatgaaaatggcatgacaattcatgcttttgcaggtgacaaagaaatttatcgtaaaacctactactctattggtggtggatttattgttgatgaagaaaacttcggcaaatctgtgcttgatagccaacctgtttcttatccttatgcaagcgctgaagagttattaaaacattgtaaagaaaccggattatcaatctctagcttaatgatgaaaaatgagctagatcttcatactcaagccgaaattagtgcctattttgctgatgtttataaaaccatgcaagagtgtatcgagcatggtttaaataccgaaggcttattaccgggacacttcgtgttcctcgtcgtgctgcgtcactaaatcgtttattaacttccagtaatagcctgtcaaacgatccgatgaaagtcgttgatcttatcaatatgtttgcactggcagtgaatgaagaaaatgccgcaggtggacgagtggtcaccgcaccaactaatggcgcatgtggtattgttccagctgtattggcttattacgatcgctgtattgaaaaggtcacgcctgaaatttatacccgttatttcttagcctcaggagcgattggtattctttacaaaatgaatgcttctatttctggcgctgaagtcggttgccaaggcgaagtgggcgttgcttgctcaatggctgccgcaggacttgctgaattactcggtgctagccctgaacaagtctgtgttgctgctgaaatcggtatggagcataacttaggtttaacttgcgatcctgttgcaggacaagtacaagttccttgtattgaacgtaatgcaattgcctctgttaaagcggtaaatgctgctcgtatggcattacgtcgtaccagtgaaccacgagtttcacttgataaagtgattgaaaccatgtacgaaacaggtaaagacatgaacgcaaaatatcgcgaaacttctcgtggtggattagcaataaaagttcaatgtgactaa

SEQ ID NO: 33024 - DNA, 552 bp, Proteus mirabilis
atgagcagtaaaaaactaacccctgctgaagttaatgatgcacataaactccaaacccgtcctctatctacccctacagatttagcacctaaagcaacaaaagaagttagtgcagcgatgaatgctattcttgcggatgtgtttgctttatatctaaaaacaaagaacttccactggcatgtgagcggtcctcattttcgtgactatcatctaatgttagatgaacaaggtgatcagctctttgccatgacagatcctattgccgagcgtgtacgtaaaattggtggcatgacattacgctctatagggcagatctcaaaaatgcaacgtattaaagataatgatgctgaatttgttgagcctttagatatgttagctgagctatgtcaagataatcaattacttgcagcagaactgagaaaagcacatgttgtctgtgatgaaaataacgatatctctaccgcaagcttaattgaaaattggatcgatgaaacagagcgtcgtacttggttcttatttgaagcttgtcgacgtgcagaaacatcagggcac

SEQ ID NO: 33025 - DNA, 834 bp, Proteus mirabilis
atgaacgaagagattagctatctgtttgtccctgctaataaaaaagttatgatttccaaagcgttaacttatggtgcaaatgcgatcattcttgatcttgaagatgcggttcatcctgatgaaaaaccgctcggacgtgacaacattcaaaattggctaacgacaataaataacaccatcattaacaccagtatatatatcagaataaatcatcctaaagagaaagaatttaaaaacgatgttgatctattaaattcattaaatgaaacgctaatgacaggagtaatgatcccaaaactggaagatgcggaaatactttcctatataaaatcaaaacttcatctggctatatcaaagcgaccctttataggcattatagaaacagcgcgtggagtgcaccattgtgaagagattgccaatagtggtgtaacgagattagcattcggctcattagattactcactagatattgattgccaacaaacagcagaagcgttgctatacgcaagaagccgaatcgttatcgcttcacgcattgccaaccttatctcccctattgactgtgtcacccctgaattttgcacacctaatacattattaatggacgccaaccatgctcgcgctcttggatttggcgctaaactctgtattcatccggatcaaatagatactgttaataaggcatttaaacctactgaggaaaaaattaaatgggcgcaagaagtggttaagcaatcaacagccagttatgcttttcagattaatggggagatgattgatttacctttaataaaacaagccacccgtattatcaatggtaaatataaaccaaat

SEQ ID NO: 33026 - DNA, 138 bp, Proteus mirabilis
tgtggatatacagcgaatgctgatatcaacggggcacgtaacattttagcggcaggacatgccgtgcttgcctgtggagggagggtgcagtcagaccgcccgtcgaagcaggaacccgccgagttgattcagacatca

SEQ ID NO: 33027 - DNA, 768 bp, Proteus mirabilis
atgaaaaaattatcaggtaagttactggctggtgcgattatctcttttgctttagtgagccaaagcatggcatcggaaaaaataacggtatttgcggcggcttctctcactaatgcgcttaatgaaatttcggcacaatataaacaggaaaaacaagcggatgtcgttgcttcttatgcatcctcttcaacacttgctcgccaaattgagcaaggagcacctgcaaatctatttatttctgccgatcagcagtggatggattatgttattaataagaatttaatggtgactgattcacgacatacattattaggtaacgacttagtgttaattgcccctaaagatagcaaattaaacaatgttgttattaataaggatactaaatggaaatccttacttaatggtggaaaattagctgtgggtgatccagatcatgtacctgttggtatctatgctaaagagtcattagaatatttaggtgcatgggatgtggtgagtccggaaatggcgcgcactaataatgttcgtagcggcatggcattagttgaacgagatgaagcaccattaggtattgtctatggctctgatgctgttgccagtgacaaagtgaaagtggttggggtattcccaactgatagtcacaaacctgttgagtatccaatggcagttgtaaaaggacaggataataaagctgttcgtgatttttatgactatctaaaaacacctcaagccgcagaaatttttaagaaatacggctttagcccactt

SEQ ID NO: 33028 - DNA, 1119 bp, Proteus mirabilis
atgcataaagaatcacctattattcgtcgtaaatcgacgcgaatttatgttggtaatgtacctattggcgatggggctcctatcgcggtacagtcgatgacgaacacacgaacaacagacgttgaagcgactgtaaaccagattaagtctctggaacgtgttggggtggatattgtacgtgtttctgtaccaactatggatgcggctgaagcattcaaactaattaagcaacaagtgaaagtgcctttggtcgctgatattcattttgattatcgtattgcacttaaagttgctgaatatggtgtcgattgtttacgtattaatcctggtaatattggtaatgaagagcgtattcgtcaagttgtcgattgtgcccgggatcgcaatattcccattcgtattggtgtgaatggggggtcactagagaaagatattcaagaaaagtatggtgagccaacccccgaagcactagttgaatcggctatgcgccacgttgatatcttagataaattgaacttcgatcagtttaaagtcagtgtaaaagcttctgacgttttccttgctgttgattcttatcgtttattagcgaaaaaaattgatcagcctttacatttagggatcacagaagctggtggtgcaagagctggatcagtgaaatcagctattggccttgggatccttctatcagaaggtatcggtgatactttacgtatctctttagccgcagatccggttgaagaagtaaaagttggctttgatatcttaaaatcattacgtattcgctctcgtggtatcaattttattgcttgcccaacatgctctcgtcaagagtttgatgttattggtacagttaatgaattagaacaacgtcttgaagatatcattacaccaatggatgtttctattattggctgtgtggttaatggtcctggtgaagccgaagtttctacactaggcgtaacaggggctaaaacgcgcagtggtttttatgaagacggtgtaagacaaaaagagcgtcttgataatagtaatatgattgatttattagaggcgaaaatccgtacaaaagcggcaatgcttgacggcaacctccgaattaatataaatcaattggataaa

SEQ ID NO: 33029 - DNA, 234 bp, Proteus mirabilis
atgtcccgagtctgccaagttaccggcaagcgtcctgtgagtggaaacaaccgctctcacgcattaaacgcgactaaacgccgttttctgccaaacctgcactctcaccgtttctgggttgagtctgagaaacgtttcgtaactctacgtgtatctgctaaaggtatgcgtgtgatcgataagaaaggcatcgaatctgtattagcagatttacgtgcccgtggtgagaagtac

SEQ ID NO: 33030 - DNA, 1800 bp, Proteus mirabilis
atgccatcagctcaggttattttgcgcgaaacctttggttatcagcaatttcgaccaggccagcaagagattattgataccattatcaccgggcgcgactgtttagtcgtcatgccgacgggagggggaaaatcgctttgctatcaaatacctgcgcttttgcttgatggcttaaccgtagttgtttctccgttgatttccctaatgaaagatcaagttgatcaactctgcttacatggtattgacgcggcatttcttaactcaactcaaagccgagatgaacaactgcaagtacaaatgcgttgtcaacggggtgaaataaaactgttatatattgcacctgaacgcctaatgatggagagttttcttcaccatttagtgcaatggcagcctgctttattagcggtggatgaagcacactgtatttctcaatggggtcatgattttcgccctgaataccgaggaattggcttattaagacagtatcttcctgatgtccctattattgcgttaacggcgacagctgataatacaacacgtcatgacattattaatcagctcgcgttacgcactcctttagttcatattagcagttttgaccgcccaaatattcgttatactttagttgaaaaatataaaccgctcgatcaactttggctgtttattcgtgggcagaaaggaaaatcaggcattatctattgtaatagtcgcagcaaagtagaagagaccgctgaacgactaggtaagcgaggattaagtatcgccgcttatcatgcgggtatggatattgccacacgagcgaaagtgcaagatgcttttcaacgcgatgatttgcagattgtggtcgcaacggtcgctttcggcatgggaattaataaacccaatgtacgttttgtggttcattttgatattccgcgtaatattgaatcttactatcaagaaacgggacgcgcaggacgcgatggtttacctgcacaagcggtgctgttttatgatcccgcggatatggcttggctacgtcgttgtttagatgagaagccagaaagtgaacaaaaagcgattgaatcccataaattaaatgccatgggggcttttgccgaagcacaaacttgtcgacgtttagtgttacttaattactttggtgaacaccgccaacaagcttgtggtaactgcgatatttgccttgatccacctaaacaatatgatgggttagtggatgcacaaaaagcgttatcttgcatctatcgtaccggacaacgttttggcattggttatattgttgaaattttacgcggtgccaataatcaacgcattcgcgataatggtcatgataaattgccagtttatggtattggtaaagcccatagccatgaatattggatgagtgtgatccgccaattgatccatttaggtatggttgcgcaaaatatcgttcatcgttctgcattacaattgactgagatagctcgaccgatattgcgtggtgaggtgtcattacccttggcagtaccacgactattaagcccaacaaaaagccgttatcagcaaacaaaaaatagtcatcgacagtacgataggaaattatttgcgaaactacgcaaattacgtaaatctattgctgatgaagaaaatattccaccctttgtggtatttaatgatgtcacactgattgaaatggcggaacaatgccctgtctgccctgatgaattgttgttgatcaatggggtaggacaacgaaaactagaacgatttgggccagcatttatgacacttatccgtgatcatattgaggggttcgaa

SEQ ID NO: 33031 - DNA, 783 bp, Proteus mirabilis
atggcttctagcaatatggcttacacaaagatccgccaaccaaagctttctgatgtgatagaacaacaacttgagcatcttattttagaaggcaccctacgtccgggggaaaaactcctgcctgaacgtgagctggcaaagcaatttgatgtatcgcgtccttcattgcgtgaagcaatccaaaaattggaagcaaaaggttttttattacgccgccaaggtggtggaacctttgtgcaagataacctttggcaaagctttagcgatcctctcgctcaactcctcagtgggcatccagaatctcaatttgatctgttagaaacacgccatgcccttgaaggtattgcggcttattatgctgcattacgcggtactgatgatgatcttgagcgtattaaagccagtcatgctcgcattattgatgcccatgataaaggggatatcgctgcggagtctgatgcggtattgcaataccaattaatcgttacggaagctgctcataatgtcgttttgctacacttattaaggtgtatggtgccaatgcttgagcagaatatccgacaaaattttgagtttctttatacacgtaaagagatgttaactgctgtaagtgagcatcgcacacagatttatcaggcgattattaatagagagccagaagcagcccgtgaagcttcacaccgccatctggcctttattgaagatgttttgttggatatgagtcgtgaacatactcgtcgtgagcgttctttacgccggctccaacaacatcctgatttattt

SEQ ID NO: 33032 - DNA, 303 bp, Proteus mirabilis
atgtcacaccaacgttcaaatgaagatctgcgtagtgaattaaaatctctggctgatactctagaagaagttctgaactcctcggcagataaatcaaaagaggaattacaaagtttacgagaaaaagctgaatatgcgctacgtggctctcgtgcaaaactcagtgatgcaggtagagaaatcgtcgataacactaaagaaatggcgggtaaagcggacaactatgtgcgtgaaaacccatggacaggtgttggtattggcgcggcagtaggtgtcgtactcggtgttctactttcgaaacgt

SEQ ID NO: 33033 - DNA, 2166 bp, Proteus mirabilis
atgaacaaaatcaactccgtctgtccttattgtggcgctggctgcaaaatcaatctctgtgtcgaaaatggtcgaataatcaaagctgaaggtgccaatggtgtcactaatcaaggcgagctttgtttaaaaggtctctatggatgggattttttaaatgacaataaattactgacagccagaattcatcaaccgatgatccgccgacaaaaaggggctgattttgaaattgtcagttgggatgaagcgattgagtttacggctaaaaagttactcgcaattaaagagaaatacggtgctaaatctattatgtgcaccggctcctctcggggtacaggtaacgaaaccaattttgtgatgcaaaaatttgctcgtgctgtactgggtaataataatgttgattgctgtgcccgtgtttgtcatggcccttctgttgctggtttacaagaaacactaggcaatggggcaatgagtaattccattgctgatattgaagattcagattgtttgttggtgtttggttataactgtgccgactctcaccctattgtggcgcgtcgtgtggtgaaagcgaaacaaaaaggggccaaaattattgtttgtgatcctcgtaaaatagaaacagcgaagattgctaatcaatatcttcccttaaagaatggcaccaatatggcgttagttaatgcatttgcctatacgctgattgatgaagatctttatgacaaagaatatgtgagtcgttacaccgaaggttttgaagaatataaaaaacagctggtggattatagccctgaagcagtagaacgtattgttggggtttctgcaagcgagatccgccaagctatgcgcacttatgcagccgcaaaaacagccaccattatgtggggaatgggggtaacacaatttggtcaagcggtagatgttgtgaaagggctagcgagtttagcgttattgacgggtaatttaggcaaaccacatgcaggggttgctcctgttcgcgggcaaaataatgtacaaggtgcttgtgatatgggggttttacccaatatgttccccggctatcaaagtgtgacagatgaaggtattcgtcaaaaatttgctcaagcttggcatattccggttgaaaaactcgatccgcaagtgggttatcgcattactgaagtccctcatttagccattgaaggtaaagtgaaagcttattacatcatgggagaagatccacttcaaactgaggcagatttaggtctggttagaaaaggttttcaagcgctcgattttattgtggttcaagatatctttatgacgaaaacggcagagcaagcagatgttattttaccttctaccagttggggtgagcacggtggtatttttacttgtgctgatagaggttttcaacgttttgaacaggcagtacaagcacgtggtaacgttaaacgtgattgggaaatcattagtttattagccacggctatgggctatccaatgtcttatacagataatgaagaaatttggcatgaggtaagagcattatgtccgctatttttcggtgcgacctatgaaaaattagcgggattagcccatatacaatggccttgtcctgagctcgatcatccgggaacaccctatttatattcagataatcgattcacaacgccatcaggtaaaggccagctttttgctaccgcatggcgcgctcctgcagaattgcctgatgaagagtatccaatgattttatcaacggtacgtgaggtagggcactactcttgtcgctcaatgacgggtaactgtaaagcattagcatcattagcagatgaaccggggtatgtgcaaattcaccctgatattgctaaagcggcaggtattgctgatcaagaaattgtttgggttgcatctcgtcgaggtaaggtgttgtcacggtgtaatctaaacgaaaccgttaataaacaagctatttatatgacttatcaatggtggattggtgcatgtaacgaactgacacaagataatctcgatcctgtctcaaaaactccagaaactaaatattgtgctgcacgagtggtgaagattgacgatcaaaaatgggcagaaagccaagtcgctcaagataatcacgccatgagaagtcgtttaattaatttagtcgagcaagcaaaaacagcgacacac

SEQ ID NO: 33034 - DNA, 468 bp, Proteus mirabilis
gtgaatttaaatgcaacaatcctcggccaggccatcgcatttgtcctgtttgttttgttctgcatgaaatatgtatggccaccaattatggcggccattgaaaaacgtcaaaaagaaattgctgacggtttatcttctgcagaacgtgcgaaaaaggacttagatttagcgaaagccgatgcaggcgaacagttagcgaaagcaaaagctgaagcacaagcaatcattgagtctgcgaataaacaacgcactcaaatgattgaagaagctaaagctgaagcagagcaagaacgtagtaagatcgttgcacaagctcaatccgaattggaagcagagcgtaaacgtgctcgtgaagaacttcgtaaacaagtcgctatgctggctatcgctggtgccgagaaaattattgaacgttccgtggatgaagctgctaatagcgacatcgttgataaactggtcgctgaactg

SEQ ID NO: 33035 - DNA, 768 bp, Proteus mirabilis
gtgtgccttgatataaatactataatgaatataccaaactctacttttcctattgtggcggttattcccgctgccggcataggtagtcgaatgcaagcaacctgcccgaagcaataccttaaaattggcagattgactatccttgaacatactattaatgcgctattaaaacatccacgcatttcgcaaattattgtcgcaattaacccagaagatgactatttttatcacctagcccttgctaaagataaacgaattattgtcgttaaaggagggggacaacgtgctgattcggtattatcagggcttcgctatattacagaacatcttgcgcaaaatacatgggcgctagttcatgatgcggcaagaccttgcctgtcctttagtgatttggataatcttattcaactcattgatgataaccatcttgatcctcaattttgtggcgggatcttagcctctcctgtgcgtgatacgatgaaacgtagtcatcaacaagataaccatattgaaaaaacagtggcaagagacacgctatggcatgctttaacgccacaatttttcccagcggccttgttaaaacaaaatcttgaaaacgcattggcacaaaacgtacccattactgatgaagcatctgcgatggaatttggtggatatgaacccttattagttaaaggccgtgcggataatataaaagtcacacaaccagaagacttggctcttgcagaatttttcctctctcgacaaattaccagcataaggaacaca

SEQ ID NO: 33036 - DNA, 405 bp, Proteus mirabilis
atgagtacattaattaaagtttatggattccatttagatgtttttgagcatgtgaataatgcacgttaccttgaatttttagaacaagcgagatgggattggattgaacaacacttagatctcgcttggtttaaacggcatggtctagcactcgttgtcgcgaatattaatatcaactatcgtttgcccgctaatttaggcgatgaactaatcattagttgtgatattgcagaagtcggtattaaaagtggcgtgttgtctcaaaaaatagtgagaaaacaagatggtgcattgatttcagatgcattagtgacttttgtactcgttgatatcaatactaaaaaagcattaacacttacagatcagttacgagaaaaattggagtatgtacgccagtctgctgat

SEQ ID NO: 33037 - DNA, 975 bp, Proteus mirabilis
atgagtgaaatcgcggattggcagccaagcgcctcaatcgccaacttactgaaaaaggcgaaaattgtcagtaatattaggcgttttttcgctgatcgtggtgttttagaagttgaaacaccgatgatgagtcaggctaccgttaccgatattcatctatgcccatttgaaacccaatttgtggggccaggtgcttctcaagggctaaagttatatttaatgaccagtcctgaataccatatgaagcgtctattagcggcaaacagtgggccaatttatcaaatggggcgttgcttccgtaacgaggaagccggtagatatcataatccggaatttacgatgcttgaatggtatcgaccttgttttgatatgtaccggttgatgaatgaagtcgatgatttattacaagaagtgcttgattgtgaagcgtctgaatcgctctcatatcaacaagcctttttgcgctatctcgatatcgaccctttatctgcagataaagaaaagttacgtgaggttgcggcaaagcttgatttatcaaatattgctgacacagaagaaaatagagatacgctactgcaattactttttgtgtcaggtgtagagcctcatattggtcttgaaaaaccaacctttatctatcattttcctgcttcacaagcttcccttgctgaaatcagctcagaagatcatcgtgttgcagagcgatttgaggtctattttaaaggtgtcgagttagcaaatggttttcgtgaattaacggatgctaaagagcaacgtcttcgttttgaacgtgataatcgtcaacgtgttgccatgggattacctgaacagcctattgatgagcgttttttagctgcgcttgaagctggattacctgaatgttctggggttgctttaggcgttgatcgcctgattatgctcgcactcggtgttgagcgtattagtgatgtgattgccttccctgtttatagagca

SEQ ID NO: 33038 - DNA, 558 bp, Proteus mirabilis
atgacacttattgatacctttatcaatcgctttcaacttactttacctgagccggtaaatcagcctattgatgctaaaaaatcggcagcagttttactgccgattatcaataagcctaatccaacgatcctcttaacagagcgcgcatcaacgttgcgctctcatgccggacaagttgcgctccccggagggaaacgcgatccacaagataaaagcctcattgaaacggcattacgtgaagcccatgaagaggtcgatattccgcccagtatggtttctgtgatcggccaattagccccattacgcagttcagaaggttatttagtaacccccattgtcggggtgatcccccccaatttatctttacggcataatcccacagaagtcgcttctgtctttgaaatgccattaagttatgtactcaatactcagcgctatttaccgttagattttcgtcgtgccggtaaaatgcatcgcatctatttttacccttatgaagggcatttggtgtggggactaaccgcagctattttacataacctcgcgttgcatattact

SEQ ID NO: 33039 - DNA, 246 bp, Proteus mirabilis
atgggatttctttcttggattgtgttcggtcttattgcgggtatcttagccaaattcttaatgcctggctcgtatgatatcggccttatctggacctgtattctaggtattgtgggtgctgtagttggtggtgtaattagtaatttctttggtaaaggcaaagtagatggtttcaattttggtagttttgtcgttgccgtaataggggcaatcgttgtgctttatttagcaaaaatatttgccagt

SEQ ID NO: 33040 - DNA, 471 bp, Proteus mirabilis
atgtaccaagattatctcaatacgccgaaaggttttccaaagccttatatatccattactgcagatgatgatggcatcaccagccttaactttgttagtgaaaaagaggcgttagttaattcaaatgccataattgacctgtgtataaaacagttaaaagagtatttttcgggtaaacgcaccctattttcagtgccactagcgcctaaaggaaccgaatttcaaatacgcgtttggcagactttacagtctattccttatggtgaaatttggagttataaaaagttggcacttacattaggttccgtcaactattgcagagcggtaggaatggcaaattcacgtaacccaatctcgttaattattccttgccatcgcgtcattggtcataatggtaagttagtaggctatactgggggacttgatatcaaacgttggctattacactatgaaaaagtggatattgacgaa

SEQ ID NO: 33041 - DNA, 1614 bp, Proteus mirabilis
atgagtcgtaaattaaaactcgcacttgctcagttaaacttggttgttggcgatattgaaggcaactgtgaacgcatgttagccaccgtaaaagcgcaagaagatgccgatctggttttgttttctgagcttgcgttatgcggttactctcctgaagatctactatttcgccctgatttccaacaacgttgtgaagagcaactggttcgtttagaacaagcaagtaagaaaacggccattgtggttgggcatccttggtggcaaaaaggtactatctataatgcactgtcatttttctatcaaggtgagttacaggcgcgttacttcaaacaacagctacctaattatggtgtatttgatgaaaaacgttatttccagcaaggaaatgaacgttgtgttgtgccttttaaaggctatcatttaggattattaatttgtgaagatatttggatcaacgagcctattgatgcactaaaacaagcgggtgctgatctggttctttctattaatgcttcaccttatagtcgtgaaaagccacatattcgtacccaattaattaaagaacattgccaaagaacgcatctgcctgtggtgtatctcaatcaaattggtggtcaagatgaattggtttttgatggatgttctaaagtctttgatgaacgaggaacaatcacccatcgtttagcggcttttgatgagcaagtggccgtggtggagtttgatgagttaactatcgtaccaatgcaagatgcggcaccagagctttctcctttagcgcaagtttatcaagcgttagtgctggcaacgcgtgattatgtgacaaaaaatggttttaaaggcgctatattaggattatcagggggcatcgactcaggcttaacagttgcaattgccgttgatgcgttaggtaaagagagcgttcaagcggtaatgatgccatttcgctatacctcagaaatgagtattcacgatgcgaaagagcaagctgatttattaggtgttgagtttgatactgtctctattgagccgatgtttgatgcttttatggatcaactttcgcctatgtttaaaggtagcgctgtcgataccacagaagaaaacctacaagcgcgttgtcgtgcggttattttaatggcgatgtccaataaacgtcgtcggttagtgctcaccacgagtaataaaagtgaatctgccgtaggctactcgaccttatatggtgatatggcggggggctttgatgttttaaaagatgttcctaaaacactggtatttgaactggctaaatatcgtaatactctttcacccgctattccacaacgtgtgattgataggcctccttcagcagaattagcaccaggacaaacagatcaagataatctgccaccttatgatattttagatgcccttcttgaaggctatgttgagcaagataaatctgtttctgacttggttgcggctggatttgatgaagccattgttcgtaaagtggtaaaattagtcgatattaatgaatataagcgtcgtcaagcaccggtaggaccgcgtattaccagtcgtaattttggtaaagatcgtcgctatccgatcacaagcggttttggtcgccataactgg

SEQ ID NO: 33042 - DNA, 975 bp, Pseudomonas syringae
atgaaacagatgaccttcgccgatgccgagtacgcgggtaaacgtaagcatacccgccgcgagcgctttctcatcgagatggatcaggttgtgccctggaaaggcttgattgcccttatcgaaccacattatccaaagggcgaaggtggccgtccggcttatccgctgatggcgatgctgcgtattcacctgatgcagaactggtttggttacagcgatccggcgatggaggaagcactttacgagacaacgatcctgcgccagttcgcagggttgagtctggatcgaatcgccgatgaaaccacgattctcaacttccggcgtctgttggaaaagcatgagttggcaggcgggattttgcaggtcatcaatggctatctgggtgatcgaggtttgatgctgcgccaaggtacggtggtcgatgcgacgatcattcatgcgccgagctcgaccaagaacaaggacggcaaacgcgatcccgaaatgcatcagacgaagaaaggaaaccagtatttcttcggcatgaaagcgcatatcggcgtcgatgccgagtcgggtttagtccatagcctggtgggtactgcggcgaatgtggcggacgtgactcaggttgatcaattgctacatggtgaggaaacctatgtcagcggtgatgcgggctacaccggcgtggacaagcgtgcggagcatcaggatcgtcagatgatctggtcaattgcggcccgcccaagccgttataaaaagcatggcgagaaaagtttgatcgcacgggtctatcgcaaaatcgagttcacgaaagcccagttacgggcgaaggttgaacatccgtttcgcgtgatcaagcgccagtttggttatacgaaagtccggtttcgcgggctggctaaaaacaccgcgcaacaggctactctgtttgccttgtcgaacctttggatggtgcgaaaacggctgctggcgatgggagaggtgcgcctg

SEQ ID NO: 33043 - DNA, 1377 bp, Pseudomonas syringae
gtgactaacaccgctttcaattctctgcctctgtctgctgccatgctggctaacctggagtcgcttggttatgccgaaatgacgccgattcaggcgcagagcctgccggtgatcctcaagggcatggacctgatcgcgcaagccaagaccggtagcggcaagaccgctgcgttcggcatcggcctgctcaacccgatcaacccgcgcttcttcggctgccaggcactggtcatgtgcccgacccgcgagctggcggatcaggtggccaaggaaatccgtcgtctggcccgctcggaagacaacatcaaagtgctgaccctttgcggcggtgtgtcttttggcccgcagatcggctcgctggagcacggcgcgcacatcatcgttggcacgccaggccgcattcagcagcatttgcgcaaaggctcgctggtgcttgacggcctgaacacgctgattctcgatgaagccgatcgcatgctggacatgggtttctacgattccatcgccgatatcatcgagcagaccccgcagcgccgccaaaccctgctgttttcggccacttacccggtcggtatcaagcaactgtcgtcgaagttcatgcgcgatccacagactgtcaaagtcgaagcgctgcacgccgacagccagatcgagcagattttctacgagatctcccccgagcagcgcctggaagccgtggtcaaggtactcggccatttccgtccaacgtcctgcgtcgcgttctgtttcaccaagcagcaggttcaggaagtggtcgaccacctgaccgccaaaggcatgtctgcggtcggcctgcatggcgatctggaacagcgtgaccgtgatcaggtgctggcgatgttcgccaaccgcagtacttcggtactggtcgccaccgacgtagccgcgcgcggtctggacatcgatgcactggatatggtgctcaacgtcgaactggcccgcgattcggaaatccacattcaccgtgtaggccgtaccggtcgcgcaggcgagacaggcatcgcggtaagcctcgtggcaccgtcggaaagccagcgcgcccgcgccatcgaagaattgcagaaagccccgttgaactggcagcagtacgacagcctgagcatcaaggaaggcggcaagctgctgcccgccatgaccacgctgtgcatcggttccgggcgcaaggacaaactgcgtccgggcgacatcctcggcgcactgaccggcgaagcgggtattgcgggcacccaggtcggcaagatcgcaatcttcgactttcaggcctacgtcgccgtcgaacgcagcatggccaaacaggcgctggagcgactgaacaacggcaagatcaaaggcaaatcgctgcgcgtacgaatcctc

SEQ ID NO: 33044 - DNA, 4908 bp, Pseudomonas syringae
atgtccgccctatcctccctgctcgacacctatcgctccgccgctgtcactgagcgcgaaaaaggcacctatttcgaagagctgatttgcggctacctgcgcaacgaagccacttatcgcgatctatacgaaaaggtgtggacgtatgccgaatgggcgaaggagcagggtcttagtggtaaggacgcgggcattgatctggtagcgcgcacccaaggaaccggcgagtaccacgccatccagtgcaagctgtacgccgaagattacaaagtccagaagaaggacatcgacagctttttcactgcctcgggcaaagctccgttcactcacaggatcatcgttgcaaccaccaacaactggagcgaacacgccgaggacgcattgcaggggcaacaccagacgatcaataagatcgacctgcaagccttggaagaaagccagatcgactgggccaagtaccagccccaccaagccgttgttctcaaagcgcgtaagcaattgcgcgatcaccaacaaaccgcactaaacgccaccgctgccggcttaaatgatgccgagcgcggcaaattgatcatggcgtgcggcactggcaagaccttcaccagcctgaagattgctgagcgtctggctggcaagggcaagcgtgtgttgttcctggtacctagcctgtccctgctatcgcagaccctcaccgagtggacgcaggaaagcgaaaccccgctccatagcttcgccgtgtgctcggatagcgacgtaggcaagaagcgcaaggccgatgaagataccgtgcaggtgttcacccacgaactgcgctacccagctaccaccaaggcggatcggctcgcagccgaaatgctcaagcgccacgatgccgagcacatgagcgtggtcttctccacctaccactccatcgacgtgatcagccgcgcccaacacgaatacgacctggcagcattcgatctggtgatctgcgatgaagcgcaccgcacaaccggcgcaaccttcgacgacgatgacgaaagtacctttgtgcgcatccatgatgtcgactacatccgcgccatcaaacgcctgtacatgaccgccacgccacgcatctacggcgacaacgccaagatcaaggccgaatccggtgaagtcaccctgtgctctatggatgacgaggcgctgtacggtaaagaactgttcgtaattaacttctccgaggccgttcagcgcggcctgctcaccgactacaaggtgctggtactcactgttgaagagagcattgtcaatcgtcggcttcaagagctgctgaaagacgaagacaaccagctcaaggtggacgacgccgccaaaatcgtcggctgctggaaagccctggccaaacaggggctagctgaaaatctggtgggtgatgatcagcccatgaagcgcgctgtagccttctgtcaggtcatctcgcccagctacaagggcaccaagcacaaggtcagctcgatcaacatcgccagcatgttccagtcggtggttgaggcttatcaagagtcagaaaacatcgacgaggcctcgcgcatcatctgcgaagctgcacacgtcgatggctgcatgaatgccagccagaaagaagccaagctcaactggctgaaggaggagcctccagccaacacttgccgcattctcagcaacgtgcgctgcctatctgagggcgttgacgtgccggcgctggacgccgtgctcttcctcaccccgcgtaactctcaagtggacgtggtgcagtctgtaggccgggtgatgcgcaacgcgccgggcaagagacgtggctatgtcgtgctgcccgtcgtcattccagccggtatggagccgcacgaagcgctcaacgacaatcagacctacaaggtcgtttggcaggtgctccaggccctgcgctcgcacgacgacagcttcgacgccatggtcaacaagcttgatctgatcggctcagacccgcgcaagatggaggtcatcgccatcaccgacaaggccgacaagaaggcgaagagaaccagcggaacgagcaacggccaagccggcaaaggccagtacggcatcggcgagaagcgccctcgacacgatgccgaaggtcagatgactcagcaggccgagctgacctacgaagtgggcgagatcgaaaaggccatctacgccaagatcgtcgagaagtgtggcaaccgccaccactgggaagactgggcgaacgacatcgccaagatcgcccgtacccatatcgaccgtatccagggcatcttggagaattcagccaacactagggaaaaggccgctttcaacgccttcgccgccgagttgcgtgacgacctcaacgacagcatcagcgatggcgagattgtcgagatgctcgcccagcacttggtaactaagccggtgttcgatgcgctgttcgacgaatacagcttcgccaagcacaaccctatggcgaaggccatgcaaggggtgctggacgcgctccacgaacaccatttggagaaagaagccgacaccctggagaagttctacgccagcgttcgacagcgtgccttgggtatcgacaatgctcagggcaagcagaagatcatcgtcgagctatatgacaaattcttccgcaacgctttcccgaaaatgactgaacgcttgggcatcgtttacacaccagtcgaagtggtggacttcatccttcacagcgtaaaccacctgctgcaacaggaattcggccagacccttggcagcaagggcgtacacatcatcgacccattcaccggcacaggcacctttatcacccgcctgatccagtcgggcctgatcaaaccggaagaactgccacacaaatacaagcacgagatccacgccaacgaactggtgctgctggcctattacatcgccgccataaatattgaagcggcctatcacggtgaagtgatcgacgggtacaccccgtttgaaggtatctgcttgaccgacactttccagatgtatgagaaggacgatttggtagacgctttgctagtggacaacagtgcccggcgtaagcgccagaagaatttggacattcgagtgattgttggcaacccaccgtattccgagggtcaaaaaagtgaaaacgataataatgccaacctgggttatccgaaattagatagtcaaattcgatcaacatatgctcgacaatccgcagcaacactttcgaaaggtttatataacagctatatacgggcgattcgttgggcaagcgaccgcttaggtgaaagcggaatagtaggctttgttaccaacgcaggctttctcgaagcgagatttgcggacggaatgcggaaatgtttggctgaggagtttagtaatatttacatatttcacctacgagggctgcgaggaaagcatacgtccggtgagagagccaaacaggaaggtgggcaaatattcggcatgggcagtgggacagcaatctgcatattctttctagtcaaaaatactgattccgaacgacgtgggaacatttattttcattctatcgaagaatatctagaccgcgaccaaaagcttgcaaagttaaaagagttgcaggatgtctcagggatcgctgcggccaacggctggacagagattagcccagactcatatggagattggctgaggcagcgtgaagatggatttaacgattttttcttgttaggagacaagaaagttaattctccgaagctattccatagttattcgcagggcattcttactgcaagggatacctggtgtttcaatggaagtaataaaaaagttgtaaaaaacatgggtgccatgattgatttttataatggcgaagttttaaggttcaataaacgttttaacggtatagatcaaaagtctcgtaacgcgcttgttgattcttttatcgacgccaatccggagaaaattagctggactagggctctgaagcaggatctatcgaaaggtaaaaagtttgatttccaggaaagtggtatgcgggaatgcttgtatcgaccatttactaaacaatggatttactttgatcgcagattcaacgagatggtctatcagatgccgcgtatcttccctaatgcggcagaccacaatctaatgatttgtgtctctggcccaggctgcataacaggtttcagtgcgatcatttcaaaagtgcctgttgagttttgtatagcagcgatgaaaggggggagtcagtgttttccactttatctttacgatgagccgactgaaggccctgatcaaggcggattgtttgtgacgtcggaaacaccagcgctaaggcgtcgcgatgctatcactgacgaggggctgactcatttcgaagctagttatcaagacgagaaaatcggtaaagaagacctgttttattacgtctacggcatactgcattcacaggactaccgcgaacgctatgccgataatctgagcaaggagttaccgcgcattccggcagtgaggaatgctgcggacttctgggtcttcagcaaggcgggccgcgccctggccgatctccacctaaactacgaaaccgtcgagccgtacccgctaaccatcgaagccaagggcacgcttaccgatgctgattaccgagtggagaagatgaagttcgccaagaaaggcgataagaccactgtcatctacaaccaccgcatcaccctcaaaggcgtccctgaagcagcctgggactacgtggttaacgctaaggccgcactgagctgggtgatggagcgccaggccgtgcgcacggacaaagccagcggcatcgtcaacgacgccaacgattgggccaccgaaactatgggcaaccctaagtaccctcttgagctgttccagcgtgtggtcacagtgagcctagaaacccaaaagatcgtcaactcgctgccggcactggatattgct

SEQ ID NO: 33045 - DNA, 871 bp, Pseudomonas syringae
gctgaagagcgtccgcacgtcgggcgcgctgatcaacggtgccaaggagcgtgtcacagaggtcctcaatgcacgcaaggcatcgttcgagcaggcagaactgactgccaaactcgccgccgaatgcatcgacgtgaccctgccgggccgtggccagacctccggtggtctgcacccgattacccgcactctggaacgtatcgaacaattcttcacgcacatcggctacggcattgccgaaggcccggaagtcgaagacgactaccacaatttcgaggcgctcaacatcccgggccatcatccggcccggtcgatgcatgacaccttctatttcaacgcgaacatgctgttgcgcacccatacctcgccggtacaggtccgcaccatggaatcgcagcagccgccgatccgcatcgtctgcccaggccgtgtgtaccgcagcgactccgatatcacccactcgccgatgttccaccagatcgaaggtctgctggtcgatcgcgacatcaattttgccgacctgaaaggcaccatcgaagagttcctgcgggtgttcttcgagaaagagctggctgtgcgcttccgtccttcgtatttcccgttcaccgagccgtcggcagaagtggatatggaatgcgtgatgtgcagtggcaaaggctgccgcgtctgcaaacagaccggttggctggaagtcatgggttgcggcatggttcacccgaacgtgctgcgcatgtccggcatcgatcctgaagagtttcagggcttcgcgttcggcatgggcgtagaacgtctggccatgctgcgttacggcgtcaatgatttgcgcctgttcttcgacaacgatttgcggttcctcgcgcaatttcgctaa

SEQ ID NO: 33046 - DNA, 2376 bp, Pseudomonas syringae
atgaaattcagtgaacaatggctgcgcggctgggtaagcccgcaggtttcccgcgacgagctggttgctcgtctgtcgatggccggtcttgaggttgacagcgtgacgctggccgccggcattttcaccggagtcgtggtgggcgaggtgctgagcaccgagcaacaccctgatgccgacaagttgcgtgtgtgccaggtcagcaatggcagagaaacctttcaggtcgtctgcggtgcgccaaacgtgcgccctggcctgaaaatcccgttcgccatgatcggttccgagctgccgggcgacttcaagatcaagaaagccaaactgcgcggcgtcgagtccaacggcatgctgtgttccgctgccgagttgcaggccggtgaaggcaatgatggcctgatggagctggcggctgatgcgccggtcggccaggacattcgtgtctacctgggcctggacgacgccagcatcgaggtcgacctgaccccgaaccgtggcgactgcctgtcggtggccggtctggcacgtgaagtcggcgcgctgtacgccgccgacgtcacccgcccgcaaatcgctgctgtcagcgctgtacacgatgaagtgcgtccggttgaagtgctggcgccagctgcctgcccgcgctacctcggccgcgtgatccgcaatgtcgacctttcgcgtccgacccctctgtggatggtcgagcgtctgcgtcgttccgatgtgcgcagcatcgatgccgctgtcgacatcaccaactacgtgatgctcgagctgggccagcctctgcatgcgttcgacctggctgaaatcaacggcgggatccgcgtacgcatggccgaggagggcgagaagctcgttctgctcgacggtcaggaagtcagcctgcgtgctgacactctggtcatcgccgaccaccagcgcgcactggccatcgccggcgtgatgggcggcgagcacagcggcgtaacggccggtactcgtgacatcttccttgaaagcgcgttcttcgacaccatttcggtggcgggcaaggcgcgttcctacggcctgcacaccgatgcctcgcaccgctatgaacgtggtgttgactggcaactggcccgtgaagcgatggagcgggccactggcctgttgctggacatcaccggtggcgaagccggtccggtcattgaagtggtcagcgaacagcatctgccttcaattgcgccggtcacgctgcgtgccagccgtgtcgagcaaatgctcggtctggtcatcgagaacgccgagattgagcgtctgctgaccggtcttggcctgacagtgtccgccgaagctgacggccagtggcgtgtagacgtgccaagtcatcgtttcgacatcagccttgaagtcgatctgatcgaagagctggcacgtctttacggctacaaccgcctgccggttcgttacccgcaagcccgtttggccccgcaggccaatgccgaagccaaaggcgatctgcccgagctgcgtcgtctgctggttgcgcgtggttatcaggaagcgatcacctacagcttcatcgaccccaagtggttcgagctgttctcgccgggcgtcaagccactgttgctggccaacccgatctccaacgacatggccgccatgcgcgcctcgttgtggccgggtctggtcaaagcgctgcagcacaacctcaaccgccagcaggaccgcgtccgcatgttcgaaagcggcctgcgcttcgtcggtcagcttgacggcttgaagcaagagccgatgctggccggtgtggtatgtggcagccgtctgccggaaggttgggcgcaaggtcgcgatgcggtcgatttcttcgacgtcaaagccgatgtcgaagcggttctgggttttgccggtgcgctgggtgaattcaccttcacgccgggtcagcacccggctttgcatcctggccagactgcgcgcattttgcgcgacggtcgtgaagtcggcttcctgggtgccatccatccggagctgtcaaaaaacctgggtctggatcgtccggtgtttgttttcgagctggtgcttgccgaagttgctacaggccgtttgccgaaattccacgagttgtcacgcttccctgaagtgcgccgcgacctggcgctgcttgccgatcgcgacgtttccgccagtgcggttctcgacgtaattcgtgaaaatgcaggcgagtggctcacagacctcaggttatttgatgtttaccagggtaaaggcattgatccacatagaaaaagccttgcagtcggcttgacctggcagcatccatcgcgcactcttaatgacgatgaggtaaacgcaacgacacttgctatcctcacctcgctggaggagaggttaaacgccacgttaaggaag

SEQ ID NO: 33047 - DNA, 348 bp, Pseudomonas syringae
atgcgcgcgcacttcaccaagatcctgaacaagtggaagcaggacttgatgcaagaggtcgaccgaacggtggatcacatgaaggacgaagctgccaatttccctgatccggccgaccgtgccagccaggaagaggaattcagccttgaactccgtgcccgtgaccgcgagcgcaagctgatcaagaagatcgacaagacgctgcaattgatcaaggacgaagaatacggctggtgcgaatcctgcggcgtagagatcggcatccgccgtctcgaagcacgcccgactgccgaccagtgcgtcgattgcaagacccttgctgaaatcaaggaaaaacaggtcggtaaa

SEQ ID NO: 33048 - DNA, 2415 bp, Pseudomonas syringae
atgagcgaaaaccaaacgtacgactcgtccagcattaaagtgctgaaaggacttgatgccgtacgcaagcgtcccggaatgtacatcggtgatacagacgatggcagcggtctgcaccatatggtgttcgaggtggttgataactcgatcgacgaagcattggcaggccattgcgacgacatcagcatcatcatccatccagacgaatctatcaccgtgcgcgacaacggccgcggtattccggtagacgtgcataaagaagaaggcgtgtcggcagccgaagtcatcatgaccgtgctccacgcgggtggtaagttcgatgacaactcctacaaagtatccggcggtttgcacggtgtaggtgtttccgtggtcaacgccctttcagaacttctgttgctgacagtgcgtcgcagcggcaagatctgggaacagacctacattcacggtgttccacaagaaccgatgaaaatcgtcggcgaaagcgacagcaccggcacccagattcacttcaagccatctgctgagaccttcaagaatatccacttcagctgggacattctggccaagcggatccgtgaactgtcgttcctgaactccggtgttggcatcgtcctcaaggacgagcgtagcggcaaggaagaactgttcaagtacgaaggcggtttgcgtgcgttcgttgaatacctgaacaccaacaagacgccggtcaacgaagtgttccacttcaatgtccagcgcgatgacggtattggcgtcgagattgccctgcagtggaacgacagcttcaacgagaacctgttgtgcttcaccaacaacattccacagcgcgatggcggcactcacctggtggggttccgatccgcactgacgcgtaacctgaacaactacatcgagcaggaaggtctggccaagaagcacaaggtcgcgaccaccggtgacgatgcgcgtgaaggtctgactgcaattatctcggtcaaagtacctgatccgaagttcagctcgcagaccaaagacaagctggtttcgtccgaagtcaaaactgcagtcgaacaggaaatgggcaagtacttctccgacttcctgctggaaaacccgaacgaagccaaagccgtcgtcggcaagatgatcgacgcagcccgtgcccgtgaagccgcgcgcaaggcccgtgagatgactcgccgtaaaggcgcgctggacatcgccggcttgccaggcaaactggctgactgccaggaaaaagaccctgccctctccgaactgtacctggtggaaggggactctgctggcggatcagccaagcagggacgtaaccgtagaacccaggccatcctgcctcttaagggcaagattctgaacgttgaaaaagcacgcttcgacaagatgatctcttctcaggaagtgggcaccttgatcaccgcgctgggctgtggcattggccgcgaagagtacaacatcgacaagttgcgctatcacaacatcatcatcatgaccgatgctgacgtcgacggctcgcacatccgcaccctgctgctgaccttcttcttccgtcagttgccggagctaatcgagcgtggctacatatacatcgctcagccgccgctgtacaaggtcaagaaaggcaagcaggagcagtacatcaaggacgacgaggccatggaagaatacatgacccaatcggcccttgaagacgccagtctgcacctcagcgagtctgcaccgggtatctcgggcaccgcgctggagaaactggttcacgacttccgcatggtcatgaaaaccctcaagcgcctctcgcgtctgtacccacaggaattgaccgagcacttcgtctacctgccgccaatcaccctggagcagctatccgaccacgagggcatgcaagcctggctggcactgttcgacgtgcgtctgcgcactggcgagaagtcgggtctggtctacaaagccagcctgcgcgaagaccgtgagcgtaacgtctggctgccagaggtcgaactgatctcccacggcctgtcgaattacatcaccttcaaccgcgacttcttcggcagcaacgactacaagaccgtcacggccctgggcgcgcagataagcacgctgctggaagaaggcgcgtacgtgcaacgtggcgagcgcaaaaagcccgtcaccgagttcaaacaagccctcgcctggctgatggctgaaagcaccaagcgtcataccatccagcgctacaaaggactgggtgaaatgaacccggatcagctctgggaaaccactatggacccaagcgtgcgtcgcatgctcaaagtcactatcgaagacgccattggcgctgaccagatcttcaacaccctgatgggtgatgcggtcgaaccacgccgtgacttcatcgagagcaatgcgctggcggtgtccaacctggacttc

SEQ ID NO: 33049 - DNA, 549 bp, Pseudomonas syringae
ttggccattttcctactccaatcagttgcggaacgggaatttgaaagcacgcagcaatgcgcgaccttcatcatcgttcttggcagtggtggtcagggtaatgtccagaccgcggagagcatcgatcttgtcgtaatcgatttccgggaaaatgatctgctcttttacgcccatgctgtagttaccacgaccatcgaaggacttggcattcaggccgcggaagtcgcgaacccgaggcagggagatcgacagcagacgatccaggaactcatacatacgatcgcggcgcagagtcactttgacgccgatcggccaaccttcacggactttaaagccagcgatggatttccgagcgtaagtcacaacgactttttgaccggtgatcttttccaggtcagcaacagcgttctcgatgacttttttgtcaccgatcgcctcgcccagacccatgttcagggtgattttggtaacgcgcggaacttccatcacgttcccaagcttaagttcttccttaagcttcggagcgatttccttccgataaatctcttt

SEQ ID NO: 33050 - DNA, 312 bp, Pseudomonas syringae
atgcaaaagattcgtcgtgacgacgagatcatcgtgatcgccggtaaagacaaaggtaagcgcggtaaggtgctcaaggttctcgctgacgaccgtctggtcgttggtgggatcaacctggtgaagcgtcataccaagccaaacccgatgtcgggcgtacagggcggtatcgtcgagaaagaagcgccattgcacgcttctaacgtcgctattttcaacggcgcaaccaacaaggcagaccgcgttggtttcaaagttgaagatggcaagaaaattcgtgtcttcaagtcgacccaaaaagcggttgatgct

SEQ ID NO: 33051 - DNA, 366 bp, Pseudomonas syringae
atgattcagactcaatccatgctcgatgtggccgataacagcggcgcacgccgcgttatgtgcatcaaggtgctgggtggctcccatcgtcgttacgctggtatcggtgacatcatcaaagtgaccgtcaaggaagcaattccgcgcggcaaggtgaaaaaaggccaagtgatgactgcagtcgtagtccgcactcgccatggtgtccgtcgtgctgacggctccatcatccgcttcgatggcaacgctgctgttcttctgaacaacaagcaagagccgatcggtacccgtatctttgggccagtgacccgtgaacttcgtactgagaagttcatgaagattgtctcgctcgccccagaagtgctc

SEQ ID NO: 33052 - DNA, 1398 bp, Pseudomonas syringae
gtggttgaagaggcggtcagcgtcatcaaggacgcccaggcgcgtcttgatcaggtttacgctgaatatgccgagccggacgctgatttcgacaagctggcggccgagcaggccaagcttgagtcgatcctgcaagccagcgacggtcataacctggagcgtcaactcgaagtcgctgccgatgcgctgcgtttgcctgcctgggatgcgaaggtttcggtactgtccggcggtgaaaagcgccgtgtcgcgctgtgccgtctgctgttgtccgcccccgacatgctgctgctcgacgaaccgaccaaccacctggacgccgattccgtcgcctggctggagcatttcctgcacgatttcccgggcaccgtggttgcgatcacgcacgaccgttacttcctggataacgtggcgggctggattctggaactcgaccgcggcgcgggcattccttatgaaggcaactattctggctggctggaagcgaaatctgaccgtctggctcaggaatcaaagcagcagacagcccatgaaaaggccatgaaagacgagctggaatgggtccgcaagggcgccaaggcacgtcagtccaaatccaaggcgcgtctgcaacgctttgaagaaatgcagtcgcaggaattccagaagcgcagtgagaccaacgagatctacatcccggccggtccgcgtctgggcgacaaggtcatcgagttcaagaacgtcaccaagggttacggcgaccgtgtgttgatcgacaacctgtcgttctccatgcccaaaggcgccatcgttggcgtgatcggcggtaacggtgccggtaaatcgaccctgttccgcatgctgatgggcaaggaacaaccggattcgggcagcatcgaagttggcgaaacggtgcaactggcctgtgtcgaccagagccgtgatgacctggacggcagcaagtcggtgttccaggcggtttccgatggttccgacgtgatccgtatcggcaactatgaaatcccgtcgcgcacctacgtgggccgtttcaacttcaagggtggcgatcagcagaagttcgtcaaggacctgtccggtggtgagcgcggtcgtctgcacttggcgttgacccttaaagagggcggcaacgtgctgctgctcgacgaaccgtccaacgacctcgacgttgaaaccctgcgttcgctggaggaagcgctgctggacttcccgggcgccgccattgtgatctcccacgatcggtggttccttgaccgcgtggccacgcacattctggcgtacgaagatgattcgcaagcgatcttcttcgagggcaactacaccgagtatgaagcggatcgcaagaagcgtcttggcgacgctgctgcccagccacaccgcgtacgtcacaagaaactggcc

SEQ ID NO: 33053 - DNA, 671 bp, Pseudomonas syringae
attctcaacttccggcgtctgttggaaaagctgagttggcaggcgggattttgcaggtcatcaatggctatctgggtgatcgaggtttgatgctgcgccaaggtacggtggtcgatgcgacgatcattcatgcgccgagctcgaccaagaacaaggacggcaaacgcgatcccgaaatgcatcagacgaagaaaggaaaccagtatttcttcggcatgaaagcgcatatcggcgtcgatgccgagtcgggtttagtccatagcctggtgggtactgcggcgaatgtggcggacgtgactcaggttgatcaattgctacatggtgaggaaacctatgtcagcggtgatgcgggctacaccggcgtggacaagcgtgcggagcatcaggatcgtcagatgatctggtcaattgcggcccgcccaagccgttataaaaagcatggcgagaaaagtttgatcgcacgggtctatcgcaaaatcgagttcacgaaagcccagttacgggcgaaggttgaacatccgtttcgcgtgatcaagcgccagtttggttatacgaaagtccggtttcgcgggctggctaaaaacaccgcgcaacaggctactctgtttgccttgtcgaacctttggatggtgcgaaaacggctgctggcgatgggagaggtgcgcctgtaa

SEQ ID NO: 33054 - DNA, 843 bp, Pseudomonas syringae
ttgaggacggctcctagccgtccggcttatccgctgatggcgatgctgcgtattcacctgatgcagaactggtttggttacagcgatccggcgatggaggaagcactttacgagacaacgatcctgcgccagttcgcagggttgagtctggatcgaatcgccgatgaaaccacgattctcaacttccggcgtctgttggaaaagcatgagttggcaggcgggattttgcaggtcatcaatggctatctgggtgatcgaggtttgatgctgcgccaaggtacggtggtcgatgcgacgatcattcatgcgccgagctcgaccaagaacaaggacggcaaacgcgatcccgaaatgcatcagacgaagaaaggaaaccagtatttcttcggcatgaaagcgcatatcggcgtcgatgccgagtcgggtttagtccatagcctggtgggtactgcggcgaatgtggcggacgtgactcaggttgatcaattgctacatggtgaggaaacctatgtcagcggtgatgcgggctacaccggcgtggacaagcgtgcggagcatcaggatcgtcagatgatctggtcaattgcggcccgcccaagccgttataaaaagcatggcgagaaaagtttgatcgcacgggtctatcgcaaaatcgagttcacgaaagcccagttacgggcgaaggttgaacatccgtttcgcgtgatcaagcgccagtttggttatacgaaagtccggtttcgcgggctggctaaaaacaccgcgcaacaggctactctgtttgccttgtcgaacctttggatggtgcgaaaacggctgctggcgatgggagaggtgcgcctg

SEQ ID NO: 33055 - DNA, 777 bp, Pseudomonas syringae
atgaaagaactgacggcagatgatgagcgactggcgcgcaaggccatagagttgctggagctgttcgccctcaatatcgatgataccgagcagcgtattgtcggtgtctgccagcgcgcgtggacgcccgtgggacctgtcgctgccgtttgtgtccagcagcgcttcgtgtgcctggcgcgaacgaccctggaccgcatgtacgcgagggatataaaagtggtggccgtcgtcaacttcccgcatggcggcagcaacgtcgatttggtggcctccgaggtgcgctcagccctgatgtccggggctgacgaaatcgatgttgtctatccgttccgcgcgctgctgggcggtgaccggcagaccggtatggaattgctcgctacctgtgcgaagttatgcagcgggcgcgcaacgttgacggcgacgcttgaaaccggtgacctgcgtgactcgcaaatgatcctcgacgcctgtcgcgatgcgattgcgtcgggcgctgacttcatcaagaccagcaccggcaaggcagccgttcatgtcacgccacaggctgcacgcatcatgctgggagccctggctgatgtcggcgggcaggccgggctcaaagtcgcgggcgggcttcgcacctttgaagaggcgcgcgcgtacatggctatggcccgtggccgtttcgggccgcagtgggtcaatatcaggcgggtgcggctgggtggctccagtttgctggacgatttgctggcaagtctgggcctgctcgaagctagcagcagcggcttt

SEQ ID NO: 33056 - DNA, 975 bp, Pseudomonas syringae; identical to SEQ ID NO: 33042

SEQ ID NO: 33057 - DNA, 1167 bp, Pseudomonas syringae
atgctcatgaccgtcttgaagatgaccgacctcgatctgcaaggtaaacgtgtactgatccgcgaagacctcaacgtcccgataaaggacggcgttgtcagcagcgatgcacgtattcttgcttcgctgccgaccatcaggctggcgctggaaaaaggcgcggctgtcatggtctgctcgcaccttggccgtccgaccgagggcgagttttctgctgaaaacagcctcaagccggttgctgaatacctgagcaaggcattgggtcgtgacgttccgctggtcgccgattacctggacggcgttgacgtcaaggcgggcgatatcgtgctgttcgagaacgttcgcttcaacaagggcgagaaaaagaacgccgacgagctggcgcagaagtacgcggccctgtgcgacgtgttcgtgatggacgcttttggcaccgctcaccgcgctgaaggctcgacccacggcgtggccaaatacgccaaggttgccgctgctggcccgttgctggctgccgaactggaagcgctgggcaaggcgctgggcgctccggctcagccaatggctgctattgttgccggctccaaagtgtccaccaagctggacgtgctcaacagcctgagcgcgatctgcgatcagttgattgttggcggcgggattgccaacacctttctggctgcagccggtcacaaggtcggtaaatcgctttacgagccagacctgctcgacaccgcgcgcgccattgccgccaaggtcagcgtgccgttgccgactgacgtggtggttgccaaggaattcgccgagagtgccactgcaaccgtcaagctgatcgccgatgtggccgacgacgacatgattctggatattggtccacagactgctgcgcacttcgccgaactgttgaaatcttccgggactatcctgtggaacggtccggttggcgtgttcgaattcgaccagttcggtgaaggcaccaaaacgctggccaaggccattgctgaaagcaaagcgttctccatcgcgggtggtggcgacaccctggccgcgatcgacaagtacggtgtggcagatcagatttcctatatttcgaccggtggcggtgcgttcctcgaattcgtggaaggcaaggttctgccagcggttgaaatgctcgaacaacgtgccagggcc

SEQ ID NO: 33058 - DNA, 1062 bp, Pseudomonas syringae
atggcacttatcagcatgcgccagatgttggaccacgcagccgaattcggctatggcgttccagctttcaacgtaaacaacctggaacagatgcgcgccattatggaagcggccgacaagaccgactccccggtgatcgttcaggcttctgccggtgcccgcaaatacgccggtgcgccgttcctgcgccacctgattctggcggcaattgaagagtttccgcacatcccggtggtcatgcaccaggaccacggcaccagccctgatatctgccagcgctcgatccagctgggcttcagctcggtcatgatggacggctcgctgcgtgaagacggcaagaccccggctgactatgactacaacgtcgatgtgacccgtcgcgtagtggcctttgcccacgcctgcggtgtttccgtggaaggcgagctgggtgttctgggttcgctggaaaccggcatggccggtgaagaagacggcgttggcgcagagggcgttctggaccacagccagatgctgactgaccccgaggaagcggctgacttcgtcaagcgcacccaggttgatgcactggccatcgccatcggcaccagccacggcgcgtacaagttcaccaagccgcctaccggcgacatcctggcgatcgagcggatcaaagagatccacaagcgcatcccgaacactcaccttgtgatgcacggttcttcatcggtcccacaggaatggctgaagatcatcaacgagttcggcggcgacatcaaagaaacgtacggcgtgccggtcgaagaaatcgttgaaggcatcaagcacggcgtgcgcaaggtcaacatcgacactgacctgcgtctggcttctaccggtgccatccgcgaattcatggccaaacacccaagcgagttcgacccgcgcaagtacctggccaaaaccgtttcggccatgcgcgacgtgtgcatcgcgcgttacgaagcattcggcaccgctggcaacgcctcgaagatcaaaccggtctccctggacgccatgttcgaacgctacgcccgtggcgagctggatgccaagatcaac

SEQ ID NO: 33059 - DNA, 1308 bp, Pseudomonas syringae
atgtacgtctgcgggatgaccgtgtacgactactgccacctggggcacggccgcagcatggtggcgttcgacctggttacccgctggttgcgcttcagcggctacgacctgacgtatgtgcgcaatatcaccgacattgacgacaagatcatcaatcgcgcacgtgacaacggcgagtcgttcgacgcgctgaccgcgcgcatgatagatgccatgcatgaggacgaggcgcgcctcaacatcctcaagccggacatggaaccgcgtgccaccgaccatatccccggcatgcatgccatgatccagacgctgatcgacaagggctatgcctacgcgccgggcaacggcgatgtgtattaccgggtcggcaagtttcagggttacggcaagctgtcgcgcaagaagattgaagacctgcgcatcggcgcgcgcatcgaagtggacgagtccaagcaggatccactggacttcgtgctctggaaaggcgtcaagccaggcgagccgagctgggagtcgccgtggggtgcgggtcgcccgggctggcacatcgaatgctcggtgatgtccacctgctgcctgggtgacaccttcgacattcatggcggcggcagcgatctcgagtttccgcaccatgaaaacgaaatcgcccaaagcgaagcggccactggcaagccttacgccaacgcctggttacactgcgggatgatccgcatcaatggcgagaagatgtccaagtccttgaacaacttcttcacccttcgcgacgtgctggaaaaataccacccggaagtggtgcgttacctgttggtgtcgagccactatcgcagcgcgatcaactattccgaagacagcctgcgcgagtccaaggcagctctggagcgcttctatcacgcgctcaaaggcttgccggctgccgagcctgcaggtggcgaggcgttcgtcgagcgtttcaccaccgcgatgaacgatgacttcggtacaccggaagcctgcgcagtgctgttcgagatggttcgtgaaatcaaccgcctgcgtgaaaccgacgttgcagcagcggcgggcctggcggcgcgtttgaagcaactggccagcgtgctgggtgtgctgcagctggaagccgacgactttttgcgcgcaggcgcgcaagggcgggtcgatgcagcagaggtagaagcgctgattcaggcgcgtctggccgcgcgtgcagccaaagactgggccgagtccgaccgaatccgcgaccagatcaccgccatgggcgtgcttctggaagacggcaagggcggcacgacctggcgtctgggggac

SEQ ID NO: 33060 - DNA, 1692 bp, Pseudomonas syringae
atgagcaagcccactccagaacccgctgcccattcaaaggcaggcccagccgtaccgaccaacttcctgcgtccgatcgtgcaggcagacctggactcgggcaaacacagcaaaatcatcacgcgctttccgccggagcccaatggctacctgcacattggtcatgccaagtcgatctgcgtgaatttcggtctggccaaggagttcggtggcgatacgcacctgcgtttcgatgacaccaacccggccaaggaagaccaggaatacatcgacgccatcatgaacgacgtcaagtggctgggcttcgagtgggccggtgaagtgcgttacgcctcgcagtatttcgatcagttgcacgactgggcggtcgagctgatcaaggccggcaaggcctacgtggacgatctgacccccgagcaggcccgcgaataccgtggcaccctgaccgagccgggcaagaacagcccgttccgtgagcgcagcgttgaggaaaatatcgacctgttcgcgcgcatgaaggctggtgaattcgaggacggcgctcgcgtactgcgcgccaaaatcgacatggcctcgcccaacatgaacctgcgtgatccgattctgtaccgcattcgtcatgcacaccaccaccagaccggtgacaagtggtgcatctacccgatctacgacttcacccacggccagtcggatgccatcgaggggatcacccactcgatctgcaccctggagttcgaaagccaccgtccgttgtatgactggttcctcgacaacctgccggtgccgtgcaaacctcgccagtacgagttctcgcgcctgaacctgaactacaccatcaccagcaagcgcaagctcaagcaactggttgacgaaaaacacgtcaacggctgggatgacccgcgcatgtcgacgctgtcgggttttcgccgtcgtggctacacgcccaagtccattcgcaatttctgcgaaatgatcggcaccaaccgttccgacggcgtggtcgatttcggcatgctcgagttcagcattcgtgacgatctggaccacagcgccccgcgtgccatgtgcgtgctgcgcccgctgaaagtcgtgatcaccaactacccggaaggtcaggtcgagaagctggagctgccgcgccatccgaaagaagacctgggcatgcgcgagctgccgttttcgcgggaaatctacatcgaccgcgacgattacatggaagagccgccgaagggctacaagcgccttgagcccaatggcgaagtgcgtctgcgtggcagctatgtgatccgtgccgacgaagcgatcaaggacgccgacggcaacatcgtcgaactgcgttgctcctacgacccggacaccctgggcaagaaccccgaaggccgcaaggtcaaaggcgtggtgcactgggtgccggcggccgagagcgttgaatgcgaagtgcgtctgtacgatcgcctgttccgctcagccaacccggaaaaagccgaagacggcgcgagcttcctggacaacatcaaccccgattccctgcaagtgctgaccggttgtcgtgccgaaccttcattgggtcatgcgcaaccggaagaccgtttccagttcgaacgcgaaggttatttctgcgcggacatcaaggactcgaaacccggtcaaccagtcttcaaccgcacggtcacgttgcgggattcctggacc

SEQ ID NO: 33061 - DNA, 303 bp, Pseudomonas syringae
atggccaagaagagcatgaaaaaccgtgagttgaagcgtcagctcaccgttgccaagtacgccaagaagcgtgcagagctgaaagctatcatcgttgatctgaacgcaagtccagaagcgcgttgggaagctaccgtagctctgcagaagcaaccacgtgacgcaagcgctgcgcgcatgcgtaaccgttgccgtatcactggtcgtccgcacggcgtctaccgcaagttcggcctcggccgtaacaagctgcgtgaagcagctatgcgtggcgacgttccaggtctggttaaagccagctgg

SEQ ID NO: 33062 - DNA, 252 bp, Pseudomonas syringae
atgtatgagttcctggatcgtctgctgtcgatctccctgcctcgggttcgcgacttccgcggcctgaatgccaagtccttcgatggtcgtggtaactacagcatgggcgtaaaagagcagatcattttcccggaaatcgattacgacaagatcgatgctctccgcggtctggacattaccctgaccaccactgccaagaacgatgatgaaggtcgcgcattgctgcgtgctttcaaattcccgttccgcaac

SEQ ID NO: 33063 - DNA, 408 bp, Pseudomonas syringae
atgctcattcttcacggcaagcagtcactcaacgaagacgtgcgtgatgctgtcgcggacaagcgcaagcagggctgggagctggatgttcggctgacctggaaggcgggcgatgcgcagcgtctggtcaatgaagcgctggcggctgggcaccggcatatcgtggcgggcggcggtgacggcaccttgcgtgacattgccgaagcgctggcgctggctgcaaccaaggccagtctgaccatcctgccgctgggcactgccaacgattttgcccgtgctgccggtgtgccgcttgatgtgtccaaggccctgcagctcatggacgtggcgccgcgcgctgtcgatctgggcgaggtgggcggcaagctgtttctcaacatggccacgggtggttttggcagccaggct

SEQ ID NO: 33064 - DNA, 771 bp, Pseudomonas syringae
gtgctgggctgcgacatggtatttgccgtctacctgccgcctcaggcagagcagggcggcaagctgcccgtgctgtattggctgtcgggtctgacctgcacggacgaaaacttcatgcagaaagcagcggccctgcggttcgcggcggagctgggtattatcatcgtcgcgcctgataccagcccgcgcggggccgatgtgccggacgaccctgagggtgcctgggacttcggtcacggcgcaggtttctacctcaatgccaccgagcagccgtatgcgcggcattatcaaatgcacgattacgtggtcaaggagttgcccgcactggtcgaagcgcactttccggcctcacaggcccgcagtatcagtggccactcgatgggtggtcacggcgcgctggtgtgtgccttgcgcaatccgggtcgttacaaatcggtgtcggcattttcgccaatcagcaatccgatcgattgcccgtggggtcagaaggcattctcgcgttacttgggcgaagaccgctcgcgctggcgtgaatgggatgccagcgtgttgattgccgaggctgcggaaaaacttccgacgctggttgatcagggtgatcgtgacgattttctgctcaatcagctcaagccagaggtgttggttcaggccgcgaaagctgcgcattatccgctcacactgcggatgcagcctggctatgaccacagctatttcttcatcgccagtttcatcgaagaccatctgaggcatcacgctgcagccttgaacagc

SEQ ID NO: 33065 - DNA, 616 bp, Pseudomonas syringae
gtgcagcacatcatcggcatgccgttgcagctcatcatcatcggcatggtgcagtcgttcatcattttcatcatcaatgcgcagcagttgctcatcatttccatgctcatgccaggcatcggcatcaacatgcacttcatgcaatcagcctcgacggtgcaggtcatcatgcacttcatcatcggcataggcatgcccatcggcatcatcatcggcatgttcatgccagacatcatgttcatcattgccataccgtcttccgacatgcacatcatcgacatgttgccgcactgcatcatcatcggcatgccgcaggtcatcatcatcgacatcatgtcggcgctgttcttgaacatagtcatgtccatgcccgcagcaggcttcatggtgcacatcatgccgtcggccatcatctcgcactgcatggtcgccatcatcatgggcatgcccatcatcggcatcattggcatggcgttgttcataggcatctgcattgcattcatcatgttcgaaactccgtaatcgaaagggatgttgaaattcatgggcggattctagagatacgcagacacgccgcaagacgctggtcaaacggtcggattcaacgctcaaggcg

SEQ ID NO: 33066 - DNA, 492 bp, Pseudomonas syringae
ttgcagcttgactcttcgttcagcccggtccgccgtatcgcatacgtggtggaaaacgcccgtgtcgagcagcgcactaacctggacaagctggttattgatctggaaaccaacggtactctggacccggaagaggctatccgtcgcgctgcaaccatcctgcaacagcagttggctgcgttcgtggacctcaaaggcgacagcgaaccagtggtaatcgaacaggaagacgagatcgatccgatcctgcttcgtccggttgacgatttggaactgaccgtgcgttcggccaactgccttaaggcggagaacatctactacatcggtgacctgattcagcgcaccgaagtagagttgttgaagactccgaacctgggcaagaaatccttgaccgagatcaaggacgttctggcttcgcgtggtctgtccctcggcatgcgcctcgacaactggccgccggcaagtcttaagaaggacgacaaggctacggcc

SEQ ID NO: 33067 - DNA, 723 bp, Pseudomonas syringae
atggcaacgctcaaagcccagcatctggctaaaagctacaagagccgacaggtcgtacgcgatgtgagtatctccatcgacagcggccagatcgtcggcttgctgggccccaacggcgccggcaagaccacgtgcttctacatgatcgtgggtctggtccaggctgatcagggtcgcgtgctgattgacgatctggacatcagccaccagcccatgcacggccgcgcacgcgccggtattggctatctgccgcaggaagcctcgatcttccgcaagctgtcggtgtccgacaacatcatggcgattctcgaaacccgcaaggaactcgacgccggggctcgccgcaaggagctggaaagtctcctgcaggagtttcacatcacccacattcgcgacaacctgggcatgagcctgtcgggtggtgagcgtcgccgtgtggagattgcccgtgcgctggccacgtcgcccaagttcatcctgctggacgaaccgttcgcaggcgtcgacccgatttcggtgggtgatatcaagcagatcattcaccatctcaaggccaagggtatcggcgtactgatcacagaccacaacgtccgtgaaacgctggacatctgcgaaaccgcctacatcgtcaacgatgggcaactgatcgcagaaggcgactccgagaccattctggcgaatcaactggtgaaagaggtctacctcggtcacgaattccgcctt

SEQ ID NO: 33068 - DNA, 531 bp, Pseudomonas syringae
atgtcacgcgtagctaagaaccccgttaagctgccatcaggcgtcgaagtcaaactcgtcggccagcagctttcggtgaagggtgccaagggcactctagaactgattatccattcgtctgttgagattgttgaagaagctggtgagctgcgtttcgctgctcgcaatggcgatcaacaaacccgcgcaatggcaggcaccactcgtgcactggttaacaacatggtccagggcgtaagccaaggctttgagcgcaagctccagctggtcggtgttggttacaaggcgcaagcaaaaggcacggtcctgaaccttgcacttggcttttcgcacccggtggactatgaattgccgaatggcatcaccgctgagacccccagccagaccgatatcctgattcgcggtatcgataagcagttggttggtcaagtggccgctgagatccgcgacttccgccgtcctgagccttacaaaggcaaaggtgtgcgttacgcggacgaagtcgtccgccgtaaagaagccaagaagaag

SEQ ID NO: 33069 - DNA, 1332 bp, Pseudomonas syringae
atggctaagcaaggtgctctctctgcgctcggcaaaggcggtatgtctgaactctgggctcgtctgcgttttctgttcctggcgattatcgtctaccgaataggcgcacacatcccggttccaggtatcaacccggaccgactcgcagaactgtttcgacagaatgaggggaccattcttagcttgttcaacatgttttccggcggtgcgctggagcggatgagcatatttgcactggggatcatgccgtacatttcggcgtcgatcatcatgcagttgatgacagccgtcagcccacagctggagcagttgaagaaggaaggtgaggctggccgtcgcaagataagccagtacacccgctacggcactgtggttctggctctggttcaagctatcggcatgtccgttggcctggcgagtcagggcgtcgcgttttctggggaccttggtttccactttgtggccgtaactaccttcgtggcaggtgcgatgttcatgatgtggctaggcgagcagatcaccgagcgcggtgtcggcaacggtatctcgatgttgatcttcgcaggtatcgtggctggtcttccgagagcgatagggcagtctttcgagtctgcccgtcagggtgatatcaacattttcgccctggttgcaatcggtttgctggcagtagcgatcatcggttttgtggtgttcattgagcgtggtcagcgtcgaatagccgttcactatgccaagcgtcagcagggccgcaaggtcttcgctgcgcagacaagccacctaccgttgaaagtgaacatggctggcgtaattccggccattttcgcgagcagcattttgctgttcccggcttcgttggggtcctggttcggtcagtctgaaggtctgggctggttgcaggacatctcgcagtcgatcgctcctggtcagccgttgaatattctgctgtttagtgcagggattattttcttctgcttcttctatacggcgttgatgttcaatccgaaagacgtagcggaaaacctgaagaagtccggtgcctttattccgggtatccgtccaggcgagcagtcggcgcgctacattgatggcgttctgactcgtttgaccatgttcggtgctctatatatgacggccgtgtgtctgcttccccagtttctggtggtcgcggcaaacgtaccgttctaccttggcgggacctcgttgctgatcgtggtcgtggttgtgatggactttatgtcgcaagtgcaatctcacctcgtttcgcaccagtacgaatccctgatgaagaaagccaacctgaagggctacggtggcagcggcggtatgctgcgc

SEQ ID NO: 33070 - DNA, 996 bp, Pseudomonas syringae
agcctgcgcgagcaactgacggcgcgcttgcccgactacatggtgcccgcgcagatcctgctgctggaccaactgccgctgaccgccaacggcaagctcgacaagcgcgccttacccaagccgggcgtagtcaaacagcgctataccgcaccggtcggcgagatcgaagaaaagctcgccgccgtgtgggccgacgttctgaagctggagcaggtcggcagcaccgacaacttcttcgaactgggcggcgattcgatcctcagtctgcaaatcatcgcccgcgccaagcgccagggcatcaagctcagccccaagcaattgttcgaaaaacagaccatcggccaactggcttctgtggccagactgatcgagaaaaagcccgcagcggcggcagagcaggtcagcggttcgctgccgctgctgccgattcaggcgcgtttctttgaaatggacatccctgagcgtcagcactggaatcaggcgctgatgctcaagcccctgcaaacgctggatgtaacccatcttcaagcggcactcacggcagtcgccatcgtcatgctcagcgcccgtgatgagctggatgaccgtcttatcggcttcaaggtgggcgccgacgattacatcaccaagccctttgcgatgtccgaggtgctcgcccgcgtcgaagcagtggtcggccgacgccagcgcaaggacaaccgggtgatggtggtcgccgatctgcagttcgatctggacaccctcgagataagccgcaacggtgcgccattgaaactcaacccgaccaacatgaaactgcttgaattgttgatgcgcaagagcccgcacatcgtcaaacgctccgagctggaagaagtgctctgggggcgcgatgccccgaacagcagcagcctgcgcagcaatattcatatcctccggcgagtgctggacggcggtcatgaaaccccgctgctgcatactgcacacggtcttggctacaaactgtgcgtacaaagc

SEQ ID NO: 33071 - DNA, 483 bp, Pseudomonas syringae
gtggggtgggtcagcctgcttgaacagcggctcaaggccgagggatacaccgacaaggtggtcaatgcgtcgatcagcggcgacaccagtgccgggggccaggcgcgtctgcctgcgctgcttgcagagcataagcccgcgctggtcattctcgaattgggtggcaacgacgggttgcgtggccagcagccagctcaattgcaacaaaacctttcgtcgatgatcgacagctcacgcgcggccggtgccagggtgctattgctcggtatgcagataccgcccaattacggcccgcgttacaccaccgccttcaaagaggtctacagccatctggccgaagagaaaaaggtgccgttcgtgccgttctttctcgaaggtgtcggcggggtgcccgggttgatgcaggccgatggtctgcatcccgccgcagcggcgcagggcaagttgctggaaaatgtctggccgagcctgaaaccgctgctt

SEQ ID NO: 33072 - DNA, 975 bp, Pseudomonas syringae; identical to SEQ ID NO: 33042

SEQ ID NO: 33073 - DNA, 975 bp, Pseudomonas syringae; identical to SEQ ID NO: 33042

SEQ ID NO: 33074 - DNA, 1179 bp, Pseudomonas syringae
atgcctcggataacccttgaatcagccacgcttgaacgtgcgcactatgactatctgattgtcggcgcgggttttgcgggcagtgtgctggcggaaagactggcggccggatcggacaagcgcgttctgttgatcgaccgacgcccccatattgcaggtaacgcttacgatcatctggacggcgccggtgtgctggttcatcagtatgggccgcatatcttccacaccaatgccgcgcgtattgtggaatacctgtcgcgatttaccgaatggcgcgactacgaacaccgtgtgcttgccagcgtagacggtcaattgctgcctatcccgatcaacctcgatacgctcaacagcctgtatgggctgcagatgaacgagcgggaagccgaagcgtttcttgccagccgagccgagcccgtggaaacgatacaaacttctgaagacgttgtgatcaatcaagtcggccgcgagctgtacgaaaagttctttcgaggctatacccgcaaacagtggggcctggacccgtcgcaactggacagggcggtcaccgcgcgggtgccgacccgcactaactcggacagtcgttatttcaccgatacttttcagaaaatgccgctgcatggctacacgcgtatgtttgaacggatgctggatcacccgcttatcgacatcgcgctgggggtcggttttgccgatgtgcgtgaggtggcgcagtatcggcatctgatctattgcgggccgatcgatgaatacttcgattattgctacgggcgtcttccgtatcggtcactgcggttcgagcacacgactgttgatcaggcccggtttcaatccgtggcagtggtcaactacccggatgagaccgttcctcatacgcgcatcactgagtacaagcacctcacgggtcaacagcatgcccgcaccagtctcagtcatgaatttcccagtgccgagggcgacccttattacccgatcccccgaccggaaaacgcggagttgtacaagcgctacaaggcattggctgatcaatcggatgaggtcacattcgttggccgcctgggcacttacaagtactacaacatggatcaggtcgtcggtcaggcattggcgctttaccagcgcctgcgccaagggttgccggagcggattcccgaggcagttgaacggcctgcgcgaggt

SEQ ID NO: 33075 - DNA, 948 bp, Pseudomonas syringae
ttgcaggccgctacacgtaagcatacccgccgcgagcgctttctcatcgagatggatcaggttgtgccctggaaaggcttgattgcccttatcgaaccacattatccaaagggcgaaggtggccgtccggcttatccgctgatggcgatgctgcgtattcacctgatgcagaactggtttggttacagcgatccggcgatggaggaagcactttacgagacaacgatcctgcgccagttcgcagggttgagtctggatcgaatcgccgatgaaaccacgattctcaacttccggcgtctgttggaaaagcatgagttggcaggcgggattttgcaggtcatcaatggctatctgggtgatcgaggtttgatgctgcgccaaggtacggtggtcgatgcgacgatcattcatgcgccgagctcgaccaagaacaaggacggcaaacgcgatcccgaaatgcatcagacgaagaaaggaaaccagtatttcttcggcatgaaagcgcatatcggcgtcgatgccgagtcgggtttagtccatagcctggtgggtactgcggcgaatgtggcggacgtgactcaggttgatcaattgctacatggtgaggaaacctatgtcagcggtgatgcgggctacaccggcgtggacaagcgtgcggagcatcaggatcgtcagatgatctggtcaattgcggcccgcccaagccgttataaaaagcatggcgagaaaagtttgatcgcacgggtctatcgcaaaatcgagttcacgaaagcccagttacgggcgaaggttgaacatccgtttcgcgtgatcaagcgccagtttggttatacgaaagtccggtttcgcgggctggctaaaaacaccgcgcaacaggctactctgtttgccttgtcgaacctttggatggtgcgaaaacggctgctggcgatgggagaggtgcgcctg

SEQ ID NO: 33076 - DNA, 729 bp, Pseudomonas syringae
gtgcgctcaagtcggcatgcgtgtagcgcaagaggacataaagtgaaaatcaaagcacccgttatcaccatcgacggacctagcggttcaggaaaaggcactgtagccgggctgctggccaagaaacttggctggtgcctgcttgattccggcgcgctataccgcctgctggccttcgctgcgcgcaatcatggcgtcgacctgaccaacgaagaagcgctcaaattgcttgccgctcatctggatgttcagttcgaaacgacagcggcggggcaggggcagcgcatcattcttgaaggtgaggacgttacccaggccattcgcaacgagcagatcggcagtggcgcatctcaggtggcgtctttgcccgctgtgcgcgatgccttgctgatgcgccagcgcgcctttcaggaagagccggggcttgtcgcagacggtcgcgacatgggcacggtcgtgtttcccgacgccccgctgaaggtattccttaccgcgagtgccgaggaacgtgcacgccgacgttacttgcagttgaaggccaagggcgatgatgttagtctgtcgagtctgctagatgagatatgtgcacgcgacgagcgtgacacccagcgagcggtagcaccgctaaagccggcgcacgacgccatacagctggattccactgaattgtccatcgaacaggtgctggaacgcattctgagtgaaatcgcgcttcgcgatatcgccggg

SEQ ID NO: 33077 - DNA, 354 bp, Pseudomonas syringae
ttggaaatcttcaaagaatttacattcgagtcagcacatcttctcccccacgttccggcggggcataagtgtggacgtctgcacgggcattcgtttcgtgtcggcattcatctggctggcaaggtcgatcctcatacaggctggatccgggacttctcggaaatcaaagctattttcaaaccgctgtacgagcgtcttgatcataactacctgaatgacatcccaggtcttgagaatccaaccagcgaaaacctggcgaaatggatctggaatgagttgaagccattgctgcctgagctatcggctatccggattcacgaaacctgcaccagtggatgtgaataccgcggggac

SEQ ID NO: 33078 - DNA, 993 bp, Pseudomonas syringae
gtgattacgcgtcaactgggtaaccacggtccgcaggtttcggccatcgggctgggctgcatggggatgtcggacttttacaccacggggatcgacgagcaggaatcgattgccacgctgcaccgtgcgctggagctgggtgtcacttttttcgacaccgccgacatgtacggcccgcacaccaatgaggcgctgctcggtcgggctctgcaaggcaggcgcgaagggatttatctggccagcaaattcggcatcgtgcggggcgacgacccgcatgcgcgtggcgtgaacggcagcccggagtacattcgtcagtccatcgacggtagcctcaagcgcctgagcaccgactaccttgatctttactatcagcaccgcgtagaccccaatgtgcccatcgaagacaccattggcgcaatggccgaactggtcaaggcgggcaaggttcggcacattggcatctgcgaagccagtgccgcgaccatcgagcgagcgcacaaggtgcacccgctggccgcggtgcagagcgaatactcgctgtggtcgcgtgacccggagcatgatgacgtgctcgccacctgccgccgtctgggtattgccttcgtcgcttacagcccgctggggcgtgggtttctgaccggcgccttacgcactgtggacgatttcgctgaagatgattaccgtcgtttcagcccacgatttcagggcgaaaacttcaatcgcaacctggcattggtcgaaaaggtcaaagggctggctaccgccaagggcatcagcgcgtcgcaactggcgctggcctgggtgctggctcaaggcgatgacatcatccccattcccggcacaaaacagcgcaagtacctggaaagcaacgtcgccgcagccacgctgaccttgagccacgatgaactggcccagctggatgcgatctttccggccagcggagccgtgtcgggcgagcgctacaacgctgaatcgatgaaatctctcaacggt

SEQ ID NO: 33079 - DNA, 979 bp, Pseudomonas syringae
atgaaacagatgaccttcgccgatgccgagtacgcgggtaaacgtaagcatacccgccgcgagcgctttctcatcgagatggatcaggttgtgccctggaaaggcttgattgcccttatcgaaccacattatccaaagggcgaaggtggccgtccggcttatccgctgatggcgatgctgcgtattcacctgatgcagaactggtttggttacagcgatccggcgatggaggaagcactttacgagacaacgatcctgcgccagttcgcagggttgagtctggatcgaatcgccgatgaaaccacgattctcaacttccggcgtctgttggaaaagcatgagttggcaggcgggattttgcaggtcatcaatggctatctgggtgatcgaggmttgatgctgcgccaaggtacgggtggtcgatgcgacgatcattcatgcgccgagctcgaccaagaacaaggacggcaaacgcgatcccgaaatgcatcagacgaagaaaggaaaccagtatttcttcggcatgaaagcgcatatcggcgtcgatgccgagtcgggtttagtccatagcctggtgggtactgcggcgaatgtggcggacgtgactcaggttgatcaatmgctacatggtgaggaaacctatgtcagcggtgatgcgggctacaccggcgtggacaagcgtgcggagcatcaggatcgtcagatgatctggtcaattgcggcccgcccaagccgttataaaaagcatggcgagaaaagtttgatcgcacgggtctatcgcaaaatcgagttcacgaaagcccagttacgggcgaaggttgaacatccgtttcgcgtgatcaagcgccagtttggttatacgaaagtccggtttcgcgggctggctaaaaacaccgcgcaacaggctactctgtttgccttgtcgaacctttggatggtgcgaaaacggctgctggcgatgggagaggtgcgcctgtaa

SEQ ID NO: 33080 - DNA, 975 bp, Pseudomonas syringae; identical to SEQ ID NO: 33042

SEQ ID NO: 33081 - DNA, 324 bp, Pseudomonas syringae
atgatgaaaggtggcatggctggcctgatgaagcaggcgcagcaaatgcaggaaaaaatggccaagatgcaggaagaactggccaacgcggaagttaccggtcaatcgggcgcaggcctggtgagtgtggtgatgaccggtcgtcacgacgtcaagcgcatcaatctggatgacagcctgatgcaagaagacaaggaagtgctggaagacctgatcgccgccgccgtcaacgacgccgtgcgcaagatcgaacaggccagtcaggacaagaccgcctccatgaccgccggcatgcaactgccaccgggcatgaaactgccgttc

SEQ ID NO: 33082 - DNA, 1020 bp, Pseudomonas syringae
atgctcatgacatctcatgccaggatcgtggacatagaatacgaactgcctgttcattcgctggacaatgaaacactggcccgcgagtttcccgagtgggatgtcgacaagatattcgccaagaccggtatcggtgaacggcacatcatcgacaagaatgaaacggcgtcggaccttgcttaccgtgcctgcgagaagttgtttctcaagggccatattcaacgcgatgaaatagacgcattgatctattgcacgcaaagtccggattacgtgttgcccgccaccgcgtgcattctgcaacatcgcctgcaattgcccacgacgtgcgctgcattcgatttcaatcagggctgttccggctttatttacgggctgggcatcgccaaggggctgatcgagtcagggcaatgcaaaaatgtattgctggtgacggcggaaacctacagccgttacattcatccgcaggataaaagtgttcgcaccctgtttggtgatgcagcagcggtgacgctgctccgtgccactgaaggcggcccgtttctggaccggttccgttatggcagtgacggctccggtgctgaaaacctgattgtgcccatcggcggcgcgcgcaggccttcggccgaaaatatcgagcctccggcctatggcgacgacagtggcaatgttcgtaccgatgccaatctgtacatgaatggcccggcgatttttgaattttccatgaagcgcgtgccgcagttgttcgcctctttgtttgatgatgaagtgggcgtgtccgatgtcgatctcttcgtgttccatcaggcaaaccacttcatgctggatgcactgcgccgacgcctgaaattacccgccgagaaattcgtttcggctttccagcattgtggcaatacggtgtcttgcaccattccgattgccttgaaggaatcgatggacaagggcgtgctcaaaccgggtgaccgggttgcaacggtcggctttggcgtgggttattcgtggggtgcgtgcgtcatacgctgg

SEQ ID NO: 33083 - DNA, 3141 bp, Pseudomonas syringae
atgtctctgttttttatcaagcggcccaactttgcctgggtgctggccctgttcattctgctcgccgggctgatggcgctgcccgccctgcccgtggcgcaatacccgaacgtggcaccgccacagatcaccattaccgcgacttaccctggcgcgtccgccaaggtgctggtggattcggtgaccagcgtcatcgaggaagagctcaacggcgccaaagggatgctgtattacgagtcgaccagcaactcgaccggcagcgcagaaatcaacgtgacgttcgtgcccggcactaacccggacatggcccaggtcgaggttcagaaccgcatcaagaaagccgaagcgcgcctgccgcagaccgtgctcagccagggtttgcaggtcgaacaagccagttccggcttcctgatgatctacaccctgagctacacgggcgattcagccaacaaggacacggtcgcgctggccgactacgccgcgcgtaacgtcaacaatgaaatcagccgggtaaacggcgtcggcaggctgcaattctttgccgcggaagctgccatgcgcgtctggatcgacccgcagaagctggttggtttcgggctgtccatcgatgacgtcaacgctgccgtgcgggcgcagaacgtgcaggtcccggcaggcagtttcggcagcagcccgggctcgtcgctgcaggagctgacggccaccctggcggtcaaaggcacgctggacaacccggaagaatttggccgcatcgtgttgcgcgccaacgaagacggctcgacggtgcacttgtccgacgtcgcgcgggtggccatcggcagtcaggattacagttttgaatcccgcctcaacggcaaacgtgcggtggccggtgcggttcagctgtcaccgggtgccaacgcgattgaaaccgtcaaggcagtcaaacagcggctcaccgaactgtcggtgaatttcccggaaggcgtcgaattttccgtgccgtatgacacctcacgctttgtcgatgtggccatcgacaaggtgatctacaccctgatcgaggccatggtgctggtgtttctggtgatgttcctgtttctgcagaacatccgctacacgctgatcccgactatcgtggtgccggtgtgcctggccggtacgctggcgatcatgtacctgctgggcttctcagtgaacatgatgaccatgttcggcatggtgctggccatcggtattctggtcgacgacgccatcgtggtggtcgaaaacgtcgagcgcatcatggccgaggaaggcctctcccctgcggcagcgaccgtgaaggcgatgcagcaggtgtcaggtgcgattttcggcatcaccctggtgttggctgcggtgtttctgccgctggcgttcatgggtggctcggtcggggtcatctaccagcagttctcactgtcgctggccgtatcgattctgttctccggctttctggccctcacgtttaccccggcgttgtgcgccacgctgctcaagccaatcccggcgggtcatcatgaaaagcgcggtttcttcggcggtttcaatcggctgttcggcaagttcaccgaccgctacgagcgcgtcagctccagcatgatcaaacgcgctggccgctacatgctgctgtatgtcggtatcgtcggcttgctgggctttttctacctgcgtctgccagagtcgtttgtgccggtggaagaccagggttatctgatcatcgacgtgcagttgccgccgggagccacccgggcgcgcaccgacgccaccgcgcagttgctggaaatctacatgttgtcccgcgaggcgaccggggccgtgaccatgctgctgggtttcagtttttccggcatgggcgaaaacgccggtctggcgttcccgaccctcaaagactggtcggtgcgcggcgacgggcaatcggcgggtgaagaagcggcggcgttcaatcagcattttgccggtctcagcgacggcacggtcatggccgtgacaccgccgcctatcgacgggctgggcacttcaggcggtttcgcgctgcgtttgcaagaccgtgcaggtctgggccgcgaagccctgcttgcggcgcgcaacgagttgctgggcaaagccaacggcaacccgaagattctctacgcgatgatggaagggctggccgaagcacctcaattacgcctgaacatcgaccgcgaaaaagcgcgggcgctgggggtcagcttcgagtcgataagcaacgcgctgtccaccgctttcggctcctcggtgatcagtgatttcgccaacgccggacgtcagcagcgggttgtggtgcaggccgagcagagttcgcggatgaccccggaaagcgtgctcaagctgtacgtgcccaacagcagcggcacgctggtgccactgagtgcattcgtttccacgcactgggaagaaggcccggtgcagatcgcccgttacaacggctaccccaccttcaggatcgcgggtgacgcaccaccgggtgtcagtaccggcgaagcgatggcggagattgaaagaatcgtctcccggttgccacccggcatcggttacgaatggaccggcctctcctaccaggaaaaagtagccagcggccaggcgaccgggctgtttgccctggccttgctggtggtctttctactgctggtcgcgctttatgaaagctgggcgatcccgctggtggtcatgctgattgtgccggtgggcgcactgggttcggtgctggcagtgaccgcggtcggcatgccgaacgacgtttacttcaaggtggggctgatcaccatcattggcctggcggcgaaaaacgcgattctgatcgtcgagttcgccaaggagctgtgggatcaaggccattcgctgcgtgatgcagcgcttcaggccgcaagactgcgctttcggccaattgtcatgacctcactggcgttcatcctcggcgtggtgccgttgacactggcgaccggcgcaggcgctgcaagccagcgggccatcggcaccggagtgatcggcggcatgctcagcgcgacgctgctgggggtggttctggtgccgatcttcttcgtctgggtgctgtcagtgctgcggcgcaagccccacgagacgaaacagcttgctgacgccgagcagcccgacaaagac

SEQ ID NO: 33084 - DNA, 1257 bp, Pseudomonas syringae
atgaatctgactgaactcaagcaaaagccgattaccgaattgctcgaaatggccgaacaggctggcatcgaaaatatggcccgttcgcgtaagcaggacgtcattttttccctgcttaaacggcacgccaaaagtggcgaggaaatatccggtgatggcgtgctggagattctccaggacggcttcggtttcctgcgctctgcagacgcgtcctacctggccggcccggatgacatctacgtctcccctagccagatccgccgtttcaacctgcgtaccggcgacaccatcgttggcaagatccgtccacccaaggaaggtgagcgttatttcgctctgctcaaggtcgacacgatcaactacgatcgtcctgaaaacgccaagaacaagattctgttcgaaaacctgacgccgctgttcccgacgatccgcatgaagatggaagccggtaacggttccaccgaagaccttaccggtcgtgtgatcgatctgtgtgcaccgatcggtaaaggtcagcgtggtctgatcgttgctccgccaaaagcgggcaagaccatcatgctgcagaacatcgcgtcgaacatcacgcgtaacaacccggaagtgcatctgatcgttctgttgatcgacgagcgcccggaagaggtgaccgaaatgcagcgcaccgtgcgcggcgaagtggttgcctcgacattcgacgaaccgccaacccgtcacgtacaggttgccgaaatggtgatcgaaaaggccaagcgcctggtcgagcacaagaaagacgtcgttatcctgctcgactccatcacccgtctggcgcgcgcctataacaccgtcatcccgagctccggcaaggtactgaccggtggtgtcgacgctcacgcactcgaaaagccaaagcgtttcttcggtgctgcgcgaaacatcgaagaaggcggctcgctgactatcatcgccaccgcactggttgaaaccggttcgaagatggatgaagtcatctacgaagagttcaagggtacgggcaacatggagctgcctctggatcgcaagatcgccgagaagcgcgtgttcccggccatcaacatcaaccgctccggcacacgccgcgaagagctgttgaccgctgatgacgagttgcagcgcatgtggatcctgcgcaagctgctgcacccgatggacgaagtcgcggctatcgagttcctcatcgacaagctcaagcagaccaagaccaacgacgagttcttcctgtccatgaaacgcaag

SEQ ID NO: 33085 - DNA, 1506 bp, Pseudomonas syringae
atggcgcataacgaagcagttgatgtagtactggtcggagcgggcatcatgagtgccacgctggcggtattgctcaaggagctcgaccccggcctcaagctggaagtcgttgagcttatggattccggtgctgcggagagttccaatccgtggaacaacgccggcaccggtcatgccggtctgtgcgagctcaattacacgccgcctgcggctgatggctccatcgacatcaagaaagccgtgcacatcaatacccagttcgaggtctcgaagcagttctgggcctttctggcgcgcaaaggcactttcggttcggcaaagtcgttcatcaatccggtcccgcacctgagtttcgtgcagggcgaaaacggcatctcgttcctcaagacccgttttgaagccatgagcaagcaccatgcgttttcttcgatggaatacaccgaagacaaggcaacgctggccgagtggatgccgctgatgatgtccggccgcgctgcagacgagaaaatcgccgcaacgcgcatgttgaacggcactgacgtcaactttggcgcgctgaccaatcaactgctcaaccacctgtccagcgcgccagatacgcagatcaagtaccgcagccgtgtcaccggcctgacccgcaagggcgcaggctggaccgtgatggtcaaggacgtgaacggcggcggcacgcgtgagatcgacgccaaattcgtgttcctcggcgcaggcggtgcggcattgccgctgctgcagatgtcgggcatcgaagagagcaagggctttggcggttttccggtcagtggccagtggctgcgttgcgataacccggaagtggtcaagcatcaccaggccaaggtttacagccaggccgccgtgggttcgccgccgatgtcggtgccgcacctggacactcgcgtggtcgatggcaataagtccctgttgttcgggccatatgccggtttcaccaccaagttcctcaagcatggctcgttcctcgacctgcccctctcggtacgtgtcgccaacatcaaaccgatgctggccgtcgctcgtgacaacatggacctgaccaagtacctggtcagcgaagtgatgcaatcgatggagcaacgcctggaatcgctgcgtcgcttctatccagaggcaaaagccgaggactggcgcctggaagtggcggggcaacgggtgcaaatcatcaagaaagatgcgaaaaaaggcggcgtgctgcaatttggcaccgagctggtttctgcgcaggatggctcgcttgccgcactgctcggcgcatcgccaggcgcttcggttacggtgtcgatcatgctggagctgattgaacgctgcttcccggaaaaaacccgcaccgagtgggcgagcaagctcaacgagattttcccggcgcgggaaaagattctggagaccgatgcgcagttgtacgaacgcgtcagcacccagaacgacgaagcgttggagctggtcgagaaaaaaagtcaggagcagagcttcgcc

SEQ ID NO: 33086 - DNA, 1662 bp, Pseudomonas syringae
atggcgtactaccgcaatccttccgatgtgaccgctatgcctgcctggcaagcgctgaccaaacaccgccaggccatgcaggacttcagcatgcgcgaagcgtttacggatgatcccaagcgcttcagccagtttacgctcagcagcgccggtctgtttctggactactcgaaaaacctgatcaccgccgaaacccgtgacctgctggttgcgctggccggtgaagtgggcctcaaggacgcgatcaaggctcaatactatggcgagctggtcaactcatccgaaggtcgcccggcgctgcacaccgcattgcgtcgtccggtaggcgacaagctgaaagtcaacggcgtcgatgtgatacccgacgttcaccgcgtgcttaaccagatgaccgagctggtcggccgcatccacgacggcctgtggcgcggttacaccgaaaagccgatcaccgacgtggtgaacatcggcatcggcggctcgttcctcggccccgagctggtttccgaagcgctggtggcgtacgcgcacaagggtgtgcgttgccattacctggcaaacatcgatggcagtgagttccatgaactgtccatgaagatccgcgccgaaaccacactcttcatcgtttcgtcgaaatccttcaataccctcgaaaccctgaaaaatgcccaggccgcgcgcgcctggtacctggcgcagggcggctcggaagtcgaactgcatcgccacttcattgcggtctccagcaacaatgcggcagcggtcgcgttcggtatccgtgaagaaaacatcttcccgatgtgggactgggtcggcggccgttattcgctgtggtcggctattggtctgcctatcgcgctggccatcggcatgtccaacttcaaggaactgctgtccggcgcctacaccatggaccagcacttccagagcgcccctttcgaccagaacatgcccgtgctgctcgcgctgctgggtgtctggtacggcaacttctggaacgcgcagagccacgcgatcctgccgtacgaccactacctgcgcaacatcaccaaacacttgcaacagctggacatggaatccaacggcaaaagcgttcgccaggacggcacgccggcactcacggataccggcccggtcatctggggtggcgtaggtgccaatgggcagcacgcttaccaccagttgctgcaccaaggcacacagatgatcccggccgacttcatcgtgccgatcgtcagcttcaacccggttgccgaccaccatcaatggctctatgccaactgcctgtcgcaaagccaggcgttgatgatgggcaagacccgcgccgaagccgaagccgagctgcgtgacaagggcatgagcgaggaagaggtgcaaaaactcgcaccgcacaaggtcatccccggcaaccgtccgagcaacacgctggtggtcgaacgtatcagcccgcgtcgccttggcgcgctggtggccatgtatgagcacaaagtgttcgtacagagcgtgatctggggcaccaacgcctttgaccaatggggtgtggagctgggcaaggaaatgggcaaggctgtgtaccagcgtctgaccggcggcactgaagaaccggcagacgatgcatcgacccagggcctgatcaactacttccgcggccgtcaccgcggc

SEQ ID NO: 33087 - DNA, 977 bp, Pseudomonas syringae
atgaaacagatgaccttcgccgatgccgagtacgcgggtaaacgtaagcatacccgccgcgagcgctttctcatcgagatggatcaggttgtgccctggaaaggcttgattgcccttatcgaaccacattatccaaagggcgaaggtggccgtccggcttatccgctgatggcgatgctgcgtattcacctgatgcagaactggtttggttacagcgatccggcgatggaggaagcactttacgagacaacgatcctgcgccagttcgcagggttgagtctggatcgaatcgccgatgaaaccacgattctcaacttccggcgtctgttggaaaagcatgagttggcaggcgggattttgcaggtcatcaatggctatctgggtgatcgaggtttgatgctgcgccaggtacggtggtcgatgcgacgatcattcatgcgccgagctcgacckagaacaaggacggcaaacgcgatcccgaaatgcatcagacgaagaaaggaaaccagtatttcttcggcatgaaagcgcatatcggcgtcgatgccgagtcgggtttagtccatagcctggtgggtactgcggcgaatgtggcggacgtgactcaggttgatcaattgctacatggtgaggaaacctatgtcagcggtgatgcgggctacacsggcgtggacaagcgtgcggagcatcaggatcgtcagatgatctggtcaattgcggcccgcccaagccgttataaaaagcatggcgagaaaagtttgatcgcacgggtctatcgcaaaatcgagttcacgaaagcccagttacgggcgaaggttgaacatccgtttcgcgtgatcaagcgccagtttggttatacgaaagtccggtttcgcgggctggctaaaaacaccgcgcaacaggctactctgtttgccttgtcgaacctttggatggtgcgaaaacggctgctggcgatgggagaggtgcgcctgtaa

SEQ ID NO: 33088 - DNA, 225 bp, Pseudomonas syringae
ttggcaaaataccccaacacctttcaccgagcttccctgatgaaacagatgaccttcgccgatgccgagtacgcgggtaaacgtaagcatacccgccgcgagcgctttctcatcgagatggatcaggttgtgccctggaaaggcttgattgcccttatcgaaccacattatccaaagggcgaaggtggccgtccggcttacgcgagcccacattcagcctggcct

SEQ ID NO: 33089 - DNA, 888 bp, Pseudomonas syringae
atggagcaatttcgaaatatcggcatcatcggtcgcctcggcagtgttcaggtgctcgataccgtacgccgactcaagagattcctgctggaccggcatctgcatgtcatcctcgaagagaccattgccgaagtcctgcccggtcatggcctgcagacttcgtcgcgcaagatgcttggcgaggtctgcgacatggtcatcgtggtcggtggcgatggcagcctgttgggtgctgcgcgtgccctggcccggcacaatgtgccggtgctgggcatcaatcgcggcagcctgggctttctgaccgacatccgccccgacgagctggaggtcaagtgcgccgaagtgctcgatgggcattatctggtcgaaaaccgcttcctgctgcaggccgaagtgcgccgccacggtgaagccatcggccagggcgatgcgctcaacgacgtggtactgcaccccggcaagtccacgcgcatgatcgagttcgaaatctacatagacggccagtttgtctgtagccagaaggccgacggcctgatcgtcgcgacaccgaccggttcgaccgcctacgcgctgtcggcgggcgggccgatcatgcaccccaagctggacgccatcgtgatcgtgccgatgtacccgcacacgctgtccgggcggcccatcgtggttgacggcaacagcgagctgaaaatcgtcgtgtccaaggacatgaccatttatccgcaagtgtcctgcgacgggcagaaccacttcacctgcgcaccgggtgacaccattacggtcagcaagaagccgcagaagctgcgcctgattcacccgttggatcacaactattacgaagtctgccgcaccaagctcggctggggcagcaggctcggcggcgggggcgat

SEQ ID NO: 33090 - DNA, 3635 bp, Pseudomonas syringae
aagattcttgccattcgcctgaaaaacctggcctcgctggccgggccgtttgaaattgatttcaccgccgagccgctggccagcgccggcttgttcgcgattaccgggcctaccggcgcgggcaaaagcaccttgctcgatgccctgtgcctggcgctgttcggggcgattccgcggctgagcaatatcggtcagtccaaggtcccggacatcgatggcgacatcaccaccagtgacccgcgcaccctgctgcgtcgtggcaccggaagcggttacgccgaggtggatttcatcggtatcgatcagcgtcgctatcgggcccgctgggaaaacaatcgcgcacgggacaacgccaccaagaagctacaggccagccgtcagacgctcaccgatctggacagcgagcaaatcctcagcaaccatagcaagcgggaattcgagcaactgatcgaaagccgtctgggcttgaatttcgagcagttcacccgcgccgtgatgctcgcccagagcgagttcagtgcctttctaaaagctgatgacaaggaacgcagcgaactgctggaaaagctgaccaacactgcgatctacagccagttgggccggcgcgcctacagcaagagcaaggaagccgaagaagcgctgaaagccctcaccacccaagccagcaacatcgtcccgctgggcccggagcaactggtcgagctggaacagcgcttcagcgacgcacagcaacacctcaaaacccatcaagcacaacagcggcagctggaactcaagcagcaatggctgatcgagctgcatcgtctgggtgacgaacagctcgccgcgcaggaagcgctgaacagtgcgcaacagacctgggaccagcaaagcggcgagcggcaaactctcggccaactggagcgtctgggcccgcaacgccatcgctttgcccgccggaccaccttgaacgcccagctcgacccgctggccgagcagattcgtcagcatcaggctcaacacacctcgctgcagggccagcaacaacagctggaaacccaccgcgctcaggcgcacaccagcctgctggacgcgcagcagcaacacggcagcgccaaaccgctgttgcaacaggcgtttgatgcccagaacaccctcaatcacctggcccaggaactgaccaaggcctgcgacctgcatcagcacaccgggcagctttgcgctgaaggtcaggccagcctgcaaaccctgctcgaccagcagcaacaggttgcgcagcgccttgaacggattgccgaacaactgcaacgcagcagcgagctggccccgctggctcaggcctggaacgcctggcgcgaccgcctgaaatccctgacgctgatcgccaaccgcctcaagcacgggcacagtgagctgccagcgctgcaacaacgcgctggcgtcgccgaccagcagttggacgagcagcgcagcgcgctggaattgctctatcgcgaagccgactgcgaagtcgaggctgtgaccgagcaggtgcagattcttggcagcctgttgcaggacaaccgtaaacagcaacgcgcgtttgaagaactgactcgcctgtgggccagccagcaagacgtcgaccgtcagcttgctgatctgacccggcaacagcaaagtgctcagcagcaacgcgaacagctcaacagtgaaggcctgcgggttcgtgacgaactggcagtcgccgagcagaccctgaccgtcacccggcaactgctggagcgtcaacgcctggcccgcagcgccagtgtcgaagagctgcgcgtgcagttgcaggacgaccagccctgcccggtctgcggcagcgtcgagcatccgtggcatcagcccgaagcgttgcttgaaagcctcacccggcatgacgacgacgagcaggccagcgcgcagaaagcggtagacctgctgaccgaacagcgcaatcagttgcgtgaacaggtgggtggcgtgatcgctcgccagaaagaactgctgcgccagcacgagcagcttcttgagcgtcatcaggcattggcgcccgaccttgaagcccatcccctcgccgctcaattgctggaccgcgacgccgataaacgcgacggctggctgagccagcaactgagccagttgaacgaagtcatcgcccgtgacgagcagcgtcagcaggctttgctgaccttgcagaaagacgcggcccgtttgcagcagcagctccaggccgcaaccgacgccagccagaccgctgcgcgccatgttgccgagcaactcaagcaactggacgccgatcaacagcgtctggaagaagaactgacggcgttcacaccgctggtctcgccgcaggtgcttgaaggcctgcgcagcgacgcatcggctacggtgatgcagcttgagcagcaaatcacccagcgtctggaccagcttgagcaacaggctgaagaacagcaggaacagcgcgaacgccagcagaagctcgaaaagcagcaaatcgagcagcaggcgcgcctgcaacgtcagagcgaactggcgcttgaagtcacccggctcgacgcgcagcaacaggccagccagcaggcactgaccggtctgctgggcgagcatgccacggccgagcaatggcagcaggcgctggagaacgccatcgagcaggccaggcaaaccgaaagctcggccgcgaggccttgcagcagattcacagccagttgatccagctggctggcgaactcaaatccggccagcaacagcagcacgccattcagcaagagttggccgaactcgacgtgcagatcagtgaatggcgcagtcagcacccggaactggacgatgccgcgctcgacacgctgctgacctacgatgacgcacacgtcgatcaactgcgccagcaattgcaggcgaccgagaagaacctggagcaggcgaaagtcttgctgcaggaacgtgatcagcgcctgcaacagcatcaggcgcagcacagcgacctgaacgacgaccagcaactgaccgccgacctgcaaacggctcaggagcaactggcgcagagtgagcagcagtgcgccgacctgcgcgccgaactcagtgaagatcagcgtcgccgcaatgccaacagcgaactgcagacgcgtatcgccgacgccaacagcgaatacctgcgctgggctcgtctggcgtcactgatcggttcggctgaaggtgataaattccgcaagatcgctcaggcctacaacctcgatctgctggtgcatcacgccaatgcgcaactcaagcaactggtgcgccgctaccgcctgaaacgcggtggaagcatgctcggcctgctggtgatggacaccgaaatgggcgatgaactgcgctcggtgcattcgctgtcaggcggggaaacctttctggtctcgctggcgttggcgctgggcctggcgtcgatggcctccagcacgctgcgtatcgaatcactgttcatcgacgaaggcttcggcagcctcgaccctgagtcgctgcaactggccatggacgcactggacggcttgcaggcacagggccgcaaagtcggcgttatctctcacgtacaggaaatgcatgagcgaattccggtgcagatcagagtgcgtcgtcagggcaatgggttgagtacgatcgaggtgggt

SEQ ID NO: 33091 - DNA, 2659 bp, Pseudomonas syringae
accgaacaaccgaaaatgatttacctgaaggactaccaggctcccgagtacctcatcgatgagacgaacctgaccttcgagctgttcgacgaccactcgctggtccacgcccaactggtcatgcgccgcaacccggagcgtggcgcaggcctgccgccgctggtgctggacggccagcatctggaactggtttcggtgaaactgagcgacatcgagctgggcgctgctgattatcaactgacagacgatcacctgacgctgcatccacaggccgaaagcttcacggtcgacagcaccgtgcgcatccatcctgaaaccaataccgcgctggaaggcctgtacaagtccagcggcatgttctgcacccagtgtgaggccgagggctttcgcaagattacctactacctcgaccgccctgacgtgatgagcacattcaccaccacgctgagcgccgacaagcagaactttccgatcctgctgtccaacggcaacccgattgccagcggcgaagaagagggcggacggcactgggcgacctgggaagacccgttcatgaagccagcctacctgttcgcgctggtggccggtgatctgtggtgcatcgaagacacctttaccaccatgagtcagcgggaagtgaccctgcgcatctatgtcgagccagaaaacgtcgataaatgccagcacgccatgaccagcctgaaaaaatccatgcgttgggatgaagaggcctacggtcgcgagtatgacctggatatcttcatgatcgtggcggtcaacgatttcaacatgggcgcgatggagaacaagggcctcaacattttcaattccagcgccgtgctggcccgcgccgaaacggctactgatgccgcgcaccagcgcgtcgaagcgatcgtcgcccatgaatatttccacaactggtcgggcaaccgcgtgacctgccgtgactggttccagctgtcactcaaggaaggcttcacggtgtatcgcgacgccggtttctcggccgacatgaactcggccacggtcaagcgtattcaggacgttgcttacctgcgcacccaccagtttgccgaagatgccggcccgatggcccatgccgtgcgcccggacagctttatcgaaatttccaacttctacaccctgaccgtgtacgaaaaaggttcggaagtggtcggcatgcttcacaccctgctgggggctcaaggctttcgcaagggcagcgacctgtacttcgagcgccacgacggccaggcagtgacctgcgacgacttcatcaaggccatggaagacgccaatggcgttgacctgacccagttcaagcgctggtacagccaggcgggcacgccgcgtctggcggtcagcgagtcgtatgacgctgctgcgaacacctacagcctgaccttccgccagagctgcccgaccacaccgggccagcctggtgatcagaaacagcctttcgtgattccggtcgagctgggcctgctggacagcaaaggtggcgagatcgccctgcgcctggccaacgaaaccgccgcaaccggcagcacgcgggtgctttcggtgactgaggccgagcagacgttcacctttgtcgatctcgctgaaaagccactgccgtccttgctgcgtggcttctcggcaccggtcaggctgagcttcccgtacgaccgcgaccagttgatgttcctgatgcagcacgacagcgacggcttcaaccgctgggatgcgggccagcaactgtcggttcaggtgttgcaggaactgatcgctcagcaccagcaaggtcagccactggtcatggatcagcgcctgattaccgcactgggcaccgtactggcggatgagcaacttgatcaggccatggtcgcggaaatgctttcactgccgggcgaggcttacctggccgagatcagcgaagtggccgatgtcgatgccattcacgctgctcgcgaatttgctcgccaacaactggccgatggcctgtttgacagcctgctggcgcgctacaaggccaaccgcgagctttccaaggccacgccatacgttgccgaatctgcgcatttcgcccgtcgcgcgctgcagaacatcgcgctgtcgtacctgatgctcagcggcaaacctgaagtgctggcggcgaccatcgaccagttcgacaccagcgacaacatgaccgagcgcctgacggcactggccgtgctggtcaattcgccgttcgctgaagagcgcgacaaagcgctggccgtgttcgctgagaacttcaagaacaacgcgctggtcatggatcaatggttcagcgtccaggcggccagcacccagccgggtggcctgcaacgcgtacaggaattgatgaaacatcctgccttcagcatcaagaacccgaacaaggtccgcgccccttatcggcgcgtttgccgggcagaacctgatcaacttccacgctgcggacggctctggctaccgcttcctggcggacctggtcattgaactgaacgccctgaacccacaaatcgcctcccgccaactggcccctctgacccgctggcgcaaatacgacagcgcccgtcaggcgctgatgaaagcagagctggagcgcatcctcgcctccggcaaactgtcggcggatgtgtatgaagtggtgagcaaaagcctggctgaa

SEQ ID NO: 33092 - DNA, 1023 bp, Pseudomonas syringae
atgactctgctcctgttacttcggcgtcacacctcgtcgtttttcgagcgtttcggctgggctggcatcggcatgctgttactggtgcactatggcgtttcctggctgttgctgacgctggccggtgaagagcacctgttgcagggggctgacttcacttatttctacctcaccactgcgaccaccgtcggctatggcgatctgtcgcccaagtcagggtggggcaagctggtcaccaccacctggatcatgctgggtggcattgccttgctgaccacggtcatcggcaaggcgtcgacgtcggtcggtgatatctggagaaggaacatgaaaggacaaggcgattgctcggcgctgacaggccatacagtgttggttggctgggacggagaagccagcgagcgtatcgtcgagctgctcggtcaggacacctctaccagccgggccgggcttgttatctgcgactcgatcatcacggaaaacccgctgccgggcagggcgtcgttcatcaagggcgattctctggattcgccggcggtgctgagccgcgcgggggttgtgggcgcgcagagaattctggtccacacccaatccgacagcctgacactcgccatcgtactgacgctcaaaagcctcgggccgaccggtcatgtggtcgcgcacttcaataattccgaacgggccgcgctggccagaacctacgcgcccgagctggaatgcacctcgaacatggccattgaaatgctggttcgctccgcgcaggacccaggctcgagttcggtgatcaccgagctgttgtgtgttggcgtgggtgccacgcagtaccgtcatgtgttgcctgccgacttcgcctgctcctgcggcgagctgtacatacgcatgcgccaggaattcaatgccacgctgattggttatcgctcctcaaccatgcagcagttcgagatcaatccggccaacgatatgtctatcctgggcggggaaattttctacattgcctccagtcgacttcaaggaaacgcacta

SEQ ID NO: 33093 - DNA, 1206 bp, Pseudomonas syringae
ttgccgttgtcagataccaccatccgtaccgcaaagcccaaggacaagctttatcgcctgaccgatgccaacggcctttgccttgaaatcgctccatcgggatcgaagctctggcgatatcgatatcgctttaacggcaaagcaaagatgctggcgcttggtgcctacccagctgtcactcttctgaaagctcgccagctccgcgatagtgcacgtcagttgctggttgagggcaatgatcccggcgagcacaaaaaaaccgctcagcaagcacagaaggttgaagggctgacttttgaaacacttgcccgtgagtggttcgcgtacaactccccccgctgggcagagagcaccacctataaggccaagctttatatggagaacgaccttattcccggtatcggtgcccgtccggtgaaagcgctcacccggcccgatctggttgatctggtgcgcaaggtggaggcccgcggcacattgaatgcggctggcaagatccgtcagtggctgcaccagatattccgttacggcctggcaaagggagttgtcgagagcaacccggccaccgacctggacgttgtagccgcgccgcagaaagcgccccgtcatcatccacatgtgccgttctcagaattacccgagcttcttgagatatgcgacgggtctaagatcaacacattgacccgatgcgccattcacttactggtgctgaccgccgttcgaccaggcgagctgcgaaatgccccttggtcagagttcgatctggatgctgctacttgggctatcccaaaggagcgaatgaaagctcgcagacctcatgtcgtccccctacccactcaagcggtcgacatcctgcgccagctccagccaatcacaggtcgatacccgttggtattcgctggccagcacaaccccagccgaccaatgagcgagaacacgatcaataaagcactgcgcttgttgggctacgagaatcgtcaaaccggccacggcttccgccatttgctttccaccgagctcaatgggcgcgggtataacaaagactggatagagcgccagcttgcgcacggtgacgctgacggcatccgcgacacctacaaccatgccagctatctggagcagcgccggggaatgatgcaggcctgggccgactcaatcgacgcgctaagtgctggctccaacgtggtgagcatcaagcgccaggct

SEQ ID NO: 33094 - DNA, 2046 bp, Pseudomonas syringae
atgtccgagccacgcaagattctcgttaccagcgccctgccctatgccaatggtcccgttcaccttggccacatgctcgagtacatccagaccgacatgtgggtgcgtttccagaagcaccgcggcaaccaatgcatttatgtctgcgcggacgacgcccatggttcggcaatcatgctgcgcgcagaaaaagaaggcatcaccccggaacaactgatcgacaacgtcaaggccgaacacagcgccgactttgccgacttcctggtggacttcgacaatttccactcgacgcactcggacgaaaaccgtgagctgtcgagcatgatctacacgcgtctgcgcgatgccggccatatcgccacgcgttcggtgacccagtatttcgacccggaaaagaaaatgttcctggccgaccgcttcattaaaggcacctgcccgaaatgcgcggccgtggaccagtacggcgacaactgcgaaaagtgcggcgcgacctacgcccccactgacctgaaagaccctaaatcggcgatttccggggccacgccagtactcaaggattcaaagcacttcttcttcgacctgccagccttcgacaccatgctgaaaagctggacgcgcagcggcacgttgcaggacgccgtcgccaacaagatcgccgagtggctggacagcggcctgcaacagtgggacatctcccgcgacgcgccgtatttcggctttgaaatccccgacgagccgggcaaatacttctacgtctggctcgatgcgccgatcggctacatggccagcttcaagaacctctgcgcacgtcgtccggacctggacttcgatgcgtactggggcaaggacgcgaccaccgagctttaccacttcatcggcaaggacatcgtcaacttccacgccctgttctggccggccatgcttgaaggagccgacctgcgcaagccgaccggcgtcaacgttcatggctacctgaccgtcaatggccagaaaatgtccaagtcgcgtggcaccttcatcaaggcgcgcacctacctcgatcatctgccgcccgagtacctgcgctactactacgcatccaaactgggccgtggcgtagacgacctggacctgaacctcgaggacttcgtgcagaaggtcaactccgacctgatcggcaaggtagtcaacatcgccagccgctgcgccgggttcattcacaagggcaacgccggtgtgatggtcgacgccaatgctgctcccgaactgaccgatgccttcctggcggcagcaccgagcatcgccgacgcttatgaggcgcgcgattttgcccgtgccatgcgcgaaaccatggccttggccgaccgtgccaacgcctatatcgcagaaaaagcgccttgggcgctggccaagcaggaaggcaaacaggatgaggtccaggccgtttgcgcattgggcgtgaacctgttccgccaactggtcattttcctcaagccggtactgccgaacctggccgctgacgcagagaaattcctcaacgtcgcgcctctgacctgggacgaccacaagaccttgctgacccatcatcagttgaatccgttttcggcactgatgacgcgcatagatccacttaaggtagaagccatggccgcggcgtccaaggaagacctgacagccaccgacacatcgacggacgctgctccagccggcaatggcgaactggccaaagacccactgtcggcggaaatcgactttgacgcgtttgctgcggtagacctgcgcgtggcattgattctcaaggccgaacacgtggagggcgccgacaagctgttgcgcctgacgctggacatcggcgacgagcagcgcaatgttttttccggcatcaagagcgcctatcccgacccgtcgaagctggaaggtcgtctgaccatgatgatcgccaacctcaagccacgaaaaatgcgtttcggcatctcggaaggcatggtgatggcggctggccctggcggtgaagagatctacctgcttagcccggacagcggtgccaagcctggccaacgcatcaag

SEQ ID NO: 33095 - DNA, 1410 bp, Pseudomonas syringae
gcgcaagccaaggaggacgcacgtctggcggcagaagccgagttgaccaggcttgctgttgaagctgcagaacaagcacgccttgcagcagaggtcgaagctcaacggattgctgccgaaaccgctgaacatgcccgagtagtagcggaggctgaagccaagcgagtagcggatgagcaggcactctttgctgcggaagcagaagctcaccgaataactgccgaagctgctgaacaagctcgtatggaggcagaggcgcaagcacagcgtgacgctgacgagcacgcgcgcgtgacggcagaagctcaagcgctagaagcgggcaagacgctcaggctcccggaagctggtacacctcagttaggtgcagttgcaggagtcatttccgttacagcaggatccggcctctttctggacgctaccattcaagccgctatcgaaatattagcggctctcgtaggcacagctgtgagctctaccacagccgtaggcatcggcacgttgctgtactccccttcgcttggcaatggagagttaccgggaagaatgctggaccttccggccagggttctgatgcctgatctgcccgacgccttgaatgacgtggcggcaacgggtggaacggtcgatatgccctatagaatttacggtgatcagtcgaagtattcagtcgtggcaacacagcccgaaggcggattttctcccaaggtgcctgtgagggctctgatactggacccagtggccaacgcctacacctttaccacttcggacaccccgcccatcaccttaacgtttccaatcgcagcacctgaaaacagctcaacgactacagtggcacaaccgatagaaactccggcgtacactggcattacgctggagcctatcgaggtgaaggcagaacctttacccgcaaccagcccgctggatattcgggatgccatttacgtttatccggtaaattcgggtttaccaccggtttacgtggtgttcagcagcccgtatgaaggggcaaccaccaaaggggagcatagcggtcgaatgtacgatcctgataatgcgggaggcccaacccagaacctcgactggacaaccgcctcagtcacccagaacggcattgatctggttaaattgcatacaggccgatttgagccgtcagacgcaaacgccgtcatgattgatcgtctggaaaaaattcttcgtagcgagttatccatgacggataccgataaaagattttatactcacgagctcagggagctggaacgttatagggcactgggcgttgctgatggagtggagggggaggtatggaacaatgctcatactgcgaccttggaagactataagctaaaagactcttcagaatcattttatacacctgaagcaataacagcagaaaacaaacaggtt

SEQ ID NO: 33096 - DNA, 2136 bp, Pseudomonas syringae
ggtcagcgccaggaagcgttggcgctgctcgatcgcttgcaaccggtcgccagcggcagcccggagcgtcaactcacgctggccagcgcttacatcgatgcgggcgagcccgcgcgcggtcgggaaatggcccgtgcggccatcgctcaggcccctttgccgtcggccgacctgatgctgcaatacgccggtctgctgctcgcagcgggcgatgacgtgcaggtcaatgcgatcctgcgcaacgtgcagggtcagccgatgagcgtgcagacccgcaaacgttttgatgaccttttgtaccgctaccgcattcgtcaggccgatctgctgcgtgaaggcggtgatctggcgggcgcgtacgacacgctggcacctgctttggcgcagcgcccggacgacattcaggcggtgtcggccttcgcccgcatgtacaccgccaatggcgacagcgcccgagcgttcgagctgtacaagcctttgttgcagcgccagcccaatgacccgcaagtgttgctgggcgcagccgatgcggcggtcaaagcgcatgattatggctttgccgaaaaagccctgagccagttccgcaaactggagcgtaacgacccgcagaccctgacggaggccgcacgtatctaccaaagcatggggcagaccggcgcggccaccgagttgctgcgcaaggccgtggccatcgaacagagtgaaaaacagcgcgcgatggctgtgcaggctgtgtcgaccagcaccacgtcgtccaacccgtttgcgacgggcggctcacgtagcctggcggcggcttcggctattccggctccggctcaggtgtcgctcagcggtgggagagcgcttgaaacaaacagtgcgcctgaaatatctgccccgcgtgacaccgcttatcccggccagatcgccgcaccacaaccgctgtctgccgcacgtacgcaaagtgtgcgcggcaatccgttcatggcagccaccgaccgcgatcaggccagcagcgcacagcaggcgctcaatcgcattcttgagcagcgcagtggcttcgtcagtcagggcctggccgtgcgcagcaataacagcgagtcgggtctgagcaaactgaccgtggtcgagaccccgctagaggtcaatttgcctgccggtgataaccgggtggccgtgcgcgtcacgccggtgtcgctgaatgctggcagcttgaagtcagatgcaggtgcccgttttggcggtggcaccagcggtgctgccggttcgcagagcgacaagggtgtcggtctggcggtggcgttcgagcgccccgaagaaggcctcaaggccgatatcggcaccacgccgatgggtttcaaatacaccacggttgccggcggcgcgagtgtcgaccggccgttgggtaacaacccggacctgcgctacggcctcaacgtgtcacggcgtccggtgacggacagcgtgacttcgtttgccggttccacagacgagcgcagcggcctgtcctggggcggcgtcacggccaacggcgggcgcggtcagctcagctatgacgaccagaccatcggcggttatggctacggctcgtggcacaaactggttggcaacaacgtgaaatccaacacccgaggcgaagtgggtggcggcgtttactggtacctgcgcaatgccgaggacagcaaactgaccgcaggcctgagcctgatgggcatgagctatgacaatgaccagagctacttcacgtacggccacggtggctatttcagcccgcagagcttctatgccatcggcgtgccggtgatgtgggcacagcgcaccgagcgtttcagctatcaggtcaagagctcggtcggggtccagcacttcaagcaggacggcgccgaattcttccccgacgacagcacgctacaggccgcttccgcccagcgctacacagggcaaagcaaaaccggaattggctacaacctgagcgcggcaggcgagtacaagctcgattccagcctgttcatgggggccagtctgggcctggacaatgcccgggactatcgccagttcagcggcgcgctttacctgcgttacatgttcgaggacataaccggcccgatggcactgccggtcagcccttaccgttcaccttattccaactgattt

SEQ ID NO: 33097 - DNA, 1209 bp, Pseudomonas syringae
atgccgaccctggtaatcaatttgcgccgcgctgttggctggatgaccggtgtgctggcgtcggcgacgctgaccccggctcttgcggccagcacctgcgacggcccggcctggccgttctggcaggactacgccacgcgctacgtgcaggccgacgggcgcatgctcgaatccagcctgaaagccaaccacagcacctccgaaggccagtcctacggcatgctcttcgccttggtggccaatgatcgcgcgcgcttcgacacgctgtggacgtggactgccgaaaatatgaccggcgccgaccccaggacacgcctgcccggctggttgtgggggcagggcgaagatggcagctggaaactgcaggacgccaactctgcgtccgacgccgacctgtggatcatctatgcgctgctggaagccgcccgcatctggcagcacccggcgtatcgaaacgatgcgctggcactgctcaagaccgttgaagcgcggctggtggtcaacctgccggggctgggcaagatgctcctgcccggcccggaaggtttcgtgcagcccgaccacttatggcgtttgaactccagttacctgccggtgccgctgttacggcgtctggccagggaagagccggccgggccatggaaggaaatcgccgacaacacggcaaaactgatcgacgcatccagcccgaaaggctttatcgccgactgggtgggttatcgcggcacatcaccgaaaaccgggctgttcgtggtcgatccggtctccggcgagctgggcagctatgacgcgattcgcgtctacctctgggcgggcatgacgcctgcgtccgacccgttggccgcacgcttgctggcgcgtctcgacggcatggcggtcagcacggcctccagcggtacgcccccggaaaaagtccaggtgatgagtggcgcgagccagggccaggcgccgtttggttattcggcggcgttgctgccgtacttccaggccaagggccagacgtggctggcggaacagcagcagcgcagggtcgaagccggtgtcagcacggcgctggcccgcgacccgacagaccgtaccgaacctgcctattacaacctcatgctcagcctgtttgccttgggctgggtcgaaaaacgctatcagttccgtgaagacgggaccctcaagttgtcatgggagacgtcatgcccgcgcgccgccacacgt

SEQ ID NO: 33098 - DNA, 1713 bp, Pseudomonas syringae
atgaaagccttcgccgaactctatgcacagctggacgccaccacgtcgagcaacgccaaactcgccgccatgcgcgactatttcgaaaaagcggcggcagaggacgcagcctgggccgtgtacttcctgtccggtggacgccccaggcaactggtgccgacccgcgtgctgcgcgagcaagccatgacactggcgagcctgcctgaatggttgttcgaagaaagctatcaggccgtcggcgacctggcggaaaccctgtcattgctgctgccgcaggccgaccacagcaacgacgaaggcctggccacgtggatggaagacaagctgctgccattgcgcggcctgccgcccgaagagctggccgcgcgcttgcccatgttctggtcgcaactggaccgcagcagcttgatggtttgcatcaagctgatcaccggcagctttcgcgtcggcgtatcgaaattgctggtcacccgcgcactggcagcgctggctgacatcgacagcaagcgcgttgcgcaaaggctggtcggctacacagacctgtcgcatcggcccagcgccgagcgctacctcaagctgatcgcgcctgaatcggaagatgaacacgcgcaacgtggcggtcagccctatccgttctttcttgcgcactccttgcagcagcctgccgaccagttcgagacgttgctggggccggccgagaactggcaggtggaatggaaatgggacggcatccgcgcacaactggtcaaacgtgacggcaggctgtggatctggtcacggggcgaagagctggtcaccgaccgcttcccggaactgcacagcctggcgcaatgcctgccggacggcacggtgatcgacggcgaaatcgtggtctggaaagcgcctgacattaacccggacatcagccacgacagcgatgcagcgttcgcgctggataatgacgccccgaacgctgcgccctcagtccagcccttcgccctgctgcaacaacgcatcggccgcaagacactgggcaagaagatcctcactgacattccggtcgtggtgctggcctacgacctgctggaatggcaaggcgctgactggcgcagccgcccgcaacacgaacgccgcacgcaactggaaaccttgatcgatagctgtcagagcgaggtgctgatgccctcgccggtgctcaccggcaaagactggctcgacctcgccacccagcgcgaagcatcccgcagcctgggggtcgagggcatgatgctcaaggcccgcgactcgctgtacggggtcggtcgcaccaaagacatgggcgtctggtggaagtggaaaatcgacccgttcagcgtcgatgccgtgctgatctatgcgcaacgcggtcatgggcgacgcgccagtctgtacagcgattacacgtttgccgtgtgggacggcccgcccgaagcaagcgaacgcacgctggtgccgttcgccaaagcctactcagggctgaccgacgaagaaatgcgcaaagtggacgcaattgtgcgcaagaccaccgtagagaagttcggcccggtgagcagtgtgacgcccacattggtgttcgagctgggtttcgagggcatcgccttgtccaagcgtcacaagagcggcatcgccgtacgcttcccgcgcatgctgcgttggcgacaggataaaccggtcgccgaggccgatagcctgacgacactgcaggacctgctgaac

SEQ ID NO: 33099 - DNA, 762 bp, Pseudomonas syringae
atgggcgtttttgttgctaaacgcaaggccttatccatgctcgatgcactcatgcaaaccctgggactctcggcattcagcctgaagggctttggcccgctgctgctggaaggcacctggatgaccatcaaactggctgtgctgtccctcgcgctgagcattctgctcgggctggtcggtgccagtgccaaactgtcgagctcggcgctgctgcgcgtgccggcgcaaatttatacaacactgatccgtggtattccggatctggtgttgatgctgttgatcttctacagcctgcaaacctggctgaccatgctcaccgacgcaatggaatgggaatacatcgagatcaatccgttcggcgcgggcgtcatcagcctgggcttcatttatggggcgtacttcaccgagacatttcgcggcgcgattctgtctgtgcctcgcggccaggtagaggcagcaaccgcttacggcttgaagcgcggccaacgattccgctacgtcgtgttcccgcaaatgatgcgttacgcgctgccgggcatcggcaataactggcaagtgctgctcaaggccaccgcgctggtgtcgatcatcggcttggccgatctggtcaaggcctcgcaggacgccggtaaaagtacctatcaattgttctactttctggtgctggcagccttgatctacctgatgattaccagcgcctcgaacttcgctctgcgctgggctgaacggcattacgccgcaggcagtcgggaggcgcagcga

SEQ ID NO: 33100 - DNA, 2508 bp, Pseudomonas syringae
atgagcagacccactgatttcgctcgacgatggtttctcgcccgaggctggaagccgttcgcgtttcagaaggaagtctgggcggcggtgaagaacggcgagtccggcctgctgcacgccagcaccggctccggcaagacctacgctgtatggtttgccgcgctcaaccgcttcgccaacgccaacgccaacaccaacaccaacaccctcaccgctgacgacaagccacgcaaacgcaaaccgcccgctgcaccgctgagtgtcctgtggatcacgcctatgcgcgcgttggctgcggatacggcgcgtgcgcttgaagcgccgttggccgagctggatattgcgtggtcggtggggttgcgtaccggcgataccagcggcagcgagcgcgctcgtcagagccgacgcctgccctcggcactgatcactacaccggaaagcctgaccctgctgctgacccgcgccgatgcacaggtcgccttgtcaacgctgaaaatggtcgtggtggacgaatggcacgagctgatcggtaacaaacgtggcgtgcaactgcaattggctctggctcgactgcgccattggaacccgcaactgattgtgtggggtatttccgcaacgctgggcaatcaggagcatgcgcagcaggtactgatcggcgacggcggcgtgaccgtgcagggcaagatcgtcaagcaattgctggtcgatacgctgttgccgactgccatcgagcgctttccgtgggccgggcacatgggcctgcgcatgttgccgcaagtggtcgccgaggtgcacagcagtgccagttgcctggtgttcaccaatacccgggcgcaatcggaaatctggtatcaggctctgctcgaagcgcgccccgactgggccgggctgattgccctgcatcatggatcgctggcccgggaagtccgtgactgggtcgagcgcgccttgaaggaaggtgtgctcaaggccgtggtgtgcacctcaagcctggacctgggcgtggatttcctgcccgtcgaacgcgtactgcaaatcggctcacccaaaggcgtcgcccgcctgatgcaacgcgccgggcgttcaggccatgcgccaggccgcccttcacgcgtgacgctggtgcccacccacagcctggaactggtcgaagccgccgccgcccacgatgccgtggcagccagaatgatcgagccgcgtgaatccccccaccagccacttgatgtgctggtgcagcacctggtcagcatggcgctgggcggcggttttctgcccgacgagctgctggtggaagtgcgcagcgcatgggcctaccgcgacctcagcgatgaccaatggcaatgggcgctggcgttcgtgcgcaacggcggtcactcgctgaccgcttacccggattaccgccgcgccgaaccggacgaacacggtgtctggcgtgttcccgatgcgcgtctggcccgtcggcaccgcatgagcgtcggtaccatcgtcagtgaagccaccgtcaacctcaaatactggaaaaaaggcggcggtggcggctcgctgggcagcgtggaggaaggcttcatcgcccggctcaagcccggcgacggctttctgttcggcgggcgtttgctggagttggtgcgggtggaaaacatgaccgcctacgtcaagcgtgccaccggcaagaaagccgccgtgccccgctggaatggtggacgaatgccgttgtccagcgagctggcaaacgccgtggtagagcaattcgatgccgccgcacgaggtgaattcaatagcccggaaatgcaggccatcaagccgctgctggaagtgcagcagcaatggtcgggcctgccgcaacgcgacacgctgctggccgaaacgctaaaatcccgcgaaggctggcacctgtttctttacccgttcgctggccgccatgtgcacctggggctgggcagcttgctggcatggcgccttagccgctatcagccgctgaccttctcgatcgcggtcaacgactatggtctggagctgctcagtgccagcgagattgactgggcgcaagcattgcaaggcgatcttttcagcgaaaccgatctactggcggacattatcgccagcctgaacgcgggcgagctggccttgcgacgctttcgtgaaatcgcccggatctcggggctggtgttttccggctacccgggagcggccaagagcaatcgtcagcttcaggcatccagtggtttgttttttgaagtattcaaacagtacgacgccgagaacatgctgctgactcaagccgaacaagaggtgttgcgccaggaactggacttgcaacgcctggagctgaccttgcgccagatcaacagtcggacgctggacctgcatgcgataaaacgcgccacgccgctggcgtttccgctgctggtcgagcgttttcgtgagagcctcagttcggaaaaactcgccgaccgcatcgcgcgcatggtccgcgatctggaaaaagctgcagggccggagcctgaacga

SEQ ID NO: 33101 - DNA, 453 bp, Pseudomonas syringae
atggatattcgcaaagtcaagaagctgatcgaattgctggaagagtccggcatcgacgagctggaaattcgtgaaggcgaagaatccgtacggatcagccgtcacagcaagaccccggcgcagccttactacgcgcccgctccggttgcagcgccggtcgccgcaccagcccctgccgccgccccggccgctgcagaagcaccctcggcaccgaaactgaacggttttgtggtcaagtcgccaatggtcggtacgttctaccgcactccggcacctacttcgcctgcattcgtcgaagtcggccagaccgtcaagaaaggcgacaccatctgcatcgtcgaagcgatgaaaatgatgaaccacatccaggcagaagccagcggtgtgatcgaatccatcctggtagaaaacggtcagccggttgagtttgaccagccgctgttcactatcgtt

SEQ ID NO: 33102 - DNA, 1698 bp, Pseudomonas syringae
atgaagatttccagacaagcctacgccgacatgttcggccccaccgttggcgacaaggttcgcctggcggataccgagctgtggatcgaggtcgagaaagacttcaccacctacggcgaagaagtgaagttcggcggtggcaaggtcatccgtgacggcatgggccagggtcaactgctggccgccgacgtggttgatacgctgatcaccaacgccttgatcatcgaccactggggcatcgtcaaggctgacgtcggcatcaagaacggccgtatcgcagccatcggcaaggccggtaacccggacattcagccggacgtgaccattgccgtgggcgcagccaccgaagtcattgccggcgaaggcatgatccttaccgccggcggcgtcgatacgcacatccacttcatctgcccgcagcagatcgaagaagcgctgatgagcggcgtgaccaccatgatcggcggcggcaccggccctgccaccggcaccaacgcgaccaccgtaacgcccggcccgtggcacatggcgcgcatgctccaggcctcggactcgttcccgatgaacatcggtttcaccggcaagggcaacgtcagcctgcccggcccgctgatcgaacaggtcaaggccggtgccatcggcctgaaactgcacgaagactggggcaccaccccggccgccatcgacaactgcctgagcgtggcggacgaatatgacgtgcaggtcgcaatccacaccgacacgctcaacgagtcaggttttgtcgaaaccaccctggcagcgttcaagaaccgcacaatccacacctaccataccgaaggtgccggtggcggccatgcgccggacatcatcaaggcgtgcggctcacccaacgtgctgccaagctcgaccaacccgaccaggccgttcacccgcaacaccatcgacgagcacctggacatgctcatggtctgccaccacctggacccgagcatcgccgaagacgtggccttcgcggaaagccgcattcgccgcgaaaccattgccgccgaggacatcctccacgacctgggcgcgttttccatgctcagctccgacagccaggccatggggcgggttggcgaggtgatcatgcgcacctggcaaaccgccgacaagatgaagaaacagcgtggcccgctgccgcaggatggcccaggcaacgataacttccgcgccaagcgctacatagccaaatacaccatcaacccggcgatcacccacggcatcagccatgaagtgggctccattgaagtcggcaaatgggcggacctggtgctctggcgcccggcgttcttcggcgtcaaaccgaccctgatcctcaagggcggtgccatcgccgccagcctgatgggcgacgccaacgcttccatcccgacgccgcaaccggtccactaccgccccatgttcgcaagcttcggcagctcgctgcacgccaccagcctgaccttcatcagccaggccgcattcgacgcgggcgtgccggaaacactgggcttgaagaagcagatcggcgtggtcaaaggctgccgcaccgtgcagaaaaaagacctgatccacaacgattacctgccggacatcgaagtcgacccacagacctatcaggtcaaggccgacggtgtgttgctgtggtgcgaacctgcggacgtgctaccaatggcgcagcggtattttctgttt

SEQ ID NO: 33103 - DNA, 957 bp, Pseudomonas syringae
atgggtgatcgttacatggatttcaaagactactacaagatacttgacgtagagccggctgctgacgacaaggcgatcaagaccgcctatcgcaaactggcgcgcaagtatcaccctgacgtcagcaaggaagccggcgccgaagacaagttcaaggaagcatccgaagcctatgaagtgctcagcagccctgaaaagcgcgccgagtacgacgaactgcgcaagtacggtcggcagggccgtccgttccagacgccacctggctggcaaagccgtgcaggcgcgggcgcaggcggattcgaagaaacagcggatttttccgagtttttcagttccatttttggtggccggccacagcagggcgggcgtacccgtaacccgggccgcaaggggcaggacgtggagatggaactggcggtctttctggaagaaaccctgtcaggcgagtccaagcaggtcagcttcaaggtgcctcagcacagccccaacgggcagcgcatgggtgatatcaccaagaccctgaacgtgaagattccggcgggtgtcgtcgatggcgagcgcattcgtctcaagggccagggcgcgccgggtataggcggtggtgccaatggcgatctgtacctgatcattcgcctggcgccgcacccgatgttcgaggtcgaaggccatgatctggtgattaccgtgccgctggccccgtgggaagccgcgctgggcaccaaagtggcggtgccgaccctgaccagcaggctcaacctgaccattcggcccgacagccagaacggtcagcgcttgcggatcaagggtaatggtttgatgaacaagagtggcgagcggggtgatctgtatgcccaactgaagatcgtcatgcccaaacagaccgatgaagcggcacgtgcgctctggcagaaactggccgacagcgctgcgttcgaccctcgggcgcagtggaagggc

SEQ ID NO: 33104 - DNA, 2286 bp, Pseudomonas syringae
ttgctgctgattgccctgctctggctggctgatcgcctctggccgttgccgctgcccaaggacgatctggcgcgtgtcgtgctggccgaagacggcacgcccttatggcgctttgccgatgccaacggtgtgtggcgctacccggtcactaaccagcaggtttcgccctactaccttgaagcgctgctgacctacgaggatcgctggttctacagccaccccggcgtgaacccgctggcgctggtgcgcgccagttggcagaacctcaggggtgctcgcgtggtgtcgggcggcagtacgctgtcgatgcaggttgcgcggctgctcgacccgcactcgcgaaccctgcccggcaagtttcgccaactgtggcgcacgttgcagctggaatggcacctgtccaaggatgaaatcctcagcctgtacctcaatcgcgcgccgtttggcggcacgctgcaaggggtggcggccgccagttgggcgtatctgggcaaatccccacagaacctgacccgcgccgaagcagccttgctggccgtgctgccgcaggcgccgagccgtctgcgccccgaccgtcatccgcaacgtgcacagttggcccgcgacaaggttctcaggcgtctggccgagtttcaggtgtggccgcaaggcagcgtcgacgaggcgctggaagagccgttatggctggcgccgcgccaggaaccgagcctggcgccactgctggcacgacgcctgaaccgaccgaacagcccgccactgatccgcaccacgctggatgccccgctgcaacggcgcatggaagatttgctgatgggctggcgggcacggctgccggagcgcacctcggcagcgattctggtagtcgaggcagagaacatggcggtgcgcgcctacgtgggctcggtggatatcagcgacgtcaagcgtttcggccatgtggacatggtgaccgcactgcgctcgccgggctcgacgctcaaaccgttcctctacggcatggcaatggacgccgggttgatccactccgaatcactgatgcaggacgtgccgcgccgctatggcgactaccggccaggcaacttttcgaccgggttcggcgggccggtggctgccagttctgcgctgtcgatgtccctcaacctgcctgccgtgcagttgctggaggtctacggcccgaaacgcttcgccgcagaactgcgtaatggcggtgtaccgctgaccctgccgccgctggccgagcccaatctggcgctgattctgggcggggccggcagtcggctggaagatctggtcgctggctacagcgccttcgcccgtggcgggcggagtgccgacgtcaggttgcagccgcaggaccgcctgcgtgagcggcggatgatgtcgccgggggctgcgtggattatccggcggattctcagcggccagtcgcgcccggacattgatccgcgtgcagagctggtgcagcgtccgcaactggcctggaagaccggcaccagctatggctttcgcgatgcctgggcaattggcgtcgggccgcgctttctggtcggcgtgtggatcggcaggccggacggtacgccggtgccgggccagttcggcctggcctcggctgcgccgctgatgctgcaggtacacgatgtactggtcaatcgcgacagccagcgcggcatcgctgcgccagtgcaagcggtgccgttgaacgttggcgtggcagcgatctgttggccgttggggcaaccgatgagcaagagcgatccgaactgccgtcgccagcgcttcgcctggacgctggacgacaccacgccgccgaccctgcaagccgccgatcaaccgcttgggctgggtttacaggaacgtatctgggtcaatgacaaaggcttgcgtgtcagtgccagttgttcggatgcccaaccgcgagacatcgcgctgtggcctgcgccgctggagccctggctgcccagggccgaaagacgcgaagcgcgcttgccacccgccgacccggactgcccgccacagaacctctcccaggcaccgccgctgagtattgtcggcgtgcgcgaaggcgacaacctgcgcttgcccgctggcagccgtcaggctctgcgcttgaaactctcggctctgggcggcagcggtcggcgctggtggttcatcgacggcgcgccaatggcagacaccgacgccggacacgacttcaccccgaccctgaacaaaccgggccgctaccaactgagcgtcctggacgaaagcggccagaccgcgagggtagaattcagcgtggtggag

SEQ ID NO: 33105 - DNA, 975 bp, Pseudomonas syringae; identical to SEQ ID NO: 33042

SEQ ID NO: 33106 - DNA, 927 bp, Pseudomonas syringae
atgagccagatgagcttttccgatttcgaatatgctggcaagcgcaagcagacacgccgcgaacgcttcctcgccgagatggatcaggtcgtgccctggacaggtctgctgggccttatcgagccgttctaccccaaggctggcggtggcagaaaaccttatcctctggaaaccatgctgcgcattcatctgctgcaaaactggttctccctgagcgacccggccatggaagaagcgctctacgaaaccacgcccatgcgccagtttgcacgcctgactttaagcgccccgatacctgaagacaccacgatcatgaacttccagcacctgctggaaaagcatcaactggccccagcgatcctcgcggtcatcaacggttatctgcaagagaaaggcctgtccctgcgccagggcaccatcgtcgatgccaccatcattcatgcccccagctcgaccaagaacgaggaaggaaaacgtgatcccgagatgcatcagaccaagaaaggtaaccaatatttctttggcatgaaggcgcatatcggcgccgacgccgagtcgggactggttcatcatgttcatggcactgcggccaatgtggccgatgtcacgcaggtcgccgagctgttgcgcggcgaagaaaacgcggtgtatgcagacgctggatacataagtgtcgagaagcgtgaagagcatgaaaatcgtgaggtcatctggcaaatcgcggcgcggcgcagcacgtattccaggttcaataaacgcagcgttctctacaaggccaagcgcaagatcgagtactgcaaagctcagacacgggccaaggtcgagcatccatttcgtgtaatcaagcggcatgtatcagttgtccagttgtccgttgtgagcttgatttcaaagggagttgagttgaatataccaagcttagggcta

SEQ ID NO: 33107 - DNA, 1020 bp, Pseudomonas syringae
atgaaagcactgggcttaatggataaccagaggcttgaacttgtggattgcaaggatcctgtcatgcttgctcctgacggcgtagaaatcgatatcgtgctatcaggtatatgcggaactgatctggcggtattgtcgggccgtgaaggtggagaggtgggcattatacgcgggcacgaagcagttggcattattatcgatgtaggtaaggatgtagtacacctacaaaaagggatgcgggtggtggttgatcccaacgaatactgtggcgtttgcgaaccttgccgtcttgctaaaacgcacctatgcaatgggggggtgaacgctgggttggatatcgcaggtgtcaacaaacatggaacttttgccgagcgcttcgttactcgtgagcgttttgtgtatcaattgccagacgatatgagctgggcagctggtgtgttggttgagcctgttgcctgcattctgaataatatagaccaggcgttcattcgagcgggagagcgtgtgttgatcctagggtctggccctatgagtctgattgcgcagatcgttctgcgctcaatgggagttgacacgctcgccactgatcgaaacacacatcgcatacagttcggccgctcacaaagtcttgatgttatacatgccgatgatcttgagttgcagatgcagcaccaagaaaagtttgatgttgttatcgatactgtcggtaatcagatcgatacagcttcacgctacatcggtcgcggtgggagaattgtactttttggatttgatagtgactatcactacatgctgcctgtaaagtacttcctggttaacgctatcagtattatttctgctggagaatacaatcagcactttcctagagcaattcgtcttgtgcaaaaacttcctgagctagggcggctggtaacgcatcgctacgtactagaaaatcactcggaggttttcgatgcacttctgaacgatgcttccgcccccaatataaaaagcgtattcacaccaaatctcgcttatctt

SEQ ID NO: 33108 - DNA, 1101 bp, Pseudomonas syringae
atgcgcttcgacctgtcgaaagaaatctatgcgcagaacggcacgcgttccaaattcacggtttccatcgccgatggagtggaaagctacaacgactggacggccactgagagcaacctgaatgtgcggcaggtattcaccgagctcgaccatatcgccgcgttcaaaggcaacccggtattcgagaacgctaccctgtgggctggcaagcgattcgacagggataatttcgatattcactggctggactcggatgtggtctttctggccgggaccggcggcggtatctacgatgttcagatgaacaagggctggcgctcgaactattccctgatcgggcgtaactacggagacttcagtgagggcggcgtcgatgctgatgtagagagctacatcctgacctccaaccaattcttcgacagtggccagtggcagtggatgttcaatgccattggggcgaagaaaaacgacgttggcactcgcaccaatcaggccggttcgacgcccgcagattccggcttgcactccatgttggccaatcaccagaaagactttttcggccgtgaaggcttcttcaagaccgctttgctctatgggcaaggtctgggggcgcaggtcaaggacatcggctcggacggtgaactgctcgacgacgctcgcgcggtgcgtctggcgctatatggcgaaacccctgttgcgccgggatggcgcatcggccccagcctgctggccgagcagagcaaagaccgatatgtcaaaggcgacgattatcgctggctcacgctgaacatgcgcctggccaacgagatcaacagtaacttcgagatggcctacgagctgagctggcaaaccatggacctggaccccaaaggctacctgcaacgcaacgcagtcgatggcaacttctggaagtttacggttgcgccgacgttcaagccagacatgggcgacttgctcacgcgtcccgaattgcgcgtgttcgcaagcctcatgaactggtcttcggacctggaccgctacagcacgaccggcaatttcggcaaaagcgacttcagcgccggtggcgtatggcaattcggaatccagatggaaacctggttc

SEQ ID NO: 33109 - DNA, 2460 bp, Pseudomonas syringae
atgcaggcactgctcgaacagcagggcggttccatcaagccattgctgctgcaagtcggcttcgatatcaacagcctgcgcaaggaactgagcgctgagctggaccgactgcccaaaatccagaacccgaccggcgacgtgaatatgtcgcaggacctggcgcgcctgctcaatcaggccgaccgcctggcgcagcagaagggcgatcagttcatttccagcgagctggtgctgctcgctgcaatggatgagaacagcaagctcggcaagttgttgctggggcagggcgtcagcaagaaggccctggaaaatgccatcaataacctgcgcggcgaaggtgccgtcaatgacccgaacatcgaagagtcgcgtcaggcgctcgacaagtacaccgttgacctgaccaagcgcgccgaagagggcaagctagacccggtgattggccgtgatgacgagatccgtcgcaccattcaggttctgcaacgccgaaccaaaaacaatccggtgctgatcggtgagcccggtgtgggtaaaaccgccatcgccgaaggtctggcgcagcgcatcatcaatggcgaggtgccggatggcctgcgcggcaagcgtctgctgtcgctggacatgggcgcactgattgccggtgccaagtaccgtggcgagttcgaagagcgcttgaagtcgctgctcaacgagctgtccaagcaggaaggccagatcatcctgttcatcgacgaattacacaccatggtcggcgcgggcaagggcgagggctcgatggacgcgggcaacatgctcaagccggcactggctcggggcgagttgcactgcgtcggcgccaccacgctcaacgagtaccgccaatatatcgagaaggacgccgcgcttgagcgtcgtttccagaaagtgctggtggacgagccgagcgaagaggacaccattgcaattctgcgtggcctgaaagagcgctatgaagtgcatcacaaggttgcgatcaccgacggcgcgatcatcgctgcggccaagctgagccatcgctacatcaccgatcgtcagttgccggacaaggccattgacctgattgacgaagcggccagccgcattcgcatggagatcgactccaagcccgaagtgctcgaccgtcttgagcgacgtctgattcagctgaaagtcgaagctcaggcgctcaagaaggaaaaggacgaggcagccatcaaacgcctggaaaaactccaggaagaaatcgtgcgccttgagaaggaatacgccgatctcgaagaaatctggacttcggaaaaagccgaagtcaccggttctgcgcagatccagcagaaaatagagcagtcccgtcaggaactggaagcggcgcgtcgccgtggcgacctgaaccgcatggccgagttgcagtacggcatcatcccggacctggaacgcagcctgcaaatggtcgatcagcacggcaagcccgagaaccagttgctgcgcagcaaagtgaccgaagaagaaattgccgaagtcgtctccaaatggaccggtattcctgtgtcgaagatgctggagggcgagcgcgagaagctgttgcgcatggaaaccctgctgcataaccgggtgatcggtcaggaagaggcggtagtggcggtttccaacgccgtgcggcgctcgcgtgccgggttgtccgaccctaatcgcccaagcggctcgttcatgttcctcggccccaccggcgtgggtaaaaccgaactgtgcaaggcgctggccgaatttctgttcgacaccgaagaggcgatggtgcgaatcgacatgtccgagttcatggagaaacattccgtggctcgcctgatcggtgcaccacccggctatgtcggttacgaagagggcggctacctgaccgaagccgtgcgtcgcaagccgtactcggtgatcctgctcgatgaggtggagaaggcgcactccgatgtcttcaacatcctgctgcaggtgcttgaagacggacgcctgaccgacagccacgggcggacagtggatttccgtaataccgtgatcgtcatgacctccaacctgggctcggcgcagatccaggaactggtgggtgatcgcgaggcgcagcgtgcggcggtaatggacgcagtcagcacgcacttccgtccggagttcgtcaaccggatcgacgaggtggtgatcttcgagcccttggcgcgtgatcagattgccggtatcaccgatatccagcttggccgtctgcgcaagcgtctggccgagcgcgagctgacaatggtgctgagccccgaggcgctcgacaagctgattgccgtcggttacgacccggtctatggcgcacggccactcaagcgcgccattcagcgctggatcgaaaacccgctggcgcaactgatcctctcgggtggcttcgagccgggcagcagcatcaccggcaaggtggtcgacgacgagatcgtgtttggc

SEQ ID NO: 33110 - DNA, 1143 bp, Pseudomonas syringae
atgatgaaattgaagctagccaacatcgacaagcaattgggcggcatgcgcattctgcgcgacgtcagcctggagatcgctgcaggtgagttcgttgtgttcgtcggcccgtctggctgcggaaagtcgacgctgctgcgcttgatcgccggactggactcgatctgtagtggcgacctgctgatcgacggacgacgggtcaatgacctggaaccgcgcgagcgtggtgtcggtatggtctttcagtcctacgcgctgtacccgcacatgagcgtctacgacaacatcagttttggtctcaagctggccaagacagaaaaaagcagcctgcgcgagcgcgtgctgaaaaccgcacagattctgcaactggacaaactcctgcagcgcaaacccaaggaactgtccggtgggcagcgtcagcgggtagcaatgggcagagccatggcgcgggaaccggacattttgctgttcgacgaaccgctctccaacctcgatgcgtcgttgcgggtgcagatgcgcaacgaaatcgcgcggctgcataagcggctgggctcgaccatgatctatgtcacgcacgatcaggtagaggcaatgaccctggcggacaagattgtcgtgctcaacggcggtcaggtcgaacaggttggctcaccacgcgaactctatgagcgtcccgccagccgcttcgtggccggttttctgggctcaccgagaatgaattttctgccagtacgcttgcaggcaccaggccgcaacagcctgatcgatgtcccggcactgggcatgacgtccctgccctttgacagctcgaacctcgccaacggtgcgcaattgaccctgggtgttcgtccggaacacatcgccctgacggctgcgaacaacggtgttggcgtcatggtgaccggtgtcgaatacctgggcagcgaggtttacgtgcacctggctaccggcgagagcgaacccttgatttgtcgctgcgatgccaaggctggttggcaggcaggcgaccaggtcgcgctgcaactggatgacagcaacctgcacgtgttcgacgccgatggcctggccctgaagcgtcatgcagacgccggtcagcagctgacacccggcaccacgccgcacctcgtacaagcaggcacccta

SEQ ID NO: 33111 - DNA, 350 bp, Pseudomonas syringae
catgattaagcaggcgggatcagcggtaatgcgggttacaccggcgtggacaagcatcaggatcgtcaaattatctggtcgattgttgtacgtccgagccgctgcaaaaagcttgatgagactagttggatcgtgcaggtgcattgcaaaatcgagtacgcgaaagcccagtgcgcgcaaaggtcgaacatccgttccgcgtgatcaagcgccagtttgggtatacgaaagtgcggtttcgcgggcgctctaaaaacaccgggcaacaggccgcgctctttaccctgtcgaatagttgggggggggggcgaaagcgcctgccggtgataggaaagttgcacctaagtgtg

SEQ ID NO: 33112 - DNA, 672 bp, Pseudomonas syringae
gtgaacagcgcctgggcgctcttgcgtctggccagtccgcagttgccgattggtggctatagctactcgcaagggctggaaatggccgtagagcagtctatcgtgatcgacccgcagactgccggacgctggattggtgatcagttattgctcaaccttgcccgcttcgaggcccccttgttgttggctcactgcgaagcagcagccgttggcgactgggggcagctgctgcaagtcagcgaacaacaccgcgccagccgcgagacccgcgagttgcatcaggagagccggcagatgggctactccctgcaacagttgctcaacggcctgcctgaactggaccgcgacgcccggcgctttctggaacagaccacagagccgcatctggcccttggctgggcgctggctgctcgcacatggcggatcagcccgcaggacgcactggccgcatggctgtggagctggctggaaaaccagctggctgtgctgatgaagacgctgccactgggccagcaagccgcgcagcgcctgaccagcgagctgttgccgttgttgcagcaggcgcaggtcaatgccagcgcacaagacactcaccctgctggcagcgcggccttcggcctggcgttggcgagcatggcccacgaacgtcaatacagccggttattccggtcc

SEQ ID NO: 33113 - DNA, 1128 bp, Pseudomonas syringae
atgacacgctcggctgatcgtcacgtgctgcagttctgccacggctatgacgggccgtttcttgactgcgcacggcaatacgccagcctgtttgtcggcaagggctatcgggtgacgacggtgtttctgaccggcgccgccgaccccgatgtggtcgccgactgcggttcggacgaagtgctgttcatggagtacagctccagtgccattcgcggcctgaagctgggcgctatccgggacctgtgcaaaatcgccgccacgcgcagtttcagcttctgcatcgcccaccgtttcaaaccggtgtacatcgccctgctggcgaccagcctgccggtgatcggcgtgcaccatgcgttcggcgactacaaacgccgtacgcgcaaactgtttgctacgctgtttcgcaagcgcctgagcctgctcggcgtgtccgatgcggtgcgcgatgacatgcgcagcagcctgcccaagtggccggccgagcgcattcagaccctgtacaaccgcattgatgtcgagcaactgcagggcagtcagttttccgctgaagatgcccgcacagagcttggcctgtcgccgtcggcgtggattgtcggcaacgtcggtcgtctgcatcccgacaaggatcaggccacgctgttacgcggttttgccgaggcgttgcccagccttcccgagaacagccagttggtgcttctcggcaagggtcgcctggatgaaaccctcaagtcgctcgcgctggaactgggcataggcccgcatgtgctgtttctcgggcaggtgcctgacgcccgccgttacttcaaggcgttcgacgtgttcgccttgagctcggatcacgagccgttcggcatggtgctgctggaagcgatggtggccggtgtgccgctggttgcgacctcgtgcggcggcgcgaaggaagtggtggaagatgtcggcctgctgttcccgctgggcgatgcccacagcctggcgcatgggctggtgcacatggccgggcttgacgtcgagcagcgtcaggactgcgccgagcgcatgctgctgcgcctgcgcgagcgtttttccgatcatgcggtacgcgatgtcttctggcgcttgccgcaagtctccagcctgacagcgggggcc

SEQ ID NO: 33114 - DNA, 1653 bp, Pseudomonas syringae
atggcccgtcagctctatcagggcctgaccgagcttaaccagttgatcacccctggcgacaatcgcctgcaactgctggaactgctgcggccggaagtctatttcgtctgcaagcaccttgagcgtcactttctcaatcaggccatcgtgctcgacgagcgcccgcgcaaggttgccaatctttgccaggccctgcaaaaccacctggcaaccggttacaagcagatcatccaacaagtagcgtcgcgctacacccgagatcaggccgggctgttcagcatggcattgcaacgcgcattgcacgggctcaccgggccgctgattcgtgccaatcagctgtactgccctgttcaagacggcctctggctcgaactgcaccagatttaccagattgcccgccagtaccagttgcaccatgcgctggtcgatgagccgctggcgcaccacaccaaagcattgagcattgaacagacgtatgtgatcgcgttattgatgggctgctcgcgttgcaatcagatgcgtcagttgaacatcggcaagctggccgatgccctggaagcgtggagcccgttggtcaaactgcaatggcctgccgagcaaaacggcctgttcgccctggacccgacggtcgacaagccgccgctgtaccacgcgttattcaccgatgagcaatcgtccaggctgctgggcatcaataccttcgcgctggcagaggcgatcaaccagtatctggcgctgccggacgatcaacgctccccttcaacgctgttgattccgaccggcatcaacactgacctgttgcaacatctggcggtcgcctggggcgatgtggctgaacgcacctttcatcgcacgccaggccagggcacgctgaaactgtgcatcggcatgagtgcgctgcatttctacgtggcgggccagcgctcgttcagcgatttgctgcaattgaacagcgcgagcggtgctgcgaatttctcgctcaagatcgccaatactgatgaagaggatgacccttggtcctccgccttcgacacacatcgcggcaagacttcatccgtgctgctgccctacgaagagatcgaatacccgaagattgagggcgacaacgactcgctttccaacggccagcacgcgtttccgaccttcgacctgaatatcgtcaaccacagcccgggcggctactgcctggcatggcagaaggaagtgccacagcaattgcaggccggcgagctggtgggcattcaggacgactcaggcctgggctggagcgttgccatcgtgcgctgggtccggcaggtacgcagcggcggcacgcaaatgggcatcgagctgatcgctcccttcgcccagccatgcggcatgcaactgatacgcgaacagcagaacagccaatacctgcgcacgttgatgctgccggaagtacgcgcgatggaaaaaccgccgaccgtgctcgcaccacgtctgccgtttcaggaaggcagcaaggtgatgatcaacgtcgatggtgaagagcgccgcgcctcactgagcaaccggcgcatcagcagcgccagttacaaccagttcgagtatcagatctacgacgcgccgaaagccgccgaggtcgaacaggcgaagccggggcaggaattcgattccctgtggggcacgctg

SEQ ID NO: 33115 - DNA, 825 bp, Pseudomonas syringae
atgcacgccgtacagcgccagattgctgaacagctcaaggtccagccaccttttgcggaccagaacgcgttgcaggcagaagtcgcccgccgcgtcggcttcatcaaggattgcctgcagaacgctcggttgaaaacgctggtgctgggcatcagcggcggcgtcgactcgttgaccgccggcctgctcgcccagcgcgccgtcaaggagttgcgcgaaagcaccggtgatacccgctaccgttttatcgcggtacgcctgccttacgtggtgcaggccgacgagcacgaagctcaggcgtcggtggacttcatcgagccggacgagcgccacaccatcaatatcggctctagcgtcaaggcgctggccgcggaagtgaaggcgtttgacgggctcccggccagctcggtggatttcgtactcggcaacaccaaggcgcgcatgcgtatggttgcgcagtacaccgtcgccggggcctatcaagggctggtgatcggcactgaccacgccgccgaggcggtcatgggctttttcaccaagttcggtgacggtgcctgcgacctggcaccgctgagcggcctggtgaaaaaccaggtacgcgccatcgcccgccatttcggcgcgccggaatcactggtggaaaaagtaccgacggccgacctcgaagacctctcccccggcaaaccggacgaagcttcgcacggcgtgacctacgccgagatcgacgccttcctgcacggcgagccggtacgtgaagaagcgtttcggatcatttgcgaaacctacgccaagacccaacacaaacgcgaattgccgtacgcgccg

SEQ ID NO: 33116 - DNA, 1263 bp, Pseudomonas syringae
atgaatgaccaatccccggcccgtgcctgcggtatcgatttcggcacgtccaattccactgtcggctggcaacgacccggcgtggaatcgttgatcgcgctggaggacgacaagatcaccctgccctcggtggtgttcttcaacatcgaagagcgccgtccggtgtatggccgccttgcgcttcacgagtacctggagggctatgaaggccgcctgatgcgctcgctcaagagcctgctgggctccaagctgatcaagcacgacaccagcgtgctgggcacggcgatgccgttcaaggatctgctggcactgtttatcggcgaactcaagaagcgcgccgagaacactgcagggcgcgaattcgaacaggtcgtgcttggccgcccggtgcattttgtcgatgacgacgcacaggccgatcaggaagccgaagacacactggctgaagtggcccgcaagatcggcttcaaggacgtgtcatttcagttcgagcctatcgcggcggcgttcgattacgagtccaccatcgaaaacgaagagctggtgctaatcgtcgacatcggcggcggtacgtcggacttctcgctggtacgcctgtcgcctgagcggcgcacgcatgctgatcgcgagcaggacatcctggccaccggcggtgtgcacattggcggtaccgacttcgacaaacagctgagcctgcaaggcgtgatgccgttgttcggctacggcagccggatgaaaagcggcgcctacatgccgaccagccatcacatgaacctggcgacctggcacaccatcaacgccgtgtactcgcaaaaatcccagttggcacttggcagcatgcgttacgacatcgaagacaccggcggcatcgatcgcctgttcaagctgatcgagcagcgcgccgggcactggctggccatggaagtggaagaaaccaagattcagctgacccacaccgaaaaccgccatttgccgatggaccgggtggaagcaggattgagcgtggacctgagccgagtgatgttcgaggccgccatcgacgcccagcttgagcgggtgcgcaacagcgtgacgacattgctgaacgacgcaggcgtaagtgtcgagcaggtcaatacggtgttttttaccggcggctcaagcggcatacctgcgcttcgcaacagcgtctcggccatgctgcccaacgcccgccacgtcgaaggcaatatcttcggcagcatcggcagcggtttggcgattgaagcgaagaagcgttacggc

SEQ ID NO: 33117 - DNA, 738 bp, Pseudomonas syringae
atgatcaagccggtctgggcaaaccgtgcggcgatcaaaccgctgctgggcaagattttcgtcctagccgtgctcggcaccgcgatgtatcaaagcctggcgtatttcgccgcaggtctcacgactgccaccaacatgggcatcattcagtcgctggtgccgatgatggcgctggggctgtcgatagcctgcctgggcaaccacctgacctctggcgcgctgctgggagcgattctgtctttcgcaggcgtggtggttgtggtgtcggcgggcaatcctgcccaattgatcgaacatggcgtcaatcgaggcgatgcaatggtgctggtggcagcggcgtcgtatgcggtttacagcacgctgttgaaaaagtggcagttgcgcctgccgccgttgcagcttttatacgtgcaaattctgctggcgattctggtgttgctgccgccgttcatcctgtcgtcgaaaaccggcctgaacgcaagcaacatcccgatggtgctgtacgcggcgatccccacctccatgctcgcgccgtggctgtggatgaccgccatcatgcgcctgggtcccagccgcacgacgctgttcttcaacctgatgccgattgccacggcattgattgcagcggcgacgctgggcgaacaactggcgctctaccacctctttggcggagcgctgaccctgtgcggagtcgtcctcgcagaacgctgggcgactccgctgcggtcaaaagcaagt

SEQ ID NO: 33118 - DNA, 2493 bp, Pseudomonas syringae
atgcccgacctgcttgaccaatacccgctgtccgagggtacttaccacgaaatgctcgatgccgacggcgctgttcgcccgcactggcgtcgcctgtacgaacacctgcggcgcagcacatcggcgcaactgattcagcgccaggacttgctgacccgccagattcaggaaaacggcgtcacctacaacgtttatgccgaccccaagggcgctgatcgcccatgggaactggacctgttgccgcacattattgcggcggatgagtggcagcatgtggcggcagggattgcccagcgtgcacgactgctcaacgccgtgctcgccgacctttacggcccgcagacgctgatcgccaatggcttgctgcctgccgagctggtatttggtcacaacaatttcctgtggccgtgccagggcgtcaaaccgcctgagggcaccttcctgcatatgtacgccgtggacctggcgcgcacgccggacgggcgttggtgggtgactgccgaccgcactcaggcaccctcgggtgccggttatgcgctggaaaatcgccagagcgtcgcgcgcgccttgccggaaacctaccgcgacctgcaagtgcggcatctgtcgggctttttcgacaccctgcagcagaccctggcccgtcaggcgccgaccagcagcgaagcgcctctggtggtgttgttgacgccgggacgtttcaacgagagttatttcgagcatctgtacctcgctcggcagttgggttatccgctggtcgaaggcggcgatctgaccgtgcgtgatgccactgtctatctgaaaaccctcagcggcctgcgccgggttcacgcgatcatgcgccgtctggacgatgacttctgcgatcctctggaactgcgtaccgattctgcgctgggcgtgccggggctgctggaagccgtgcgccagggcaacgtgttggtcgccaacgccttgggcagcggtgttctcgaatcgcctggcctgctgggctttttaccgaaaatcagccagtacctgttcggcgaagagctgatcctgccgtccgttgcgacctggtggtgcggagaaccgaccgtgctggcgcaagcgctggagaaactgcctgatctgctgatcaaaccggcatttccctcgcagcatttcgccccggtgttcggccgcgacctgaacgaagaacagtgcaacgcactggctcagcgcatgcagtcgcggccctacgcctatgtcgcccaagagctggcgcagttgtctcacgcgccggtattgcaagccgatggcaccggcttgcaaccccgtgccattggcatgcgcgtttatgcggtggccagccttgatggctatcgcgtgttgcccggcggcttgacccgcgttgccgctgaagccgatgccgacgtggtgtcgatgcagcgcggtggggcgagcaaagacacctgggtgctgggcgagcgctcgcatttgggcgagccctggaaaggccagcgcgcgctgggtgtctacgacctgatccgccgagacccttacctgccatcacgcgtggtggagaacctgttctggttcgggcgctattgcgagcgctgcgacgacagtgcccgtctgctgcgcatcatgctgacgcgctatgtcgatgatgacgatccgctggcgttgcaggcagccgtggcactggcggaaagcctgggcatggtgcccgaagccgaggaagacgaggagttgaaggatcgcctgctcgtggccctgttgggtgacgagtggccgttcagcctgcgcgccaacttgcagcgtctgcaatgggccgcctcgcaagtgcgtggcaagctctcaagggaaaactggcaggcgctggtcgaattgcagcgtgaagcgttaagcctggaaaccgaagagccggattttggccaattactggattttctcaaccgtctggtgatgtcgctggcggcactgtccggttttgcgctggacgacatgacccgcgacgaaggctggagctttttgatgatcgggcggcgtatcgagcgtctgaagtttctcagcaccagcctggcggcgtttctgcgtggctcggtggcgtctgaacaggcggggctggaatggctgctggagctgggcaacagcagcatcacctatcgctcgcgttacatggccgtgccgcacctgattccggtgctggacttgctgttgcttgatgagcaaaacccgcatgcggtgttgttccagctcaagctggtgcaacgctcgctgcgccgcctgaacgacgagttcgatgcgccccgcgataacagcctggcggtgctggctcagcgtctggccgcattcgatctgggcagcctggaaaacccgctgtttggtcagagcagcatcgacgcggtgctcgacggcctggctgatctgctgcacagcatcggcgacagcagcgggcaggcgtcagatcgtatggcgctgcgccattttgcccacgtcgatgacgtcagccaacgcacggtatctgtc

SEQ ID NO: 33119 - DNA, 1392 bp, Pseudomonas syringae
atgaacgatatatccgcccccgagcaatacgatctgcaaaccgctgccctgaaggtgccgccacactccatcgaggctgaacaggctgtgctcggtggtctgatgctggacaacaacgcctgggagcgggtgctcgatcaagtctctgacggggatttctatcggcatgaccaccgcctgattttccgcgccatcgccaagctggcggatcagaacagcccgatcgacgtggtcacgctggccgagcaactggacaaggaagggcagacctctcaagtcggtggcctgggctacctcagtgagctggcgaaaaacacgccttccgtggccaacatcaaggcctatgcgcagatcgtccgtgcgcgggcaacgttgcgacagctgatcggcatcagcaccgaaattgccgatagcgcgttcaacccggaagggcgcaccgccgaagagattcttgacgaagccgaacggcagatcttccagatcgccgaagcacggcccaagaccggcggcccggtcagcgtcaatgacctgctgaccaaagccatcgaccgtatcgacaccctgttcaacagcgacaacgccatcaccggcctgtccaccggctacaccgaccttgatgaaaaaaccagcggcctgcagccggctgacctgatcatcgtcgccggtcgtccgtcgatgggtaaaactaccttcgcgatgaacctggttgaaaacgctgtgttacgcagcgacaaggtggtgctggtctactcgctggagatgccaggcgaatcgctgatcatgcgtatgttgtcgtcgctggggcgtatcgaccagaccaaggtgcgcgccggtcgcctggacgacgatgactggccgcgtctgacctctgcggtcaatttgctcaatgaccgcaagctgttcatcgacgacaccgctggcatcagcccgtcggaaatgcgcgcgcgcacacgccgtatcgtccgcgaacacggcgaaatcggcatgatcatgatcgactacctgcagttgatgcagattcccggttccagtggcgacaaccgtaccaacgagatttccgagatttcccgctcgttgaaagcactggccaaggaattcaactgcccggtcattgctctctcgcagctcaaccgctcgctggagcagcgcccgaacaaacgcccgatcaactccgacctccgggaatccggagcgatcgagcaggatgccgacgtcatcatgttcgtttaccgggacgaggtgtatcacccggaaaccgagcacaagggaattgccgagattatcatcggcaagcagcgtaacggccccatcggcaccacgcgcctggcgttcatcggcaaatacacacgcttcgagaacctggcgccgggtagttacaacttcgacgacgat

SEQ ID NO: 33120 - DNA, 849 bp, Pseudomonas syringae
ttgccgcatcacataatcgcgctgaatcctctctgggagacggccttgccaagcgcagccctttcatcgtcagttttgctggtgcagatatccgatagccacctgtttgccgaggcggacggggcattgctgggtatgagcacccgcgacagtctggaaaaagtcgttgatcaggtgctggccgagcagccgcacatcgatcttgtggtcgccagcggcgatatctcgcaggatggcagcgtcgagtcttacgaagcgtttcgtcggataagcgggcggatcgatgcgccagcgcgctggtttgccggcaatcatgatgaattgccgcagatggagcacgtcgctcagggtgaggggctgcttgatccggttgtagacatcggccggtggcgggtgacgttgctggattcggcggtgcctggctcggtaccgggttttctggcagatgggcagttgcagttgctggaacggtcgttgagcgaggcgccagaccggcatcatctggtttgcctgcatcatcatccggtggccattggctgtgaatggatggcgcccattggtcttcgtaatgctgatgcgttgtttgcggtgctggaccagtttgtgcaggtaaaggccgtgctctgggggcatgtgcatcaggagttcgaccaggtgcgtaacggcgtgcgcctgttggcatcgccttcgacctgcattcagttcgcgccgggcagtgtggatttcaaggtggacacgttggcgcctggctatcgctggttgcgactgcatgatgacggacggctggaaaccggtgtttccagagtggtcggcatggtctttgaagcggattacggcggcaccggttac

SEQ ID NO: 33121 - DNA, 444 bp, Pseudomonas syringae
atgcaactgatccttctggaaaaagtcgccaacctgggcaacctgggcgacaaagtaaacgttaaggccggttacggtcgtaactacctgctgccttacggcaaagcaaccgctgcaaccgctgccaacgtggctgcgtttgaagagcgtcgtgccgagctggaaaaactggctgcagacaagaaagcatctgccgaaactcgcgctgcccaactggctgagctggaagtgactatcactgccaccgctggtgacgaaggcaagctgttcggttcgatcggcacccacgacatcgctgatgcactgaccgcctctggcgttgaagttgcaaaaagcgaagttcgtctgccgaacggcactatccgcaacgttggcgaattcgacgtagccgtgcacctgcacagcgacgtagaagcgaccgtacgcgttgtcgtagtggctgct

SEQ ID NO: 33122 - DNA, 228 bp, Pseudomonas syringae
atggcacgtttcttccgtcgtcgtaaattctgccgcttcaccgctgaagacgtcaaagagatcgattacaaagatctcaacactctgaaagcctatgtatccgagaccggcaaaatcgttccaagccgcatcactggtactaaagcacgttatcagcgtcagctggccaccgctatcaaacgtgcccgcttcctggccctgctggcctacaccgacagccacggccgc

SEQ ID NO: 33123 - DNA, 423 bp, Pseudomonas syringae
atgcgtcattacgaaattatctttttggtccacccggatcaaagcgagcaagtcggcggcatggtagagcgttacaccaagctgatcgaagaagacggcggcaaaatccaccgtctggaagattggggccgtcgtcaactggcctatgcaatcaacaatgttcacaaggctcactacgtgatgctgaacgttgagtgcactggcaaggccctggccgagctggaagacaacttccgttacaacgatgctgtgatccgtaacctggtcatccgtcgcgacgaagccgtaactggccagtccgagatgctcaaggctgaagagaaccgcagtgagcgccgtgagcgtcgtgaccgtcctgagcactccgacagcgccgatggcgatgacggcgacaacagcgacgttagcgataacgctgacgag

SEQ ID NO: 33124 - DNA, 486 bp, Pseudomonas syringae
atggctggcgctgaatcgtgcagagataagggggttatggtcgtgaatctattgcgcgagcgctaccgtgtcgatcttgcaggactgcaggctgcgtgcgaggccaactacgcgcgcctgatgcgcctgttgcccgacatgcgtaacgaacaacgttcgcgccgcgtcgccgttacccagggtgatcagatgctgggcgtgctggccgtcgaagtgctgctcgactgcccgtacaccaccaccctgcaagtccgccaggaacacagcttgccctggctgccggtgccggtgcttgaagtgcaggtttatcacgatgcgcgcatggccgaagtcatcggtgccgaacatgcgcggcgctttcgcggcatctacccataccctaatgctgacatgcaccagccggacgaaaaagttcagctcaatctgtttctgggtgaatggctgagccattgcctggcgtgtgggcatgagtttgaagcagtgcgg

SEQ ID NO: 33125 - DNA, 1290 bp, Pseudomonas syringae
atgggtaagaatgtcgtagtcctgggcactcaatggggtgatgagggcaaaggcaagatcgttgatctgctgaccgaacatgctaccgccgtagttcgctatcagggtggccacaatgcgggccacaccctggtgatcgacggtgagaaaaccgtattgcacctgattccgtccggtgtactgcgcgaaggcgtgcagtgcctgatcggtaacggtgtggtggttgctcccgacgcgctcctgcgcgaaatcatcaagctggaagagaaaggcattccggtgcgcgagcgcctacgcatcagcccgtcctgcccgctgatcctgtcgtatcacgttgcgctggatcaggcgcgtgaaaaggcccgtggcgagttcaagatcggcaccaccggtcgcggcatcggccccgcttacgaagacaaggttgcacgtcgcggtcttcgcatcggcgacctgttccatcgcgaacgcttcgctgccaagctgggcgagctgctcgactaccacaactttgtgctggtcaattactacaaagagcctgccatcgacttccagaagacactcgacgagtgcatggaatacgctgacatgctcaagccgctgatgcttgacgtcaccgctgcgctgcatgaaatgcgtcgcgacggcaaagacatcatgttcgaaggtgcccagggttcgctgctggacatcgaccacggtacttatccgtacgtcaccagctccaacaccactgcaggcggcatcgccacaggttccggttttggtccgatgtacctggattacattctgggcatcaccaaggcttacaccacacgtgttggctcgggcccgttcccgaccgaactgtttgacgatgtcggtgctttcctggccaagcgcggtcacgagttcggtgctaccaccggtcgcgcccgtcgttgcggctggttcgatgctgtcatcctgcgtcgcgctatcgaaatcaacagcatttcgggtctgtgcctgaccaagctggacgtgctcgacggtctggaaaccatcaacatctgcatcggctacgagaacgaagaaggcgcggttatcgacgcgcctaccgacgctgacagctacctcggcctgcgtccggtctacgaagaaatgccgggctggagcgagtccacgctgggtgccaagacccttgaagagctgccagctgctgcacgcgcctacatcaagcgcgtcgaagagctggtcggtgcgcctatcgatatcatttcgaccggtcctgaccgcaacgaaactatcgtactgcgtcacccgttcggc

SEQ ID NO: 33126 - DNA, 1053 bp, Pseudomonas syringae
ttgttcggcggcggtaacaaacgtggcagcgatggcggcagcggcaatggcggtggttcaggcaagggcggtggctttggtctgctcggcattggcttggtcgtgctcgtcgcgttctggctctacagcgctatctatgttgtcgatgagcaagaacaggctgtcgtgttgcgttttggccagtaccacgaaaccgtggggccgggccttaacatctacttcccgccgttcgatcgcaagtacatggaaaacgtgactcgcgaacgtgcctacagcaagcagggccagatgctcaccgaagacgagaacatcgttgaagtgccactgaccgtgcagtacaagatcagcaatctggaagctttcgtcctgaacgtcgatcagcctgaaatcagcctgcagcacgcgactgaaagtgcgctgcgccacgtcgtgggttccactgcgatggatcaggtactgactgaaggccgtgaactgatggccagcgaaatcaaggagcgtctgcaacgtttcctcgatacctacggcaccggtatcaccgttactcaggtaaacgtgcagagcgctgccgcgccacgcgaagttcaggaagcgttcgatgacgtgatccgcgcccgtgaagacgagcaacgttcacgcaaccaggctgaaagctacgccaacggtgtcattccggaagcccgcggtcaggctcagcgcatcctcgaagatgccaacggctaccgtgatgaagtggtttcgcgcgccaagggtgaggctgaccgctttaccaaactggtcgccgaataccgcaaggcgcctgaagtcactcgccagcgtctgtatctggacaccatgcaggaagtcttcagcaacaccagcaaggttctcgtgaccggtgacaaagggcagaacaacctgctttacctcccgctcgacaagatgatcgaaagcagccgcagcactaccggcaatggctcagctaccggcacgccatctcagtccaatactgatactgccgcgcgagcggccgatactcagcagcgcggtgaagtgcgtacaagggagactcgc

SEQ ID NO: 33127 - DNA, 1935 bp, Pseudomonas syringae
atgaccgatcttctcctcgacggcagcgaagccgataacgcgcagactgtcctgaacgctgcacgcattgaactgctcagcccgcgtctggccaaccagattgccgcgggcgaggtggtcgagcgtccggcttcggtgatcaaggaactgctggaaaacagcctcgactctggcgctcggcgcattgatatcgatgtcgaacaggccggcatcaagctgctgaaagtgcgcgatgatggcggcggtatctcctccgacgacctgccgctggctctggcgcgacacgcgaccagcaagattcgtgacctggaagaccttgagcgggtcatgagcctgggttttcgcggcgaggcgctggcgtcgatcagctccgtggcgcgcctgacactgacctcgcgcacccgcgacgccgatcaggcctggcaggtcgagaccgaagggcgcgacatggatgcgcgcgtgcagcctgctgcgcatccggtgggcacgtctgtggaagtgcgcgacctgttctttaatacgcccgcacggcgcaagtttctcaaggccgagaaaaccgaattcgatcacctgcacgaagtgatcaagcgcatggcgctggcgcgtttcgatgtcgcctttcatttgcgtcacaacggcaagaccgtgctcagcctgcacgaagcccatgacgacactgccagggcgcggcgcgtctcggccatttgcgggccgggctttctggagcaggcgctgcccatcgagatcgaacgcaacggcctgcatctgtggggctgggtcgggctgccgacgttttcgcgcagccaggctgatctgcaatatttctttgtgaatggccgtgcggtgcgcgacaaactggtcgcccacgcggtgcgtcaggcgtatcgcgatgtgctgttcaacggccgtcatccgacgttcgtgctgttttttgaggttgacccggcggctgtcgacgtcaacgttcacccgaccaaacacgaagtgcgtttccgtgacgggcgcatggtgcatgactttctgtatggcacgttgcaccgcgctttgggtgatgtgcgccctgaaaaccaattgggcggcagcgtgccggccgccgccgaacctcggccgaccgggcctgacgccggtgagttcgggccacagggcgaaatgcgtctggccaacaatgtgctggagcagccccagggtgagcctttcgccaggcctgcgggcggcggttccggcagcggctatcagtattcgccacggcccaccacgggcgtgccggttgccgaagcgcagagcgcctatcgagagttttttgcgccgctgcccggcaccacgccgtcagcgctgcctgagtcgcccagcgacattccgccgctgggctacgcactggcgcagctcaagggtatctacattctggctgaaaacgcccacgggctggtgctggtggacatgcatgccgctcacgagcggatcatgtatgagcgcctgaaaattgcgatggccaacgaaggcctgagcggccagcccttgctggtgcccgagtccattgcggtcagccagcgcgaagcggactgcgccgaagagcacatcacaacgttccagcgcctgggtttcgagcttcagcggcttggtccggaaaccctggcgattcgacagattcctgcgttgctcaagcaggccgaagccaatcggctggtcagtgacgtattggccgacctgatggaatacggcaccagcgaccgggtgcaggcgcacatgaacgagttgctcggcacgatggcgtgccacggcgctattcgcgccaatcggcgtctggccattccggaaatgaacggcctgctgcgcgacatggaaaacaccgagcgcagcggacaatgcaaccacggtcgtcctacctggacgcagatgggtctcagtgacctggacaaattattcctgcgcggtcaa

SEQ ID NO: 33128 - DNA, 1422 bp, Pseudomonas syringae
atgaagctatccatgccgcgctttgatcaggcccctgtcctggtggttggcgatgtcatgctcgacagatactggcatggtggtacctcgcgtatttcccccgaagcgccggtgcctgtggtcaaggtcgatcagatcgaagaccgtccgggcggtgccgccaacgttgccttgaacatcgcagccctgggcgctccggcgtcgctggtcggtgtgaccggcgacgacgaggctgcagaaagcctgaccaacagcctgaaagctgcgggtgtcgtggcgcgctttcagcgtattgccgatcagccgaccatcgtcaaactgcgtgtcatgagtcgccatcagcaattgctgcgtatcgacttcgaagaaccgttcaacacggatccgctggccctgagcgcagaggtttacagcctgctggacggcatcaaggtgctggtcctgtccgattacggcaaaggtgcgttgaaaaaccatcaggcattgattcaggcagcacgcaaacgcggtattccggtgctggctgatcccaagggcaaggacttcgcgatttatcgcggggccagcctgatcacgccgaacctcagcgaattcgaagccatcgtcggccattgtgaagacgaagcacaactggtcaccaagggtgcgcagttgatgcaggaacttgatctgggcgccttgctggtgacccgtggcgagcacggcatgaccctgctgcgtcctgaccagcaggccctgcacctgccagctcgcgctcgtgaagtgttcgacgtcactggcgctggcgacacggtcatttctaccctggcggcggccatagcggcgggcgaggaactgccgcatgcggtggcgctggccaatctggcggcaggcattgtggtcggcaaactcggtacagcggccatcagcgcaccggaactgcgtcgcgccatccagcgtgaagaaggctccgagcgcggcgtgctgggcctggagcaattgctgctggcggtcgatgacgcgcgtgcgcacaaggaaaaaatcgttttcaccaatggctgcttcgacatcctccacgcaggccatgtgacctacctggagcaggcgcgcgcgcaaggtgatcgtctgatcgtagcggtcaacgatgacgcctccgtcagccgtctcaaaggcccgggccgcccgatcaacagcgttgaccggcgcatggccgtactggccgggctgggcgcggtggactgggtcattagcttccctgaaggcaccccggaaaacctcctgacccacgtcaaacccgacgtactggtcaaaggcggtgattacggaatcgatcaggtggtcggtgccgacatcgtccaggcctatggcggagaagtgcgggtgttggggctggtggaaaacagctcgaccaccgcgatcgtcgaaaagattcgagggcagggg

SEQ ID NO: 33129 - DNA, 1227 bp, Pseudomonas syringae
gtgatcgacatcaatggcgccactttgggtggtccgctgaacgtgtcgaccgccaatacgccgatcagcagcatgcgttctgctcagcgcacgcctaccgatctgcgcgtggtcatcgacctgaaaaaggccgtgacccctaaaagcttcacgctcgcgccgaaccagcaatacggtaaccgtctggtggttgacctgttcgacagcgccgccgacgccaatccgacgccggttatccccgataccgccgccaatactgcgccagcggttccggtcagcccggccaagcctgaaatcaaactgacgccggtgcctaacggcaagcgcgacatcgtgatcgtgatcgatgccgggcacggcggtgaggacccgggggcctcgggtggcgcagggcagaaagaaaagaacgtggtgctgtcgatcgccaaggagttgcagcgtcaggtcaatgctgaaaaaggctaccgcgccgagctgacaaggaccggcgactactttattccgttgcgcaaacgcaccgagatcgcccgttccaagggcgccgacctgtttgtgtcgattcacgctgacgccgcgccgtccacggcggcctttggtgcgtcggtgttcgcgctgtctgatcgcggcgcgacgtctgaaaccgcgcgctggctggcggacagtgaaaaccgttccgacctgatcgggggcgccggtgcggtaagcctcgatgacaaggaccgtatgcttgccggtgtgttgctggacttgtccatgaccgcctcgctgtcttcaagcctgaacgtcggccagaaagtgttgagcaacattggccgagtgacctcgctgcacaaatcccgcgtcgagcaggccggcttcatggtgctcaagtcgccggacattccgtcgattctggtggaaacaggcttcatctccaacgctaatgaagctaacaagctctcttctgcgtcgcaccagcaagccttggcgcgttcgatcaactctggcgtgaaacagttcttccagcagaatccgccgcagggcacctatatcgcctggctgcgtgacaccggcaagctggcccagggggcgcgcaaccatgtggtgcgctccggcgaaaccctggccatgctcgcggcgcgctatgacatgaacatcgccacgctgcgcagtgccaataacctgaaaaccgatgaattgaaaatcggccaggacctgcgaattccgagcgccgaggttgcgacccag

SEQ ID NO: 33130 - DNA, 1668 bp, Pseudomonas syringae
atgctcgccggcatcctcaaatactttgtcgatggcctgagcaaccctgaagcggtgctgttccccaacgtgccttatctgcgcgaactgcaactgttgcaggcggtgccgctgctgatcgtgctgatcgccgcatggcaggggcttggttcgttcctgggcaactactttctggccaaggtttccctggggctggtgcacgacctgcgcgttgagctgttcaacaagttgctggtattgcccaatcgttatttcgacacgaccaattccggccatctgatttcgcgcatcaccttcaacgtcaccatggtgaccggcgctgccaccgatgccatcaaggtggtgattcgcgaaggcctgacggtggtgttcctgttcatctatctgctgatgatgaactggaaactgaccctggtcatgctcgccatcctgccgctgattgccgtgatggtgagcagcgcgagcaagaaatttcgcaagcagagcaaaaagattcaagtggcgatgggcgatgtcacccacgttgcgtcggaaaccattcagggctatcgcgtggtgcgcagctttggtggcgaagcttacgagcagaaccgtttcgccgaagccagtgacagcaacacccgcaagcaactgcgcatgaccaagaccggcgcaatctacacgccgatgctgcaactggtcatctacagcgccatggccgtgctgatgtttctggtgctgttcctgcgcggcgacgcgacggcgggcgatctggtggcttacatcaccgctgccggtctgttgcccaagccaattcgccagctgtcggaagtcagctcgaccatccagaaaggcgtggccggtgccgaaagcatcttcgagcaactggacgtggaggaagaggtcgacaccggtacgatcgagcttgatcgcgtcagcggccatctggaggtgaagaacctcagcttcttctacccgcagaccgagcgtcaggtgttgaacgacatcagtttctctgcagcgcccgggcagatgatcgcgctggtggggcgttccggaagcggcaaatcgactctggccaacctgataccgcgtttttacgggcacgagatgggcaacatcctgctcgatggcgtcgaaatcaacgattaccgtttgcgcaatctgcgcaagcacatcgcccaggtcaatcagaacgtcacgctgttcaatgactccattgccaacaacattgcctatggcgatctggccggtgcgccgcgtgccgacatcgaagcggccgccgccgacgcttacgccaaggagttcatcgaccagttgccgcaagggttcgacactcaggtcggcgaaaacggtgtgctgctgtcaggtggccagcgacaacgcctggccatcgctcgcgcgttgctcaagaacgcgccgctgctgattctcgatgaagccacgtcggcgctggacaccgagtccgagcggcatatccaggccgcactggatcacgtcatgaagggccgtaccacactggtcatcgcccaccgcctttcgaccatcgaaaaggccgacatgattctggtcatggatgccgggaagatcgtcgagcgcggtactcatacagagttgctggcgcagaacggttactacgcccgcctgcacgccatggggctggacgagccagcgcctgccggcgcggtt

SEQ ID NO: 33131 - DNA, 1137 bp, Pseudomonas syringae
atgaaagccatcgtctataacggtccgcgcgacgtcagtgtcaaaaacgtgccggatgcgaagatagagaagccgacagatgctcttgtcagagtgacgaccaccaatatctgcggctcggatctgcacatgtacgaaggtcgtacgtcattcgagaccggacgtattttcggtcatgaaaacatgggcgaagttatcgaggtcggcgcaggcgtggaccgtgtcaaggtgggcgaccgggtttgcctgccattcaatattggctgcgggttctgcgaaaactgcgaaaaaggcctgaccggttactgcctgaccgcaaaccccggcagcgcaggtgctgcctacggtttcgctgaaatgggcagccacgaaggcggccaggccgaactgctgcgcgtgccttacgctgatttcaactgcctgctgttgcccgaagacgccgccgagcgtgaagacgattacgtgatgctctcggatattttccctaccggctggcacgccaccgagctggcgggcctgttgcccggcgaaagcgtcgccatctatggcgcaggcccggtcgggctaatggccgtccactcggcaatgatcaaaggcgcgtcgcaggtatttgtcgtggacaaccacccggatcgcctcgcgcttgcagcgaagatgggcgccactccgatcaactcgctggagcagggcgcggttgaccagattctcaatctcaccgacggccgaggtaccgaccgcggctgcgaatgcgtcggttatcagtgctgcgaccggcacggtcatgaagccaaccacgtcaccatgaacaacctcgtggcctcgaccaaggccactggcgggatcggcgtcgtgggcgtctttgtaccgcaggatccgggcgctcacagcgacctggcgaaggaaggcaagatggccttcgacttcggctcgttctggttcaagggccagcagatccgtaccggtcaggccaacgtcaaggcctacaaccgtcgcctggccgagctgatccaccatgatcgcgccaagccttcgcagatcatttcccatcgcctgaagctagaagaaggcccggctgcctaccagcacttcgatgctcgtgacgatggctggaccaaggtcgtgctcaagccaaacggc

SEQ ID NO: 33132 - DNA, 858 bp, Pseudomonas syringae
atgaatgaagactatcccaaaccgccgtttgccagtcagccccagaatgtacctggcgagcaaggccggatggatccgtacccggattgcggagaaaaaagctacaaaggctcaggacgtctgcaaggcaagatcgcgctgatcaccggcgctgacagcggcatcggccgcgctgtcgcgattgcctttgcccgcgaaggcgcgcaggttgcgatctcgtacctgaacgagcacgaagacgctcaggaaaccaagcgctgggttgaagaggcgggcatgagatgcctgctgctgcccggtgacctggcgcacaaacagcagtgcgaagacatcgtcagcaagactgtcgccgagttcggccacattgacgtgctggtcaacaacgctgcattccagatgacccatgaggcgttggaagacatctccgacgaagaatgggtcaagacgttcgatatcaacatcactgcgatgtttcgcatctgcaaggccgcagtcccgcacatgccgcgcggcggttcgatcattaacaccagctcggtcaattccgacatgcccaagccgacattgctggcctatgccgccaccaaaggtgcaattgccaacttcaccggcggcctggcgcaattgctcggcgagaagggcatccgcgtcaacagcgtggctcccggcccgatctggacgccgctgatccctgcgaccatgaccgatgaagacgtgaaaaccttcggcagcgagacacccttgggccgcccaggccagccggtcgaggtttcgccgatttatgtgctgctggcctctgacgaagccagctacatctctggttcgcgctatggcgtgacgggcggcaagcctattctg

SEQ ID NO: 33133 - DNA, 273 bp, Pseudomonas syringae
gtgccacgttctctgaaaaaaggtccttttattgatcttcacctactgaagaagatcgaagtggcggcggaaaagaatgatcgcaaaccggtgaaaacctggtcgcgtcgttcgatgattctgccacaaatggtcggtttgaccattgcagtgcataacggtcgtcaacatgtcccagttcttgtgagcgaagacatggtcggccataaactaggcgagtttgccggtacccgcacatatcgtgggcacgtggcagacaagaaagccaagcgt

SEQ ID NO: 33134 - DNA, 906 bp, Pseudomonas syringae
gtgtccaagggtgcggtcggcgtcgatatcttcttcgtcatcagcggtctggtgattttcctttccacccagaacagcgacattccaccccggcgtttcatcctgcatcgtctgattcgcatcgttccggcctactggctgtataccgccgccatggccttgctgttgctgatcgccgcgcccatgctgccgcatcaggtgattggctggcagaatttccttttgtcgctggttttcatcccttcggaaaaccccggcggctatggcctgtaccctacgctgaacgtcggctggacgctcaactacgaaatgtttttctacctgctgttctccatggtctttttgtttgaacagcgtcatcgaccgctgatcattgcggcggcgctgtttgcggtcagtgaagtgctggccaaagcagggctgatcagccggttctacggcaatgacattgtttacgagtttctgctgggcatcggtatcggcatcctctatcgccgtggctggatcaggcaggcagtgtggctgccgctggcaggcatcgcggtggggctgtatgccattaatcacctgaccaatgagcagcgtctgctgaattggggcctgccgagcgccttgattgtgctgtcgtgtatttctctggaaccgtttttcaaaggcagccgtctgctcaaagtgctgggtgactgctcgtattcggtgtacctgctgcatgtgctggtgctgtacggcggattgttgatggcgcaacgctatggcttgagcccttacgtggtattcgcgttctgcgtgccgatcatcgccataggtgcatgggtgagttacgagtggatcgagaagggcctgtaccggcgcatgaagggctggctggacggtcgccgggcagtcagtcaggcgcaggcattaacc

SEQ ID NO: 33135 - DNA, 1479 bp, Pseudomonas syringae
atgaaactgaacaagaacaatatttcacgactggacgcagacatcgccctgcccgcctacagcgccgacgacacccgccagggcattgcccatatcggcgtcggcggtttccaccgggcgcatcaggcgttttacaccgatgcactgatgaacagcggcgaaggctttgaatggagtatctgcggcgtaggcctgcgtgccgaagaccgcgccgtgcgcgatgcgctggcgcaacaggattatctgtacacgctctatgaactgggcgacacgccagataccgaaacccgcatcattgcctcgatcagcggcatgctgttggccgaagacagccctcaggcgctgatcgacaagctggccagcccggacatccgcatcgtctcgctgaccatcaccgaaggcggctattgcatcgacgacagcaacggccagttcatggcccacctgccgcagatccagcacgacctcgccaaccccaaccagccgaagacggtatttggcttcctctgcgcggcgctggcccgccgccgcgccgaaggcacgcccgcgttcaccctgatgtcctgcgataacctgccgcacaacggcgcagtgacccgcaaggcactgctgacgtttgcggccttgcgcgatgccgatctgcatgactggatcgccgccaacgtgagctttcccaacgcgatggtcgaccgcatcacgccgatgaccagtgcggcacatcgcttgaagctggcggacgaaaagcacatcgacgacgcctggccggtagtctgtgagccatttgtgcagtgggtgctggaagacaagttcgtcaacggccgtccggcctgggaaaaggtcggcgtgcagttcacagacgacgtgacgccctacgaggaaatgaagatcaagctgctcaacggcagccacttggccctgacctacctgggctttctcaagggttatcgtttcgtccatgaaaccatgaacgaccctttgttcgtgcgttacatccgtgcctacatggacaaagatgtcaccccgcaactggcgtcggtgcccggcatcgatctggaaggctacaaggacacgctgatcgagcgtttttccaatcaggcgattgccgaccagttggcgcgggtctgctcggacggctcatcgaaattccctaaattcacggtcccaaccatcaatcggctgatcgtcgatcagggcaatttccagcgcgcctcgctggtggtcgctgcctgggccctttatttgaagggcgttgacgaaaacggtgtgacctacacgattcccgacccacgcgccgagttctgtcaggggctggtggctgacgatgcactgattgcccagcgcctgttgcaggtggaagaaatattcggtctggccattcctcagtcgcccgaatttgttgcggcgttcgagcagaacctcgctgatctgcgcgcgctgggtgtaagtggcacactggaaagaattctggccaacggcctc

SEQ ID NO: 33136 - DNA, 585 bp, Pseudomonas syringae
gtgtgccgagtactcgggaaaagcgcccctgccttcactggtctaaagtaccctctcctgaactcttccagagccttcaccctcatgaatgaccgcgcacgtgaactggcgtctcgtctgatccgcaatttcaatgaagcgtcactcgaacatgaagttcgtgagccgctgtatgaaagcgcagcagcgcgcctcggcactgggacggtggcacacaagcttggggcttctgtcgatgtcgtcgcgcccggcaagcgctcgtgcccttatcatttccatcacgctcaggaagaaatgttcgtgatcatcgagggcgaaggcagtttgcgtgttgccggcgagatgttgccgatcaagacgggcgacgtcctgtttattccagcgggccccgaataccctcatcagatcatcaatacatcacaggcaccgctcaagtacctgtcgatcagcacgcgggagacgcccgaggtgtgtgaatacccggactccggaaagtatcaggcgatggtttcagccaacggggcacgtgtgttcaccgccaaccagcggaccactgaaaacgtcgattactgggacggcgaaccc

SEQ ID NO: 33137 - DNA, 3105 bp, Pseudomonas syringae
atgaacctctctgcgccctttatccgtcgtccggtcgccaccgtcctgctgagcctggcgatcatgctgctgggcgcggtcagctttcgcctgttgcctgtcgcgcctctgccgaacatggatttcccggtcatcgtggtgtcggcaagcctggccggggccagcccggaggtgatggcgtctactgtggcgacgccgctggaacgttcgttgggcagcattgccggggtcaacaccatgaccagcaattcgagccagggcagcacgcggatcattctgcagttcgatctgaaccgcgacatcaatggcgcggcacgggaagtgcaggcggccatcaatgcgtcacgcaatctgctgcccagcggcatgcgcagcatgccgacctacaagaaggtcaacccgtcccaggcaccgatcatggtcctgtcgatgacttcgaccgtgctggaaaagggccagctttacgatttggcctccaccattctgtcgcaaagcctgtcacaggtttccggggtcggcgaagtgcagatcggcggcagctcgctgcccgcggtgcgtatcgagctcgagccacagatgctgtcccagtacggcgtgtcgcttgacgacgtacgtaccgcgatcaccaatgccaacgtgcgacggcccaagggcttcgtcgaggacgaccagcataactggcaggttcaggccaacgatcagttggagagcgccaaggattacgcgccgttgattatccgctatcaggacggcgcaacgttgcgtctcaaggatgtcgccaaggtcagcgatgcggtggaagaccgctacaacagcggtttttacaacaatgaccgcgctgtgctgctggtcgtcaaccgtcaggccggcgccaacatcatcgaaaccgtggcgcagatcaaggcgcagttgccggcgctgcgtgcagtgctgccggctagcgtgagtctgaatattgcgatggaccgttcgccggtgatcaaggcgaccctgcacgaagccgaaatgaccctgttgattgccgtggttctggtggtgatggtggtgttcctgtttctcggcagctttcgtgcctcgctgatccccaccctggcggtgccggtatcgctggtcggcacgtttgcgatcatgcacctgttcggtttttccctgaacaatctgtcgctgatggcactgatcctcgccaccgggctggtggtagacgacgccatcgtggtgctggaaaacatctcccggcacatccacaacggcctcgaccccatgaaagcggcctttctgggggccaaagaagtgggctttaccttgctgtcgatgaacgtctcgctggtggcggtgttcatttccatcctgttcatgggcggcctggtagaaagtctgtttcgcgagttttccatcactttgtcggtgtctattgttgtctcgctgatcgtctccctgaccctcactccgatgttgtgcgcgcgctggctcaagccccacgttgccgaaaaggacaatgcctttcagcgctggagcgagcgggtcaacgaccggatggttgccgcctatgatcgttcgctgggctgggtcctgcggcaccggcggctgacggtgctgagcctgctggtgactgtcatcgtcaatgtcgcgctgtacgtggtggtgcccaagacttttctgccgcagcaggacacagggcaactgatgggttttgtgcgcggtgacgacggcctgtcgttctcggtgatgcagccgaaaatggagatctttcgccgttcggtgctggcagaccccgccgtggaaagtgtcgcaggctttatcggcggcagcggtggcaccaacaacgccttcatgatcgtgcgcctcaagccgattgccgagcgcaagctgtccgcggaaaaagtggtcgagcgcctgcgcaagaacatgccgcaagtgccgggaggcaggctgtttcttgccccggatcaggacctgcaactgggcggaggccgcgagcagaccagttcgcagtatcagtacatcgtgcagagcgctgacttggccagcctgcgcctgtggtatccgaagattgtcgcggcgctcaagtcgatcccggaactgaccgccattgatgcgcgggaagggcgcggcgcgcagcaagtgacgctggtggtcaaccgcgacacggccaagcgcctgggcatcgacatgaacatggtcacggcggtgctcaacaatgcctatagccagcgtcaggtttcgaccatctacgacagcctgaaccagtacaaggtggtgatggaggtcaacccgaaatatgctcaggacccggtcacgctggagcaggtccagttgattaccgccgacggccagcgtgtaccgctgtcgagcatcgcgcattatgagcgcagtctggcgaacgaccgggtgtcgcatgacggccagttcgcggctgaaaacatctcgttcgatctggccgagggtgccagcctcgacaaggcaacggtcgccatcgaacgtgcgattgccgccatcggcctgccatccgacatcatttccaagatggccgggacggccaatgctttcgcatcgacccaaaaaggccagccgtggatgattctcggctcgctgctggcggtttatctggtgctggggattctctatgagagttacattcacccgctgacgattctgtcgaccttgccctcggcaggtgtcggggcattgctgacgatctatgtgctgggcagcgaattcagcctgatttccctgttggggctgttcctgctgatcgggttggtgaagaagaacgcaatcatgatgatcgacctggctctgcacctggagcgcgagcagggcatgacgcccgaggagtcgatccgcagcgcgtgcctgcaacgcctgcggcctattctgatgaccaccatggcggcgatcctcggcgccttgccgctgctgctaagcactgccgaaggtgccgagatgcgcaagccattgggcctgaccatcatcggcggcctgattttcagccaggtcctgaccctttacaccaccccggtggtctacctttatctcgaccgcctgcgccatcgtttcaacaaatggcgcggcgtgcgtaccgatgctgctctggaaacttcgtta

SEQ ID NO: 33138 - DNA, 1071 bp, Pseudomonas syringae
atgcgtccagcccgcgcccttattgatcttcaggcactgcgccacaactaccgactggcccgtgacagcagcggcggcagagcgctggccgtcatcaaggccgacgcctatggtcacggcgcggtgcatgtcgctcaggcactggaagcgcaggccgacggtttcgcggtggcgtgtatcgaagaagcactggaactgcgcgcggcaggtatccgagcgccgattctgctgctcgaaggcttttttgaagccgacgagctggcactgattgtcgagcacgacttgtggacggtggtgcacgcgatctggcaactggaagccattgaacaggcgcagcttggcaaacctctgacggtctggctcaagctcgacaccggcatgcaccgtgtgggcctgcacccttccgagtatcgcgcggcgtatcaacgtttactggcgaccggcaaagtggccagggtcgtcctgatgagccatttttcgtgtgccgacgaattgaacagcgcctgcagcgatcagcaggtcgcggtatttgaagccgctcgccaagggcttgtggctgaaaccagcctgaaaaattctcccgccgtgatgggctggccgaagatccccagcgattggtcacgcaccggcatcatgctctacggcgccacgccgtttgaccagacgcagccgcttgccgagcgtctgcaaccggtcatgacccttgaatcgaaagtcatcagcgtgcgcgaactgcccgctggcgaagccgtgggttacggcgcgactttcgtcagtgagcgccccctgcgcatcggcgtagtcgcaatgggctacgccgacggctatccgcgccatgcgccgacgggtacgccggtgctgatcgacggccaacgctcaaggctgcttggccgggtgtcgatggacatgctctgcgtagacctgaccgacgtgccgcaggccgggctcggcagccgcgtcgagctgtggggcaaggccgtgctcgccagcgaagtggccacgcaagcgggcaccattccctatcagatcttctgcaacctgcgtcgcgttccgcgcatctattcagaaaac

SEQ ID NO: 33139 - DNA, 1929 bp, Pseudomonas syringae
atgccgtattcctgttccatcgagcaagccgtcgatcacgttctggcgcagttacccgagcatgtccatctcggcatgccgctggggttgggcaagcccaatcggttcgtcaacgcgttgtaccagcgcatcagccagctgccagagcgacggctgacgatctacaccgccctgaccctgggacgccccacacccggtgagggtttgcaggcgcggtttctcgagccgtttctggaacgcaccttcggtgactacccggagcttgaatttctcgccgcattgcgccgcgacaagctgcctcccaacatccgcgttcagcagttcttcatgcagccgggcagcctgctcgacagtgctccggcccagcaggactacgtcagcagcaattacagccacgccgcccgcgatatcaacgcccatggcctgaatctggtggcgcaactggtcgcgcgtgacgaccagcggccgggcacgctgagcctcagttgcaaccccgacgtgaccctcgacctgctgccgatgatcgccaaacggcgcgccgccggggagaccattctgatgcttgggcaggtccatgccgacctgccgtacatgccgggcgactcggagctggacgtcgaagccttcgacctgctgttgaacgaagacgaacacagcacgctgttttccacgcccaacatgccggtgggttatcaggatcacctgatcggtctgcatgccagcacgctggtgcgcgacggcggcacattgcagattggcatcggctcgatgggcgacgcactgaccggcgcattgctggcgcggcaggccgacaacgaaacctggcgcagcctgctggctgacctgaacatgagcaactggcagaccctgatcgaccgggaaggcggtactcagcctttcgccagcgggctttatggttgcagcgagatgttcgtcaacgggctgctggtgctggccgatgcgggcattgtgcggcgcaaggtgtatgccgatgccgaactgcaaagactggccaacatgggcacgctggatgaagacgcgcaccctgaaggtgtggtcgtgcatggtgggttttttctagggccgtcaagcttctacgagcggctgcgcgagctacccgccgagcgattggcgcagttcaacatgactgccatcagctacatcaacgagctttacggccaggaagacctcaagcgtctgcaacgccgcgatgcgcgttttatcaacagcgcgttcaccgtcaccctgatgggtgcagcggtggccgatcaactggaagacgggcgggtgctgagcggcgtgggcggccagtacaactttgtcgcgcaggcccatgcgcttgagggcgcgcgttcgattctgatgctgcgcagctggcgcgagtcaggcggcgaggtcagttccaatatcgtctggcagtacggccacacgacgatcccccggcacctgcgcgatatcgtcgtgactgaatacggcatcgctgacttgcgcggtcagactgacgccacagtgatcgaacgcattctgaacatcagcgattcgcggtttcagcccggcttgatcgagcaggcgcaaaaggccggtaaattgcccaaggacttcatcctcgacccgcgctttacccagaatacgccggagcgcctgcgtggcattgctgctcactatccgtcgttgttcaccgagtacccgctaggctgcgacttcacccccgaggagcgtgatctgctgcgcgcattgaactggctgaagagcaaactcaagctcaccgaaatactcgaactgggcaaagccaccctcgacgcccccgacccggagaccttcccgcagcacttgcaacgcatgcaactcgaccagcctcaaggcctgcgcgaggaactgtatcagcggctattgctggccggattgcacaatacaaccgggctgacagga

SEQ ID NO: 33140 - DNA, 2103 bp, Pseudomonas syringae
ttgccgagcatagacgccctcgccgacagactgtcggcctacctcggtaaggaccaggtcaatctggtccgccgagcgtatttctacgccgaacaagcccacgatggccagcgccgtcgcagcggtgaagcctacgtcacccatcctcttgcggtagccaatatccttgctgacatgcacatggaccatcagagcctgatggctgcgatgctgcatgacgtcatcgaagacaccggtattgccaaggaagcgctcagcgcgcagtttggcgaaaccgtcgcggaactggtcgacggggtcagcaaactgacccagatgaacttcgagaccaaagccgaagctcaggccgaaaacttccagaaaatggccatggcgatggcgcgggacatccgcgtgattctggtcaagctcgccgaccgcctgcacaacatgcgcacactggaagtcctgtccggtgaaaagcgccgccgcatcgccaaggaaaccctcgaaatctatgcccccatcgccaatcggctgggcatgcacagtgtgcgcatcgaatttgaagacctgggtttcaaggccatgtacccgatgcgctcctcgcgaatcaaccaggcggtcaagcgcgccaggggcaatcgcaaggagctggtcaacaagatcgaagagtccctgagccattgccttgcggtggatggcatcgaaggcgacgtcagcgggcggcagaaacacctctacggcatctacaagaagatgcgcggcaagcgccgggccttcaacgagatcatggacgtttacgcgttccgcatcatcgtcgacaaggtcgatacctgttatcgcgtgctgggcgctgtacataatctgtacaagccgctgcccggccgattcaaggattacatcgcgatccccaaggccaacggctaccagtcgttgcataccacgctgttcggcatgcacggcgtaccgatcgaaatccagattcgcacacgcgaaatggaagagatggccaataacggcatcgctgcgcactggctgtacaaatccagtgatgacgagcagcccaagggcactcacgcccgcgcccggcagtgggtcaagggcgtgctggaaatgcagcagcgcgcgggcaactccctggagttcatcgagagcgtcaagatcgacctgttcccggacgaggtctacgttttcacgcccaagggccggatcatggagctgcccaaaggctccacggcagtggattttgcctatgcagtgcataccgatgtcggcaacagctgcattgcctgtcgcatcaaccgtcgactggcgccattgtccgagccgctgcagagcggctccacggtcgagattgtcagcgcccccggcgcacgtccgaacccggcatggctgaacttcgtcgtcaccggcaaggcacgtacccatattcgccacgcgctcaagctgcaacgccgctccgagtcgatcaaccttggcgagcgcctgctcaacaaggtgcttaacggctttgaatgcagcctggacaaggtcacgccagagcgcattcaactggtgctgaatgaatatcgggtcgaggtgctggaagacctgctcgaagacatcggcctgggcaatcgcatggcctatgtcgtcgcccgccgcttgctgggcgaaggcgagcaactgccaagcccggaaggcccgctggcgattcgcggcaccgaaggtctggtactcagctacgccaaatgctgtacgccgatcccgggcgacccgattgtcggccatttgtctgcgggcaagggcatggtcgtgcacctggataactgccgtaatatcagcgaaatccgccacaacccggaaaaatgcatccagctttcctgggccaaggacgtcaccggcgaattcaatgtcgagctgcgtgtcgagctagagcaccagcgcggtctgatcgccttgctggccagcagcgtcaacgcagccgatggcaatatcgaaaaaatcagtatggacgaacgcgatggtcgcatcagcgtggtccaactggtggtcagtgtgcacgaccgcgtgcacctggcccgcgtgatcaagaaactgcgcgccttgaccggtgtcacacgcatcacccggatgcgcgcg

SEQ ID NO: 33141 - DNA, 1677 bp, Pseudomonas syringae
atgggcaaacctcagggggctttcagcatgctgaccctgctcgatttgctatctgccgtcgccctgctgatctggggcacgcatatcgtgcgtactggcatccttcgagtttacggggcacaactgcgccgcttgctcagccagaacatgtccaaacgaccactggctttcatcgctggcattctggtcaccgccatggtgcagagcagtaatgccacggccatgctggtgacatccttcgtgggccaggggctgatgacgctgacgcctgcgctggtgatcatgctcggcgccgatgtcggcacggccttgatgtcccgtgtgttgacgttcgacctgtcgtggctgtcgccgctgctgattttcctcggcgtggtgttctttctgtcacgcaagcagacccgcgccggtcagttgggccgggtcggtatcggcctgggccttatcgtgctggcgctgcaattgatcgtcgccgctgccgcaccgatcactcaggcggccggggtcaaggtgctgtttgcctcactgacgggtgatctgctgctggatgcgctggtgggcgcgatgttcgcgttgatttcctactctagcctggcggcagtgctgctgacagccaccctggcaggtaccgaagtcattggcctgccggtggcgatcggcctggtgattggtgccaacatcggcagcggcctgctggcgtttctcagcaccagcatgcagaacgtcgctggccggcaggttgcactgggcagcctgttgtacaagctgttcggcctgttgttgatcattccggtgctcgacccgctggttgcctggatcgatacgctgggctttcgcccacaggagctggtcatcggcttccacctgatctacaacacggtgcgctgcctgatcatgctacctacggtcggcccgatggcgcggctatgcgcaggcttgctgccgcagcagaacgaggttggcgggctggccaggcctcggcatctggacctgaccgcgctggcgacgcccagcctcgcactggccaacgccgtacgcgaaacgctgcgcatgggcgacctgatcgagagcatgctcggctcgatgctggccgtgctgcgcggcacacaaacggcggtcactcaggaagtacggcgtctgaacgatgacgtcgaagcactgtacagcgcgatcaaactgtacctggcgcaaatgccccgcgaagacctcggcgagcacgacaaccggcgctgggctgaaatcatcgagctgaccatcaacctggaactggccagcggcctgatcgagcgcatgttgcgcaagatccagcagcagaaaacttcgcatcgtcgctcattctccgaggtcgggcttgaagagcttgccgatctacaggttcaactgcagtcgaatctgcgcctgggcctttcggtatttctcagcggcgacgaagaaagcgcgcggcaattgctgcgtgagaagcgccgtttcagggctcaggagcgtcgcctggcgcacgcgcatgtgagccgtctgcgacataaagtcgtgcaaagtatcgagaccagttctctgcacctggaactgattgccgacatgaagcgcctcaactcgctgttttgcagcagtgcctacgtggtgctggaaacgtccgacaccggggccttgtcgagtgaggaccagcccgaacgatcactg

SEQ ID NO: 33142 - DNA, 1239 bp, Pseudomonas syringae
atgctcaatggcctgtggcttggtttttttgtcgtggcgacgatttctgcgctggtgcagtggctggtgggcggcaatgcggggatttttgcggcaatggtcgaaagcatcttcgccatggccaagctctcggtcgaagtcatggtgctgttgttcggcaccctgacgctgtggctgggctttttgcgcattgcagagaaggccgggatcgtcgactggctggccaaggtgctggggccgctgtttctgcgcctgatgccggaagtcccgccaggccacccggcgctgggcctgatcaccctcaactttgccgccaacgcactggggctcgataacgcggccacgcctatcggcctgaaggccatgcgctcgctgcaggagctcaacccgagcaagaccgctgccagtaacgcgcaaatcctgtttctggtgctcaacgcttcatcactgaccctgctgccagtgacaatctttatgtaccgcgcccagcaaggtgctcccgatccgaccctggtgtttctgcctatcctgctggccaccagcgtctcgacgtttgtcggcctgttgtcggtggcgttcatgcagcgcctgcgcctgtgggacccggtggtgctcgcctaccttatccccggcgcactgctgcttggtgcgttcatggcctttctcggcaccctgtcggccgcagcgctggcgggcctttcgtcgattctcggcaacctcacgttgttcggcctgatcatgatgtttctgatcataggtacgctgcgcaaagtgctggtctacgaggcgttcgttgaaggcgcgaaagaaggcttcgatgtcgccaagagcctgctgccttatctggtcgccatgctctgtgcggtcggcgtgctgcgcgcatccggcgcattggacttcggcctggaaggcattcggcatgtggtgcaatggctggggctggacacacgcttcgtcgatgcgctgccgaccgcgatggtcaaaccattctccggcagcgcggcccgggcgctgctgatcgaaaccatgcagacacaaggcgtggacagtttcgccgcactggctgccgcgacgattcagggcagtacagaaaccacgttctacgtgctggcggtatacttcggcgccgttggcatccagcgcgcccgacacgcagtaggctgtgccttgctggcggagttttccggcgttgtggcggcaatcttcgtctgctactggttctttggtgccaccgccacc

SEQ ID NO: 33143 - DNA, 660 bp, Pseudomonas syringae
ttgagatggccagtacagtcgcaggaattggatcgcctgaaacacagtcttcgcgaacaagttcgctcccacaggggccatgtgtgccccgtaaatggactgcccccaagaagttggacaccaatccgacctaatgggggtgttcaaatggccaagtattcagagcaattcaagctcaccgtcgtcaaagcctatcttgcaggcaacataggctttcgcaaggtgtccagccagttctcgatcgattccagcctgcttcgacgctgggtcgccaattacaagagccatgggcacacaggccatcgtaagcctggtcttcggtacagcgaagccttcaaacgctcagtgctggagcacaagcgcgagcacgggctgtcccttcgccagaccgcagcgcattttggtattggtgatcctggccaaatagtcatttgggaacagcagcattacagtaacgatctagccccctacgttcccaagagaagaaagtctgttgccatgcccaagaagccttatcccaccgcaccagtaatcgacgacgatacgcagaagacgcgtgaccagttaatggccgagctcgaatacctgcgcatggagaacgcttacctaaaaaagttggaagagttgaaggagcagcaacgacggcaaaagaaaaagccc

SEQ ID NO: 33144 - DNA, 1983 bp, Pseudomonas syringae
gtgctaatcgaatctgccgtcctatctggtttccgttgctttgcgccccgtcctatcagcgtaacaatctcgccaaagatcacgaccatcgtcggccccaacgcggcagggaaaactgcgcttctacacgcgttggcgaagctgtttggagtgactcgggcacaacgcaccgtacgtcgctcggactttcacttgggacctgatgacgatcccaccagtcttgaatcaaagcacctctacattgaggttttgatcgcccttcccgaactgattgatggaactgcaacgccagaaacgatcgcaccttcatttcggcatatgctaatcgagcgaccagacgatgctcccgtctgtcgtcttcggcttgacgctcagtgggaggacgatggaaccgtggaaggcgaggtttcgcaaaccctgcactgggtcgacacgctcgacgatgcaccgccagaagacaagtgccaccccgtctccgtagccgatcggggattaattcagttgtattacacaccggcaagcagagacgctgctgctcagacccgggcgactgccggagcattggcggctcgtttgttacgcgcgatcgagtggtcgtccgataccgaagaggcggttcatgacgctaccgaaaatcttgcctctgccttcgaggaagaagcggcaattgccgcaatcacagaagctctacagacgcggtggtcggcacttcatgatgacgtcgtcgacactaatccgcgcctgagtctggtaagtcgcaggttcgaggaggtcgtcaacaaaattgcagtcatgttcgagcagggacctgacggtcaggagcgcggtatcgaggcgctcagcgacggtcaacaatcgctcttttacttcgctctggctgcggccgtcttcgacctagagcgtgaggttgtagcgggatcaattgagggcttccgaagtgacgctctgcggatacctgcgttgacgatcttcgctttggaggaaccagagaaccacctttcgccatatttccttgctcgcatcatccgccaagtccgatcactcacaaccgatggcagcgcgcaagccattgtcaccagtcactcacccgcagtacttagccgcgtcaatccgacggaagttcgatactgtagatgcgaccccaaaacgcgcgtgtctacggtcaagcggattaagcttccagtcaacgacgtggaggctagcaagtttgtaaggggtgcgatgttggcctacccagagctttattttgcgcggtttgttttgctggttgagggagattcggaaagaattgttttaccgcgactcgcagaggcgctgaatttgctgatcgatccagcctttgtcgctattgtcccattgggtggacgtcatgttcagcatttttggcgcttgcttaaacatctgggtattcctcacgccacgctgttggatcttgacctagggcgcgatggaggcggttttggacgagtcaaaacggcgatcgaaaagctgatcgagttcggtgcaccgaaagccgaagtgctgagaattacaactggcatcttatccgatgccgacttagcgaacatgcataattggcctgattcggtcgatcatagcggcctcctgtcatggatcaacaacaacctaaaagctcatggagtgtatttctcctcaccgctggatttagatctagcaatgctggaagcattccctgccgcctatgcagccatcgtccccgagcgcgggggttctcgcatggccgctgacaaagccgccgaagtggtattgggaacggcaggtcccggattaaaagcctacacagggccctttgttggttatccccctcaattcccgagttaccgctaccactttctcactaacagtaagcctgcaacccaccttgcagcgttgactcatatcacaaaggcgcaactggtagcgcacatgccagttgtgcttgcttcagtgctcaaacacatttccgcgtcgttgaggcgggac

SEQ ID NO: 33145 - DNA, 861 bp, Pseudomonas syringae
atggtgcacagcatgactgccttcgcccgagtagagcgggctggcgcccagggcacattgagctgggagctgcgctcggtcaatcatcgttaccttgagcctcacctgcgcctgcctgaatcgttccgcgatctggagggcgcgattcgcgaagcgctgcgccagggtctgtcgcgtggcaaggttgaatgcaccttgcgctttgtcgaagagaccgccggcaagccgctgcaggttgatcgcgagcgtgcgggtcaattgatcgccgccgccgaatcggttgctggcttgatcaagcagcctgccgcgctgaacccgcttgaggtgctggcgtggccgggcgttctggtcgccgatgccagcgacccgcaagtgttgaacaccgaggcgctgacgctgttcaatgacgcgctgagcgaattgaaactggggcggggccgtgaaggtgcagacctggccaggttgctggatgagcgcctgtcttccattgtcggggaagtggccactttgcgcacgctggtcccgcagatgctggccgctcagcgccagaaagtgctcgatcgctttgccgacatgaaagccgagcttgatcctcagcggctggagcaggagatggttctgctggcacagaaaagcgacgtggccgaagagctggaccgcctcagcacgcatgtcaccgaagtgcgccgtgtgctcaaggccggtggtcaggcgggtcgtcgtcttgatttcctgatgcaagagcttaaccgcgaagcgaatacactgggctccaaggcctttgacccacgcagcacgcaggccgccgtcaaccttaaagtgttgatcgagcagatgcgtgagcaagtgcagaatattgag

SEQ ID NO: 33146 - DNA, 1392 bp, Pseudomonas syringae
atgagcaccgacaagaccaaccagtcctggggcggccgcttcagtgaacccgtcgacgcgtttgtcgcgcgtttcactgcctccgtcaccttcgatcaacgcctgtatcgccacgacatcatgggctccatcgcccacgccaccatgctggccaaggtgggcgtcctgaccgacgccgagcgcgataccatcgtggacggcctgaacaccattcaggccgagatcgaggccggcaacttcgaatggcgcgtcgatctcgaagacgtgcacatgaacatcgaggcccgcctgaccgatcgtatcggtatcaccggcaagaagctgcacaccggtcgcagccgtaacgatcaggtcgccaccgatatccgcctgtggctgcgtgacgaaatcgacctgatcctcagtgagatcacccgcctgcaaaagggcctgctggttcaggccgagcgcgaatccgataccatcatgcccggcttcacgcacctgcagaccgcacagccggtcacatttggtcaccatatgctggcctggtttgaaatgctcagccgtgactacgagcgtctggtggactgccgcaaacgcttgaaccgcatgcctttgggcagcgctgcgctggcaggcaccacctacccgatcgaccgcgagctgacctgcaaactgctgggtttcgacgtggtgggcggcaactcgctggacggcgtttcggaccgtgacttcgccattgaattctgctcggctgcgtccatcgcgatgatgcacttgtcgcgcttttccgaagaactggtgctctggaccagtgcgcagttccagttcatcgatctgccggatcgcttctgtaccggcagctcgatcatgccgcagaagaaaaaccctgacgtgcctgagctggtgcgtggcaagagtggccgcgtattcggcgcgctgatgggcctgctgaccctgatgaaaggccagccgctggcttacaacaaggacaatcaggaagacaaggagcccctgttcgacgctgccgacaccctgcgtgattcgctgcgtgcgtttgccgacatgatcccggcaatcaaacccaggcacgccatcatgcgcgaagcggcgctgcgcgggttctcgaccgctaccgatctggctgactatctggttcgccgtggcctgccgttccgtgactgccacgaaattgttggccatgccgtgaaatatggcgtcgagaccggcaaggacctggctgaaatgagcctggaagagttgcgtcaattcagtaaccagatcgagcaggacgtgttcgccgtgctgaccctggaaggctcggtcaacgcccgtaaccatgtcggcggcaccgcacctgaacaagtccgcgccgccgtggctcgtggccaggagctgctggccgggcgt

SEQ ID NO: 33147 - DNA, 1080 bp, Pseudomonas syringae
atgcgaatagaacctgtgaaaacccctgccaggcctgcgcccggcaaagatttttttctccccgaactgtgcctgccgcaggcattgctggtgcttgtcgtgctggccgagctgctggtggtgattctggtgctggtagaaccgatgcgtgccggtttcgactgggtacgtctggcgctgatgtcgctgttcgtgcagtggatcgtgttgctgtccgcagcgctgctctgcggcttgcgaccctggctggcgcgcctgacgccggggctggccggcatgctcagttgcctgctggtcgtcggcctgacccttctttgcacagccgtcaccgacgtttgtcagcttaccgggcggatttcaatcagcgggatggtcgagcgctacctgcgttactcgaccatcgccctgatcatgtcagccctgatgctgcgctacttctacttgcagagtcagtggcgcaaacagcagcagggcgagctgcgggccaggattgaatcgttgcaagcgcgaatccgcccgcactttctgttcaatactctcaacagcatcgccagcctggtcgccagcgatccgggcaaggccgagcaggcagtgctggatctttccgacttgtttcgtgccagtctggccaagcccggcagcctggtgacgtggagcgaagagctggcattggcaaaacgatatttatcgattgagcaatatcgtctcggcgagcgtctacagttggactggagggtgagcgcaattcctgatgacttgccgattccccagctaaccttgcaaccattacttgaaaacgctttgatttatggcattgctccgcgaattgacggaggcgtggtaacggtcgaagcggactataaagggggagagttcatattgagcgtcagcaatccctatgaagaagttgccaatcggcagacttccaacggtactcaacaggccctgtcgaatataggtgcgcgtattgcggcactttttggcccgcacgccagtctgagcgtggagcgccgtgacggtcgtcactacacctgtctacgctatccttgtgcgagactcacgcaggaagccagagctata

SEQ ID NO: 33148 - DNA, 744 bp, Pseudomonas syringae
atgaatgtcctgatcgttgatgacgaacccctggcccgcgagcgattgagccgcatggtcaatgaaatcgagggttatcgagtactggaagacagcgcttccaatggcgaagaagccttggcgctgatcgaaaagcacaagcctgacgtggtgctacttgatatccgtatgccgggtatcgacggcctgcaggtggctgccaaactgtgcgaacgggaagctccgcccgccgtggtcttttgcaccgcccacgacgaatttgccttggaagcctttcaggtcagcgcggtcggctatctggtcaagcctgtgcgcgccgagcatcttatcgaagcgttgaaaaaggccgagcgaccaaaccgcgtgcaattggcggcgatgacacggccggcggcagaaagcggttccgggccgcgcacgcacatcagtgcgcgtacccgaaaaggtatcgaattgattccgctggatcaggtgatctacttcatcgccgatcacaagtacgtcaccctgcgccacgaaggtggtgaagtcctgctggacgagccgctcaaggcactggaagacgagttcggcgaccggttcgtgcgtattcaccgcaatgcgctggtagcccgaaagcgaatcgaaagcatgaagcgcacgccggtggggcatttcgagctgttcctcagaggcctgaatggcgatgcgctgatcgtcagtcgccgccatgtagcgggtgtgcgcaaaatgatgcagcagctc

SEQ ID NO: 33149 - DNA, 939 bp, Pseudomonas syringae
atgtcctctcgcgaaatccgcattgccacgcgcaaaagtgcgctggcgctctggcaggccgaatacgtaaaagctcgcctcgaacaggctcaccccggcctgctcgttaccctggtgcccatggtcagccgtggcgacaagctgctcgactccccgctgtcgaaaatcggcggcaaaggcctgttcgtcaaagagctggaaacggcgttgctggaagacaacgccgacatcgccgtgcactcgatgaaagacgtgccgatggacttcccccaggggctgggtctgttctgcatctgcgagcgtgaagacccgcgcgatgcgttcgtgtccaatacctttgagagcctggacgcactgccggcgggaagcatcgtcggcacctccagcctgcgccgccaggcccaactgctggcgcgacgtcctgacctgcagatccgtttcctgcgtggcaacgtcaatacccgtttggccaagctggacgccggcgaatacaacgccattattcttgccgctgccggcttgatccgcctgggcttcgaagaccgcatcacctcggcgatcagcgtcgatgacagcctgccagcgggtggccagggggctgtgggtatcgagtgccgcagcgtcgatgccgaaattcatgccctgctggccccgctgcaccatgaagacaccgctgtgcgggtgattgccgaacgttcgctgaacaagcacctcaatggtggctgtcaggtgcctatcgcctgttacgcagtgctggaaggcgatgatgtctggctgcgcgggctggtcggcgatccgtcagggcgggtgttgctgcacgccgacgcccgagcgccgcagacctctgcacaggcgctgggcgtgcaggttgccgaagcattgctggctcaaggggctgccgagatcctcaaggccgtctacggcgaggccaacaacgaa

SEQ ID NO: 33150 - DNA, 1227 bp, Pseudomonas syringae
atgacccagaccaactttcgcagcggccccgacgccaacggcctgttcggctcattcggcggtcgctacgtagctgaaaccctgatgccgctggtgctggacctcaaccgcgagtacgaagccgccaaggccgatcctgagttcatcaaggaaatggcctacttccagcgcgattacattggccgtcccaatccgctgtacttcgccgagcgcctgaccgaattctgtggcggcgcgaaaatctacttcaagcgtgaagagctcaaccacaccggcgcgcacaagatcaacaactgcatcggccaggtgctgctggccaagcgcatgggcaaaaaacgcctgatcgctgaaaccggtgcaggcatgcacggcgttgccactgcaaccgttgccgcgcgtttcggcctgccttgcgtaatctacatgggcgcgaccgacatcgagcgtcaacaggccaacgtgttccgcatgaagctgctgggcgctgaaatcgtgccggtcacttccggcaccggcaccctgaaagacgcgatgaacgaagccctgcgcgactgggtaaccaacgtcgatgacacgttctacctgatcggcacggtggcaggcccgcacccgtatccggcgatggtgcgcgacttccagtccgtcatcggcaaggaaaccaaagagcaaatgcaggagaaggaaggccgtctgccggacagcctgatcgcctgcgtcggtggtggctccaacgcgatggggctgttccatccgttccttgatgacgccagcgtagaaatcatcggcgtcgaagcgggcggtcatggcgtggacaccgacaagcatgcagccagcctgaatggcggcgtaccgggcgtgctgcacggcaaccgcacctacctgttgcaagataacgacgggcaaatcaccgacgctcattcgatttctgctggcctggactaccctggcatcggcccggaacacgcttacctgcacgaagtgaagcgcgtcgaatacgtcagcatcaccgacgaagaagcgctcgacgcgtttcatcagtgctgcttgctcgaaggcattatcccggcgctggaaaccgctcacgcactggccgaagccatgaagcgcgcgaccaacctgcgcgacgatcatttgatggtcgtgtgcctgtccgggcgcggcgacaaagacatgcaaaccgtcatgaaccacatggcagccgccgacaacactcaggagaagctggta

SEQ ID NO: 33151 - DNA, 1566 bp, Pseudomonas syringae
atgcgctggctcaatcgccataaattcctgccatttctcgcctggctgccgcagcagagccgcgccagcgtggggcgtgatgcgctggtgggtttaagcggtgcgattctggccctgccgcaatccatcgcttacgcgctgatcgccgggctgcctcccgagtacggtctgtacgccgccattgtcccggtgctcatcgcttgcctgtggggctcgtcctggcacttgatctgcgggccgacggcggctatttccatcgtgctgtatgtcagtgtcagtccgcttgccgtgccggccagccaggactacatcatgttgatcctgctgctgacctttatcgccggtgtcttccagttgttgttggggatgatgcgcttcggcgcgctggtgaatttcgtttcgcactcggtggtgctcggtttcacactgggcgctgccgtcgttattgcgctcgggcagatgcccaatttgctgggcatcgatctgccgagccagaccacggcactcaaaagcctgagcgccgtgcttgagcatcgcggcgaactcgacaagccttcgttgatgctgggcctgttgaccctcacgctgggcatcggcctcaaagcatgggtgccgcgctggccgacgctgttgatcgcgctggtatcaagcagcctgctggtctggctctggccagcgatgttcgggcatgtgcgagtggtcagcgccttcgtcgggcatttaccgcctttcagcccgctgccgctggaccttgagctgatcctcaagctgctgccgacggcagtggcggtgggcatgctcgggctggtcaacagcctgtcgattgcccgctctctgtcggcacgctcgcaacagatgctcaacgccaatcaggaagtgcgcgcccaagggctgtcaaacatggtcggctcgctgttttccgggtatctctccgcgggctcgttcacccgtgcagcgctgagttatgaagcgggcgctcgttcgccgttggccggggtgttttcggcgctgtgggtggcgctgttcgcggtcgccggagcttcattggtttcgcacattccgatcccggccatggcggcttcaatcctgctgatctgctgggggctggtggaccgtcgtggcattcgcgcactgttgcgcgtcagccgcgccgagttcttcgtgatggcgctgacctgcctggccacgctgttgctggagttgcaaacggcgatttatgcaggcgtgctggcttcgctgtttttctacctcaagcgcacctcacagccccgcgtgcagcaatggcgcgagggtgatgaggatgtgttgcgtgtcggtggatcgatctttttcggtgccagtcattacctgcaaacccgcctgcaacgcaccgaagggctgcgtgtggtgatcgatgcgcaacagatcaacttcatcgattactcaggtgtggaaatgcttcatcaagaagccagacgcctggggcagcaggggcgagtgctggttctgcgcaatgccagaccgctggtaatcgaggaattgcacaagctggaagggccggagaactgcccgattttgtttgaggat

SEQ ID NO: 33152 - DNA, 672 bp, Pseudomonas syringae
atgagtattcgcagttggcccgcggccgaacgcccgcgggaacgcttgttggagctgggagcggcgagcctttcggacgccgaattgctggcgatctttttacgcaccggcgtggccggaaaaagcgctgtagacctggcgcgtcacctcttgaatcaattcgacgggctcagatcgttactggatgctgatcagcccgctttcaccgctcaactggggctgggaccggcaaaattcgctcagttacaggccgtcatggagatggcgcgccggcacatggccgagtcattgcgccgcgattcagcgctggaaaacccggcccaggtgcgtaactacctcaaggcccagcttcgacacgaaccgcatgaagtcttcgcctgcctgtttctcgataacaaacaccgggtcatgaccttcgagatcctgtttcgcgggacgatcaatgcatcctacgtgcacccacgtcaggtagtgaagcgggcgctggcgcacaacgccgccagcctgatcctctgccacaaccatccctcgggcattacaacgcccagccgctccgacatcgacctgaccaagcgcctcaaagaagccctgaagctggtggatgttcatgtgcttgaccatgtgatcgtaggtgacggcgagccgttgtcgatggtggagaagggattgatg

SEQ ID NO: 33153 - DNA, 954 bp, Pseudomonas syringae
atgtcggccaaaaagaagccagtaaacactccgttgcatttgctccaacaattatcgggcagcttgctagaacatctggaagacgcatgctcccaagctttggctgatgccgaaaaactgctcgccaagcttgagaaacaacgcggcaaggcgcaggaaaaactgcacaactcccgcatcaaactgcaggacgctgccaccgccggaaaatccaaggcacagaccaaggccaaagatgccgtggctgaactggaagaattgcttgatgcgctcaaatcgcgccagactgaaacccgcacctacattctgcacctcaagcgtgatgctcaagagagcctcaagcttgcgcagggtatcggtcgcgtaaaagaagccgtcggcaagattctgaccacccgcagcgccaagcctgcagccccgaaagccgcaaccaaggcgcctgctgccaaggcccccgcaaaagctccgagcaaagcacctgccaagccgccggtgaaagcagccgctgccaagccggttgccaaagctgcagccaaacctgcggtcgctgcaaaaccggctgccaagcctgcagtggtcaaggccccggcaaaaaccgcagccaagccagcagcacggtcagccgcagccgccaagcccgttgcagccaaatcgactgccgctaagccagctgccaaacctgccgtcaccaaagcacctgctgcggccaaggcacctgcgagcagcgctgccaaaccagctgctgccaagccggcggtcgccaagcccgctgtgaaagcgcctgccaaagcgcccgtgaaagcagtgaccaaacctgctgccgtcaagcccgctgccaagccagctgccgccaagtcggcaacaccagcgccagccgctgccaagccgacacctgccgcaccggccgctgcatcggcaaaacctgccgacaatgcaacgccaaccagcgcttcc

SEQ ID NO: 33154 - DNA, 630 bp, Pseudomonas syringae
atggcacttgaaacgtggctgggcttttttgcggcctgctggattatcagcctctctcctggcgcgggtgccatcgcctcgatgtcctgcggcctgcaatacggtttcctgcgcggctactggaatgccttggggctgcagatagcgctggtggcgcagatcgcgattgtcgcggccgggcttggcgcggtattggcagcttccgagatggccttcacgctgatcaagtggttcggcgtggcgtatctggtctatctgggcatcaaacagtggcgcgcatcgcccaccgaccttgccgacgaatccgccgtgcggccggtgggcaagccgatgacgctggtgttccgcggttttctggtcaacatcagcaaccccaaggcgctgatcttcatcctggcgatcctgccgcagttcatcgagccgactgctccgctgttcatgcagtacgtgatcatcgccgcgaccatggtcgtggtcgatctgatcgtcatggcgggttacacagggctggcgtcgaaggtgttgcgtgcgctcaagacccctcgccaacagcgtcgcctgaaccgcacctttgccagcctgttcgtcggcgcggccggttttctcgcgacgttgcaccgcggcacggcc

SEQ ID NO: 33155 - DNA, 1896 bp, Pseudomonas syringae
atgcccctccgttctcgtttccttgtctggctgctggtgccactactgacgctgtgcagtagcatcgcgctggccgaccctgtcgagggcgcagcccaggcgttgcacctgctggattatctgggtgctgactacccggccagcgtggcggatggcaaggttgtcgaagctgccgactaccagcagcagattgaagccctgaccacgctacaaggccttgtgctcgctctgccgcaacgcgccgagcgcgcggatctggaacaggctgttgcgcagctgaaaaatgccgtgagcagcaaacaggacggcacacaggttgcgcgtcaggcacggcaactggcggcaaaactggctgtggcctatgaggtcagccaggcacccgccatcacgccagacccagcccgtggcgcgcctctgtatgctcagcattgctcggtctgtcatggcgacaccggtgcaggtgacggcccggcaggtatcggtctggagccgccgccgtcgaacctgcgtgacactgcgcggctggatcgcctgagtctttacgatctctacaacgccctcggccttggcattgccggcaccgatatgcccgcgttcgccgaccagctggatgatcgccagcgctgggacatcgcgacctctatcgcaagcttcagcgcgcaacctgtggccactgccaccaaggcgttcaacctggcagacctggcccgtcaaacccccgccgaggtacaggctgcggaaggcccggacgccgcagcgaccttccgcgcccagcgcgcacaaccgccgcaggtgcagcgcggcccggcgcaactgctcgattacaccggtgtaacgctggacaagagcctggcggcctacaaggcgggtgatcgcgagcaggcctacgatttgtcggtggcggcgtatctggaaggttttgagctggtcgaaagctcgctggataacgtcgatgccaacgtccgtaaagacaccgaaaagagcctgatggcttaccgtcaatcattgcaggacagcctgccgctaccacaggtcgagcaaaagcttgaggtggccaaagccaaactcaaagagtcggcaggcctgctgggcagcgatggtctgagcctttcgctgagctacatctcaggcctgttgatcctgctgcgcgaagggctggaagcgattctggtgctggcggcgattctggcgttcctgcgtaacaccggccaacagtccgccgtgcgcagcgtcaacgtgggctggggcctggcgctgctggccggtctcgggacctgggcactggcggcttatgtcattgacgtcagcggcgcacagcgtgagttgctggaaggggccaccgcgttgtttgccagcgtgatggtgctctggctaggcgtgtggatgcacgaccgtcgccatgcagctgcctggcaggactatgtcaaaagcagcctggtcggcggcggtggccgtttcggattcgcggtgctggcgttcttctcggtgtatcgcgagctgttcgaagtcattttgttctacgaaaccctgtggctgcaggcaggaccagccgggcacaacgcagtgctggcgggcggcgccacggcacttgtgctgctggtcggtctggcgtgggtgattctgcgcggctcggcgaaactgccgctgtcgctgttctttggcatcaacgctgcactgctgtgtgcgctgtcggtggtgttcgccgggcatggcgtcaaggccctgcaagaagctggcatcttcggtacccggccagtgccgttcttcgagttcgactggctgggcattcacgccgacctgtactcgctcggtgcacaggccatcgcccttactgccattgccgtgctttacgggcgtagcgtgctggcagagaaacgcaggctgcaggcatcagcc

SEQ ID NO: 33156 - DNA, 1428 bp, Pseudomonas syringae
gtgacttccagcattttctggtacgactacgaaaccaccggtatcaacccgcgcaacgatcgagcgctacagatggcgggaattcgcaccgatgccgagctcaatgaaatagcgcctccggtcaatctttactgccagcccagcgacgacattctgccccatcccgcagcctgtgtgatcaccggcataacccccgccacgctggcagaaaaaggcttgtgcgaggcggacttcatgactcgcgtgcacgccgagcttgctgcgcccggtacatgcggtgccggctacaatacgttgcgtttcgacgacgaagtcacccgctacagtttttatcgcaactttttcgatccttatgcgcgcgagtggcagggcggcaatagtcgctgggatttgattgatgtagtgcgcgcagcctatgcattacgtcccgagggcattgtctggcccgaacaggacgggcgagtcacgctcaaactggaacgcctgaccgctgccaacggtattgatcacgggcaggcccatgatgcgttatccgatgtgcgtgcaactatcgctctggcgcgtttgattcgcgaaaaacagcccaggctttatgactacctgttcacgctgcgcaccaaacagaaagtccaggagcacattcacctgatgaaacctctggtgcatatttccggacggttttccgcggcacgcagttatctgggcgtggtactgccgctggcgtggcatccgcataatcgcaatgcgctgatcgtttgtgatctgcacctggatcattccccgttgttgcagtgcgacgctgaaacgctcaagcagcgcttatatacccggcttgacgcactgaaggaaggcgaattgccggtaccgctcaaactattgcatataaaccggtgcccggtgatcgcgcccttgggcgtactgcgcagcgaagatcagcagcggctgaaactggacatggcaggctatcaggcgcgcgcagcgcagttgagtgaaagcctcgaagtttggcaggataaattgcaggttctgtacggcaaggatgacttcgttgcaagtgaagatcccgagcaacaattatatgatggctttatcggtgaccgtgatcgccggttgtgtgagcaagttcgacaggccgagcctgaacagttggcccgtgacgcatggccgtttgatgacgctcgcttgcccgatttgttattcaggtaccgcgctcgcaactttcccgagaccttgagcgccgacgagcaacatcgttggcaggatttctgtcggcagcgcctgagcagcccggaatggggggcgcccactaccttgcaggattttaccagcgcgctgaatgaatgctcgcttagtgccactccagagcagttggaggtgttgcggcaatggcaggatcatgcccttcaactgagtaaacgcctgggtgta

SEQ ID NO: 33157 - DNA, 1008 bp, Pseudomonas syringae
gtgagctttacccccgccaaccgcctgtttcctctcactcgtctgcgccgtaatcgccgcgacgacttttcccgtcgtctgatgcgtgagaacgtcgttaccgttgatgatctgattcttcccgtatttgtcctcgatggcgaaaaccgtcgtgaatcgattgcttccatgccaggcgtcgagcgcctgagcgttgacctgctgcttgaggaagccgagcactgggtcgcactgggtattcctgcgctggcgctgttcccggtgacaccgccggagaaaaaatccctggacggcgccgaagcctggaatccggacggcatcgctcagcgcgccacccgcgccctgcgtgaccgcttcccggagctgggcgtcattactgacgtggcgctggacccgttcaccacgcacggtcaggacggcattctcgacgaagaaggctacgtacagaacgacattactgtcgacgcgctggtaaaacaggcgttgtcgcatgccgatgcgggcgctcaggtgatcgcgccgtcggacatgatggatggccgcattcaggccatccgcgagtctctggagctggccgggcatgtcaacgtgcggatcatggcctactcggccaagtacgccagcgcctattacggcccgttccgcgatgcagtgggttcttcattgaacctgggcaaggccaacaaggcttcctatcagatggacccggccaacagcaacgaggcgctgcacgaagtggcggccgaccttgccgaaggcgccgacatggtgatggtcaagccaggcatgccttatctggacatcctgcacagggtcaaggacgagttcaaggtgccgacctttgtctatcaggtcagcggtgaatacgcgatgcacatggcagcaatccagaatggttggctgagtgaaggggtgattctcgaatccctcactgccttcaaacgcgccggtgccgacggcattcttacctacttcgccgtccgggctgctcaactgttgaaggggcaa

SEQ ID NO: 33158 - DNA, 2265 bp, Pseudomonas syringae
ttgcaggggcagtacggcaccgacgaggcgattgcccgcttgctgagcggcagcggtttgcgcgccacggcattgtcggccaaccgctatcgcatcgagaccgcgcccgaggcggtggaggggtcgctggaattgcaggcgaccaccatcagcggcgcgtcccggctggagaccgctacggggcctgtaaccggttatgtggcgacgcgtggcctctcggcgaccaagaccgacactgcgctgatcgaaaccccgcagtcgatctcggtggtgaccaaagaccagatgaaagctcagggcgcggagaacctcagccagatgttgcgctatagcgccgccgtggtgcccgagacacgtggctcgacggcttcgcgtctggacatgctgagcatccgcggtttttcgcctgcgctgtatctggacgggctgcgcatgccggacaaccgtgatgccgcgccacagaaagacgtgttcgatctggagcgtgtggaagtgctgcgtggtcctgcgtcggtgctgtacggtcaggccagccccagtggtgtggtgaacatggtcagcaaattgcccaccgagacgccgttccatgagatcggtctgacgtatggcaccttcaacaagaagcgcaccacgttcgattttggcgggccgattgatgatcagggtgtttattcctatcgcctgtccgggctatacgacgatgccgatggccagatcgaacacaccgaaacccgtcgccagtcactggcctcggcgttcacctggcggcccgacgaggacacttcgctgaccctgctggccaatctgcagagcgatcccaagggggcttcctacggatcgatgccggcctatggttcggtggtaaaaagcccgaccgggcggcacatcgatttcgatttctatgatggcgagaagaatttcgagaagagcgaccgtgaatatcacgccgtcggttatctgttcgagcaccatctgaacgacgtctggaccttgcgccagaacgcccgctatctgcgcagcgaaggggtttaccgaagcatctacaacggctggggcacgttgcagcctgactatcgcacctccgaacgcgccaccatcgccaccgatgtgaatctggattcctacaccatcgataaccagatgcaggccaatttcgacaccggcccgttgcagcacacgctattgctgggtgcggattatcagaacaccagcactgataccaaagcgggttacggcatagggccaacgctggacattttcgacccggtctatggctcgcctgtcgaggttccagcctttaccgagtcgagcacacagcgtgatcagcagaagggcctgtacctgcaagagcagttgaagtgggacaagtgggtgctgttgatgggcggccgttacgactgggccgagagcagcaacagttctaccaacctgacttcaagcaccaagacccggtcttcggccgacagcgaagcgttcaccgggcgtctgggattggtttacctgtttgataacggcctggcgccttacatcagttattcggaatccttcgagccacaaagcggtacggggctgggcggtgcgctgttcgatccgaccgagggcacgcaatacgagctgggtatcaagtaccagccgcccggcagcaacagctttatcacggcggcgattttcgacctgcgtcgttccaatgtgctgagccaggaccccaatggcaacctgtgcaacggcgcggtctgtcaggtgcagaccggtgaagtgcaatcgcgtggtttcgagctggaaggcaaggccagtttgaacgacaacctggacatcactgcggcgtacgcctatctcgacaaccgggtgaccaagtccagcaacgtggtcaatgtcacgtccggcatcatcggcgatgcgccaggtcctgatctgaccaccaaaggcaccacggcaccggccattccacgccacaccgcctcggcgtgggtggattacacggttcatgacgggcagttgaaaggtgctggtgtgggtggcggcgcacgttatgtgggcgcgagttggggggatgaagccaacaccctgaaggtgccgggttacacgctgttcgatgccgccgtgcattacgacattccgaacatcagcaacgcgatggacaacctgcgcctggcgctgaatgtcaccaatctcgccaacaaggagtacgttgcgtcgtgctacacctactcatggtgctggtacggctcgcaacgcactgtgcaggcgagtgctacgtatcggtgg

SEQ ID NO: 33159 - DNA, 2163 bp, Pseudomonas syringae
gtgctgatttcctacggttcgcagatcaccagcggtctgaaaagccgtgggctggaagggcaatacacgcccgagcagggcctcaatgccttgctcgaaggtacgggcttgcaggcgatggccgacggtaataacggtttcaccctgcaatcggccagtgccgctggcgcaccgatcgagctgggcgcatccacggtgatcggtgactggctgggtgaagcgcagcagaccaatgtcttcgagcaccccggcgcacgtgacgtggttcgtcgcgaagaattcgagcgggtcggcgcaacctcggcgcgtgaagtgctcaatcgtatccccggcgtcaacgctccggacaacaacggaacgggcagccatgacatggcgctgaacttcggcattcgtggcctcaacccgcgtctggcgtcacgctccacggtattgatggacggcatccctgtgccgtttgcgccttatggccagccgcagctgtctttcgcgccgatcagcatgggcaacatggacgcagtggacgtggtacgtggcggcggcgccgtgcgttatggcccgcagaacgtgggcggtatcgtcaacttcgtgacccgcgccatccctgacgcgccaaccctcaaaggcggcatacagaccgaaaccagcccatcgtccagccacgatggcttcaagaccaccggcaacctgctggcaggcggcacagcggacaacggcctgggcggcgcgattctgtattccggcgtgcgcggcggtgactggcgcgagcacagcgacacccagatcgacgacttgattctgaagggcaaataccagatcgacgaggccaacagccttaatgcaacggcgcagtattacgagggcgaagcacagatgcccggcggcctgagcgtcaaggattacgatgccgatccgtatcagtcgacgcgcctgaaggacaagttctggggccgccgcaccctgttcaacttcggctatcgctatgaagaggatgcgcgcgtattcaccgccaacacgttctttaccaagaccctgcgcagcggttatctcgaccagggcagcttcgtttccctgtcgccgcgcgaatactgggtgcgcggcctggaaacacgcttttcacaaggctttgccctgggcgaaacctggcatgaagtgggcgtcggctaccgctacgtcaacgaggccggtcacgaactgcgctatcgcgagccagtgaccggcaacctgccgaccaccgccagccgcaacgaccgcgacacgcgcggtgctaccgaagcccatgcgttctacatcgatgaccgtatcgacatcggcaagtggaccatcacgcccggcgttcgctacgagatgatcgacaccgcgcagaacaacaacctgaccaacgccagataccagggcgactacagcactgcgctgcctgcgttgaacgtgctctatcacctgaccgacacctggaacctgtacgccaacaccgaaggttcgttcggcagcgtgcaatacagccagatgcccaatcgcgtcaccggggatgaagtcaaaccggaaaaagcacgcacctgggagctgggcacgcgctacgacaacggcaacctgcgggctgaaatcggcgcgttcctgatcaacttcgataaccagtacgacagcaaccagaccaacgacacggtcatcgcacgcggcgagacgcgtcatcaagggatcgagaccagcgtcaactacgcgctggaaggtctgaacccgatactggccggttacgatgtttacgcaacgtatgcgtttgttgacgcgaccatccgcgaagacgggccgaacaagggcaatcgtgtgccgttctcgtcaaaacataaaggcacgatgggcgtcagctacaccgaagggccgtggaagctgaattttgacagttcattccagagcgaccagttcgccgacaacgccaacacagcagcggaaagcgccgacggcagcaccggcaaaatccctggctacatgctgttcagcacccgcgccaactacgatttcggcccgcaactgtcggacctcaacgtagcggtcgggatgaagaacatcttcaaccgccagtactacacccgctcgttcgacgacaataaccgcggcaaatacgtcggcgagccgcgcacggtgtatgtgcagacgtcggttgcgttc

SEQ ID NO: 33160 - DNA, 975 bp, Pseudomonas syringae
atgaacctgagcaacgattccctgaacaaatccgacatttcgcctgccgtggcgcagcaagcggtcggctggctgctggaaatgcaggagggcgcgctggacgcccgccgccagcacgcgtggcagtcatggcttaatggcaattccgagcatcagcgggcctgggcgcatatgcagcgggtcaatcagcgcctcagcggcctgtcctcgccgctggcccatgcggcgctcggcgcaccgaaatccgccgggcgtcggcatgccttgaaactgctgttgctgctgggtgcaggctcgatggcgggctggagcctgcgcgagcagattgccctgcaaccgttgctggctgactacaacagcggcgtgggcgaacaacgcaaagttgcgttgagcgatggcagtcgggtgcagttgaataccgccagtgccgtggatgtgcgcttcgatgcgcagcagcgtttgatcaagctgctacagggcgaactgctcatgagcgcctcggcagacgctcgcccgctgaacctgttgagcgcccaggggactgtcagggcgtcgacaggcagcagccgcttcaacctgcgccaactggacgggcgcacgcaactggccgtgtttgccggcgccatcgaagtcgcaccggcgaacaaaagcggacccggcttgatgctgcgcgccagccagcaggtcacgttcggccgtgatgcctgggacagcgtgcgcacggtggatgcaaacagcggcgcgtgggccgacggcatgctggtggcgtcgcgcatgaagctgtccgactttctggcagagctggggcgttatcgacgcggccgtctgaactgcgacgcgaacgtggccgacctgctgatttccggcagctacccgctggccgacagcgagcgcatcctcgacatgctccagctcgccctccccgtgcgcgtgcagcgcttcacccggtactgggtgaacgtgcaggcacgggtt

SEQ ID NO: 33161 - DNA, 966 bp, Pseudomonas syringae
atgcgtgtaaccttgcagccctcgggtgcggtactcgaaaccctgccgggcgagcggattctggatgctgcacagcggctgggccatgaatgcccgcaaagctgtcgcaacggtaactgccatgtctgctcggccttgctggtcgaaggccgggtcatgcagtcggggcaggtgctcgaccacggcgagattcatacgtgtgtggccgaaccgctggaagcgtgcgtcgtgctgtgggatggcgtgctggccaaaggtgaactgccggtacgcagttttgcctgccagttgagcgagtgtgtcgagatcggtggcgacgtctggcgtgtgggcctgcgcgcgccggccggcaaaccgccgcgctatcacgccgggcagtacctgatgatcgagcgggagaacggcgagaagtcggcgttttccatcgcatcagcgccgcacagcggtcgtgagctggagctgcacgtgctggcccgcgaagacagcgcacgcagccttatcgaacaactgcaacgcaataaaatggcgcgggtcgaactgccgtttggcgacacccaccttgccgagttgccgaacgggcctttggtgctgatcgctgccggtacgggcatggcgcaaatgaacagtttgttggaacactgtcgctccacaggctttagtcatcctgtgcacctgtactggggcgtgcgtcgccccgaggatttttaccaggtcagccactgggatgagtgggcaaccctgccgaacctgttcctgcacaaggtcgtcagcgatctgtgcggttgggaagggcgctgcggcctgctgcacgaggcagtttgcgaggacatcaaggatctctcggcggttcacgtgtacgccagcggttcgccggcaatgatctacgggacgctggacgcgcttgtcagtgccggtatggatgcgcatcaaatgcgcgcagacgtgtttgcctacgcaccacgtccg

SEQ ID NO: 33162 - DNA, 1374 bp, Pseudomonas syringae
atgacgtcacaagatggtttgaaacgcgggttatccgcccgccacatccgcttcatggccctgggctctgccatcggcacagggttgttctacggctcggcctcggcgattcaacaggccggtcccgctgtattgctggcgtacctgatcggcggcgcggcggtgtacatggtaatgcgcgcactgggcgaaatggctgttcacgacccggtgtccggttcgttcagccattacgccacacgctacatggggccgctggccggtttcgtgctgggctggacctacgcgttcgagatgatcatcgtctgtctggccgatgtgacagccttcggcatttacatgggcttctggtttccggaagtgccgcgctggatctgggtgctgggcatcgtgttcctgatcggcgcgctcaacctgtgcaacgtcaaagttttcggcgaaaccgaattctggctgtcgatcctcaaggtcagcgccatcgtggcgatgatcgttgcaggcttcggcatcatgatcttcggcatcggcagctcgaccagcggcactgaaatcggcatcagcaacctgtgggcgcatggcggcttcatgcccaacggcgtcaccggcctgatcgcttcgtttgcagtggtgatgtttgctttcggcggcatcgagatcatcggcatcacggccggtgaggcaaaggacccgcaacgcagcctgccgcaggcaatcaacgcggtgccgctgcgtattctgctgttctacgtgctgaccctgtttgtgctgatgtgtatttatccgtggccgcaaatcggcacccaaggcagcccgttcgtacagattttcgacaacctgggcattgcctcggcggcgaccattctcaacatcgtggtgatctcggcggcggtgtcagctatcaacagcgacatcttcggcgcaggccgcatgatgtacggcctggcccgcgacggtcaggcgccggcgagttttgcgcgcctgtcgcgtcagggcgtgccgtggatgaccgtgctggtgatgggcgtgacgctgctcggcggcgtgctgctcaactacctgatccccaaagacgtgttcctgctgatcgcgtcgctggcaaccttcgccacggtctgggtctggctgatgatcctgctgactcaggtcgccatgcgccgctcgatgagccgcgaagaggtcacacagctcaagtttgcggtgccgttctggccttacgggcctgccgccgccattgccttcatgctgttcatcttcggcgttctgggctatttcccggacaaccgtgcagccttgatcgtcggcgcaatctggattgcgctgctgctcatcgcctacgggttgtgggtcaagccaaaggcgctcaacaaaacccat

SEQ ID NO: 33163 - DNA, 1545 bp, Pseudomonas syringae
gtgaccaccttatctgccaagacgctgaacctgatccctggccagttgaccctcgcgcaattgcgcgccattcaccaacagccggtcagcctgacgctggacagcagcgccaaccagcagatcgacgacagcgtagcctgcgtcgagcgcattctggccgagaaccgcaccgcgtacggcatcaacaccggtttcggcttgctggcctcgacgcgaatcgccagcgaggacctggaaaacctgcagcgttcgctggtgctgtcgcatgcggccggtgtcggccaaccgatcagcgatgatctggtgcgcttgatcatggtgctcaaggtcaacagcctgagccgcggcttctcgggtattcgtcgggtggtgatcgatgcgttgatcgcgctgatcaatgccgaggtctatccgcatattccgctcaagggttcggtcggcgcttcgggtgacctggctccgctggcgcatatgtcgctggtgctgctgggcgaaggcaaggcacgtcacaagggcgaatggctcaacgctgtcgatgcacttgccgttgctggcctgaaaccgctgaccctcgccgccaaggaagggctggcactgctcaacggcacccaggtttccaccgcgtatgcactgcgcggcttgttcgagggcgaagacctgtttgccgctgcgctgacctgcggttcgttgaccgtcgaagcggtgctcggctcacgctcgccgttcgacgcacgtattcatgccgcgcgcggtcagcgcgggcagatcgatgcggcggcctgctaccgcgaattgctgggcgaaagcagtggcgtgtcggagtcgcaccgcaactgcgacaaggttcaggacccctactcgctgcgctgccagccacaggtgatgggcgcgtgcctgacccagttgcgtcaggccgccgaggtgctggaagtcgaatcgaatgcggtgtccgataacccgctggtgttcgccgccgagaacgacgtcatatccggtggcaattttcacgcagagccggtcgcgatggcggcggacaatctggcgctggccatcgccgagatcggctcgctcagcgagcgccgtatttcgctgatgatggacaagcacatgtcgcaactgccgcccttcctggtggccaacggaggcgtcaattccggcttcatgatcgcgcaggtcacggccgccgcgctggccagtgaaaacaaggcattggcccatccgcacagtgtcgacagcctgccgacctccgccaatcaggaagaccatgtgtcgatggcaccggctgctggcaagcggttatgggaaatggcagaaaacgttcgcgggattcttgccgtagaatggttggctgcctgccaggggctggacttgcgtgaaggcctgaaaacctccgcgaagctggagcaagcccgcagcctgttgcgcagcaaggtcccgttctatgaaaaggaccgcttttttgcaccggacatcgaagctgccagtcagctgttgtcctccacttgcctgaacccgctggttcctgcacgtctgctaccgagtctg

SEQ ID NO: 33164 - DNA, 1965 bp, Pseudomonas syringae
atggcagatgagcaagaaaaacatatatatgtaaaatactggcctattccagacttagggtccgcagaccgggcagcggccgaggcagctgctaataaagcgagtggtggaggtaattcaggctggagcattggaatcggtggtggcggcggcggacccagcactaccggcctaggcccagggcgcggtcgccgaagaggtatcactaataaacagctgagacgtctattaaggcaacaagaggcagaggcgcatgcgttggcccagcggcaagcggcagaacacgcggctcatctcgcacgagtagaagctgaggcgcatgctcgggcaatggcggaagccgccgagcgagagcgcgttgaaacgcaggtacgcgcacaggccgaaaaagatcaggcacatcgacaggctcttgaaacactgacagcgtcctatccctcgttacaatctggattggcacaaaactacttactggcttctgcatcgctgccaaatgatcttcaaaaagaaatagcgtcaggtcatgatctaaatgctgatcccccacgcgacgagcagactcttgagctgatacttcagaaaaaaaccagggttaactatttacttgcaatcaaacaaccgttactggacgagcgtcgcgctcaggctctgagtctcaccggtcaagagcttgaccatgctacacaaaaagaccacctgaactatctggtgtactacagccagggtgatcctccacgtgtgcagcaggcccatgaagcgtgggtaaacgctttatctcaaacctacgaagcaaagcttcttgccgagtcggtcacgctgctcaatgaacaatcagcagcgctttccatgcgccatgctgaactgtcgctggccaataaaccggcgagtcaggaagcacgacaggccgctggcatcgacaagttgtggtcagttattgcccccgcgtcaaccaccaccgcagcaccaggcatcagaaccgttgcgaccaacatcgcgaaggatcaactcatcaggattgcgaccagaacattgggcagcaatctggttacgttgctggcgatgtatccacaaccgttgggcgacgcagaactgccgcccgccgttatcgccacacctctgtcgcagctcaacctgccgccgcatatcgatctgcactaccttgccagcgtcaaaggcacgctggatgtgcctcatcgactgacatccgatgaagctggcacaagcgctacacgctgggtagctacggacggtgtgaaagttggtaccaaggttcgcgtaagaactttcacctataacgcacagaacaattcctacgagtttatccgtgacggggaatcgacaccggcactgatatggacgccaatagcacaaccagcggacagttcgacaagctcacccgcagggccacccgctttgccggtagatccaggcaacgtggtgacaccttttgtacccgagcttgaagcttacccggcgattgatcgagatgatcctgatgattacattctcatatcgccgattgattcagggctgcctaacacttacctgttgttcaaggacccgaggtcgattccgggggttgcgagtgggtatggtgagccggtgactggagtttggctaggggacagaacgcgtgcagaaggcgcatcgattccgacgcatattgcagatcaactgcgcggacgacgatttggtgattttgcttcactgaggaaagcaacctggatagccgtagccgatgatcccgagctagggaaacagtctactcagaataaccttgaaataatgcgaggtggtggtgcgccccaccctaaactcagcgaccaagccggaggccgtacgagatttgaaatccatcataaaaattatatttcaaaaggcggcgcggtttatgacatcgacaacttggttattatgacatcaaggcaacatattgatcatcacaggagccaaaaaaatgatctt

SEQ ID NO: 33165 - DNA, 729 bp, Pseudomonas syringae
ttgcgcttccagggtcagtacttcgatgcggaaacgggcttacattacaaccggcatcgctattacaatccgggcactggacggtttttgaccccggacccgatcaagctggcgggtgggctgaacaactaccagtatgtgcctaaccctactgggtgggtggatccgttggggttgatatttggtgctattcgggctgccgctgttagatctgctggtactgctaggaaagccgcttctaccgttcaatctaacattagatcccaaaccgcaatatccaactgtcctgggtcaagtattgggaatccaatcggtaaaacaaaagcaccggaaacgaaagctagtgtcaaccaaggcgaacctagccttccgatagtcagcggaagtcacaaggctttgaatgatgcgaaggcaaaagattcacatcacattattcaagatgcggctgtaagggatttaccaggatatgatcgaaatgcggcacctgctgtacaacttcccggcccatctaccaaaaaaggaactccccactacgaggccactcaggctcagcgtagatctggcggaggaacctataggcttgagcgtatttttggctacagagcgttgcgtaaagcaggggttagtaaggacgatgcaaaaaccttgatcaggggtgctgatgagcattttaaaggtattggcgttactccggaaaccacaactcgcattccaggaaacagacgaaaa

SEQ ID NO: 33166 - DNA, 819 bp, Pseudomonas syringae
atgcgcacactggaattggcaggcaacaccgtaccagtgctgggtcagggcacctggcacatgggtgaaaaagggcaccagcgctcggcagaaatcgccggtctgtgcctgggcatcgaacagggcctgaccctgatcgacaccgccgagatgtacgccgatggcgccgctgaagagatcgtcgggcaagccatcgcaggccagcgtgacaaggtcttcgtggtcagcaaggtctatccgcacaatgccagcagtgccggtattcccgtcgcatgcgaagccagcttgcgccggatgaacaccgactacatcgacctctatctgctgcattggccgggcaactacccgctgaccgagaccgtcgaggcgttcgagcgtctgcgtgaggccggaaagatcggcgcatggggcgtgtccaactttgatgtccgggacatgatcgagttgaacaacccgcgctgcgcgaccaatcaggtgctgtacaacccggaacagcgcggtatcgagttcgacctcatgccgtggagcgcagaccgccacttgccgttgatggcgtactgcccgattggccaggccggcgatctgctttaccaccctgccctgcatgaaattgccaaacgccatgaagcaacgccagcgcagatctctctggcgtgggtgctgcgtcaggacaacctgattgccatccccaaggcgaccaacccggagcatatccgcctgaacatcgcggctgagcaaattcgcctcaccgagcaggatctcgctgatatcgacctggcctggcccgcaccgacccgcaaggtgccactggcgatggtc

SEQ ID NO: 33167 - DNA, 1708 bp, Pseudomonas syringae
gccatcgggctggttgggattgatcgctgaggatttttttgtgaccgagaataatcaagacctgaagcagaactggacccgccaccgcgaaggcgtcgtgcgggctgctcgcggcactcaattgacggccaagacctggatgaccgaagcgccgctgcgcatgttgatgaacaacctcgacccggaagtcgccgagaaccccaatgaactggtggtttacggtggcatcggtcgcgcagcgcgcaactgggaatgctacgacaagatcgtcgagagcctcacccggctcaacgatgatgaaaccctgctggtgcagtccggcaagccggtcggcgtgttcaagacccacagcaacgccccgcgcgtgctgatcgccaactccaacctggtgccgcactgggccagttgggagcatttcaacgaactggatgccaagggcctggcgatgtatggccaaatgaccgctggcagctggatctacatcggcagccagggcatcgttcagggcacctacgaaaccttcgtcgaagccggtcgccagcactatgacggcaacctcaaaggtcgctgggtgctgaccgcaggcctgggcggcatgggtggcgcacaaccgctggccgcgacactggccggggcctgctcgctgaacatcgaatgccagcaaagccgtatcgacttccgcatcaagacccgctatgtagacgagcaggcggctgatctggacgacgcactggcacgcatcgccaaatacaccgccgagggcaaagccatttccatcgctctgtgtggcaacgcagcagacattctgccggaaatggtccgtcgcggcgtgcgcccggacatggtcaccgaccagaccagcgcccacgatccgctcaatggctatctgcccaaaggctggacctgggacgaataccgcgcccgctcggtgagcgagccggccgaagtggtcaaggctgccaagcagtcgatggccgaacacgtcgaagcgatgctggcgttccagcaagcgggtattccgaccttcgactacggcaacaacattcgccagatggccaaggaagtcggcgtctccaatgccttcgacttccccggtttcgttccggcctacatccgcccgttgttctgccgtggcatcgggccgttccgctgggccgcgctgtcgggtgacccacaggacatctacaagactgacgccaaggtcaaagagctgatcccggacgacgatcacctgcataactggctggacatggcccgcgagcgcatcagttttcagggcttgccagcacgtatctgctgggtcggcctgggtcagcgcgccaagctgggcctggcgttcaacgaaatggtccgcagcggcgagctgtcggcaccggtggtgatcggccgcgaccacctggattccggctcggtcgccagccccaaccgcgaaaccgaatccatgcgtgacggctccgacgccgtctccgactggccactgctcaacgccctgctcaacaccgccagcggcgcgacatgggtgtcactgcaccacggcggcggcgtcggcatgggcttttcgcagcattcaggaatggtcatcgtctgtgacggtacggacgaggccgccgaacgcatcgcccgcgtactgcacaacgacccggccaccggcgtgatgcgccatgccgatgccggttacgacattgccatcgactgtgccaaagagcag

SEQ ID NO: 33168 - DNA, 546 bp, Pseudomonas syringae
gtgctcactcgcagccagcaacgcgcagccgcccgcggcctctaccagcagttggcgcaacacccgctgtttcgacgcgcccgtcacgtctccctgtacctgccgatggacggcgagatcgacccgcgcctgttgctgcgcgaagcacagcgtcgcggcaaggcaacttacctgccggtgctcaacgcatggccacgcacccgcatggttttccagcgtgtgcgtcccggcgagaaattcatccccaatcgctttcgcattcccgaaccgcgcatcaatcgcacgaagcaacgccctgtgtgggcactcgacctggtgctgatgccgctggtgggtttcgatgacgaaggcggtcgcctgggcatgggtggcggcttctacgaccgcagcctggcgtatctggcgcgcagaaaaacctggcgcaaaccggcgctgctgggcttggctcatgagtgtcagaaagtagatcgactggcgcaggccatttgggatgtaccgctacagggcacggtatcggacaagcaatggtatttgacgcagaggctc

SEQ ID NO: 33169 - DNA, 1023 bp, Pseudomonas syringae
gtgtgggatggcatcgcgtcgcgacgtaccagcccttacgcgcacatgcacgtctgggatggcagcggcaccgggcagatccacttctcggcctctagtgtgcatgccgacgtgctgggccatatcgtcgagaaccgagtggtgcaggatgcgttgctcgaccgtttgcatgacagcgacatcggcctgctggccaacgcgcggctagagcagatgcgtcactccggcgatgactggttgctgacgctggcggacggtcgtttgctgcgtgcgccgctggtggttgccgccgacggtgctaactcggcagtacgccgcctgaccgaaacgccgacgcgcgagtgggattacctgcaccacgccatcgtcaccagcgtgcgcacggccgattcccacaagaaaaccgcctggcagcgtttcacggatgacggcccgctggcgtttctgccgctggaccgtgagggcgagcactggtgttccattgtctggtcggtcacgccagcagaagccgagcgtttgatggtgctggaagatgatctgttctgccgtgagctggagcaggcgttcgagggccggctgggccaggtcttgtctgccgacgcgcgcctgtgcgtgccgctgcgccagcgtcacgccaagcgctacgtcgccaatggcctcgcgctgattggggacgcggcgcacaccattcacccgttggccgggcagggcgtgaacctgggttttctggatgctgcggtgctggcgcaagtgctgacccacgcagcgcagcgtggcgagcgcgtggcagacctgcgcgtgctgggccgctacgagcgtcgccgcatgccgcacaacctggcattgatggcggcgatggagggctttgaacgcctgttccaggccaacccgctgccactgcgctggctgcgtaataccggcctgaaaatggtcaaccaaatgcccgaggccaaggctctgttcgtgcgcgaagccttaggtttgtcgggcgatctgccggagttggcacggcttgacgctcgt

SEQ ID NO: 33170 - DNA, 945 bp, Pseudomonas syringae
atggacaccctgcaaaacatgcgcgctttcagcagcgtggcacaggcgggcagcttcaccgccgccgctgccgtgctggacaccacgaccgccaacgtctcgcgcgctgtgtccaaccttgaagcgcacctgcagacccggctgctcaaccgcaccacacgacgcattgctctcaccgaagcgggcaagcgttacctgttgcgctgcgagcagattctggcctcggtcgaggaagccgaggccgaagcgagcgacgcccatgcaaggcccgccgggcagctcaaggtgcattcgatgccgggtgtcggtcagcactatgtgatcgatgccattgcccgctatcggcgcaaccacccggacgtcgccttcgacctgaccatgacccaccgggtgccagacttgctggaagaaggcttcgacgtgtcgatcgtgctggccagcgaactggccgattcgggctttgtgtcgcaacgcctgggcattacctacagcatcgtgtgtgcatcccccgagtacgtcaaaaccttcggcatggcgcacaagcccgcagaccttttgaaccatgcgtgcctgcgcctggtgagcccggtgttcccgctggacaaatggctgttcgacggcccggaaggccaggagatggtcaccatcaacagctcgccgttgctggtcaactcggcggacgccatgaagaccgcgatttccagcggcatgggcatcggtatcctgccgatctactcggccatcgaaggcttgcgcaacggcacgctggtgcgcgtactgtccgactatcgctcgcaagagctgaacctgtacgccatctacccgtcgcgccagtacctggacgccaagatcaggacctgggtcgaatacctgcgcggctcgctgccggaaatcctcgcggccgatgaagccgacttgcacgtacaggcactcaaagcgtcctgc

SEQ ID NO: 33171 - DNA, 858 bp, Pseudomonas syringae
atgaaaaagttcttcagtctgtttgccacgttgctggtgctggcaatcgcgctctggatcggtcgcacgctgtgggtcgactacatggatagcccatggacccgcgatggccgtgtacgcgccgatatcatcaacgtggccgccgatgtgtccggcagcgtggtcgacgtcccggtgcatgacaaccagtgggtaaaacgtggcgatctgctgatgcagatcgacccggagcattaccggatcgccgtgaagcaggcacaggcattgctggcttcacgcaaggcgacctgggagatgcgcaaactgaatgccaggcggcgtgccgacatggatgaactggtcatctcggcggaaaatcgtgacgacgcgagtaacgtagccacctcggcccttgccgattaccagttggcccaggcgcaactggaggcagccgagcttaacctggcacgcacgcgggtactggcggcggtggacggttacgtcaccaacctcaatgttcatcgcggcgactatgcgcgcatcggtgaggcgaagatggccgtggtcgacatgaactcgttctgggtctacggcttcttcgaggaaaccaagttgccgcacctgaaagtgggtgatcctgcggacctgcaactgatgagcggcgaggtgctcaaggggcatgtcgaaagcatcgcacgcggcatctacgaccgtgacaacccgcaaagccgcgaattgatcgccgacgtgaacccgaccttcaactgggtgcgtctggcccagcgcgtgccggtgcgtattcatctggatcaggtaccgcaggatgtgttgctggcggcggggatgacctgcacggtgatcgtcagaccggtagacggc

SEQ ID NO: 33172 - DNA, 132 bp, Pseudomonas syringae
gtgaacccgaccttcaactgggtgcatctggcccagcgcgtgccggtgcgtattcatctggatcaggtaccgcaggatgtgctgctggcggcgggtatgacctgcacggtgattgtcaggccggtaggcggc

SEQ ID NO: 33173 - DNA, 1713 bp, Pseudomonas syringae
gtgcgcgatgtgcgtggttttgcggtcaagttctacaccggcgaaggcaacttcgacctggtgggcaacaacatgccgatcttctttattcaggacgcgatcaagtttcccgacttcgtgcacgcggtaaaacctgaaccgcacaacgaaatcccgactggcggctcggcgcacgacaccttctgggacttcgtctcgctggtgccggaatctgcacacatggtgctgtggaccatgtccgaccgcgcgatcccgaaaagcctgcgcaccatgcagggctttggtatccacaccttccgcctgatcaacaccgaaggtaaatccagcttcgtcaaattccactggaagcccaagttcggcgtgtgctcgctggtctgggacgaggcgcagaagctggccggcaaggacactgatttccaccgccgcgacctgtgggagtccatcgagatgggcgactacccggaatgggaactgggcgtgcagatcgttgccgaggaagacgagcacaagttcgacttcgacctgctcgatccgaccaagatcatcccggaagaactggtgccggtcactccgctgggcaaaatggtgctgaaccgtaacccggacaactactttgccgagaccgagcaggttgccttctgcccgggccacatcgtgccaggcatcgacttctccaatgatccgctgctgcaaggtcgcctgttctcttacaccgacacgcagatcagccgtcttggtggcccaaacttccacgagatcccgatcaaccgtccgattgcgccgaacaacaacggtcagcgcgatgctcagcaccgcaccaccatcgacaagggccgcgcttcctacgagccgaactcgattgatggcggctggccgaaagaaacccctgctgctgcagtggacggcggcttcgagacttaccctgagcgcgtcgaagcgcacaaggtgcgtgagcgcagcgaatcgttcggcgaccacttctcgcaggctaccctgttcttccagagcatgagccaccacgagaaagagcacatcatcgcggcgtacagcttcgagttgggcaaggtcgagcgcgagtacattcgtgcccgtcaggtcaacgagattctggccaacattgatcttgagctggccagccgtgtggctgccaaccttggcttgcctgcgccgactgctggaaccgtgcctgttcgtaacacctcggtaaaagagtcgccggcgctgagccaggtcaatctgctgtcgggtgacattgtttcgcgcaaagtcgccatccttgtcgccaatggcgtggacggcaaagcggtcgaggccatgaagaaggaactgactgcaaagggcgcacatgccaaggttctcggcccgacgtctgcacccgtcaaaactgctgatggcgccagcctgccggtagatgcttctgctgaaggcttgccttcggtagcgttcgacgcggtgtttgtgccgggcggcaaggactcggtgaaggcgttgagcaccgatggcgtggcgctgcactttatcctggaagcctacaagcacctcaaggccatctccgttgccggggaagccaaagaactgctgacgttgctacgcctggaagaagatgcaggcttgctggttgtgtccgatagcaaatcgttcgagacgttcttcaacgcgattgcgcaacaccgcgtctgggaccgagaagtgaaggccaaagctgttccggct

SEQ ID NO: 33174 - DNA, 672 bp, Pseudomonas syringae
atggacgctttcctgaacctgtttgccaacgtcgactggtacgagatctgggtcgccacgggcgataccctgatcatgctcagtgtttcgctgggtttcactattctgctcgggctgcccctgggcgtgctgatgttcctgacatcgccgcgtcagttgctggagcataaacagctgtacgccacggtcggtttgatcgtgaacatgctgcgcgcgctgccgttcatcattctgctgatcgtgatgatgccgctgaccgaaatcatcactggcacatcattgggcattctcggcacgctgccgccgctgattgccggcgccacgccgttttttgcgcgcctggtggaaaccgcattgcgtgaagtggatcgcggcatcatcgaagccacacaggcaatgggcgccaccacccggcaaataatcgtcaaggcactgctgcccgaagctcgccccggcattgtggcggcgattaccgtcactgccatcgcgctggtgtccttcaccgccatggcgggtgcggtaggtgctggcgggctgggcgatctggccattcgttacggttatcaacgcttccagaacgatgtgatgttcgtgacggtcgtattgttgctggtactggtgcagattctgcagaccatcggcgacagactggtcgcacacttcacccaccgt

SEQ ID NO: 33175 - DNA, 771 bp, Pseudomonas syringae
atgaagaagttattggccatatttgccgctgttaccgccttgtccgcgcaggccaacgaaacactgaccgtcgcggcctctgccgtgccgcacgccgagatcctcgagttcgtaaaaccaaccctcgccaaagagggtgtggacctggagatcaaggtattcaacgattacatccagcccaacgcacaggtgtcgcagaagcgtctggacgcgaacttcttccagcatcagccgtatctggatgagtacaacaagggcaaaggtactgatctggtcgcagtggccaaggttcacgtggaacccttcggcgcgtactcggacaagttcaagaagctggacgagctgcctgccggtgccaacgtcgcgctgcccaacgacgccaccaacgaaggccgtgccttgctgttgctggccaaggcgggtctgatcacgctgaaagacccaagcaacatcctgtccaagccgtcggatgtcgtgaacaacccgaaagacctgaaatttcgcgagctggaagctgccacgctgccacgcgtgctgacccaggtcgatctggcgctgatcaacaccaactacgcgctgagcgccaagctcgatccgaccaaggatgcgttgatcatcgaaggtgccgattcgccttacgcgaacatcctcgttacccgcccggacaacaaggactcggacgccatcaagaaactggtcgcagccttgcaaagcccagaagtgaaaaccttcctggccgagaaatacaaaggcgctgtggttccggcgttt

SEQ ID NO: 33176 - DNA, 780 bp, Pseudomonas syringae
atgaaaaagacgtttttgatcaccgctctggcggctgcgctttcgattggcctggctcacgcaggcgaaaaactggtcgtcggcgcaacgcccgtaccgcacgcggaaatccttgagctgatcaagccgaccctggccaaagaaggcgtggacctggaaatcaaggtcttcactgactacgtacagcccaacgttcaactgaacgaaaagcgtctggacgccaactacttccagaccaagccttacctggacggcttcaacaaaggcaagggcgccaatctggtgaccggcgttggcgtacacgtcgaaccgttcggtggctactccaacaagtacaagaaactggctgacctgcctgaaggcgcaaccatcgccatcccgaacgaaggcagcaacgccggtcgtgccctgctcctgttgcagaaaggtggcctgatcaccctgaaggacccgaccaacgccctggccacgcctaaagacatcgcgaccaacccgaaaaaactcaagttccgcgaactggaatcggctgtattgccgcgcgccttgagccaggttgaccttgccttgatcaacaccaactacgcgctggaagccaagctcaatccgaagaaggatgcgctgatcattgagggcgctgattcgccgtacgtgaacttcctcgtcacccgcgaagataacgcccacaccgacgccatcgaaaaactgtcgaaagcgctgaccagccagcaagtcaaagacttcatcaacaagaagtacgacggcgcggtactgcctgcgttc

SEQ ID NO: 33177 - DNA, 1848 bp, Pseudomonas syringae
atgtccggaaaagcgcaacagcagtctcgtatcaaagagttgatcaccctgggtcgtgagcagaagtatctgacttacgcagaggtcaacgaccacctgcctgaggatatttcagatcccgagcaggtggaagacatcatccgcatgatcaacgacatggggatcccggtacacgagagtgctccggatgcggacgccttgatgctggccgacgccgataccgacgaggcagccgcagaagaagcggctgcagcgttggcagcggtcgagaccgatatcgggcgtaccaccgatcccgttcgtatgtacatgcgtgaaatgggcaccgttgaacttctgacccgtgaaggcgaaatcgaaatcgccaaacgtatcgaagaaggcatccgtgaagtgatgggcgcaattgcgcacttcccaggcacggttgaccatattctctccgaatacacacgtgtcaccagcgaaggcggtcgtctctccgacgttctcagcggttatatcgacccggacgacggcatcgcgccgcctgccgaagtccctccgcccgtcgaccccaaagccgtcaaggccgaaggcgctgacgatgatgaggaagagtcggcagactcgagcgacgaagaagacgaagtcgaaagcggtccggatccggtcatcgcccagcagcgtttcggtgcggtttccgatcaaatggaaatcacccgcaaggcgctgaagaagttcggtcgcgacgacaagcacgccatcgccgaactggttgcccttgccgaattgttcatgccgatcaaactggttccaaaacagtttgaaggtctggtagagcgtgtccgtggtgccctcgagcgtcttcgtgctcaggaacgcgccatcatgcagttgtgcgtacgtgatgcacgtatgccgcgcgccgacttcctgcgccagttccccggccacgaagttgacgaaagctggaccgatgggctcgccaaaggtaaaggcaaatacgctgaagccattggtcgcctgcagcctgacatccagcgttgccagcagaagctgtctgcgctggaagaagaaaccggcctgaaaatcgccgagatcaaggacatcaaccgtcgcatgtcgatcggtgaggccaaggcccgccgcgcgaagaaagagatggttgaagccaacttgcgtctggtgatctccatcgccaagaagtacaccaaccgtggcctgcaattcctcgatctgatccaggaaggcaacatcggcttgatgaaggctgtggacaagttcgaataccgtcgtggctacaagttctcgacgtatgcgacctggtggatccgtcaggcgatcactcgctcgattgccgaccaggcccgcaccattcgtattccggtgcacatgatcgagacgatcaacaagctcaaccgtatttcccggcagatgctgcaggaaatgggtcgcgaaccgaccccggaagagctgggcgaacgcatggaaatgcctgaggataaaatccgcaaggtattgaagatcgccaaagagccgatctccatggaaaccccgatcggtgacgacgaagattcgcacctgggtgacttcatcgaagactcgaccatgcagtcgccaatcgatgtcgccaccgttgaaagcctgaaagaagcgacacgcgaagtgctatcgggccttaccgcccgtgaagccaaggttctgcgcatgcgtttcggcatcgacatgaataccgaccacacgcttgaagaagtcggtaaacagtttgacgtaacccgcgagcggattcgtcagatcgaagccaaggcactgcgcaagctgcgtcacccgacaagaagcgagcacttgcgctcgttcctcgacgag

SEQ ID NO: 33178 - DNA, 1139 bp, Pseudomonas syringae
ccagagcagtctaacgaaaccgctcaaccagatgcgcgctctgctcaacaacaggcaccgggagaggccgacccaggctcttctgccaacgtggatgatcagaagagggcggcaccacctgcggcgacagaccaagaaatgtcctctgacgcgcctgtactcaaccagccacctttggcggcggccgagccagagcagtcgaacgagactgctcaacaacaggcaccgggagaggccgacccaggctcttctgccaacttggatgatcagaagagggcggcaccacctgcggcgacagaccaagaaatgtcctctgacgcgcctgtactcaaccagccacctttggcggcggccgagccagagcagtcgaacgagactgctcaacaacaggcaccgggagaggccgacccaggctcttctgccaacgtggatgatcagaagagggcggcaccacctgcggcgacagaccaagaaatgtcctccgacgcgcctgtactcaaccggccacctttggcggcggccgagccagagcagtcgaacgagaccgctcaaccagctgcgcctcctgctaaacaacaggcgtcagtagaggctgatcctgacacttcccccgtcgctgaggatcaaccgataatcgcaccggcagggcctgctcaaaacgaagacaatgaaagcctttcagacgtggaggttccggtgtcaggggccctgccgcgtcgtttcaccacagcacgcaagaccggcccggcggtcgtaccggatgctatcttcgtaggggctccgataggtgccgacgagccacaactgcaagccagcaacatcgacaaagacgctctgttggcccgcatcagccgtgaggttcaaggtgacaattcggtgctctacaagctcgatgccgagcctgctttcgttgaccgtgggtcgcgcctggagatggtccaaggcgcaggtcaggaagatgagaaggtaatagctgcgttgctcacggcagcacagttctaccgggggcgcatcgaactgaccggcagtgacgaattcaaggcaaaagccatcgagctgattgctcagcaccagatcaatgggagatgaagaaccctgcgcagcaaatgttgctggacgatgcccgtaacgcgttgaag

SEQ ID NO: 33179 - DNA, 1242 bp, Pseudomonas syringae
atgcgtctgtttcacacctccgactggcatttgggtcagaacctgcatggccaggaacgggacttcgaacatgcctgctttctgacctggctgctggcccgtctggccgaacgacagcctgatgtgctgctgatagcaggcgacatcttcgacaccgtcaacccgccggtcaaagcccaggaacggctgtacgacttcatcgtcaacgcccacgagcaacagccgctgctgaccatcgtgatgattgccggcaaccatgactccgggtcgcgcatcgaactgcccgcgccgctgatgcgccgtctgcgcacccatgcgctgggcagggtgatgtggctgaacgacggcgtgctggatgccgaacgtctgctgctgccgttgcccgatgccaatggcgacatcaaggcctggtgcctggcgctgcccttcctgcgccccgctgaagtcaccggcccgaccctgggtgatgactacctgcgcggcattggccgggtgcatgaactgctgatcgatgcggccaatctcaagcgccagccaggccaggcattgatcgccatcagccacgcacacatggcgggcggctcggtctcggaagactccgaacgcagcctgatcatcggcaacgccgaagccttgcccgccagcctgttcgggccgagcatcacctacgtcgccctcggccatctgcacaagccgcagcgggtcaatggtgaagagcgtattcgctacagcggctcgccgatcccgctgtccttttcggaaatcggctaccagcatcagattctcgagatcaattgcgacggcgacacgctgaccagcgtcgagccctgcctgatcccgcgcgccgtcaacctgcaacgtctcgggcctgcgccattggctgatctgctggtgcagctcaagtcgctgccggacatcgacctgctcgccgacccggaccgccagccgtggctggaagtgcgcgtgcgtctggatgagccgcaaccggacctgcgcaaccagatcgaaaccgcgctgcaaggcaaggccgtacggctggtgcgcatcggtgccgaatacgccggtaaaggcagcgccgatggcagcgacggcgaggcgggcctgatcgaactggaccagctcaccccacaggaattgttcagccgtgcctggcaagacaactttggtagcgaggtggacgaacagaccctgaccgatttcgccacgctgctgcgtgaagttcagcaggagagcgaacagcca

SEQ ID NO: 33180 - DNA, 1014 bp, Pseudomonas syringae
ttggcaaaataccccaacacctttcacctagcttccctgatgaaacagatgaccttcgccgatgccgagtacgcgggtaaacgtaagcatacccgccgcgagcgctttctcatcgagatggatcaggttgtgccctggaaaggcttgattgcccttatcgaaccacattatccaaagggcgaaggtggccgtccggcttatccgctgatggcgatgctgcgtattcacctgatgcagaactggtttggttacagcgatccggcgatggaggaagcactttacgagacaacgatcctgcgccagttcgcagggttgagtctggatcgaatcgccgatgaaaccacgattctcaacttccggcgtctgttggaaaagcatgagttggcaggcgggattttgcaggtcatcaatggctatctgggtgatcgaggtttgatgctgcgccaaggtacggtggtcgatgcgacgatcattcatgcgccgagctcgaccaagaacaaggacggcaaacgcgatcccgaaatgcatcagacgaagaaaggaaaccagtatttcttcggcatgaaagcgcatatcggcgtcgatgccgagtcgggtttagtccatagcctggtgggtactgcggcgaatgtggcggacgtgactcaggttgatcaattgctacatggtgaggaaacctatgtcagcggtgatgcgggctacaccggcgtggacaagcgtgcggagcatcaggatcgtcagatgatctggtcaattgcggcccgcccaagccgttataaaaagcatggcgagaaaagtttgatcgcacgggtctatcgcaaaatcgagttcacgaaagcccagttacgggcgaaggttgaacatccgtttcgcgtgatcaagcgccagtttggttatacgaaagtccggtttcgcgggctggctaaaaacaccgcgcaacaggctactctgtttgccttgtcgaacctttggatggtgcgaaaacggctgctggcgatgggagaggtgcgcctg

SEQ ID NO: 33181 - DNA, 366 bp, Pseudomonas syringae; identical to SEQ ID NO: 29947

SEQ ID NO: 33182 - DNA, 1575 bp, Pseudomonas syringae
atggccctcgacattcacgcccaccgtatcttgatcctcgacttcggctcccagtacacccagctgatcgcccgccgcgtgcgtgaaatcggcgtgtattgcgagctgcatccgtttgacatggacgacgaagcgattcgcgaattcgctccaaaaggcgtgatcctcgccggcggccccgagtccgtgcacgaagccaacagcccgcgctgcccgcaagcggtatttgacctcggtgtgccggttttcggtatctgctacggcatgcagaccatggccgagcaactgggcggcaaggttgcgggttccgagctgcgcgagttcggctacgctcgcgttgacgtagtcggcaaaagccgtctgctcgatggtatcgaagaccatatcgacgccgacggcctgtttggcctcgacgtatggatgagtcacggtgacaaggtcaccaaactgccggaagacttccacattctggccagtacccctagctgcccgattgccggtatggctgacgacgctcgcggttactacggcgtgcagttccacccggaagtgacccacaccaagcagggcggtcgcatcctgtcgcgcttcatcctcgatatctgcggctgcgaagcactgtggaccccttcgaagattgctgaagacgctatcgctcaggttcgcgctcaggtgggtactgatagcgtgttgctgggcctgtccggcggcgttgactcctccgtagtcgcggcgctgctgcacaaagccatcggcgatcaactgacctgtgtattcgtcgacaacggcctgctgcgcctgcacgaaggcgagcaagtgatggccatgttcgccgagaacatgggcgtcaaagtcattcgtgccaacgccgaagaacagttcctgaacaacctggaaggcgagagcgatccagagaaaaagcgcaagatcatcggccgcaccttcatcgacgtgttcgatgccgaatcctgcaagctggacaacatcaagtacctggcgcaaggcaccatctacccggacgtgatcgagtcggctggcgcgaaaagcggcaaggctcacgtcatcaagtcgcaccacaacgtgggcggcctgccggaagaaatgaacctcaagctggtcgagcccctgcgcgagctgttcaaggacgaagtccgccgtctgggcctcgaactcggcctgccgtacgacatggtctaccgccacccattcccaggcccaggcctgggcgtgcgcatcctcggtgaagtgaagaaggaatacgcagacatcctgcgtcgcgccgaccacatcttcatcgaagaactgcgcaaggccgactggtatcacaaagtcagccaggccttcgtcgtgttccagccagtcaaatcggttggtgtagtcggcgacggtcgtcgttacgcctgggttgtagcgctgcgcgcggtggaaaccatcgacttcatgaccgctcgttgggcgcacctgccttatgagctgctggagacggtgagtggccggatcatcaacgagatcgaggggatttcgcgggtgacttatgatgtgtcgagcaagccgccggctacgattgagtgggag

SEQ ID NO: 33183 - DNA, 932 bp, Pseudomonas syringae
gtcttgcgccgcgcgcaattgccgggtgatttgttcacacgacaaaatgttcgtctggactcggcacacttcttcaagctttgggaggcgatcgaagccgaggctgcatccatcaatgcggacttgccggcgcctttgcaaattgccaaggtcatgtcttcggactggtttgatccagaactttttgccgcgctgtgcagcgccaacatggccgacgccctggagcgcattgccaaatacgtaaggttgatcgcgcccatggtcattcgggtcgtgccgaccaaagcgcacaccaccgtcaccatggattttctggacgcctgcgaaccgcccactgtgtttctggcattcaagctcgtgttttttgttcaattggccagactggcgacacgcagtcctgtgcagcccttgcaggttaactggccgtcgccatcgacgcccggccsggacttgcaggcctatcaagcgtacttcggcattcccgtgactcacgcgccacaggccagcctggtatttgcagcggcggacgtagagcgcccgttctgacggaaaaccacaagatgtggttgttcttcgagcccggtctgcgacagcgattgtctgacctggacaggacatccggaatggtcgagcgggtacgcagtgcgctgcttgagtctttaccggcaggcgcggtatcgatgcagcagatcagccgaaaactgggcgtcagtacccgcactctgcagcgcaggttgcaggatgaagggacgacgtttcagcagacgctcgatacgctgcgcgattccctggcacgccactacctgcgcagcacagccatgtcgagtgcgcagatatcgtttcttctgggcttcgaggacgccaattcctttgctcgcgcattccagtcatggacaggcagtacgccgggcaaggtgagggctgaaatggat

SEQ ID NO: 33184 - DNA, 4854 bp, Pseudomonas syringae
atggcgttcttcaccgcagccagcaagtccgacttccagcatcaactgcaagcggcactggctcagcacatcagcgaacaggcactgccacaagtggcgctgtttgccgagcaattcttcggcatcatttccctcgacgaactcacccagcggcgtctgtccgacctggcaggctgcaccttgtccgcgtggcgtctgctggagcgtttcgaacacgctcacccgcaggtgcgcgtctacaaccctgattacgagcgccacggctggcagtcgactcatactgccgtcgaagtgctgcatcacgacctgccgtttctggtcgactccgtacgcaccgagctgaaccgtcgcggttacagcatccacaccttgcaaaccaccgtgttgagcgtgcgccgcggcgcgaacggcgagttgctggagctgctgcccaagggcgccaccggcgaagacgtgctgcaggaatcgctgatgtacctggagatcgaccgctgcgccagtgccagcgagttgaacgtgctggctcgcgagctggagcaggtgctcggcgaggtgcgggtcgcggtagaagattttgcgccgatgaaagcgcgtctgcatgatctgctggcgagcatcgatgccaacgaatccaacaccgatgcggaagaaaaggccgaaatcaaggtcttcctgcaatggctggtggacaaccactttacctttctgggttacgaagagttcgaggtgcgcacggacgccaatggcggtcaactggtgtacgacgaatcttcgttcctgggcctgacccgcctgctgcgtccggggctgagccacgaagacctgcacatcgaagactatgcggtgaaatacctgcaagagccggtgctgctgtcgttcgccaaggccgcgcacccgagccgcgtacaccgtccggcctacccggactacgtgtcgatccggcagatcgacgcctccggcaaggtcatcaaggaatgccgcttcatgggcctgtacacctcgtcggtgtatggcgagagcgtgcggcagatcccgtacattcgccgcaaggttgcagaagtcgagcgtcgttccggcttcgatgccaaggcgcacctgggcaaggaactggcgcaggtcgtcgaagtgctgccccgcgacgacctgtttcagaccccggtggacgagttgttcgccacggtcatgtccatcgtgcagattcaggagcgcaacaagattcgcgtgttcctgcgcaaggacccgtacggccgtttctgctactgcctggcctacgtgccgcgtgacgtgtattccaccgaagtgcggcagaagatccagcaggtgctgatggatcgcctgaaagccagtgactgcgagttctggacattcttctccgaatcggtcctggcgcgtgtgcaactgatcctgcgggtagacccgaagatcaacctggacatcgacgttgcccagctggaaaacgaagtcattcaggcctgccgctcgtggaaggacgactacgccagtctggtcgtggaaagcttcggcgaagcgcaaggcaccaacgtgctggccgacttcccgaaaggcttcccggcgggttatcgcgagcgctttgcggcgcactcggccgtggtcgacatgcagcacatgctgagcctgagcgaaaccaatccactggtgatgagcttctatcagccgctggccggtgatcgtcagcaattgcattgcaagctgtatcacgccgacacgccgctggcgctgtccgacgtgctgccgattctggaaaaccttggcctgcgcgtactgggcgagttcccgtatcgcctgcaccacgccaatggtcgcgaattctggattcatgacttcgcctttacctatggcgaaggtttgagcctcgatattcaacagcttaacgacaccttgcaggatgcgttcgtgcatatcgtgcgcggcgatgccgaaaacgatgcgttcaaccgtctggtgctgacggccggtctgccatggcgcgacgtggcgttgctgcgtgcctacgcgcgttacttgaagcagattcgtctgggctttgatctgggttacatcgccaccaccctgaacaaccacaccgacatcgcccgcgagctgacgcgtatgttcaagacccgtttctatctggcgcgcaaactgggctccgatgacctggacgacaagcaattgcgtctggagcaggcgattctgaccgcactggacgatgttcaggtgctcaacgaagaccgcatcctgcgtcgctacctggacctgatcaaggccaccctgcggaccaacttctatcaggctgacgcaaacgggcagagcaagagttacttcagcttcaagttcaacccgcgcctgatccctgagctgccaaagccggtgcccaagttcgagatcttcgtgtattcgccgcgtgtcgaaggcgtgcacctgcgcttcggcaacgtggcgcgtggcggcctgcgctggtcggaccgcgaagaagacttccgtaccgaagtgctcggtctggtcaaggctcaacaggtgaagaactctgtcattgtgccggtcggcgccaagggcggcttcgtgccgcgccgtctgccaaccactggcaaccgcgacgaagtgcaggcagaagcaattgcctgctaccgcatctttatttcgggcctgctggacatcaccgacaacctcaaggaaggcgtgctggtgccgccggtcaacgtggtgcgccacgacgacgatgacccgtacctggtggtcgccgccgacaagggcaccgcgaccttctccgacatcgccaacggcatcgctatcgactacggcttctggctgggtgatgcgttcgcctccggtggctcggccggttacgaccacaagaagatgggcatcaccgccaagggcgcgtgggtgggcgtgcagcgtcacttccgtgaacgcgacatcaatgtgcagcaggacagcatcagcgtgatcggcatcggcgacatggccggtgacgtattcggcaacggcctgctgatgtccgacaaactgcaactggtcgcagcgttcaaccacttgcacatcttcatcgatccaaacccggagccggccagcagctttgccgagcgcgagcgtctgttcaatctgccgcgctcgtcgtggaccgattacgacaccagcatcatgtccgctggcggcgggatcttcccgcgcagcctcaagagcatcgccatcaccgaacagatgaaggcgcgcttcgacatcaaggccgacaagctgactccgaccgagctgctgcacgcgctgctcaaggcgccggttgatctgttgtggaacggcggcatcggtacgtacgtcaagtccagcgaagagtcgcatgccgatgtcggcgacaaagccaacgacgcgctgcgtgtcgacggcaacgagctgcgctgcaaggtggtgggcgagggcggcaacctgggcatgacccagctgggtcgtgtcgagttcggcctcaatggcggcgcaaccaacaccgacttcatcgataacgccggtggtgtggactgctccgaccacgaagtgaacatcaagatcctgctcaacgaagtggtgcaggccggtgacatgaccgagaagcagcgcaaccagctgctcgaaagcatgaccgacgaagtgggtcatctggtgctcggcaacaactacaagcagacccaggcactgtcgctggccgcacgccgtgcgtacgagcggattgccgaatacaagcgtctgatgagcgacctggaagcgcgtggcaagctcgatcgcgccattgagttcctgcctgctgaagaccagattgccgagcgggttgcggccaaacaaggcctgagtcgtgccgagctgtcggtgttgatctcctacagcaagatcgacctcaaggaagcgttgctggaatcgcgtgtgccggatgatgattatctgacccgcgacatggaaaccgcattcccgccgtcactgggtgccaggttctccacggccatgcgcagccaccgtctgaagcgcgagatcgtcagcacgcagatcgccaacgacctggtcaaccacatgggcatcacctttgtgcagcgcctcaaagagtcgaccggcatgagtgctgcggctgtggccggtgcctacgtgattgtgcgggacatcttccacctgccgcactggttccgtcagatcgaatcgctggactacaaggtttcggctgaaatccagctggcgctgatggatgagctgatgcgtctggggcgtcgtgccacgcgctggttcctgcgtagccgtcgcaacgagctggatgccggtcgtgacgtggcgcacttcggtccgcacctcgccgcgctgggcctcaagctcgacgaactgctggaaggtccgacccgcgagatctggcagacgcgttatcaggcttatgtcgaagccggcgtgccggaattgctggcgcgcatggttgccgggacgactcacctgtacacgctgttgccgatcatcgaagcctccgacgtcaccgggcagaacgctgccgatgtggccaaggcttacttcgccgtaggcagcgcgctggacatcacctggtacttgcagcagatcagcagcctgccggtggaaaacaactggcaagccctggcgcgtgaagcgttccgtgacgatatcgactggcaacagcgggcgatcaccgtgtcggtcctgcaaatggcagacggcccgtcagacatcgaagcgcgtctggctctgtggctggaacagcattcgctgatggtcgagcgctggcgcgccatgctggtcgagctgcgtgcggccagtggcacggactacgccatgtatgccgtcgccaaccgcgaactgctggacctggccatgagcgggcagagcctcacggtc

SEQ ID NO: 33185 - DNA, 2667 bp, Pseudomonas syringae
gtgggtgcgtacgatttctggatgagcgtcccggacacccatttgggaccactgatgagggttaatactgtgcttgaagcctaccgtaaacacatcgaagagcgtgccgcccagggtatcgtgccccagccgcttaacgccgaacaaaccgcaggcctggtcgagctgctgaaaaatcccccggctggcgaagaagctttccttgtcgacctgatcaccaatcgcattccaccgggtgttgacgaagctgcctacgtcaaggccggttccctgtctgccctggccaagggcgaagccacttctcccctgatcgacaaaaagcgcgcaaccgagctgctgggcaccatgcagggcggctacaacatcgtcacactggtcgaactgctcgacgacgccacgctggccccggtcgccgccgaacaactcaagcacactctgctgatgtttgatgccttccacgacgtcgccgaaaaagccaagagcggcaacgctcacgccaaggctgtcgtgcagtcctgggctgacggcgagtggttcaagaagcgcccgaccctggccgacaagatcagcctgcgcgtcttcaaggtgacgggcgaaaccaacactgacgacctgtccccggcacccgatgcctggtcgcgcccggacatcccgctgcacgctctggccatgctgaaaatggcccgtgacggcatcgttccggacgtacagggctccatcggccccatgaagcagatcgaagaaatgcgcggccagggcttccctatcgcctacgtcggtgacgtggtcggtacaggttcttcgcgtaaatcggcaaccaactcggtgctgtggttcttcggcgacgacgttccttacgtgccgaacaagcgtgccggtggtttctgcttcggcaccaaaatcgctccgatcttctataacaccatggaagatgctggcgctctgccaatcgaattcgatgtctcgaacatcaacatgggcgacgtgatcgacgtttacccttacgaaggcaaggtctgcaagcacgacagcgacgaagtcatcaccaccttcgaaatgaagaccccggtgctgctcgacgaagttcgcgctggcggccgtatcccgctgatcatcggtcgcggcctgaccagcaaggcgcgcgccgaactgggcctgccggcattcgacctgttcaagaccccggaccagccagccgaaagcaccaagggttttaccctggcgcagaagatggtcggcaaggcgtgcggcgtagccggtatccgtcctggcacctactgcgaaccgaaaatgaccaccgtcggttcccaggacaccactggcccgatgacccgcgacgagttgaaagacctggcctgcctgggtttctcgaccgacctggtcatgcagtcgttctgccacaccgctgcctatccaaagccgatcgacgtcaagacacaccacacgctgcctgacttcatcatgacccgtggcggcgtatcgctgcggccgggcgacggcatcatccacagctggctgaaccgcatgctgctgccggacaccgtcggcaccggtggcgactcgcacacccgtttcccgatcggcatctcgttcccggccggttccggcctggtagcgttcgccgcggccaccggcgtcatgccgctggacatgcccgagtcgattctggttcgcttcaagggcaagctgcaacctggcatcaccctgcgtgacctggttcacgccattccttactacgcgattcaggctggcctgctgaccgtagagaagaaaggcaagaagaacgccttctccggtcgcattctggagatcgaaggccttgataacctgagcatcgaacaggctttcgagctgtccgacgcctcggccgaacgttcggctgccggttgcaccatcaagctggccaaagagccgatcatcgaatacctgaactcgaacatcaccctgctgcgctggatgatcgaacagggttacggcgatccgcgcaccctggagcgtcgtgctcaggcgatggaagcctgggtggccaaccctgaactgctcgaagccgacgcagacgccgagtacgctgaaatcatcgaaatcgacctggccgacgtcaaagagcctgtgctctgcgcgccgaacgacccggacgatgcccgcctgctgtcttcggtacagggcgagaaaatcgacgaagtgttcatcggttcgtgcatgaccaacatcggccacttccgcgctgcgggcaagttgctggaacaggtcaaaggccagttgccgacgcgtctgtggctgtcgccgccgaccaagatggatgctcaccagcttaccgaagaaggctactacggcatctacggcaaagcaggcgcacgcatggaaatgccgggctgctcgctgtgcatgggtaaccaggcgcgcgtcgagccgaattcgactgtcgtctcgacatcgacccgtaacttcccgaaccgtctgggtgacggcgcgaacgtctacctggcctcggccgagctggcgtccgtcgcttcgattctgggtcgcctgccgaccgtcgaagagtacatgggctacgccaaccagatcgacacaatggccgcggacgtgtaccgctacctgagcttcgatcagatcgccgagttccgtgaagccgctgcaaacgccaacatcccggcgctgcaagtg

SEQ ID NO: 33186 - DNA, 621 bp, Pseudomonas syringae
atgtacccgatccctgaaatcgaagcctttctgctctgccgcacacccgacagctgggtccaggctgcactgcgcaacctggacatcctgctgatcgatcatgcgaacaacgagaagaaggccgcaggggcggcgttccagttcatgttccagtacaacgacaagttcgatctgcttagcaagatgtcgcgcctggcccgcgaagaactgcgccatttcgagcaggtaatcagcatcatcagaaagcgccagatcccgatggccaacatcagctcggcgcgttacgccggagcgctgcgcaaactcgtgcgcaatcacaacccgtaccggctgaccgacgcgttgatcgtgggtgccatcgtcgaagcgcgttcttgcgagcgttttgctgccctggtgccgcatctggatgaagagctggccaagttctacggcggtttgctcaagtccgaagcgcggcattttcaggattatctgaagctggcttacagctatggcgacaaggctgacgtagacgccaagatcgaggaaatccgcctggccgagcgcgagctgatcgagagccccgacgaagaattccgctttcacagtggcgtaccaactggcgtatctgccgccgcc

SEQ ID NO: 33187 - DNA, 930 bp, Pseudomonas syringae
atgtcgagtgagcattttgccagcgtgatggtggacgcgttcatcgcggccgttgacgaaggcctcgacctggtgccggtggtcagcgattcgacgtccaccgccaagatcggccccttcatgcagcgcttcccggagcgcgtgatcaacgtcggcatcgccgagcagtcgctggtcagtgtggctgcgggcctggcgctgggcggcaagatcgccgccacctgcaacgctgcgccgttcctgatttccagggccaacgagcaggtcaaggtcgatgtctgttacaaccaggccaacgtgaaaatgttcggcctcaatgcgggtaccagctatgggccgttggcgagtacccatcattgtctggacgacatttcggtcatgcgcggctttggcaacgtgcagattttcgccccgtccgacccgctggagtgccggcagatcatcgattacgtcctgcgttatcacggcccggtgtacatccgcctcgacggtaagccgttgcgtgaactgcatgaccccggctatcgcttcgtaccgggaaacgtggatattctgcgccagggttcagacctgaccatcgtcgcactgggttcggtggtgcacgaggcggtcgacgctgcggcgcagctggcggagcaggggctcgacgcgcaggtcatcaacctgtcttcgattcgcccgctgcagcgtgatgcgctgctcagcgccctgagcggcagtcgcggggtgattactgttgaggaacataatatcaacggcgggcttggcagcctggtggccgaattgctggccgagaatgcacttggcattaccctgattcgcctcggcattggtgatggcgaatacgcagcagcgggtgcccgtgagccgacgcgtgccttgcatggtatcgatgcggacggcattgtcgcggccgctgcacgtttgcgt

SEQ ID NO: 33188 - DNA, 741 bp, Pseudomonas syringae
ttgccgctgctggaagcgttgaacgtgggcaatgtcgacatcagcgcggacgtggccgacaccgtgccgatttttgctcaggcggcgcaggccaggctgacgtactttgcacaggaagcagcctcgccttcggcccaggcgatcatcgttcacaaagactcggccgtgcagcaactgtctgacctcaagggcaaaaaagtcgccgtaaccaaggcagcgggttctcactacctgctgatcgcggccctgcaaaaaaccggtctggcattttcagacattcagcccgcctacctttcgcccgccgacgggcgagccgccttcgagaaccacaaggttgatgcctgggtgacatgggaaccctttctgaccagcgcacagcgccagttgccaacccgtaccctggcggacggcagcggactggccagttacaaacgttattacctgaccggcaccggctacgccaaggctcatccgcaggtgctcagcgtggtttacgatcagttgcacaagaccggaaactggctcaaggccaacccgaaagacgccgcgcaggtactgagccctttgtggggcaatctggacatcgaaacagtcgaaatcgccaacagccaccgcagctatcagatccggcccgtgaagcgcgacgaactgggcgaacaacagaagatcgccgacgccttctttgcagcgggcctattgcccaaggcagtggatgcgggcgatgtcgagatctggaagccc

SEQ ID NO: 33189 - DNA, 924 bp, Pseudomonas syringae
atgagcaagatcgccagcctctactatgaagaaggactcaaacagtccgagatttccacccggctcgacctgtcccagtccttcatcagccgcgccctgcgccgcgccttgcaggaaggcgtggtgaaaatcaccgtcatgcgcccgcagggcctgcacctggagctggaaacccggctacaaaagatgtacggcatacgccaagtgatcgtcgtcgaagccaccgagccggatgacgaagaaagcatcaaacaagccatcggctccgccgccgcgcactacctggaaaccagcctcagcgcccaggaccacatcggcatctcctcctggagcagcaccatccgcgcgatggtcagccacatgcacccccagccgggcaaacagagcgcccaggaagtcgtgcaactgctcggcggcgtcggcaacaaaggcgctttcgaagccaccctgctgacccaacgcctcgccaccctgctcaactgccccgccttcctcctaccgtcgcagagcatcgaacagtcggtggaaagcaaacaacgcatcgtcgaaatggaagaagtcaaagaagtcctccaccgcttcgacagcatcaccctcgccatcgtcggcatcggcgaacttgaaccctcacaactgctgcgcaacagcggcaactactacaccgaagacatgctgcgcgtgctcgctgagcgtggggcggttggggatatctgcttgcggtattttgatgcgcaggggaaaccggtgctggaagaggatgaggagtttgtggtgtcgatggggttgggtaagttgcggtcgattaatcgggtgttggggttggctggaggggtgaggaaggtgckggcgattaagggggcgctgttgggggggtatctggatgtgttgattacggatgtggggactgcgcgggggttggggggg

SEQ ID NO: 33190 - DNA, 696 bp, Pseudomonas syringae
gtgctggcttccaacgacctcgaacgtatgacgttcagctccgagcaactggccagcgaatactcggtcaacagcctggcacttggcatcgacgtcaccgacgaggccgacatacagcgcctgtaccagagcgcccacgagcgcttcggcagcatcgatgtgtcggtgcaaaacgccggcatcatcaccatcgaccattgcgaaagcatgccccgcgcagacttcgacaaggtcctgcaggtcaacaccaccggcgtctggctcggctgccgggaagccgcccgctatatggtcaaacaaggcagcggacggttgatcaacacctcgtcaggccaaggccgccaaggcttcatctacactccccattacgccgcgagcaagatgggcgtgatcggcatcacccaaagccttgcgctggaactggcgcggcataacatcacggtgaatgccttctgccccggtatcatcgaaagtgaaatgtgggactacaacgaccgggtctggggcgaaatcctcggcaccgaagaaaaacgctacgccaagggcgaactgatggccgagtgggtccgcaacatccccatgcgccgcgccggcaaaccctcggacgtggccgggctggtcgcctttctggcctcggacgacgccgcctacctgaccggccaggcgatcaacatcgacggcgggctgatcatgtcc

SEQ ID NO: 33191 - DNA, 930 bp, Pseudomonas syringae
atgttcatgaccaaaaaactgctgctcgccacggctctggccgccgttaccctcaccaccgcaggctcgacctgggccaaagagctgaccatcggcctggccgtggccaatctgcaggctgacttcttcaaccagatcaaacagtcggtcgaagccgaaggcaaagctcgcggggtaaagatcatcaccgttgacgcacagggcaattcctcgactcaggtcagccagatcgaagacctgatcacccgccagattgacgcactgatctacattccggctggcgccactgccgccggggtgccggtcaaagccgccaaggctgcgggaatcccggtgattgcagtggaccgcaacgcgcctgacgcacccggcgacacgtttattgccagcgacagcgtggcgggagccaaagccctcgccgagtacgtgggcaaagtcaccgacggcaaaggacgcatcgcgattcttcaaggccaactgggcaccaccccggaaaacgaccgggcgaaaggctttcaggaaggcttgaaaggcttccccggcctgaaggtcgtggctgaacagcctgccgagtgggcgcaggacaaaggctttgcagtcgctcaggacctgttgcagcgtgacccgaacatcaccgtattctttggccgcgccgatgcgatggcgctcggcgctgcccaggcggtaaaagtcgccaacctgtcacaacccgtggtggtggtcggtttcgacggcgacgtggcaggcctcaaggcggtggccagcggcgtgctgcaagcaaccatgacccagcaaacgcagaaaatgggccgcatggccgtcgcctctgcgttggacctcaaggctggcaaagccgtacccaaggaacaactcctcgaaaccgtgctgaccaccaaagacaacgtcgcgcctttcctgcaacagcatcct

SEQ ID NO: 33192 - DNA, 921 bp, Pseudomonas syringae
gtgggcaatctgcacttgctggcgagtatcgaatcagccggccattcagtgccgtttcgcggcaagaacgtgcgtgtgcgtgaagtcgatgcgttcgatttcagccaggtccggctggcattttttgccgcaggcccggccatcagccgcagctacgctgaaaaggcgatcgcggcaggctgctcggtgatagacctctcgggcgcattcccgtccgcacaggctcccaatgtcgtgccggaaatcaatgctacgcttttgaacacttgcggcgtcgcgccccacctggttgccagcccgagtgcgtctgccacggcggttgcgttggcgctggccccgttgcgcgcgctgctcgatattcagtctgtagcggtaactgcctgcctggcagtgtctgcattggggcgtgaaggtgtcagtgagctggcgcgccagaccactgaactgctgaacgtgcgcccgctggaaacacgcttttttgatcgccagatggccttcaacgtacttgcccaagtgggcaagccggatgagtcgggtcatttgtcgctggaaaaacgcctggttgacgagttgcgcgaactgttggcgctgccttcgctcaaagtatcggccacctgcattcaggtgccggttttcttcggtgacagtttcacggtagcgctgcgcactgccgggccggttgacgtggtggcagtcaacgccgcgcttgagtctgctgacgggatcgagctggtcgatgcgggtgattacccgacgccggttggcgatgcagtcggtcaggatgtggtctacgtcgggcgggtccgggccggaacagatgatcctgagcaactcaatctgtggctgacctgcgacaacgtgcgcaaaggcgcggcgctcaatgctgtgcaggttggcgaattgttgataaaagactatgtg

SEQ ID NO: 33193 - DNA, 783 bp, Pseudomonas syringae
atgcttgtagattcccattgtcaccttgatcgtctcgatctcacccagcacgacggttccctcgatgcagcccttgaggcagcgcggggcaggggtgtcgggcattttctatgcataggcgtcagcgctgacaacgcaggtgcggtcaaggcacttgccgatcgttatgccgacgttgattgctcggtcggcattcatccgctggacgtgaaaccgggtgagatgccgccgctggactggttgctcaaggagctggatcacccgcgtgtggtggccattggtgaaaccggtctggactaccactacgagcccgaagccgccgagctgcagcaggcgtcttttcgcgtgcacctggaagcggccagcgtgaccggcaagcctgtgatcatccacacccgtggcgcgcgcgccgacacactgagccttttgcgagaagcggcgctgccccaggcgggcgtgctgcattgtttcaccgaagactgggacatggccaaagccgcgctggacatgggctattacatctcgctttccggcatcgtcacctttcgcaatgccgacgccttgcgtgacgtggcccggcaggtgcctgctgatcgcctgctggtcgagacagactctccgtatcttgccccgatcccttatcggggcaagccgaatctgccgcaatacgtgcgtgaagtggctgagtttctggcgatgctgcgtggcgaaagctatgagcgtttcgccgaacagaccaccgccaacttcgcccgccttttcccgttggcgcaccttcagcgc

SEQ ID NO: 33194 - DNA, 630 bp, Pseudomonas syringae
gtgactggcttgtttatcactcttgaaggtccggaaggtgcaggcaaaagcaccaatcgcgactatctggcggcgcaactgcgagcgcagggtgttcaggtattgctgacccgcgagccgggcggtacgccgctggccgagcgtattcgcgagctgctgctggcccccagtgatgaaggcatgagcgccgacaccgagctgttgctggtgttcgctgcacgtgcgcaacatctggccgaggtcatccgtcccgcgctggcgcgtggcgaagtggtgctgtgtgaccggtttaccgacgcaacctacgcctaccaagggggcgggcgtggcctgtctcacgagcgtatcgcagcgctggaacagtttgttcaaggcgacctgcgcccggacctgacgctggtgttcgatctgccggtggaaatcggcttgtcacgcgctgcggcacgggggcggctggatcgtttcgagcaggagggccgagctttcttcgacgctgtgcgcagcacctacctgaatcgtgcgaaggctgaacccgcgcgctatcgcctggtggatgccgcgcaaagtctggctgacgtgcaggcttcgctcgataagctgctgcctgagttgctggagctgcaacgtggc

SEQ ID NO: 33195 - DNA, 813 bp, Pseudomonas syringae
atgctcgcgtgggttgatggctgctgcgcagacaccctgtctgtcaaggacagggggcttgcgtacggtgacggagtgtttgaaaccgtcgccgtcaagggcggtcagccattgcttcttgagcgtcacttgcagcgtctcgaaaacggctgtcagcgcctggcaattgcaatcgatcaggtgctggtccgcacagaaatgacccgtttcgctgccgaacttggcgacggggtcatgaagctgattctcacccgtggcgacagccagcgcggttatgccccggctcccgatacccaatcacgtcgaattctactgggcagccccgcgccggcttacccggttgcgcatgccgagcagggcgtgcgcctgtttgcctgccagacccgtctggccgagcagccgctgctggccgggctcaagcacctgaatcgccttgaacaagtgctggcgcgttccgaatggagcgacagcgaacacgccgaggggttgatgtgcgacacctccgggcggctgatcgaaggtgtttacagcaacctgtttctggtcagcgccgggcgcctgttgaccgctgacctgagccgttgcggggtcgcaggcgtgatgcgcgccgagttgctcgatcaggcacgaaacctgggtctggctgtcgatatccgggacgtgcacttgtccgacctcgaagcggcggacgaagtgtttctgtgcaacagcgtctacggcgtctggccagtgtgcaggtttgcagcgctgaactggccggttggtccgctcacccgtaaactgcaaggcatcgctcgcgcccttctggatatc

SEQ ID NO: 33196 - DNA, 1242 bp, Pseudomonas syringae
gtgtcgcgtagacgcgtcgtggtcaccgggatgggcatgctttcgccactgggcaatgacgtgcccagcagttggcaaggcattctggcgggccgcagtggcattggccttatcgagcacacggacttgtcagccttcaccacccgtttcggcggttcggtcaagggtttcaacgtcgaagaatacctggcgcccaaagaagcgcgtcggctcgatctcttcattcagtacggcctcgcagccagctttcaggcggtgcgtaacgccggccttgaagtcactgatgcaaaccgtgagcgcatcggcgtggcaatgggttcgggcatcggtggtctgaccaacatcgaaaacagcagtcgtctgctgcatgagcaaggtccagggcggatttctccgttttttgtgccaggctcgatcatcaacatgatttccggtttcctgtctatccatctgggtgcacaggggcctaactacgccatcgccacagcgtgcacgaccgcgactcactgcatcggcatggcggcgcgcaacatcgcctacgacgaagctgacgtgatgattgccggtggtgctgaaatggcagcctgtggcctcggtctgggcggcttcggcgctgcacgcgcgttgtcgacccgcaacgacgaccccacgcgtgccagccgtccgtgggacaaaggccgtgacggtttcgtgctgtccgacggtgccggtgcgatggtgcttgaagaactcgagcacgccaaagcgcgcggcgcgaccatctatgccgaactggtcgggtttggcatgagtggcgacgcctatcacatgacctccccgcctgatgacggtgccggcgccgcacgttgcatcgtcaacgccctgcgtgatgccaaggtcaatgcggatcaggtgcagtacatcaacgcacacggtacctcgacacctgcgggcgatctggccgaggcatctgcgatcaagtcggtgttcggcgatcacgcctacaagctggcggtcagctcgaccaagtcgatgaccggccacttgctgggggctgccggtgcggtcgaggcaattttcagcgtgctggcaatggttgatcaggtggctccgccgaccatcaatctggatgaaccgagcgaaggctgcgacctgaactttgtgcctcacgaagcgcgccggatgccgattgatgtagtcctgtcgaactccttcgggttcggtggcaccaacggctcgctggtgtttcgtcggttcgccgag

SEQ ID NO: 33197 - DNA, 936 bp, Pseudomonas syringae
atgtctgcatccctcgcattcgtctttccgggtcaaggatcgcaatcactcggcatgctcgccgagcaaggcgcgcagcatccattgatcctcgacactttcgagcaggcttccgaagcccttggctacgacctgtgggcgttgacccaaagcggtccggccgagttgctcaatcagaccgacaagacccagcctgccattctgaccgcttcgatcgccttgtggcatgtatggctggccgagggcggtgcggttcctgcgtttgttgccggtcacagcctgggtgaatacagcgcgctggttgctgcgcaaagccttagcctggccgatgccgtgaagctcgtcgagcgccgcggccagttgatgcaggaagctgtgccagccggtcagggcggcatggcagccattctgggtcttgatgacgccgacgtcatcgctgcctgcgctgaagcggcacaaggtgaagttgtcagtgccgtgaatttcaactcgccgggtcaggtggtcattgccggttccgccgaggccgtcaagcgcgccatggagctgtgcaaggcgcgaggcgccaagcgtgccttgccgttgccggtcagcgtgccatcacactgcgaactgatgcgtcctgctgcagagcgtttcgtcgaggcggtcgaagccattgaatggcaagcgccctcgatagcgttggtgcagaacgtcagcgccagcgcggtcagtgacctggcgacgctcaagcgtgatcttctggaacagttgtacaagccggttcgctgggttgaatccattcaatgtctggcgagccacggtgcaacccggcttgtggaatgcgggccgggcaaagtgctggctggtctgaacaagcgttgcgccgaaggcgtgattacttacaaccttgacaccccggacgcctttgccgccgcacgcgcggcactggcc

SEQ ID NO: 33198 - DNA, 576 bp, Pseudomonas syringae
atgccatccctgctccttgcttccagctccccctaccgccgcgaactgctcgcccgcctgcgcctgccgttcgcctgcgagtcgccggatatcgatgaaagccatcgccccggcgagacccctcacgaccttgtgcagcggcttgcccgcgagaaagccgaggcactcgcgagcgagtatccaggacacctgatcatcggttccgatcaggtcgcggtactcgacggacagatattgggcaagccgcacacgttcgagcgggcacgggaacaactgacggcggccagcgacacccgcgtgacgtttctgaccggcctcgccctgctcaacagctcgacaggcgaatgccaggtcgactgcgtgcctttcacggtgcacatgcgcgaactcgaccaggccagcatcgaacgctacctgcgtgcagaaacgccttacgattgcgctggcagcttcaaggccgaaggcttgggggtcagcctgtttcgcagcacgcaaggtgctgacgcaacaagcctgatcggcctgccactgattcgcctggtagacatgctaataaaggaaggcgtgagcgtgcct

SEQ ID NO: 33199 - DNA, 1017 bp, Pseudomonas syringae
atgaccttgcacgtgcagtccgcggtttccttgaggccgttcaatacctttggcgttgatgttcaggcgcggttgtttgcccaagcgcgcaatgacgacgaagttcgtgaggctctggcttattcggccgaacatgacgtgccgctgctggtgatcggcggcggcagcaacctgctgctcagtggtgatgtgcaagctttggtgctgcgcatggccagccgcggcattcgcatcgtgcgcgaagattgtcttgaagcgattgtcgaggcggaggcgggcgagccctggcatccgtttgtacagtcttgccttgaactggggctggcggggcttgaaaacctcagtctgatacccggtactgtcggcgcggcaccgatgcagaatatcggtgcttatggcgtcgagatcaaagacgtttttcacggcctgacggcgcttgatcgtgaaacgggtgagctgcgcgagtttgctctgcaggactgtgcgtttggctatcgtgacagcgtattcaagcatcagcccggacgctggctgatcctgcgcgtgcgcttcaagctttcgcgcgaagccaatctgcaccttgaatacgggccggttcgtcagcgtctcgaccaactgggtatcgataagccgacccccttcgatgtcagtcgggcaatctgcgccattcgcagtgaaaagctgcctgaccctgcggtattgggcaacgcaggcagctttttcaagaacccactggttgctgccgagttgtacgcaacgatcaaaagccagcatccgggcgtagtgggctacccacaggccgatggccaggtgaagctcgcggcgggttggctgatcgagcaggctggctggaaaggctaccgtgatggcgacgccggggtgcacaagctccagtcgctggtgctggttaattacgggcacgccagtgggttgcagctattgaatctggcacgccgcatccaggctgatatcgtcgagcgtttcggtgttgaactggagatggagccgaatctctac

SEQ ID NO: 33200 - DNA, 918 bp, Pseudomonas syringae
atgagcaactggttggtagacaagctgatcccatcgatcatgcgttccgaggtcaagaagagctcggtacccgaaggcctctggcacaaatgcccgtcctgtgatgccgtgctctatcgcccggagctggaaaagaccctggacgtctgccccaagtgcaaccaccacatgcgcatcggcgcacgcgcacgtctgaacatctttctggatgtcgacggccgtgaagagctgggagtcgatctggagccggtagaccgtctgaaatttcgcgacggcaagaagtacaaggaccgcctgacggctgcacagaagcagaccggtgaaaaggacgcgctgatttccatgagcggcaccttgctgggcatgccggtcgtcgcttcggcattcgagttctcgttcatgggcggctcgatgggcgccatcgtcggcgagcgtttcgtccgtgctgccaactatgcactggaaaaccgctgcccgatgatctgcttcgccgcctcaggtggtgcgcggatgcaggaagcactgatctccttgatgcagatggccaagacttcggctgttctggcacgtcttcgtgaagaagggctgccgttcatctcggtgttgaccgaccctgtctacggcggcgtttctgccagtctggccatgctgggcgacgtgatcgttgccgagcccaaagcactgatcggttttgccggcccgcgcgtcatcgaacagaccgtccgcgaaaaactgcccgaaggcttccagcgcagcgagttcctgctggaccacggtgccatcgatatgattattgcgcgaagcgagcttcgtccgcgtctgggcaacctgctggcgcagatgatgaatctgccgacgccacgctttgtcgcaccggtcatcgaacctatcatcgttccgccggcaccggccacgata

SEQ ID NO: 33201 - DNA, 897 bp, Pseudomonas syringae
atgttcgactacaagctgttatcggcactggcggctgtgatcgagcaggctgggttcgagcgcgcggctcaggtgctcgggctgtcccagtcagccatctcgcagcgcatcaaattgctcgaggcccgcattggtcagccggtactggtgcgcgccacgccgcctgttccgaccgacatcggcaggcgtctgctcaaccatgtgcagcaggtgcgtttgctggagcgtgacctgcaaagtcaggtgccggcgcttgatgaagaggggctgcccgagcgtctgcggatcgccttgaatgccgacagcctggcaacctggtgggcaccggccatcggcgacttctgtacccggcaccgtctgctgctggatctggtggtcgaagatcaggacgtcgggctcaagcgcatgcgtgccggtgaagtggcggcctgcctgtgtggcagcgagcggccggtggccggggcgcgtagccagttgctgggcgccatgcgctatcgtgcggtggccagtccggcatttatcgagcggcattttccggacggcgtgagccccgagaaactggtcaggtgcgcagcgctggtgtacgggccggacgattttctccagcaccgctatctggcgtcgcttggggttcaggagggtttcgagcatcatctgtgcccgtcgtccgaaggtttcatccgcatgatcgaagccggaatgggctgggggctggtgcccgagctgcaagtgcgcgggcaactgggcagcggcgccctgcgcgagctgctggccgatcgctgcatcgatgtgccgctctactggcatcattggcgcaacggcggccaattgctgacgcaactgaccgaacagctcgcgcaacactcggcccgctggctggtgccgttgagtgaagag

SEQ ID NO: 33202 - DNA, 1647 bp, Pseudomonas syringae
atgatcatggctgctaaagaagttaagttcggcgatgctggccgtaaaaaaatgctcgccggtgtaaacgtcctggctgacgcagtaaaagcgaccctgggcccaaaaggccgtaacgttatcatcgaaaaaagctttggcgctccgctgatcaccaaagacggtgtgtcggttgccaaggaaatcgagcttaaagaccgtttcgaaaacatgggcgcgcagctggtcaaagacgttgcctcccgtgccaacgatgatgcgggtgatggtactactaccgctaccgtactggctcaggccatcgtcaacgaaggcctgaaagctgtcgctgccggcatgaacccgatggacctcaagcgcggcatcgacaaggcgaccatcgctatcgttgcagagctgaaaaagctgtccaagccttgcaccgacaccaaggcaattgcccaggtcggcaccatttcggccaactctgatcactccatcggcgacatcattgccgaagccatggaaaaagtgaccaaagacggcgttatcaccgttgaagaaggttcgggcctggaaaacgagctgtctgttgtagaaggcatgcagtttgaccgcggttacctgtccccgtacttcatcaacaagccggacaccatggtcgccgagctcgacagcccgctgctgttgctggtcgacaagaagatctccaacattcgcgaaatgctgccggttctggaagcagtcgccaaggctggccgtcctctgctgatcgttgctgaagacgttgaaggcgaagcgctggcaactctggttgtcaacaacatgcgcggtatcgtgaaagttgcagccgtcaaggctccaggtttcggcgaccgtcgcaaggccatgctgcaggacatcgctgttctgactggcggtaccgtcatctccgaagagatcggtctgagcctggaaaccactaccctggaacacctgggtaatgccaagcgcgtcatcctgaacaaagaaaacaccaccatcattgatggtgctggcgtcaaaaccgatatcgactcgcgtatctcccagatccgtcagcaaatcggcgacaccagctcggactacgacaaggaaaaactgcaggagcgtctggccaagctgtctggcggcgttgcagtgatcaaggtcggtgccggttccgaagttgaaatgaaagagaagaaagcccgcgttgaagacgccctgcacgcaacccgtgcagcggtcgaagaaggcgtggtacctggcggtggcgtagcactggttcgctcgctgcaggccatcgaaggtctgaaaggcgacaacgccgatcaggacgtcggtattgctctgctgcgtcgcgcagtcgaagcgcctctgcgccagatcgttgccaactccggtgacgagccaagcgttgtggtcgacaaggtcaagcagggttcgggtaacttcggttacaacgctgcttccggcgaatacggcgacatgattgaaatgggtatcctcgacccggccaaagtgactcgctctgctctgcaggccgcgtcctccatcgccagcctgatgatcaccaccgaagcgatgatcgctgacgtggctgatgaaaaggcagcaggcggcggcatgccggacatgggcggcatgggtggtatgggcggcatgatg

SEQ ID NO: 33203 - DNA, 870 bp, Pseudomonas syringae
gtggcgactcatcgaaatcggttccaatgcaagatgggatttttacgtccggcctatccgctgatggcgatgctgcggattcacctgatgcagaactggtttgattacagcgatccggcgatggaggaagcactttacgagacaacgatcctgcgccagttcgcagggttgagtctggatcgaatcgccgatgaaaccacgattctcaatttccggcgcctgctggaaaagcatgagttggcaggcgggattttgcaggtcatcaatggctatctgggtgatcgaggtttgatgctgcgccaaggtatggtggtcgatgcgacgatcattcatgcgccgagctcgaccaagaacaaggacggcaaacgcgatcccgaaatgcatcagacgaagaaaggaaaccagtatttcttcggcatgaaagcgcatatcggcgtcgatgccgagtcgggtttagtccatagcctggtgggtactgcggcgaatgtggcggacgtgactcaggtcgatcaactgctgcacagtgaggaaacctatgtcagcggtgatgcgggctacaccggcgtggacaagcgtgcggagcatcaggatcgccagatgatctggtcaattgcggcacgcccaagccgttataaaaagcatggcgagaaaagtttgatcgcacgggtctatcgcaaaatcgagttcacgaaagcccagttgcgggcgaaggttgaacatccgcttcgcgtgatcaagcgccagtttggttatacgaaagtccggtttcgcgggctggctaaaaacaccgcgcaacaggctactctgtttgccttgtcgaacctttggatggtgcgaaaacggctgctggcgatgggagaggtgcgcctg

SEQ ID NO: 33204 - DNA, 683 bp, Pseudomonas syringae
atgctgcgtagatttgtccgcctgtgtctggttctgatcctgggtttaagtgcccagggcgtcgttgctcaaacatggccgacagagcaatggtcctctcagcctgtaccgcgatcggcggcaatcgaagaactcgaggcctacgccttcccgccccgtgacgaggccacgcgcaaaggcatccgcaccgatgcgctgctggtgatccgcgacggcgaagtagtctatgagcgctatgctggcgtcaccaatgcccagaccccgcacctgacctggtcaatcagcaaaagcatcatggccactgtgcttggcgtggccttcacagaagggcgctttcaactgagtgatccggtcgcgaagttctatgcgccattccagagccatcccgatatcaccctcacggatctgatgcactgggcctcaggtctcgactggcaggaagactacgaatacgcaccgctcaactcctctgtcgtcgccatgctctacacacgggggcgtaacgacatggcgcgctttaccgccgagcatgccgcagccggaccgccgggcaaggcgtacctgtactccagcggcgacagcacggtgctggctgctgcattgaaaaacatggtcgggccacaggcgtacccggattatccgtggaccgcgctgttcgacccgctcggcattcgcagtgcggt

SEQ ID NO: 33205 - DNA, 312 bp, Pseudomonas syringae
atgccgatcgacctcgacgacataataaaagccctggcccacccggtccgccgagaaatcctgacctggctgaaggacccgcgcacgacttttcctgcgcaggaacactcgatcgaacacggcgtctgcgccggccagatcgatcagcgcgcaggattgtcccaatccaccgtgtcggcccacttggcgacgctgcaacgcgccggcctgatcagcagcaagaaagttggccaatggcacttcttcagacgcaacgaagaagtcatcgaagcgttcgtgcaggcgctgatcaaagagctgaacaacccgacc

SEQ ID NO: 33206 - DNA, 1164 bp, Pseudomonas syringae
gtgcccctttcgctactcattctggccctgagcgccttcgccatcggcaccactgaattcgtcatcatgggcctgttgcctgacgttgccgccgacctgggcgtttccatccccggcgctggctggctggtgaccggctacgcgctcggcgtggcggttggcgcaccgttcatggccatggccaccgccaaactgccgcgcaaagccgcgctggtcacgctgatgggaattttcatcatcggcaatctgctctgcgcgctggccagtgactacaacgtgctgatgttcgcccgtgtagtgactgcactgtgccacggcgcattcttcggcatcggttcggtcgtggcggcaggactggtgcctgccaaccgtcgcgcatcggcggtggccttgatgttcaccggcctgaccctggccaacgtgctgggcgtgccattgggtaccgcgctgggtcaatacgcaggctggcgctcgaccttctgggcggtcaccgtcatcggcgtgatcgcgctgatcggcctgattcgctacctgccgaccaaccgcaacgaagaaaagctcgacatgcgcgccgaactggctgcactcaaaggtgccggtatctggctgtcgctaaccatgaccgcgctgttttcagcctccatgttcactctgtttacctacatcgccccgctgctcggcgaggtgaccggcgtatcgccccaaggcgtgacctggaccctgctgctgatcggcctgggcctgacagccggtaacgtgatcggcggcaagatggctgaccgccgtgtgtcgacgacgctgattgccgtgttcgtgtcgatggcggttatctcgaccgcgctgagctggaccagcgccgcgctgatcccgactgaaatcacccttttcctctgggccgtcgcagccttcgctgcggtcccggcattgcagatcaacgtggtgaccttcggcaaggccgcacccaatctggtttcaaccttgaacatcggcgccttcaacgtcggcaatgcactgggcgcgtgggtcggtggcagcgttatcgcccacggccttggcctgaccagcgtgccattggccgccgccgtgctggccgtgctggcgctgctgatcacgctgattacttttcgccagaccggcaaccccgatctggcaccggctacacac

SEQ ID NO: 33207 - DNA, 990 bp, Pseudomonas syringae
atgaagattctggtcaccggcgcaagcggcttcatcggcggacgctttgcgcgtttcgccctggagcagggcatgagcgtgcggatcaatggccgtcgtgccgagggtgtcgagcatctggtcaggcgcggtgccgaattcattcagggcgacctcgcagacccttatctggttcgggcgttatgcgatgacgtggaggccgtggtgcattgcgcaggctcggtcggggtatgggggcgtcgccaggatttcatgcagggcaacgtgcagctcacggaaaacatcgtcgagggctgcctgaaacaaagagtacgcaggctggtccatctttcgtcaccctcgatctattttgatggccgctcgcacttgggcatcaaggaagagcaggtgcccaagcgctttcataatcactatgcggccaccaagtacctggccgaacagaaggtgttcggtgccgaggagttcgggcttgaggtgattgccctgcggccgcgtttcgtgaccggggcaggtgataacagtattttcccgcggctgttgcacatgcagcgcaaaaagcgcctgtccatcgtcggcaacggcctgaatgtggtggatttcaccagcatgcagaatctcaacgaagcactgttgagcagtttgctggcaaccggttcggccttgggcaaggcctacaacatcagcaacgtcacgccggtcccgttgtgggacgccatcaattatgtgatgcggcagatgcacttgccgcaggtcacccgttatcgttcctacgggctggcctacagcgcggcggcgatcaacgaaggtgcctgtatgctgtggccgggccgacctgaacctaccctgtcacgattgggcatgcaggtcatgaacaaggacttcacgcttgatatcagccgtgccaggcattatctggattatcagccgcaggtcagcctgtggacggcgctggatgagttctgtggctggtggcaggcacagcacgcaatc

SEQ ID NO: 33208 - DNA, 2215 bp, Pseudomonas syringae
atgagttatcaggttcttgcacgtaaatggcgtccgcgctcgttccgcgaaatggtcggccaggcccatgtgctcaaggccctgatcaacgcgctggacagccagcgcctgcaccacgcctatctgtttacaggtacgcgaggcgtcggcaagaccaccattgcgcggatcatcgcccaagtgcctgaactgcgaaaccggcatcacctcgacgccctgcggcacctgttcggtgtgcaaggagatcgacgaaggccgttttgtcgacctgatcgagatcgacgccgccagccgcaccaaggtcgaagacacccgcgagctgctggacaacgtgcagtacgcgcccagtcgcggacgcttcaaggtctacctgatcgacgaagtgcacatgctctccagccactcgttcaatgccttgctcaagacgcttgaagagccgccgccctacgtcaagttcattctggccaccactgatccgcaaaagttgccggcgaccattctgtcgcgctgcctgcagttttccctgaaaaacatgacgcccgagcgcgttgtcgagcatctgacccacgtgctgggcgtcgaaaacgtgccgtttgaagatgacgcgctgtggttgctcgggcgcgctgccgacggttcgatgcgcgatgccatgagcctcaccgatcaggcgattgcctttggtgaaggcaaggtcatggcggccgacgtgcgcgccatgctcggcacgctggatcacggccaggttttcgatgtgctgaccgcgctgctggaaggtgacgcccgtggtgtgctggaagccgtgcgccatctggccgagcaggggcctgactggaatggcgtactctcggaaattctcaacgtgctgcaccgcgtggcaattgcccaggcgttgcccgaaggcgtcgacaacggccatggcgaccgcgaccgggtgctggccctggcgcaggcactgcccgccgaagacgtgcagttttattaccagatgggcctgatcggccgtcgtgacctgccgctggcaccggacccgcgtggcggtttcgagatggtcctgctgcgcatgctggcgtttcgtccggctgacagcgaagacgctcccaggcaaccgctaaagccagtggggatcagccaggccacggctgattcccgcaaaacggtggctgatgcgacacctgttgcatcgcccgcttcgacgccgccggtcgtggctgcgcctgaccctgccttcgaagcgcagccgcctgcgtatgcgccggcgccggctgctgttcagccagaggcaaaagccgagcctgcgccgcaaatcaaacccgagcctgagccgcagcctgaacccaagcctgcgccggtcgaagaaatcgatctgccgtggaacgagtcgaaagcgccggtggccgaaaagcctgccgagcccgagcccgagcccgagcccgagcccgatcctgtggcagaagttgaagcagagccccagcctgagccggtagccgaaccggttctggaaacggtttccgagcagccggacctcacgccgatgccagcccctgcgcccgccagccccgtgccggatgcgccgcaggcccagccgtcgccgccggttgaggaacagcaggtcacgcctgcgatgctcgaagcgattcctgactcagcctatctgtccgccccgatggaccgcgatgacgaaccgccagcggacgacgattacgtcgagccggacatcgacatcgacccggcgtcgtatagctatctggatgaactggcccacgagagcgtcgtcgagctcgaggccgttgagcccgagcctgctccggccgccatgccggccaccggtcttgctgccgattggcttgaagtgtttcccaaactgccaatctccggcatgaccggcagcatcgccgccaactgcacattgatggcggtcgatggcgacaactggctgctgcacctggacccggcgcacagcgcgctgttcaactccacgcaacagcgccgcttgaacgatgcgttgaaccagtaccatgggcgcacgatcaacctgagtatcgagctgatcaagcccgagcaggaaacccctgcccaggccgcttcacgcttgcgcaccgaacgccagcgtcaggccgaagcctcgattcaggctgacccgtacatccagcagatgctccagcagtttggcgctgtgatccgcgaagatacgatcaagcccgtggacgcgccg

SEQ ID NO: 33209 - DNA, 669 bp, Pseudomonas syringae
atgagctgtgtctttgcggcgctgatcctgcgcgaagcacgcctgcttgcgcgtcgtccggccgagctggccaacccgctggtgttcttcgcgctggtcatcgccctgttcccgctggccatcggcccggacacgcaattgttgcaagccttgtcgccgggactgctctgggtggcggcgctgttggctgtgctgctttcgctggacgggctgtttcgcggcgatttcgaggacggctcactggaacagtgggtcctttcgccgcaccctctggcgcttctgattctgggcaaagtactggcacactgggttttttccgggctggcgctggtactgttgtcgccggtgctggcattgatgctcggtctgccggtgcagtgcctgccggtgctgatgctttcgctgctgctcggcacgccggtgctcagcctgttgggcgccgtgggcgccgcgttgacggtgggcctcaagcgcggcggtgtgttgctcgccctgctgattctgccgctgtacatcccggtgttgattctgggcagcgctgcgctgcaagccgccctgcaaggcgtgtccgcgaccggctacctgttgtggctcggcagcctcacggtgctggcgattaccctgacaccctttgcaatcgccgcgggcctgaagatcagcgtcggcgaa

SEQ ID NO: 33210 - DNA, 600 bp, Pseudomonas syringae
atgagcttcagccccctgattcgccagttgatcgatgccttccgcgtgctgccgggcgtaggtcagaaaaccgcgcaacgcatggcgttgcagctgctggagcgcgaccgcagcggcggttcgcggctggcattggcgttggggcaggcaatggatggcgtcggtcattgccgcttgtgccgcacgctgaccgaagaagagctctgcccgcagtgttccgacctgcgtcgcaatgacaccctgctgtgcgtggtcgaaggcccgacggatgtctatgcggtggagcagaccggttatcgcggtcgttatttcgtgctcaagggccacctgtcgcccctcgacggcctgggcccggaggccatcggcattccgcaactgatggagcgcatcagccagcaggccaccttcacggaagtgattctggccaccaacccgaccgtggagggcgaggccaccgcgcactacatcgcccagttgctccacgacaaaggcctggtggcctcgcgcattgcccacggcgtgccgctgggtggcgagctggacctggttgacggcggcaccctggcgcactcgtttgccgggcgcaaaccgattgccttg

SEQ ID NO: 33211 - DNA, 2064 bp, Pseudomonas syringae
gtgccacccgcgcgcgactggttctacggtgtgcgtaccttcggcgcttccatgctggcgctttacatcgcgctgttgatggaaatgccccgcccctactgggcaatggccaccgtgtacatcgtttccagcccgttcgtaggcccgaccagctccaaagcgttgtatcgcgccgccggaaccctggccggtgcggccgcgtcggtgctgctggtgccgatgttcgtgcagacgcccttgctgttggccatcgtggtcgggctgtggaccggcacgctgctgtttctgtctctgcacctgcgcacggccaacagttacgcgttgatgctggcgggctacaccatgccgttgatttcgctgccggtggtcgataatccacaggccgtgttcgacattgcagtgtcgcgtaccgaggaaattttccttggcatcatctgcgcctccgttgtcggcgcgatgttctggcccagacgtctggctccggtgtttcaggccaccacagaaaagtggttcggtgacgccgcgacctacagccagcgcttcatcagccgcacctgtcaggccgaagaaatcggcacgctgcgtaattccatggtcggcagcttcaattcgctggaaatgatgatcggccagttgagccacgagggcgcacgcaaacagaccgtgcgcaacgccaatgaactacgcggccgaatgattcacctgctgccggtcattgatgcgctggacgatgcgttgtgggcactggagcggcgcacgcccgagctgctggccagcctgaaacccatgctgcaaagggcttgcgactggctcgaaagcaccgccgatggtccgcaacatgagccgtggcgacaactgcaccgcgagctggaaggcctgcaaccgggctctgcgcaactcgatgaccgagaccggttattgctctccaataccctgttccgcctgagcgagtggatcgacctgtggcaggattgccgcacgctgcagtacgcgatcaagaccgacgatcagtcgccatggcgcgccgtctatcgccactggcgtctgggtcgcctgacaccgtttctggaccgcggcctgatgctctattcagtgacttcgacggtactggcgatcatcgccgcatcggtgttgtggattctgctgggctggaaagacggcgccagtgcggtcgcgctggccgcggtgtcgtgcagcttctttgccgccatggacgacccggccccgcaaatctaccggttcttcttctggaccctgctgtcggtggtgtttgccagcctgtacctgttcgtggtgctgcccaacctgcatgacttcccgatgctggtactcgccttcgccgtaccgtttatctgcgtcggcaccttgaccgtacagccgcgcttctttctgggcacgctgctgaccatcgtcaatacctcgtcgttcatcagcatccagagcgcctacgacgcggatttcatgaacttcctcaattccaatctggccgggcctgccgggctgctgttcgcctttatctggacgctggtgttccgcccgtttggcgtcgatctggcggtgaagcgcctgacccgtttcagctggcgcgacatcgccagcctcagcgaacactcgtctctggccgagcaccggcgcatgggcgtgcaaatgctcgaccgcctgatgcagcaactgccgcgcctgacgattaccgcgcaggacaccgggattgctctgcgtgagctgcgggtggcgctgaacatgcttgacctgctcgcttacacccggcgcgcaacacctgccgctcaggtgttattgcggcaggtgatcgatgaggtcagcggctatttcaaacactgcagcaaagccggcgagcgactgcccgcgcccagaggcctgttgatggccatggaccgcgcacgccgcgcgctgaccgatcaggaaatgggcgacaacccggctcgcgttcatctgctgcacgcgctcagcggcctgcgtctggcgctattgccgggcgtggagatcgtcactgtggggggtgagctgaccgagcaactgccacacaacatcgatggagcgccgctg

SEQ ID NO: 33212 - DNA, 996 bp, Pseudomonas syringae
gtgaacaaactcttcgccgcctcgctactggccgcaggcctggcctttgccagcgcaactcaggcggctcagccgctgctcaacgtctcttacgacgtgatgcgtgatttctacaaggactacaacagcgcctttcagaaacactggaaagccgaaaagaatgaagacgtgaccgtgcagatgtcgtttggcgggtcgagcaagcaggcgcgctcggtcatcgacgggctgccggctgatgtgatcaccatgaacatggccaccgacatcaatgcgctggccgacaatggtgaactggtgccgaaagactgggtcagccgcctgccgaacaacagtgcaccgttcacgtcggccactgtgtttatcgtgcgcaagggcaacccgaaagccctcaaagactggccggacctgatcaaggatggcgtcgaagtcatcgtgcccaacccgaaaacctcgggcaacggccgctacacctacctgtcggcgtgggggtacaccctgaaaaacggcggcgatgaagccgctgcgaagaaattcgtcggtgatctgttccgccatgtgccagtgctcgacaccggcggccgtggtgcgaccacgacgttcatgaccaaccagatcggcgacgtgctggtcacctttgaaaacgaagccgagatgatcgcccgcgaattcggtcgcgaccagtttgaagtggtctacccgtccgtgtcggcagaagccgagccgccggtgagtgtggtcgacaaggtggtggacaagaaacagtctcgcccactggctgaggaatatctgaaatacctgtggtcgccagaaggtcaggaaatcgctgccaagaattacctgcgcccacgcgatacgcagattctcgccaagtacaaggatcgtttcccgaaagtggacttcctctcggtggagaaaaccttcggcgactggcgcactgtgcagaagacccacttcattgacggcggtgtgttcgaccagatttatccgggcaag

SEQ ID NO: 33213 - DNA, 1011 bp, Pseudomonas syringae
atgtcggcagtacgcatcggcccgtatacagtgcacaacggcttgatcctcgccccgatggcgggcgtcaccgaccagcctttccgtcagctgtgccgacaactcggtgctggcctggtggtatcggaaatggtcaccagtgacatgagcctgtggaacagccgcaaatcgcgtctgcgcatgatccacgcaggtgatcccgagccccgctcggtacagatcgctggtggtgacgcgcagatgatggcagacgcagcacgtgccaatgttgaactgggtgcccagatcatcgacatcaacatgggctgcccggccaagaaggtctgtaacaaggcggcaggttcggcgctgttgaaagacgagcaactggtcaacgacatcctgcaggccgttgtggctgcggtcgatgtgccggtcacgctgaagatccgcaccggctgggaccgcgacaaccgtaacggcctgaccgtggcgaaaatcgccgagcaggcgggcattcaggcgctggcggtgcacgggcgaacccgtgccgacctttacaccggcgaggccgagtacgacaccattgccatgatcaaacaggcagtgtcgattccggtctttgccaatggcgacatcgattcacccgaaaaagcccggcacgtgctacaggccaccggcgcagacggattactgattggcagggccgcccaggggcgtccctggatttttcgcgagatagaacactacctgcttaccggaaaaacactcccggccctgcagtcgagtgaagtggaacgcattctgcttgagcatctggcagcgctccacgttttctatggcgacgtgatgggcgtgcgtattgcacgcaaacacgttggttggtatctcgcaaccctgccgggcgccagggagtttcgcgccctcttcaatcgtttggaagatacggaagcacagtgcgccaacgttcgggagttcttcagccaaggctgcaagggcccggataaccagaatgataaagaggtggccgca

SEQ ID NO: 33214 - DNA, 300 bp, Pseudomonas syringae
atggacctgacgccacgcgaaaaagacaaaatgctgattttcaccgccggactggtcgccgaacggcgtctggcacgcggtgtgaagctcaattatccggaagccatggcctacatctcggcggcattgctggaaggtgcgcgtgacgggcagaccgtcgctgacctgatgcactacggcaccacgctgctgacccgtgatcaggtcatggaaggtattccggaaatgatccctgagattcaggtggaggccactttcccggacggcaccaaactggtcaccgtgcatcagccgattgcc

SEQ ID NO: 33215 - DNA, 231 bp, Pseudomonas syringae
atgtcgagagtatgtcaagttaccggtaagggtccggtgactgggaataacatttcccacgcaaacaacaaaacccgtcgtcgtttcctgccaaacctgcagcatcaccgcttctgggttgaaggcgagaagcgttttgttcgtctgcgcgtatctgctaaaggcatgcgcatcatcgacaagcgtggcatcgaagttgtgctcgctgaactccgtcgcgacggcaaaatt

SEQ ID NO: 33216 - DNA, 990 bp, Pseudomonas syringae
gtggccgacaaacgacattcaagcgagatatcattccgattattcatgttgctcacgcacgctcgcgccgtaaaaagagaagtcatcatgctgaacaaacgtcatctgccttcgatcgccgcattgcaatgctttgaggcagtgacccggcacttgagcttcacgcgcgccgcagaagagttgaacctgacccagagcgccgtcagcaaacaggtcgcgcagcttgaagaactggtccagcacttgctgtttcagcgcgtgcgtcggcgcttgcaactgacgcccgccggcgcgctgtatctggcggaagtgcgcaagatcctcactcagatcgagatgtccacgcactttctgcgctcctatggcggcgagaccgaggtgctgcgggtctccacgccgtcgacgttcggtgcccgctggctggtgccacgcctgaaaggctggcggttgcgacacccgcacattcatctggacctgatcaatgaacaggagtccgacgacctgctcaaggggcgttgcgacgtgtcgttctacttcggccaggccgcgatacccggtgccgaaagcgtcaagctgttcggcgaagaactggtgccggtgtgctcgcccgacagcctgccagccgagcccttcacggacccgacacaactgagcgaactggtgctattgcagaacgcctttcgcccgcaagcctggcacgagtggtttgaaagccagggttaccacaccgatcacagttatcacgggccgcgcttcgaaaccttctacatgtgtattcgggccgcacaggtcggttgcggtgtcgcgttgctgccacgctttctggtcgaggaagaactggccgagggcaagctggtgattgcatgggattacgcattgcccagcactaacagcgcctactacctgtcctacccggaacatactgccgacgtacccaaaatcagggtttttctgcagtggatgctggaacagttggatcaaccggcccgt

SEQ ID NO: 33217 - DNA, 1221 bp, Pseudomonas syringae
atgagcgagagcgccttttcaaatcgcatcgtgcaaagcctgctcgataccgatttctacaaattgaccatgatgcaggcggtgctgcacaactaccccaacgtcgacgttgaatgggagttccgctgccgcaacggtgaagacctgcgtccctacctgggcgaaatccagcaccagatcgagctgctgtgcgagctgtccctgagccctgaacatctggtctttctggaacgcatcaccttcatgaaaccggattttctgaggtttctgggcctgttccgtttcaatacccgctacgtaaaaaccagcatcgagaacgatgaactgtgcattcgcctgcacggcccgtggctccacgtcatcctctttgaagtgccgttgctggcgatcgtcagcgaggtgcgcaatcggcatcgctacccggacaccctgctcagccaggcgcgggatcgcctgtacgacaagttcgaatggctgaccgtcaacgccacgccagatgaactggccgagctgaaagtcgcagacttcggcacgcgcaggcggttctcctaccgtgtgcaggaagaagttctcaacgtgctcaagctggactttccggggcaactggtcggcaccagcaacgttcacctggcgcgccagcttgacctcaaaccgctcggcacgatggcccacgaatggatcatggctcaccagcaactggggccgcgcctgatcgacagtcagatcgccgcgcttgattgctgggttcgcgagtaccgcggtctgttgggtattgcgctgactgactgcatcaccaccgatgccttcctgaacgacttcgatctgtacttcgccaagctgttcgacggtttacgccatgattcgggcgacccggtgaagtgggccgaaaaatgcatctcgcactaccagaaactgggtatcgacccgatgagcaagacgctggtgttctccgatgggctgaacctgcccaaggcactcgatatttttcgggcgttacgcggacgcatcaatgtcagcttcggcatcggcaccaacctgaccgccgacatacccggcatcgcccccatgaacatggtgttgaagatgaccgcttgcgcaggtcaggcggtggcaaaaatttccgatgagtccggcaagacgcaatgcaaggacccgaactttgtcgcctacctgcggcatgtgttcaaggtgcctgatttgccgagccccgcaaaacccgct

SEQ ID NO: 33218 - DNA, 1243 bp, Pseudomonas syringae
gtgcagaagcacggtgaagtcgacgtctggttcaacccgccgccgattccgatgaccaccgacgaaatggactacgtgttcggcatgccttacgcgcgcgttccacaccctgcgtacggcaaggaaaagattcccgcctacgacatgatccgtttctcggtgaacatcatgcgtggctgcttcggcggctgcacgttctgctcgatcaccgagcacgaaggccggatcatccagaaccgttcggaagagtcgatcattcgcgaaatcgaagagatccgcgacaaggtgccaggctttaccggcgtcatttccgacttgggcgggccgactgcgaacatgtatcgcatcgcctgcaaaagcccggaaatcgagtcggcctgccgcaagccgtcctgcgtattccctggcatctgcccgaacctgaacaccgaccactcgtcgctgattcagctgtatcgcagtgcccgcgccttgcctggcgtgaagaaaatcctcatcgcttccggcctgcgctatgacctggcggtcgagtcgccggaatacgtcaaggagctggtcacccaccacgtcggtggttacctgaagatcgccccggaacacaccgaggaaggtccgctcaatcagatgatgaagccgggcattggcagctatgacaagttcaagcgcatgtttgaaaagtacaccaaggaagcaggcaaggagcagtacctgattccttacttcatcgccgcccatccaggcacgaccgatgaagacatgatgaacctcgcgctgtggctcaagggcaacggtttccgcgcggatcaggtgcaggcgttctacccctcgccaatggcgactgccacggccatgtaccactcgggcaagaaccccctgcgcaaggtcacttacaagagtgacgccgtcacgattgtgaagagcgaagagcagcgtcgcctgcacaaggccttcctgcgttatcacgaccccaagggctggccgatgctgcgtgcagcactggagcgcatgggccgtgccgacctgatcgggccgggcaaggaccagttgatcccgctgcatcagccagcgaccgacacctaccagagtgcccgtcgcaagaactcgacaccggctggcagccacaaggtgggcaaggacccgaaaaccacgctgatccagacccagcacaccggcctgccgccgcgtggcagcgatggcagcaagccgtgggacaaacgcgaagaagccaaggctgccgcaatgg

SEQ ID NO: 33219 - DNA, 1422 bp, Pseudomonas syringae
atgcccatgaattgtccgagagttgagtcgatgacccatcccgctttgattgatgagctgcaagccctggctgaccccggcaaggtgctgactgatgccggttctctggagacctacggcaaggactggaccaggcagttcacccccgcgccgctggctatcgtgtttcccaagaccaccgagcaggttcaggccattgtgcgctgggccaatgagcgtctggtcgcgctggtgccgtctggcgggcgcaccgggttgtctgcggcagcggtggcggccaacggtgaagtggtggtgtcattcgattacatgaaccaggtgctggaactgaatctcaccgaccgtacggcagtttgccagccgggcgtgatcacccggcagttgcaggcgctggccgaagacaacggcctttattacccggtcgactttgcctcgtcgggctccagccagatcggcggcaatatcggcaccaatgcgggcgggatcaaggtcattcgctacggtatgacccgcaactgggtggctggcctcaaagtggtcaccggcaagggcgacctgcttgaactgaacaaggacctgatcaagaacgccaccggttacgacctgcggcagttgttcatcggtgccgaaggcacgctggggttcgtggtcgaagccaccatgcgcctcgaccgcgcgccgaaaaacctcactgcgatggtgttgggtaccaccgatttcaactcgatcatgcctgtgttgcatgccttccacggcaagctcgacctgacagccttcgaattcttctccgacaagtctttcgcccgggtcatggcgcgcggcgatgtgccgtcaccctttgatacgccttgcccgttctatgtgctgctggaatttgaagcgaccaccgaagaccttgccgatcaggcgctggcgacctttgagcattgcgtcgagcagggctgggtgctggacggggtcatgagccaaagcgagcagcagctgcgcaacctgtggaagctgcgcgaatacatctccgagaccatctcgcacttcaccccgtacaagaacgacatctcggtctcggtctcgaaagtgccggaatttctcgctgaaatcgacgccatcgttgccgagtactacccggacttcgaagtgctctggtacggccatatcggcgacggcaacctgcacctgaacatcctcaagcctgaaaacctcgacaaggacgagttcttcgtcaaatgtgcgcgggtcaacaaatgggtgttcgagaccgtagaaaagtacaacggctcgatttctgccgagcatggcgtcgggatgaccaaacgcgattacctgacgtacagtcgctcgccggtggaaatcgagtacatgaaggcgttgaaagcggtcttcgaccccaacggcatcatgaaccccggaaagatattcgccgtt

SEQ ID NO: 33220 - DNA, 945 bp, Pseudomonas syringae
gtggtatcaatgccgcccgctcaacttgcccgagtcacctcaatgcgccgctctacccgctctttactcctgctcattgcccttgttccgttggccgggctgttcatgctcgccaatgagcgataccgctatgtggaacgcgtgctgttcgactggcaagtgttctggcaatccgactcgcttgaggccattggccttgatcagtatcgcgctgtgacagaaggtcaggtcatcaacgggcttgaggacgatgtctcgggcctgagcttcgacccggaccgcaaaagcctgttcaccgtgaccaaccagaaccccgagcttgtcgagctgagcctggacggtcgcgtgctgcggcgtattgcgctggtgggttttggtgatgccgaagcggtcgaatacatcagccccggcgtttacgtgatcagtgacgagcgtcagttacggctgattcagattcacgtcgatgacagcacaaaaagcctgaacgccgccgatgccgagcagctgacgctggggctgacggccagcggcaacaagggctacgaagggctggcctatgattcgcgtggcaagcgcctgtttgtcgcccgcgagcgcgatccggtgcagatcatcgaggtgcgtggctttccccgagtcaatgccgatgcgccgggcaatcttcaggtcatcaccgacggcaagcgcgacggcaagctttccgtgcgtgatctttccagcctgcaattcgatgaagtgagcggtcacctgctggcgctgtccgatgagtcgaaacggattctggaactcgacaccacggggcggccgattggcagtggctcgctgaaagaaggcgatatggggttgagcaagagcgtgccacaggccgaaggcatggccatggacgacgaagggacgttgtatctggtgagcgagccgaacctgttctacgtgttccgcaagcct

SEQ ID NO: 33221 - DNA, 975 bp, Pseudomonas syringae; identical to SEQ ID NO: 33042

SEQ ID NO: 33222 - DNA, 660 bp, Pseudomonas syringae
atgagctttggcgtcatcagcatcaatgaaagctctttcgtgcagattgattcggaaacgcctaggctttgcgtactcacgaagggcacttattcaggaaccacaaacgcaaacgtcacgtttccacgcgcggtaacaagtgcagatcctccaatagtgttcatcaggcccgatcaaaacggcatcgtccaggtgccgatatcagtatggtttacaggtggtccgggcaattggacaggcttcgcaatgaaagcctcaaacgtacagagtacgctgagcggtcaatattttattgccgcatgggcagccatgagtacagcctcttttgggatgcgtatttggggagctggcggcgagcttgtatacgacagcggtgcacctccagttgtcgtaacgtttgctgcgggtaactggacatacgtcgggagcgatcagcttagcgtcggtcgtcggtatatatggagcatcgataaattgcttggggccggcgagtttatatcaataaattcatttgctatgagttgtcacaacggcgcaagcggtggaggctgcggaatagcagtcgattacaccaattcaaaaataatgatgtatagcctcgctacaacggcatggacagatcagggccaccggccattcctctgcgcaaaactaaccgcc

SEQ ID NO: 33223 - DNA, 684 bp, Pseudomonas syringae
atgggcttcgccatcgccggattcttccttgaaaaccgccagatcaacgcaccggagccgctgcgcgactggtcattgatcgacttgcagccagtactcgaagaacgcttcggcatgccggtctggctggaaaacaacgccaccacagccgccatcggcgaaagrctggtgggcgttggcgcctgggccagcaacttcatctacctgtcgttcaacttcggtttcggcgcaggcgtggtcatcaacggtaaaccgtacttcggcagccacggcaacgcaggcgagatcaccctctacaacgatgaagaatcaataaaccgcccggcgttgcgctatttgctggaagaactgcatcagaaaggcgtgcaagtggattccatcgaagacctgcgcctgcgcttcgaccccaactggcccggtgtcgatacctggttgaaacgaatccagccaacgctggaccggctggtcaatgcgctggcggggttgtttgatccacaggcggtggtgtttggtgggcaattgccggcggaactggggaagcgcctgattgcggcgacgactttctgggggacccatcggtataactcgccaccgccaaggcctcggttattgctgagtgaaaccaatggggatgcggcggctatcggggcggcgttggtgcctttgaaggagcggttttttgtt

SEQ ID NO: 33224 - DNA, 969 bp, Pseudomonas syringae
atgaagcaatatctggaactggtcgcccacgtgatcaagcacggcaccttgcaagccaaccgtaccggcgtgaacaccatcagctttccgggtgccatgctgcgttacgacttgcaggaaggttttccggcgatcaccacacggcgcatggcgttcaaatcggctattggcgagatggtcggtttcttgcgtggcgtgagcaatgccgccgaattccgcgaactgggctgcaaggtctgggaccagaacgccaacgaaaacgcccagtggctgaacaatccgttccgcaagggcgaagacgatctgggcgagatctacggcgtgcaatggcgcaaatggccagcgtacaagcgcatcgacacgggcaacgtcgccgccatcgaactggcactcggtcagggttatcgccagattgccgaatcggaagaagacggccagtcgttcgtggtgctgtacaaggccatcgaccagattcgccagtgcatcgacaccatcatcaatgacccaggcagccgccgcatcctgttccacggctggaactgcgcccagctcgatgaaatggccctgccgccatgccatctgctgtaccagctgcaccccaacccgcagacccgcgaaatctccctgaccctgtacatccgctccaacgacctgggcctcggcacgccgttcaacctgaccgaaggcgccgcgctgctgagcctcatcggccgcctgaccggctacacgccgcgctggttcacctacttcatcggcgatgcccatgtgtacgagaaccacctggacatgctcaacgagcaaatgacccgcgagccgtacccgatgccaaaactggtgatctccgaccgcgtgccggagtttgccaagaccggcgtttatcagcctgaatggctggagctgatcgagccgtcggacttttcgctggaaggctatcagcatcacccggcgatgactgcgccgatggcggtc

SEQ ID NO: 33225 - DNA, 837 bp, Pseudomonas syringae
gtgatggaactgaggcctttgcattctctggacggcctgctgaagtttgccggtctggcacgcagcactttttactatcaacaaaaggtactgctggcagatgacaaatacgccgggctgaaagacctgattcaggcaactttctacgagcacaagggccggtatggctatcgtcgcatcacggcagctttgcgcagggcgggccatcttgtgaaccacaagacggtgcagaaactaatggggcagctaggcctgaagagcctgatacgcgtgaagaaataccgttcctacaaaggcgaaacaggcaaggccgcgcctaacctgctaaagcgtgatttcaaagcgcaataccttaaccagaaatgggccaccgacgtgaccgaattcaaagtaggaggccagaaactctatctgtcgccgatcatggatctgtacagcggcgaaatcatttcctatgcgattgccaggcgcccgctgtactccatggtcgacgaaatgcttgaaggagcatttaagcggcttggaccgcatgaaaagccgattttgcattccgaccagggctggcaatatcggatgcctatttaccagcgactgctcaatgagaattcgatcacagccagcatgtcgcgcaagggtaactgctacgacaacgcggctattgagagtttttttagcacgctgaaattcgaatttttctacctgaacaaatttaacgatctggatgagcttcaagcgggtatcgaagagtacattgagtattacaatcactcacgcataaaactgaagcttaacggcctgagtcctgtggaatacagaatgcaggccgccaaggcagcg

SEQ ID NO: 33226 - DNA, 879 bp, Pseudomonas syringae
atgaaccgctttcgattctcgaacctgatgctggttttcggcctgttgttcatctacgcgccgatggtgattctggtcatctactcgttcaacgcctcgcaactggtgacggtctggggcggttggtcggtgaaatggtacgtcggcctgctggacaactcgcaactgatgggctcggtgatgcgctcactggaaatcgcctgctacaccgctattgcggcagtggcattgggcaccatggccgcgttcgtcctgacccgcatcagccgcttcaagggccggacgttcttcggcgggctggtcacggcgccgctggtgatgccggaagtaatcaccggtctgtcgctgttgctgctgttcgtggccatggcgcagatgatcggctggccgcaggaacgcggcatcatgaccatctggatcgcccacacgacgttctgcgcggcttacgtggcggttgtggtgtcggcgcggctgcgtgagctggacctgtcgatcgaagaggcggcaatggacctgggcgcgcgcccgtggaaggtgttcttcctgatcaccatcccgatgatcgcgccgtcactggctgccgggggcatgatgtcgtttgcgctgtcgctggacgacctggtactcgccagcttcgtttccgggccgggctcgacgaccttgccgatggaggtgttctctgctgtgcgcttgggcgtgaagcctgaaatcaacgccgttgcgagtctgatcctgctggccgtgtcactggcgaccttccttgtctggttcttcacccgccgcgctgaaaacaaccgcaaacgcgcgatccagcaagccatcgaggaaagcgctgccgacgcctggacgcagcctgacccaaggcgagcgccagctgtc

SEQ ID NO: 33227 - DNA, 810 bp, Pseudomonas syringae
atgctggtggctgcgctgaccttcgcctccagcgagctgtatcaattgatacagcccaaggggccgggagtggtcggcattgtctggcagcccgataacgccacggtcggtatcagcggtgactgggacaagctcggcgcgcggcaattgctcgtgcagtggacggctgtcgatgaccagtcgttcatacccggcaccgacctgccgaatgtgccggtgctgcccgactggtcgcgtatcggccagcagccctgggcgcaagaggtgatcctcgggctggccggctacttcagcgagaatcgctcacgggacaacatcgaacaattggcggtgctctcggcgcagatggccaaggtcaaaaccccgctcaatgtcaccggctggtatttcccggccgaggtcgatcccagctggagccgtgccaaggagttgcccgcactgctggcaaacctgccaagacccttgtggataagcgtctacgacggcgccaacatcggccccgccgccaccgccgactggctgaaaacctggctgccggacgacatcggcgtgttctttcaggacggtgtcggcgtttacgcacgcaccgcgccagtggcccgaacctacgccgatgccttgcgcaaacggctgggcaaagaccgcgtaaggatcatcgtcgaagcgtttcgcccgcagttcggtggtggcttccgctcggcaaccgctgccgaattgaaaccgcagattgctgcttttgacgggtatccgctgtacctgttcgacggtccgcactacgtgacgcccgaactgatagaggcgttaaacaag

SEQ ID NO: 33228 - DNA, 1038 bp, Pseudomonas syringae
atgaagtgtctttcgaacaacaataaaaggacgcaccctatgaacaccctgaaacgcacgctgcttgccagtgccttggcactgctgtccctgccggtcatggccgacgccgcccacccgaaaatcggcttttccatcgacgacctgcgcctggagcgctggtcacgagaccgtgattacttcgtggcggcggcagaaaaactggatgccaaggtcttcgtacagtccgccgatgccaacgagcagaagcagatttcgcagattgaaaacctcatctctcgcggcgtcgacgtgattgtcatcgtgccgttcaacgccaccgtgctgaccaacgccatcgccgaagccaagaaggccgggatcaaggtcgtttcgtatgaccgtctgatcctcaatgccgacatcgacgcttacatttccttcgataacgaaaaggtcggcgagatgcaggccagcggcgtgctgcaagcggcacccaagggcaattactttttgctcggcggcgcgcccaccgacaataacgccaaaattctgcgcgaaggccagatgaaagtgctgcaaccggccatcgacaagggcgatatcaagattgtcgggcaacagtgggtcaaggagtggaaccccaccgaagcactgagcattgtggagaacgccctgacccgcaatgacaacaagatcgatggcatcgtcgcctccaacgacgcgacggccgggggcgccattcaggcgctggccgcgcagaaactggccggcaaggtgccgatttcgggtcaggacgccgacctggcggcggtcaagcgggtcatcgatggcacccagaccatgaccgtttacaagccgctgaaactgatcgccaccgaagccgccagactgtcggtgcaactggtacgtaacgagaaacctgcctttacctcgcagtacgacaatggcagcaagaaagtcgacactatcttgctgaccccgacaccgttgaccaaagacaacatcgacctgctggagaaagacgggttctacaccaaggcgcagatgggcggccag

SEQ ID NO: 33229 - DNA, 1314 bp, Pseudomonas syringae
atgtcgtacttccccactgtcgacaaggttatctacgaaggccccgacagcgactcgccgcttgcctttcgccactacgacgccgacaaacgggtgctcggcaaacccatgcgcgaacacctgcgcatggctgcctgttactggcacaccttcgtctggccgggggctgacatgtttggcgttggcaccttcaaacgcccatggcaacgcgccggtgacccgatggagctggctatcggcaaggccgaggcagcgttcgaattcttctccaagctgggcattgattactacagtttccacgacaccgatgtagcgccggaaggcagctcgataaaggaataccgcaataactttgcacagatggtcgaccgcctcgagcggcatcaggagcagagcggcatcaagctgctgtggggcacggccaactgtttcagcaacccgcgttttgccgcaggtgctgccagcaacccggaccctgaagtatttgcctacgctggcgcccaggtgttcagtgcgatgaacgccacccagcgcctcaaaggctccaactacgtgctgtggggcggtcgtgaaggttacgaaaccctgctcaataccgacctcaagcgcgaacgcgagcaactcggtcgcttcatgcgcatggtggtcgagcacaagcacaagataggtttcaaaggtgatctgctgattgaacccaaaccacaggagccgaccaagcatcagtacgattacgacagcgccacggtattcggttttcttcaccagtacggcctgcaggacgagatcaaggttaacatcgaagccaaccatgccacgctggccgggcacagcttccatcacgaaatcgccacggcggtctcgctggggatcttcggcagcatcgacgccaatcgcggcgacccgcagaacggctgggacaccgaccagttccccaatagcgtcgaggaaatgaccctcgccacctatgaaattctcaaggccggtggttttacccatggcggctacaatttcgactcaaaggtccgccgtcagagcctggacgatgtcgatctgttccatggccacgttgccgccatggacgtccttgccctctcgctggagcgcgctgcggcgatggtgcagaacgataaacttcaacaattcaaggaccagcgttacgcaggctggcagcagccgttcggccaatcggtgctgagcggaggtttcagcctcgcgtcgctggccgaacatgcgttcgccaacgaactgaacccgcaggccgtcagcggtcggcaggagttgctcgaaggtgtggtcaaccgctttatctacacc

SEQ ID NO: 33230 - DNA, 2040 bp, Pseudomonas syringae
atgttcgcgccggccaatcagactcacttttccctgaccatagaaggtctttccaatgatctgcaggttcttgccttgcaaggtcgggaagccatcagccagccttttgcgtttgaggtcgatctggtcagtgagcagccatccctggacctcgaaacgctgctacataaaccggcctttctgcagctctcgcctgacggcagcggcattcatggccagatttaccgcgcctcacagggcgactcgggcaagcggctaacccgctacgccgtgaccttacgcccgcaactggcctaccttgcccaccgtaccaaccagcgtatcttccagaacctcaccgtcccgaaaatcatcggtattgttctcgaagagcacggcattcaaggcaacgcctacgaattcaaagtcgggtcgatttatcctgaacgcatctactgcgttcaatacgatgaatcggatctgcacttcgtccaacggctgtgcgaggaagaaggtatccactaccatttccagcacagcaccaacggccacacactggtgttcggcgatgaccagacggtgttcccgaaacttgcaccagtggcctaccagcaagactcaggcatggtcgccaccgatccggtggtaaagcgattcgacctgcgcatggaaacccgcactagccgcacgacacgccgcgactacgacttcgagaaaccgcgcctgacgctggaaagcgaaaaccggggcgatgccatccccgaccttgaagactacgactaccctggccgcttcgtggatcgcgaacgcggcaagcaactggccaaaagagcactggaacgtcatcgcagcgactaccaactggccgtaggcaagagcgatcagccgctgctggtcagcggccactttctggcgctgacccagcaccccaaagccaaatggaacgatctgtggctgctgaccgaaatcctgcacgaaggcaaacagccgcaggtgctggaggagtcggtcaccagcgacacaaccgacctgaaggatgatttccatcagggctaccgcaaccgcttccaggccaccccgtgggacgtgcccaaccgtccgccgctgacccaccccaaaccgcgcattctcggcagccaaagtgccgtggtcaccggccccaaaggcgaagaaatccactgcgatcagtacggccgcgtcaaagtgcagttcccctgggaccgcgaaggccagtccgacgacaagaccagctgctggctgagggtctcctcggcctgggcaggtgcgatgtacggcggcatcgccattccgcgcatcggcatggaagtgctggtgactttccttgaaggcgaccccgatcagccgctgatcagtggctgcctgtaccacaaggaaaacgtggttccgtacgacctgccggctaacaaaacccgcagcactttcaagtccatgagttcacccggtggcggcggcttcaacgagctgcgtatcgaagacaagaaaggccaggaacagatattcctgcacgcccagcgcgactgggacgagaacgtcgagaacgatcagaagatacgcgtcggcaacgaacgacacgacacagtcgagcagaacagccacagcgaattcaaggccgaagagcaccataccgtctacgccgaccgcaaagtcgaagcacgggctgacgatcacctcaccgtaggtgcgaaccagcacgtcaaggtcggcaccggtcagttcatcgaagcaggccaagagatccacctgagcagcggcgtgaaagtggtgcttgaagccggtagcgaattgacccttaaggctgggggcagcttcatcaagatcgacgccagcggcgtgaccctgagcggcccgttcatccacgtcaacgacggcggtagccccggcaacggcaccccggcagccccgctgatgccgggtcctttgctgcaggccgatgccgacaaggccggtgcggctctaaccccggcgcagatcaacaccctcaaacgcaacgcgccgttctgtgaagaatgcgagaagtgcaaggacggtgcgtgtgcgatc

SEQ ID NO: 33231 - DNA, 4716 bp, Pseudomonas syringae
atggatcgcgttgccgatatcgaagcacaactggactcgttcaaagacagcctgacgctgtaccgtgaacaaaccaaaacctggtatgcagagctggccgacaaaggcagccgcgcgacagacatgccttcactgttaggcatggagcgcgtcatcaaagcagggggatcgagtaaagcggtcagcatgaatgacgacgatttctcatacgtcgccaagtgccctctcgtcggcccgcttttgatcgagagtaagtttgagtcgctgtatgacattcctgtcggtgacattcaggttgatgttattgccgttgaaggtggcgccaagaccaccgtgatgctggacaagcaaggcaaaggcagctttcaggggcaaccgggcaaagcttataaaattcatgtccatgacaaagtcacccccgctcaaattgatgccctgttcaaatcctatgacggtctgagtgctgacctggaaggcttcctgcgcaaggagtgggcaggcttcaaaccccagtggtccaatcaaagcgcttcggcgacagcaatggcgatcggcgcaggcattctggagggtggctgggaagccattaaaggcgtgtgggacggcatcaccaaagcgctggatattttgcaaaaccctaagaaatttgcggaggaattgggcgcaggtgctgacgaactggtcaaactggccaaagaagcgcctgatgtcatgaaaaaagccatgttgcttgccagcgacgaggcggcccttttcctgatggttcgctgcgcctcgatatgggtggccggattaccgccgacccaggctgcaggccagacggcgaagatgacctcggcagccactatcggcatcctgatcgacattgtcatatccgtcgtgttgaccttggcagccgagggcgcagggctgttttatctggctgcacgcctggccaagtacggcaagatcatcctcaacgcggtcaccggctttgtaaaagccgtgttcaatatcatcaaaggcttcatgggctatgtgagcaaatacgtcgcggtagcagctcgcggcgcagtatcagccactaaccaaggcgtcgcccaactacgttttgacggcaaaagaaacaccacagtcagaaccagtaaacgtctcgacgatgcagccagccaatccaggacacatgacggtaaaagtgcagcggcggcgcaggacacttgtgtcaacggttgcccggtttcaatggtgacaggggaagagctgctcaccctgaccgatgggcaactcgatggcctgctgccctttgaatggacgcgactgtatcgcaccagcgcggtagaaactgacagccgtctcggttatggctggagccatgcgttatcccatcgtcttcaacttgacgatgagggagtgctatggatcgacaatgaaaaccgccagacccgcttcccgatgccgaccgagcatcgccctgctatcaccaatagcttggccaaagcggcgatctatctcggcaatacgcccggcgagctgatcctgactcaagctggcaagcaaccacgcttctaccactttcgtgccgggcgcctgattactatcagcgacgcctacgacaaccagcttcaaatcacttacgaccttgtagatcgcgtgcagcggatcgacaacaacgccgggcgctctctgcttctgcgttatgaagatcgccatatcgtcgcagtggattatcagcagcaacggcccgactataccgatcagggcgaacggcaagatccttgggcgaccgtacagacattggtgacctaccagtacaacgtgaaaggtcagcttgtcagcgcaaccaccgcggcgggcgaaagcgagcactaccgttacaacgaacaaaacgtgatccaggagcgccagcttgctggaggcgcgagctttttctgggaatgggagaacgaaggcaagtcatcgcgaagcatccatcactgggccaacttttctcagatggactcgcgttacatatgggacgacgcaggccaggtcactgttctcaatgccgatggcagtgaacaggtttatgtacacgacgaaaatgcgcgcctcatcagtgaaaccacccctgatggagctgaaacgcaaaaagcttatgacgagaaaggccgactgatcgcggagaaagacccgctgggtgcgatcactgaataccgctatgacgaagacggactgctgatcgcgttgattccaccggaagacgaaccggtagcctacgaataccatcgcggcttcgtcagtgatgttcgtcggggtaaagcaacttggaaatatcagcgtaatgaacaaggcgacattaccgtccagaccgacccggacggcaacgaaacccattacagctatgacctgcgcggccgcttgctggagatccgtcaccccgacggcagccgtcatcaactgggctggaacggcctaggccaattgctcgaagagcgtctgcctgatggtggtcagcgtaaataccgttacgacgccctgggtcggcagatcacccgtcaggaagaaaccggcgccatcacccattaccaatgggacgcagccaaccgcctggcacaagccactctgcccggcggcgccacgcgtgctttctcctacaacgcctacggcaaagtcaccgccgagcgcgacgaactgggccgcatcacccgctacgaatacgccgacaacctgcatctggtcagccgccgtatcaacccggacggcagccagctgcgttatcgttacgacaacgcgcgcctgctgctcaccgagatcgaaaacgagcgcggcgagcactaccacctcgactactacagcaacggcctgatccagcgagaaaccggtttcgacggccgcagcaccgcctacgagtacgacctcaacggccagttactgaagaaaaccgaattcggcgacgacggcagcgagttgtccactgaataccaacgtgatgccgctggccgtctgctggtgaaaaccctggccgatggcagcgcgatccattaccgctacgacgccctcgggcgtctggtcagcgtcgacgacggccactggccgctggcttacgaatacgacttgcaggaccgcctgatcaccgagcatcagggctggggcacgctgcgttacgagtacgacactgtcggccaactgaaacactgccgcctgcctgacggcagtaagctcgattaccaccatcagcgtggtggccagctcggcagcatcgacctcaacggctcgcgcctgaccacccaccagttcagcgccggccgcgaacagcaacgccagcaaggtttgttgctaagtcagtatcagtacgacgaacaaggccgactgcaagcacacagcgtcagccaacaggatcgccacctgttccaccgccactacgcgtacgacgcaaacggcaatctggcaggcgtcaacgacagccgaaaaggcaaccgtagctatcattacgatccgctcgaccgcctgatcaacgtgcgtggcaccaccccggaaagcttcgcccatgatcccgcaggcaacctcctcggccaaggcgatcaaccggctgccaacctggccaacgtcaaaggcaaccgcctgctgatgcagggcgaccgccattacgattacgacgcctacggcaaccagatccgcgaacgccgcggcaccggacaaaagctcgtcaccgagtaccgctacgactgccagcaccgcctgatcggcgtcagcctgccgggcggaagcgtggcttcgtacaaatacgacgcctttggccggcgcatcgaaaagaccatcgatggccacatcaccgaatttctctggcaaggcgaacgcctgatcgccgaaagcgccgacaaccgttaccgcagctacatctacgagccgggcaccttccgaccgctggcgatgctggacggcgaaggccctctgaaagccgcaccgttctattaccagcttgaccacctcggcacgccgcaagaactcactgactacagcggcgagatcatgtggtcggccaaataccgggcttacggcaacctcgccaccctcgacatcgccgaaatcgaaaacccgctgcgcttccagggtcagtacttcgatgcggaaacgggcttacattacaaccggcatcgctattacaatccgggcactggacggtttttgaccccggacccgatcaagctggcgggtgggttgaacaactaccagtatgtgcctaacccgacggggtgggtggatccgttggggttgagtggagaatgtccagattcagaaaaaaacaaaatcccagttgaggaagcatccagtccatccaactcttacgacaactcggaagagctcagaccgcctgaatcaaatggcagaagatatgcagctggtaaacattatgtaaatccccaggacataaatttttcacagcgcggcgtacacggcaatgaatatgaagcaaaaatgtcacaaggtgattgggattggtcccgaccaggttccgctcttaacgtaatggaggttgacggtcaacttgtgtcttatgacaaccgaaggctaagagccgctagatctgtcggcttaaactcaatacctatacaaattgtactggccgaagatataatgccaggttcgaaaaaaacttgggagaaagcttttaaactcagaagagaagatagacgaaatcttctagatggtgagcctgtacctccaaaaggactaaacacactacctaaaattaatgaa

SEQ ID NO: 33232 - DNA, 3189 bp, Pseudomonas syringae
atgaacttctccaaattctttatttcacggccgatcttcgccgcagtgctgtcgctgctgatcctgatcgccggtgcaatctcgctgttccagttgccgatcagtgaatacccggaagtcgtgccgccgaccgtagtggtacgcgccagcttccccggcgccaaccccaaggtgatcggcgaaaccgtcgcttcgccgctggaacaggccatcaccggtgtcgagggcatgctctacatgtcgtcccaggccaccgccgacggcaaactgaccctgaccatcacctttgcgctgggcaccgagctggacaacgctcaagtgcaggtgcagaaccgcgtgacacggaccgagcccaagctgcccgaggaagtcacgcgtatcggcattaccgtggacaaggcctctcccgacctgaccatggttgttcacttgacctcgccggaccagcgctacgacatgctgtacctgtccaactacgccgtgctcaacatcaaggatgagctggcgcgactgggcggtgtcggtgatgtgcagttgttcggcatgggcgactactcgctgcgtgtctggctcgatccgaacaagaccgcctcacgcaacctgaccgccaccgacgtggtcaacgcaattcgcgaacaaaaccgtcaggtcgccgccggccagttgggctcgccgccttcgccgaatgccaccagttttcagatgtcgatcaacacccagggccgtctggtcagtgaggaagagtttgaaaacgtcgtggtccgcgccgggccagacggagaaattacccgcctgaaggacgtcgcacgtatcgagctgggttccagtcagtacgccctgcgctcgctgctcaataaccagcctgccgtggcaatgccgatctttcagcgcccaggctccaacgccatcgacatttccaacgatgtgcgggcacggatggccgagctgaaaaaaggcttccccgaaggcatggactacagcatcgtctatgacccgaccatctttgtgcgcggctccatcgaggcggtgatccatacactgttcgaagcactgattctggtggtgctggtggtggtgctgttcctgcagacctggcgcgcctcgatcatcccgctggtggctgtaccggtgtcactgatcggcaccttcgctgtgatgcacatgttcggcttctcgctgaacgcgctgtctttgttcggcctggtactggccatcggcatcgtggtagacgacgcgattgtggtggtcgagaacgtcgaacgtaacatcgagctggggcttgaaccggtcgaggcgacgcacaaggccatggctgaagtgacggggccgatcattgccacggcgctggtgttgtgcgcggtgtttgtaccggcagcgtttatttctggccttaccgggcagttttataaacagttcgcactgaccattgccatctcgacggtcatctcggcgttcaactcgctgaccctgtcgccggcgctggccgcggtattgcttaaagctcacgatgcacccaaggatcgcttctcgcgtttcctcgataaaatactcggaggctggctgttccgcccgttcaaccgcttctttgaaaaagccagccacggctatgtgggcaccgtcgcacgggtcattcgcagcagcggcatcgcgttgctggtctatgcggggctgatggttctgacctggctgggcttcgccagcacgccaaccggttttgtgccaagccaggacaagcaatatctggtggcatttgcccagttgccggacgccgcgagcctggaccgcaccgaggacgtgatcaagcgcatgtcggagctggcactcaagcagcccggtgtggaaaacgcgattgccttcccgggtctgtcgatcaacggcttcaccaacagcccgaacaacggcgtggtattcgtcgccctcaagcctttcgatgaacgcaaggacccaagcctgtcggccaacgccatcgccggtgccctgaacggccagtttgcgtcgattcaggaagcctacatggcgatcttcccgccaccgccggtacaagggctgggcaccattggcggcttccgcttgcagatcgaagaccgtggcaacctgggttacgacgagctgtacaaggaaacccagaacatcatcaccaaaagccgcagcgtgccggaactggccgggttgttcaccagctacacagtgaacgtgccgcaggtcgatgccgcgattgaccgagagaaggccaagacgcatggcgtggccgtcagcgatatcttcgacaccctgcaggtgtacctgggctcgctgtatgccaacgacttcaaccgtttcggccgcacttatcaggtcaacgtccaggctgagcagcagttccgtcaggatgccgatcagatcggtcagctcaaggtgcgcaacaatctgggagaaatgataccgctggcaaccttcgtcaaggtcagtgacaccgcaggtcccgaccgcgtgatgcactacaacggtttcattaccgccgagatcaacggcgcagccgcaccgggcttcagctctggccaggcgcagaccgcggtggaaaagctgctgcgtgaagaactgcccaacggcatggtctacgaatggaccgacctgacctatcagcagattctctcgggcaacaccgcgctgttcgtcttcccgctctgcgtgttgctggcgttcctggtgctggccgctcagtacgaaagctggagcctgccgctggcggtgatcctgatcgtaccgatgaccctgctctcggccattgccggggtgatcattgccggtagcgacaacaacatcttcacccagatcggcctgatcgtactggtggggcttgcgtgcaagaacgcgattctgatcgtcgagttcgccaaggacaaacaggccgagggcatgagcccgctggatgcagtgctggaagcctgccgcctgcgtctgcgtccgatcctgatgacctcgtttgccttcatcatgggtgtggtgccactggtactttccagcggtgccggtgccgagatgcgtcacgcgatgggggtcgcggtgttctccgggatgctcggcgtcaccttcttcggcttgctgctgacgccggtgttctacgtgctgatccgtaactacgttggacgtcaagaggcccgcaaggccgccaaggcgcaaaaactgcaaaacctgcctgcggagatgcat

SEQ ID NO: 33233 - DNA, 1626 bp, Pseudomonas syringae
atgagcgggcgccctctcctcacgcgcctgctgttcgccgctattactgtcaccctgctcggctgttcgcctccgagccaggacagccaggctggcaagacactcaaggtcacttttttcagagacaacaccacgctggtcagccttgacccgttccaggtgtactggctggagcaccgggtggtgctgcgtaacgtcgccgagtcgctgaccgatcaggacccgcagaccggcaacatcattccctggctggcagaacgctgggacgtcagtgacaacgcgctggagtacacctttcacttgcgcaaggacgtgacgttcagcaatggcacgcgcttcgatgcccaggccgtaaagaccgcctatgacaccaacaaggcgttcgccgaccagttgccggccacctttggcgcgacctacctgaagggctacgaccacgctcaagtgctggatgacttcaccgtcaagctggtgctggccaaacccaatgccgggttcctgcaagccacctccaccaccaacctcgccatactcgctccgcagtcctacgcactcagcgtcaaggagcgttcattgggcgcgatcatcggcaccgggccgttcgtgctggagcgctacaccccggagagcggcctgcgtctgaccaagcgcaagggctatgcctggccatcagccaacgcacaaaacaagggcgaggcgcatctggatgcagtcgacgtcagctatgtgccggaagaaagtgtgcgcaacggccagttcgttcagggccaggtggatattctctggccgcgcaccccgttttccgaggtcgatctgaacctgttcaaatccaggggcgcgaccatccagagccgttcgctgccagggccggccctgaacatgtaccccaacacccgtggcaatcgcatcctcgccgaccgcaacgtgcgtctggccctgcaaaaggccattgaccgcaaaacctatgcagccacggtttacaacccgcagttcccggtggtttcgggcatctacgatgtcaccacaccgttttacaaaaaccaggctgacaaactggcctacgaccctaaaggggccgaacgcctgctcgacgaggctggttgggcgaaaaacgccgacggctatcgctacaaggacggcaagcgcctgaaactggcttacaacctgtcgcccgccgaaaccgctggtgacgtgctgatccaggatcaactgcgcaaggtcggtatcgagctcaagctcaacgtggtcaccaccgccgagtgggccgcgaacaatgccgcaggcaactacgacctgacctacaactacatgacccgcgccgacccgatcatcctgcagacaatcatcgacccgcgcagcgccaacagctcgacgctggccaccaacctttacgcaccgcaaacgctgccaaaggccctggaactgttcgatgccgggctgaccgccacgcgcagcgagcagcgcgcaaaagcctatggcgacttgcaggatttgctgatcgacgaaggttcggcattcccggtctatgagcgggtctggcaagccgccactgcaaaaaacgtgcgtaacttccactggaccgccgaagggttcgcgctgttcaacgacatcgagatcgcagcgcca

SEQ ID NO: 33234 - DNA, 681 bp, Pseudomonas syringae
atgtatcgattagtatttaagtgcttacccgtattcaagctcctggaggagatcgacatggcacaaatgggacgtccgcgcacgtttgaccgtgacgtggcaattactcaggcaatgcacctgttctgggagcatggatacgatgcgacatcccttagccagctcaaggccaacattggcgggggcatcaccgcgcccagcttttacgccgctttcggttcaaaacaggcgctgttcactgaggtcatggagcgctacctcactacccacggccgagtcaccgacagcctgtttgatacgaccctgccgcctagagaggcgattgaacttacccttcgccggtccgcgaaaatgcaatgtgagcccgatcaccccaagggatgtctggtatcgttaggcctgatgagcgcttgctcggaggaaagcaaggccatctccgcgcctctggcacaggcgaggaatctgaaccgtgcaggtctgatagcgtgcatcgaccgcgccattgcctcaggcgaattgcctgctacggtgataccggagacgttcgccgccgtgttcgacagctttatgctcggtttgtcgacactggcacgcgacggtgtcgcgcatgccacgctggatagcgcagtgactcaggtgatggggctgtgggacagcctgcgtgtcgttgccgacgatcag

SEQ ID NO: 33235 - DNA, 315 bp, Pseudomonas syringae
atgtactggtcagaaacccaaggcaccgacctgcccgaaggcaaatgcctggtggtcaaactcggcgctgaagtgtgcgatctgtccgaggacatgcgttgcgtgctggaagtcggcactgcaaaaatcatccagcgcatcagcgcctgtgtcgaaatgggtgtatccgacggcagcattcaccccgaaggcgatcatcagggtttcgcagaatcgctttatcaactctggcttggcgcttccctgctggtgaaggtcaacaagtccaccgagtctttcgataaagcgttgaacatgaccaagcgcctgctcaag

SEQ ID NO: 33236 - DNA, 891 bp, Pseudomonas syringae
ttggcttgcggcctgctcacgctgctggcgagcgccgctcaggctgcgcccatcgacatcgatgacggccagcacaaggtgcatctgccagacacccccaagcgcgtggtggtactggaattttcgtttctcgacgggcttgcttcggttggcgtgacaccggtcggcgccgcagatgatggcgacgccagtcgtgtactgcccaaggtgcgcaaggccgtgggtgaatggcagtcggtggggctgcgctcgcaacccaatatcgaagtgatcgcacggctcaagccggacctgatcatcgctgacctcggtcgtcatcaggctctttataacgacctggccagcctggctccgacgctgatgttgccgtcacgcggcgaggactatcagggcagcctgaaatctgccgggctgatcggcatggcgctgggcaaaggcccggagatgcaggcgcgaatcgcagaaaaccgtcagcacctgaaaaccgttgccgagcagattcctgccgacagcaacgtgctgttcggcgttgcccgtgaagacagtttctcggtccacggcccgcactcctacgcaggcagcgtgctgcaagccatcggtttgcaagtaccggaagtgcgcaacaacgccgcgcccaccgagttcgtcagcctggagcaactgctcgccctggaccccaactggttgctggtcggccattatcgtcgcccgagcattgtcgacacctggagcaagcagccgctgtggcaggtgctcggcgctgtacgtaataaacaggtggccgaagtcgacggtgatagctgggcgcgcaatcgcggaatcatggcgtccgagcagatcgctgacgatgcgcttgccgtactcaagggcggcaaggccgtgctgaaccct

SEQ ID NO: 33237 - DNA, 807 bp, Pseudomonas syringae
atgtggtcattgcgcaattggcgcaggcgacgaaccctcgccaggcatccggttgctgaagaactgtggcagcaggtgcgcaagcgtctgccgatcctcgatggcttaagtaccgagcaggacgcacacctgcgcgacgcctgcgtgctgtttctgaacgacaaacacctgagcgcgctgccgggtgtagagctggacgacgaacaaaggctgtttctcgccgcgcaagcgcaattgccgctgctcagcctgggcgaactgaactggtatcagggctttcacgagatcgtgctgtaccccgacgacttcgtcagcccgcagcgccatcgcgatgcaagtggcgtggaacatgagtgggatggcgaacacagcggcgaggcatggctgcaaggcccggtgattctggcctggccgggcgtgctgagcagcggcgactgggacggctacaacctggtcatccacgaactggcgcacaagctcgacatgctcaacggcgacgccaacggcctgccaccgctgcacagcgacatgcgggtgaccgactgggccagcgtcatgcaaagcgcattcgacgacctcaaccggcagctggatcaggacccggatgcacaaaccgtcatcgacccctatgccgcacaagaccctggcgagtttttcgccgtgaccagcgagtacttcttcagcgcacccgacctgctgcacgaaagctacccggcggtctacgcacaacttcaggcgttctaccgtcaggacaccctcgcgcggctaaatgcgttgcgtcatcaggacccggcttatcgggaccac

SEQ ID NO: 33238 - DNA, 987 bp, Pseudomonas syringae
atgcgccgctggctgatggcgggcgtgattgccgcgacctgcctgggactgttctgggtgtcgctgttcgccttgtcgtcgttcagcattcgccagatagatgcctggaacgggctgttcacgcagggtcgcgagggtggcaatatcgcgtatatcgtcgcgcaactgcgggtgccgcgtgccttgtgcgcagcattggtgggcgcgtgcctcggtgtcgccggggcgttgatgcaaggcatcacgcgcaaccgtctggcctcgccgtccttgtttggcgtcacggcaggcgcggcgttgggtctggcgctgttttccaccgggctggtcgcgctgccctttgccggtggcgcactgttgatgacctgcatcggcggcgcactggcgtggattaccgtgttcagcctcggtggcgcatggtcgccgaccaccgcgcaagggcgactggtgctggcgggtgtcgccgttgcggcgctgtgcgcagcattgactcgcctcacggtgattctggtcgaagcccaggcgcagagtgtcctcaactggctggccggctcactggccaatgtcggtgccgagcaactgcaactgctctggccctgcacgctgatcggcctggtgttggcgattgcctgtgcgccacgtctgaacctgatcaacctgggtgaagacgccgcccgttcgctgggcgtgcgtatcggcgccctgcggctgctggtgtttgtggtcagcctgctgctggtcggtgccagcgtctgtgcagttgggccgattgcctttgtcggcctgatcgcaccaaacatcgctcgccaatggctgggcaatgactaccgctggctggtcccgatcagtgccggtctgggcgcggccattgtattggcttccgacctgatcagccgcgccgtggcgtttccggtagagacaccggctggcgtggtgacagcgttgatcggcgcgccgttctttctgtttctggcgaggcgtgcgcta

SEQ ID NO: 33239 - DNA, 966 bp, Pseudomonas syringae
atgaaccagcctcgttcccggctgttattgctgatcatgttgctggcactggcgctgttgttgagcctcagcgcgggtaccgtgtggcttaagcctggcgcggtgcttgatcacttgattgctcacgacagcaaagactttgaagtatggaatcatcgcctgccacgcggcctgatcgcgatcatgaccggctgtgcgctcggcctggcgggcgccatcgtgcaaggcgtgattcgcaacccgctggcctcgccggaaatcctgggtgtgacccagggcgcgggactggcgctgaccatcgccattatcggcctgccgcaattgcccgtggctgcgctgccgtttgtggcatgtctgggcggtgcggcgggcgcattgctgctggctttgtacaacaccggcgtgcagttttccgggatgcgttttgcgctgtccggggtggcgattgcggtcactctgtcgagcatcaccgagttcctgatcctgtccaatccactggacatcaacaccgcgctgctggccttgaccggcagtttgtggagccgcaactggcaccacgtcttgctggccacaccgcttttgctgctgatcccgctcagtatgctgctggccaaaccactgaacctgatcggccttggcgatgaggcagcacagagcctgggcacaagcctgaaacgtattcgctggctggcgatgggcagtgccgtgctgctgaccagcctgggcgtgggcattatcgggccggtgagttttgtcgggctggtcgcgccgcacatggctcgccgtctggttggcggtcatcatcaatacctgctgcccgcgtcgatggtgctgggcgcgctattgctggtgctggccgatacgctgggccgcacgctgatcgcgcccagcgagatccctgccgggattctcaccgccgtgatcggcgctccgtattttctctggctgctggcccgattcaaaggt

SEQ ID NO: 33240 - DNA, 789 bp, Pseudomonas syringae
atgagcattctgaaggcgcagcacctcgacatcggctacggcgcaacgcggatcgtgcaggacctgtcattcagcccgcccgcggggcaggtcacggcgttgatcggccccaacggctgcggcaaatccacgctgctcaaggcgttcgcgcggatcctcaccccgcagtcgggcagcctgagcctggacggtaaaggctacagccagctgtcggccagggagctggcctgcaaggtggcgtttttgccgcaagtgctgccgattcccgaaggcgtcaacgtgcgccaactggtggcttacggccgcagcccgcacaacagtttgtgggggcgtttgagcggggccgatcagcacagtgtcgatcaggcgttgcagcgcatggaactggctaccctggccgaacgcccgctgtccgatttgtccggcgggcagcggcagcgcgcctggctggcgatgattctcgcgcaggacgcagccatcgttttgctcgatgaaccgaccacctacctggacatcagccatcaggtcgaactgctggacctgatgcgcgagcttagcgctgaaggcaaaaccgtgattaccgtgctccatgacatcaatcaggcctgccgctacgccgaccatctggcggtgatgcagggcggacgtctggtgacctgcggcgcgccgggtgatgtgctgaccgccgagctggtgtgtcaggtgttcgacgtgcacgtgcagatcatgcgcgagccggtggccggcacgccgatgtgcattgtcgaacgcagcacccgctgcaccagt

SEQ ID NO: 33241 - DNA, 651 bp, Pseudomonas syringae
atgacgttgctggtgattttctcgctggtgacctgggcgctgctgctcggcaaaactcttcagcactggcgactgagccgtcagaaccggcgctactcgacgcaattctgggccgcccgcgacctgaaaaatgcgctgcacctgccgcacagtgaaggcagcctggcacgcctgaccgacgcaggcgcgcaggccctcgcaacgccgcacgactcgccggacctgggccacagctggaatcgtcaggacctgctggagcgcagcctgcgccagcagatccacaaggagcgtcgtcgcctggagagcggcatgatcctgctggcctcgatcggcagcacagcgccttttatcggtctgttcggcaccgtcttcggaatcattcacgcactcacagcgatcagccaggccaagtcagcgagcattgcggtggttgcagggcccatcggtgaagccttggtggcgaccggcgtcggtatcgccgtcgccgtgcccgccgtgctggcctacaactttttcggacgacgcatgaagctggtgatcgccgacctggaggagttcgccgtggactttctcaacctctcgcagcgcaacgccttccggttgcaacccgagggtcgcgacaaggcagcacctaacctgaaaggagtgagc

SEQ ID NO: 33242 - DNA, 1011 bp, Pseudomonas syringae
atgaaagccatcgcgtactaccagtctctgccgatcagcgacgcccaggcattgcaggacatcgaactgcccgagccagtggctggcgctcgtgatctgctggtcgaggtcaaggcgatctccgtcaacccggtggacaccaagatccgtcagaacgtccagccggaagacggcgcagccaaggtgttgggctgggatgtggcgggcgtcgtgaaagcggtcggcagtcaggtcacactgttcaagccaggcgacaaggtgttctatgccgggtccctgacccgaccgggtggcaacagcgagctgcatgtggtggacgagcgcatcgtcggccacatgcccaagaccctgagttttgctcatgcggcggcgctgccgttgaccgcgatcacggcctgggagctgttgttcgagcgcctgcaggttgcgcagcgcaaaggcgaaggttcgcaaagcctgctgattgtcggcgcggccggtggcgtggggtcgatcctgacgcaactggcgcgacaactgacctcgctgaaagtcatcggcaccgcgtcgcgagccgaaaccgaaagctgggttcgcgaactgggcgcgcatgaggtactggaccacagcaagccgttgagcgaagagctcaaacgcgtcggccttgaccaggtgacccatgtggccagcctgacccagaccgagcagcatctggaccaattggtcgaggcgctcaggccacaaggcaagctgggcctgattgatgatccgaaggcgcttgacgtgtcaaagctcaagcgcaagagcctgtcgctgcactgggagttcatgtacacgcggtcgatgtttgaaaccgaggacatgatcgaacaacacaacctgctcaaccgggtggccgagctgattgacgccggtacgctgaaaaccacgttcggtgaacacttcggcaccatcaacgccgaaaacctgcgtcgtgctcacgccatgctggaaagcggcaaggccaaaggcaaggttgtgcttgaagggttc

SEQ ID NO: 33243 - DNA, 1194 bp, Pseudomonas syringae
atgaatctacgaacgatccttatcctcggctcactgagcgcttttggccctctggccatcgacttttatcttcccggctttccggccatggcctcgtatttcggcaccgatgaaaaacacgtgcagttgaccctggccgcctattttctggggctgtcgctggggcaactggcttacggtccagtggctgaccgctttggccggcggatcccgatgctggtcggcgtgacgctgttcatgctcgcgtcggtggcttgcgcctttgcgccaagcctcgaatggctgatcggtgcacgcttcattcaggcgctgggaggctgtgccgggatggttctgtcgcgggcgatcgtcagcgacaagtgcaatgcggtcgagtccgccaaggtcttttcgcaactgatgctggtcatggggcttgcgccgattctggcgccgatgctgggcggtgtactggtcagcaccttcggctggcaatcgatctttgccagcctcgcgctgttcagtgctgcctgtctgactgcggttgcgctgtggctgccggaaagcatgccggccagcacgcctcgccaaccgttgaacggcgcgttgcgccagtacgtcaatctgctgcaagaccgcgttttcatcggtcatgccctgacgggcggcatcgcgatggcaggtatgttcgcttacgtcgccgggtcgccgttcgtgttcatcaagctgtatggcgtgccggcagagcattatggctggctgttcgggatgaatgcggcgggcttcattctggttgcgcagatcaacgcccgtattctgcgcaagacgggccctgcgtttttgctgtcacgcacggtctggatctacctggcggcagcgctggttttgctcgcgatcaccgggctgcgtaccgaagcactgtggccgctgctggtgccgctgttcatttgtgtggcgagcctgggttgcatcatccccaatgcgtctgcctgtgccatgaatggccagtgggctcgcgccggcagtgcgtcggctttgttgggttgcctgcaattcagcgtcgccgccgtggcggccagtctggtcggcgtgctgcatgacggcaccgccacaccgatggcgctggtgatcagcctgtgcggcgtgctgaccgtgagcatttcggtgctgacacgccgtgcccaggccaggcgcgatgttctggcccagacggcc

SEQ ID NO: 33244 - DNA, 2244 bp, Pseudomonas syringae
gtggcaaggttgatccttgcaggcattcagtctcagggagtgttacagatgcaagacatcaccaccttcgacctgccgatcagcggtatgacctgtgccagttgcgcaggtcgggtcgagcgtgccctggccaaagtgccgggggtcaacagtgtgacggtcaacctcgccaatgaacgcgcgcacgtcagcgttgcgccgcaaaccgatccgcacaccctgatttcagccgtcacccgcgccggttatggcgcaacactgattcaggaccggcaggccgacgccgagaaaaaaatccagcatctgcaccgagagcgctgggccttgctgctggccattgcgctggcgttaccactgatcgcgccgatgctcctgacgccgctgggcgtgcactggatgctgcccgcatgggcgcagttcgcactggcgacaccggtgcagttcattctgggcgcgcggttttatctggccgcatggaaagcagtgcgcgcgggcgcaggtaacatggacctgctggtcgccatcggcaccagcgcgggttatggcctgagcgtctatcaatggctgcatgccgcaccgggcactacgccgcatctgtattttgaagcatcggcggtggtcatcgccttggtgctgctgggcaagtacctggaaagccgcgccaaacgccagaccgccagcgccattcgcgccctggaagcattgcgcccggaccgcgccctgcggctgattgacggcattgagcaagacgtcgcgatcagcgagcttcggcttggcgacgcggtgctggtcaagccaggtgaacgctttccagtggacggcgaagtgctcgagggccgcagccacgccgacgaagcgttgattaccggtgaaagtctcccggtggccaaacagccgggtgacaaggtcaccggcggtgcaatcaatggcgaaggtcgcttgctgattcgtactgccgcgctgggtgcggaaacggtgctggcgcgcatcattcgtctggtcgaagacgcacaggcaggcaaggcaccgatccagaaactggtggataaagtcagccaggtgtttgtgccgaccgtgctggttatcgccttcttcacattggcgggctggctgctggtcggtgcatcgctggaagtggcactgatcaacgccgtcgcggtgctggtgatcgcctgcccctgctcgctgggcctcgcgacgccgacagcgattatggccggaacgggtgtggcggcgcgctacggcattctgatcaaggacgcagaagccctggagcgcgcccatgatgtggacgccgtggtgttcgacaagaccggcacgctgacgtccggcaccccgcgcatcaccaacatgagcgccgtgctgggcaatgaagagcacttgctgcaactggcgggcgcactgcaacgcggcagcgaacatccgttagccaaggccgtgctggacgtctgcgatgaatggcaactgacactcgacccggtcgaaaacagccacgccctgagtggccgagggatcgccggcacggttcagggccgcgaactggcgctgggcaatcggcgcttgctggacgaaagcggcctgccgatgggcgatctggccgaatccgcacgcatctgggaagccgacgggcgcacgctgtcctggctgatcgagcaggctccagagccgaaagtgatcggcatgtttgcgtttggggacacgctcaagcccggcactgatcaggcaataagggcgctgaatgcgcgcggcatcaccagccatttgctgaccggcgataaccgcggcagcgcgcagatggttgccagggcgctggggatacacgacgtacacgccgaggtgctgcctgccgacaaggccgataccgtgatgcggctgaaaagcaaccatgtggtggccatggtcggtgacggcatcaacgatgcaccggcgctggcggcggctgacgtgggcattgcgatgggcggcgggactgatgtcgcgatgcatgccgcaggcattacattgatgcgcggcgacccgcgactggtgccggctgcgctggacatcagccaacggacctacgcgaagatccgccagaacctgttctgggcgttcgtctataacctgatcggcatcccgcttgcggcgctgggctatctcaacccggtactggcgggcgcggccatggcactgtccagcgtcagcgtggtgggcaacgccctgctgttgaaaacctggaagccgcgtaatctggaggacaaacca

SEQ ID NO: 33245 - DNA, 885 bp, Pseudomonas syringae
atgatcgcgagctatcaagcgcaaagccagactcgcgtcaatgcagcactcgaaggcttgtttcaggcaccgagccctgagctgagccgcctctacgaggccatgcgttacagcgtgatgaacggtggcaaacgtgtgcgcccgctgctggcctacgccgcctgtgaagcactgggcggcgtggccgaagatgccaatggcgcggcctgtgcggtcgagctgatccatgcttactcactggtgcacgacgatttgccggcgatggacgatgacgacctgcgtcgcggccagccgaccacccataaggcgttcgatgaggcctgcgcgatcctcgccggtgacggcctgcaaagcctcgctttcaccgccttgctcgccccgcacctgagctcgcgtaacgccgcaacccgattgcagatggtcagcacactggccgctgccgcaggtccggccggaatggtgggcggacaggccatcgatctgggttcggtaggactaaagctggatcaggctgcgctggaatacatgcaccgtcacaagaccggcgcgttgatcgaagccagtgttcggctcggagccctggccagcggtcaggccgatcaggcgcggctcgatgccctgcaggtctatgcacgtgcggtcggtctggcctttcaggttcaagacgacattctcgacgtcgaaagcgataccgcgaccctcggcaagcgccagggtgccgacatcgcccgcgacaaaccgacctaccccgcactgctgggcctggacgcggccaagggctatgccctggaattgcgcgatcaggcgctcgctgcgctgagtcttttcgacaccacggcagagccgttgcgcgagttggcgcggtacatcgtcgagcgccgtcac

SEQ ID NO: 33246 - DNA, 963 bp, Pseudomonas syringae
atgggagagttcgagctgatccgcaattacttcgccgccgcgccctgtgcgcaggcgggtgaagaggttgtattggggatcggcgacgattgcgcgctgctggcgttaccgcccggtgagcagttggcgatctcgaccgatacgctggtggccgatgtgcattttccggccgtctgcgacccctttctgcttggtcagcgtgcattggccgtctctgccagtgatctggcggccatgggcgctcgtcccgttgcattcacccttgccctgaccttgccgcatgtcgatgccgactggttgcagcgctttgctcacggtttgagcctgatggcgcaaggctgttcgttgcgcctgatcggtggtgacaccacgcgcggtccgttgagcctgaccctgaccgtgttcggtgctgtaccctcagggcttgcgttgacacgtagcggcgctcgcgtaggtgacctgttatgtgtcggcggtgcgctgggcgatggtgcagctgcgttgcccctggtgttgaatcaacgcagcgccgaggcttcgattgccgaaccgttgctggcgcgctactggtcgccacaaccgcaattggcgctgggtcaggcattgcgcggcaaggcgacgtcggcgctggatatctccgatggcttgctcgcggactgcgggcacatcgcccgtgcttcgggggtacgtctgttgatcgagcgcgacgggctgccaatgtcgccgcacctgctcgcgttgttcgacctgcaggccgcgcaacaggcggcgcttagcggcggtgatgattacgtgctggcctttacgctgccgccagaacatctggctgggttgctcgacgccggctggccggtgcatgtgatcggccgggtcgaggctggaaatgacgtggttctgatcgaccatgccggagccgacatcacccccgatacccgtggctaccagcattttggcggcccacag

SEQ ID NO: 33247 - DNA, 1182 bp, Pseudomonas syringae
atgctcaccgcagcacttgaaggtctgatcgagcgcttcaacctgcacgggctgcgcatgggtgaagtcgcgacgggcgcggtgctcaagcactccagagacttcaacctgacccgcgaatgcgtgctcggctcgcggctgtccgcgcagactcccgcttacgacattcagcaggcctgcggcacggggctggaagccgcattgctggtggccaacaagatcgcgctagggcagatcgagtgcggcattgccggcggcgtggacactacgtcggatgcgccaatcggcgtcaatgaagggctgcgcgccattctgttgcaggtcaaccgctgcaagacccccgctgacaagttcaaggcgttgctgcagttgcgcccgcatcacctcaagccggagctgccgcgcaacggtgagccgcgcacggggttgtcgatgggccagcattgcgaactgatggcacagacttggggcatcgagcgttcaacgcaggatcaactggcgctggaaagccatttgaaaatggccgccgcttacgctgagggctggcaggatgatctgatgacgccgtacctggggctgatccgcgacaataacctgcgcccggacctgacgctggagaaactggccagcctcaaaccggccttcgagcgcagcgccaaaggcacgttgtcggcaggcaattcgacaccgctgaccgatggtgcgtcggtggtgttgctggccagtgaagactgggctcgcgaacgtggtttgccggtgctggcttactggcgcgatggcgaggcagcagcggtggacttcgtcaaaggcacggaaggcttgctgatggcgccggtctacgccgttccgcgtctgctggcccgcaacgggcttacgcttcaggattttgattactacgaaatccacgaagcgttcgccgcgcaagtgctgtgcacgctcaaggcctgggaagacgccgattactgcaagacccgcctggggcttgatgcgccgcttgggtcgattgaccgcagcaaaatgaacgtcaaaggcagctcactggccgcgggccacccctttgctgctaccggaggccgcatcgtcgccaacctggccaaactgctggcggcggcgggcagcggacggggcctgatctcgatctgcgcagcaggcggacagggcgtgacggcgattcttgagcgt

SEQ ID NO: 33248 - DNA, 495 bp, Pseudomonas syringae
gtgatttccgacgacaccgaccagttcaacccgcgcgacgccaaatcgccggaaatcgccaagggcaagagcgccaaacgtcgcgaagcgcgtcagatggcaactcaggccctgtaccaacggcacatggctggccacgcgctgaacgaaatcgaagcccagttccgtgtcgataatgacttcagtaacgttgacggcacttacttccgtgagctgctgcacggcgtggcaatcaaccagaccgagatcgacactgctctgacgccttgccttgatctgaccatcgaagaactcgatccgattgagctggcgatattgcgcctgtccaccttcgaactgctcaagcgcatcgacgtgccttaccgcgttgtgatcaacgaaggcatcgaactggccaaagtctacggctccactgacggccacaagttcgtcaatggcgtgctggacaagcttgcaccgcgcctgcgtgaagtcgaagtgaaggctcacaagcgc

SEQ ID NO: 33249 - DNA, 1089 bp, Pseudomonas syringae
gtggcgctcaataatatcgaagaactggttgaagacatccgccagggcaagatggtcatcctcatggatgacgaagaccgcgagaacgaaggcgacctgatcatggccgccgaatgcgtcaagcctgagcacatcaacttcatggcgcgtttcgcccgtggcctgatctgcatgccgatgacccgcgagcgctgcgaaaccctcaagctgccgctgatggcgccgcgcaacggctccggtttcggcaccaagttcaccgtctccatcgaagctgccgaaggcgtgaccaccggtatttccgcagccgaccgtgcgcgtaccgtgcaggccgccgctgccaaagaagccaaagccgaagacatcgtcagcccggggcacatcttcccgctgatggctcaggccggtggcactctggctcgcgccgggcataccgaagcggcgtgcgatctggcgcgcatggccgggttcgagccgacggggctgatctgcgaagtcatgaacgacgacggcaccatgtcgcgtcgcgccgaacttgaagaatttaccctgcaacacgacatcaagatcggcaccatcgccgacttgatccactaccggatgatccacgaacgtaccgttcagcggattgccgagcagccgatggacagcgaactgggcagtttcaacctggtgacctaccgtgattcggtcgagggcgatgtgcatctggcgctgaccctgggcaagatctgcgcagaagagccgaccctcgtacgcgtccacaatatggacccgttgcgcgacctgctgatggtcaaacagcccggccgctggagcctgcgcgccgccatgcgtgcggttagcgaggcgggcagcggtgttgtgctgttgcttggtcaccccctggatggcgatgtattgctggctcatatccgcgaaaccgcagggcagcaaccgatcaagacgccgaccacttacagcacggtgggtgccggttcgcagatccttcgtgacctcggtgtgcgcaaaatgcgcctgatgagttcgccaatgaagttcaatgcgatatccggtttcgatctggaagttgtagaatacgtgccctccgaa

SEQ ID NO: 33250 - DNA, 660 bp, Pseudomonas syringae
atgtttactggcatcatcgaatccatcggcagcatccgcgccctgactcccaagggtggcgacgtccgcgtttacgtggaaaccggcaagctcgacctgagcgacgtcaaactcggcgacagcattgccgtcaatggcgtatgcctgaccgctgtcgaattgcccggcgacggcttctgggctgacgtcagtcgtgaaaccctgaccgtgactgcctttgtcgatttgaagagcggcagccgggtcaatctggaaaaagccctgacgccgaccacgcgtcttggcggtcacctggtcagcggccatgtcgacggcgtcggtgaaatcgtcgcccgtgccgataacgcccgcgccatccagtttacggtgcgtgcgccgcgcgagctggccaaatacatcgcccataaaggctcgatcaccgttgacggcaccagcctgacggtcaactcggtcaatggcgccgagttcgaactgaccatcgtgccgcacaccctcagcgaaaccatcatggccgactacctgcctggccgtaaggtcaacctggaagtggacctgctggcgcgctatctggagcgtctgttgctgggcgacaaggcagcagaaccgggtcacggcacgatcaccgaaagctttctggccgagaccggctacctcaaatcc

SEQ ID NO: 33251 - DNA, 1134 bp, Pseudomonas syringae
gtgttgactgaacaggcagccctcgacgttcattacatggcccatgcgctggaactggcgcgcaagggcctttattcgacacaccccaacccgcgagtcggttgcgtgatcgtgcgtgacggccagattgtcggtcagggctggcatgcgcgggctggcgagccgcacgccgaagtgcacgcgctgcgcgaggccggggagcttgcccggggcgcaaccgcctacgtcacacttgaaccgtgcagccatcagggacgcaccccgccgtgcgccgatgcactgatcagcgccgggctggcgcgggtcgttgcggcaatgcaggaccccaatccgcaagtggccggcagcgggcttttgcgcctgatgactgccggtatcagcgttcagtgcggcgtactggaaggcgaggcgcgagcgctgaacaaaggttttatcaagcgcatggaaaccggacggccctatgtgcgggtcaagatggccatgagcctggatggcagaacggccatggccagcggtgaaagccagtggatcaccggccccgaggcgcgttctgcggttcagcgcctgcgcgcccaatcgagcgtggtgctgaccggtgccgatacggtgctggccgacaaggcacgcctgaccgtgcgccctgacgagctggggctcaatgccgaactcactgcgctggcggctgcgtgtccgcccctgcgcgtattgatcgacggacggctgcgcgtgccattggatacgccgttctttcaggcgggcagtgcgctggtcgtgacctgcgccgcggcgtcggcgcggggtcgttatcaggaagacggtcacgagatgctggcgctggccgacagcgccggtcatgttgacctgcgcaggttgatgggcgaactgggcgcgcggggcgtcaacgaggtgctggtcgaagccggtccgcgtctggccggtgccttcacgcgtctcgggctggtcgacgaatttcagctattcattgcaggcaagtttctcggttcgtcggcccggccgctgctcgatctgcccctggcgcagatgagtgaagcgctggagctgaacatcattgaaatgcgagccgtcggcaatgactggcgagtcattgctctccctgtcagtgcacccggcgta

SEQ ID NO: 33252 - DNA, 1392 bp, Pseudomonas syringae
atggcgagcttttcccattctgtcggtgcgcagacgtaccgcttcgacagcctcaaagaagtcatggccaaggccagccccgcgcgttccggtgattatctggccgaagtcgcggcgcaaaatgatgccgagcgggttgccgcgcaaatggcgctggccaatattccccttaagcattttcttgaagaagctctgatcccttacgaacaggacgaagtcacccgcctgatcatcgacacccacgacaaactgaccttcgcgccggtcagccacctgaccgtcggcggttttcgtgactggttgctcagcgatcaggccgacgaaaccagcctgcgcgcgctggcgccgggcctgacgcccgagatggcggctgccgtttcaaaaatcatgcgcgtgcaggatctgatcctggtggcgcagaagatccgcgtcgtcacccgctttcgcaacaccatgggcctgcgtggccggctgtctacccgtttgcaacctaatcacccgactgacgacccatccgggattgccgccagcgtgctggacggcctgctgtacggcaacggcgatgccatgatcggcatcaacccggctaccgacagcacctcaagcatcgtcgcgctgctggagatgctcgacgccatcatccagcgctatgacatcccgacccagtcctgcgtgctgacccacgtcaccacctccatcgaggtgatcaaccgtggcgtgccggtcgatctggtcttccagtcgatcaccggtacggaagccgccaacgccagcttcggcatcaacctcaagctgctgcaggaaggctatgaagcagggctgagcctgaaccgcggtaccctcgggcaaaacctgatgtatttcgagaccggtcagggcagcgcgctctcggccaacgcccatcacggcgtcgaccaacagacctgcgaaacccgcgcctacgccgtcgcccggcatttcaacccgtttctggtcaataccgtggtcggtttcatcggcccggagtacctgtacaacggcaagcagatcattcgcgccggcctggaggatcatttctgcggcaagttgctgggcgtgccgatgggctgcgacatctgttacaccaaccacgccgaagccgatcaggacgacatggacaccctgctgacactgctgggcgtcgccggcatcaatttcatcatgggcatccccggctccgacgacatcatgctcaactaccagaccacctcgttccacgacgcgctatacgcccgccagagcctgggcctgcgtccggcaccggaatacgaagcctggctggagaaaatgggcatcttcactcagacagacggccgcgttcgcttcggtgacagcctgccgcctgcctttcgtcaggcactggcgcacctcgca

SEQ ID NO: 33253 - DNA, 684 bp, Pseudomonas syringae
atgaacaagcatctgctacgcgcatctcttgccgcgcttgccctcacagccccgctcgcggcgaacgcctacgagaaaggcgacttcatcgttcgcgccggtgccgcccacgtccagcccaacgaagacagcggtgaagtccgcctggacggtgccaaggtttccggcaccaaatcgacgctggatggcgatactcagctgggcctgaccttcgcttacatgctcaccaaccatatcggcatcgagctgctggctgccacgccgttcaaccacaccgtatccgtcaagggcctgggccccgggcttgacggcaagctggccgatgtcaaacatctgccgccaaccctgtcgctgcaatactacccgatggagccttcgtccagattccagccgtatgcgggcgtgggcatcaactacaccaccttcttcgacaatgacctgaccagcgatcgcaagagtcaaggtttcagcaacctcaaactcaaggactcggtcggcctggccgcccagttgggcatggactacatgatcaccgacaacgtactggtcaacgcctcggtctggtacgtggatatcaacaccgaagcgacagtggacggcccttctgctttggcagtcggccagaccaaggtcgatgttgacatcgacccgtgggtgtacatggtcggtgtgggttacaagttc

SEQ ID NO: 33254 - DNA, 1875 bp, Pseudomonas syringae
gtgggcgactttctcgccctgtcgtttgtgtggatcggctcgttcgcggtactgacgaccctcggacgcttcctcgccgttcgcctgtgccggaccaactttatccatgttcgcgagcgcagccaggcgctgctcaaatacgtcttgccgttcacattgccggcgatcatctgcctgcctttgaccctgtatgtcagtcacttcatgccggcatcggtcggccgtgcgctggcgctgtgttttgcctacgcgaccagcagcggcatcgtgtccacctcggtgctgctctgcgtgatcgtgatgttcaactccgggcacaagcgcgctgcggtgcgcatgatccgccgctacgcgccaaggcccttgtttgtggtcggctttctggcggcgctgagcgatgcactgaccagcccgcagatcgcccgtcaactgggcagtaacgttaccaccagcgttgcagtgttcaccgggctgttcgcctcggtggtgttctgcatgctgatcatcaaggtacgtcgcccggtcgcgcacctgatccgtaaccgctcgttgggcagccgcttgcaacgacctgcactgcaacagtcgctgaagatattctccaatctgtggcacctgccgattctgctgatgattctggtctcggcgatcaacctcatcggtgccgctgaagacagtcaggaagcgctgcgttgcgcgttgttcacgaccattctgctgatcgccacggtgtttttgagtacggtcttccagcacctgttcaaaccgaacgaatctctggggcgcggcggccatgtgtacaaggcgcgcctgctgagcctgctgtatgcggtggtgcgcattgcgctggccatcacgttcattgaggtgttggggcgtatctggggcttctcgatgttcgagtttgcccagcgcaatactctgggccgggtgatcagcgactcgttgagcagcatcggcctgatattcgtggtcacctggttgctgtgggtggtgctcgacaccgcgattcaggaagccctcaaaccgccggtcaaccatcgcagcggccgccagccgagcacgcgcatcaagaccattctgccgctgctgcgcaacgccgttaaaatcattctggtggtgatctgcgcgatcaccaccatggccaatctgggcatcaatgtcgcgccgctgctggcgggtgccggggtggtcggtctggccatcggttttggctcgcaacaactggtgcaggacgtcatcaccggcctgttcatcatcatcgaagacacgttctcggtgggcgactgggtggtgctcagcaccggccattccggctcggttgaaagcctgaccatccgcaccgtacgcctgcgggacggcaagggcttcgttcactcggtgccgttcgggcagatcaaggcggtcaccaaccagtcgcgacaattcgcttacgcgttcttctcggtgcagttcacctacgactccgatatcgacgatgcgctggcgctgatccgcgaaaccgggcagtcgatcagtgatgacattctgctcaagcacaacctgcaggggccgctggaggtgttcggcgtagacagcatgaacctcaacggcatggtgttaacggcgcaatttcggacctcttccggtggtcagtacgcagtggggcgcgccttcaacgagcgcctcaagcggcttgtggataaaaacccgaacgtgcgtttctcgcaaacttatccacaggtggtcatggggccgggattcaacaatccgcaagcgggcaccgaacccgaagggcctcctgcaccgtcggaccctgctgctgccacaccttctgcgccagcaccggcaccgctgggtctgcccaagggtggcggcgcgccagggcctgcggct

SEQ ID NO: 33255 - DNA, 1140 bp, Pseudomonas syringae
ctcacgatcagctcggacttcgacagcggcaatattcaggtgctggacagcagcgacccggcccatatcaagctggcaatcaggcccgacacgcaaagcgcgcactttcaatggtttcatttcaaggtcgacggcctcaacgtgggtcaaacctatggcttgagcctgagcaacgccagcgagtcgaccttcaacagtgcctggaccggctacaacgccgtggcctcttatgatcacaaacactggtttcgcgtgccgtcgggtttcgacggcaaggcgctgaatttcagccttgcggccgagcaagcgcaggtctggtttgcctatttcgaaccctacagccgtgagcgtcatgacgggctgatcgagcaggcgcagacaaacgccggcatgcaggtgctggcgaccggcaaaagtattgaaggccgtgacattcagttgctgcgcaaaggcgatggcagcgaaggcaagcgcaagatctggttcatcgcccagcaacatcccggcgaacacatgggccgagtggttcaatggagggcgtgatttgagcgtctgcagcaaaaagacgacactgtgctgcagcaattgctggacagtgccgacctctatctggtgcccaacatgaacccggacggcgcattccacggtcatttgcgcaccaacgcagccggcaaggacctcaaccgcgcctggcaggacagcaccgaagcgcagagcccggaagtcctgttcgtcaggcagcagatggaaaaatatggcgttgacatgtttctcgacgtccacggcgatgaagaaatacctcacgtattcaccgccgcctgtgaaggcaatccgggctacaccatacatcagcggcaactcgaagagcgctttcgcagccgtctgagcgacgtcactgtcgatttccagacggtttacggatacccgcgcagcgcgcctggccaggccaacatgaacctggcggccaacgccatcggcgaacgctacaaatgcctggcgctgaccctggagatgccgttcaaggatcacgacaacgcaccggacccgctcaccggctggtcaggcaagcgctctgcgcaactggccaaggatgtgctgagcgtgctggcgcagatggtcgaagaactgcgctgatccaca

SEQ ID NO: 33256 - DNA, 3483 bp, Pseudomonas syringae
atgattgcgcacctgcgcaagccgcgggcatggatattgctggcttttgttgtacagcgtttgttttatcagggagcttcgaacgacctattacccctcctctggagacgtaccgtgcgaccttcaggctctcagcgcatcataaaaattcgacgcgactacaaccgcctggtcgccgacgaaacaatggaagactacgcgctcaggttcacgcccaaatcgtttcgcaaatggtcggaatggcgcatttcgaacacggccgttggtgccgtgtcctttttggcactcgaggccatcggcggcgcgctggtgatcagctacgggttcaccaataccctctgggcaatcctcgccactgcactggtgatcttcctgaccggcctgccaatcagctactacgcggcgcgctatggcgtcgacatggacctgctgacccgtggcgcagggttcggctacatcggctcgaccatcacgtcgctgatctacgccagcttcacctttctgttcttcgcccttgaagcggcaatcatggccctggcgctggagctttacttccacattccgattgcgctggcctacatcatttgctcaatcatcgtcatcccgctggcggtttacggcgtcaccctgatcagccgcttgcagatgtggtcgcaaccgttgtggctgacgctgctgctggtgccctatgtgttcgtgatctggaaaaaccccgatgccctcggcgactggctgagtttctccgggcgcgaaggtgaaggcggcacctttgacctgttgtttttcggtgcggcgttcagcgtcgcgctgtcgttggtgacgcagatcggcgagcaggtcgactacctgcgctttctcccggaaaagacccggcacaaccgcaaacgctggtgggccgcattgctcatggcagggcctggctggatcatccccggcgcgctgaaaatcatggccggggccttcctggcttttctcgccctgcaacatgaagtgcccgttgagcgcgccgccgagccgacgcagatgtacctggtcgccttccggtacgtgttcagttcccccgagtgggcgctggcggccatgaccctgttcgtaatcatttcccagatcaagatcaacatgaccaatgcctacgcaggctcgctggcctggtcgaacttttttgtccgcgtcacccacagccacccggggcgtgtggtctggctggtcttcaacgtggccatcgcgctggtgctgatggagctcggcgtgttcgatgccatcgagcaggtgctggggctgtatgccaacgtcgccattgcctggattggtgcgctggtcgctgatctggtcatcaacaagcctatgggctggtcgccgaaacacatcgagttcaagcgcgcgcacctttacgacatcaaccccgtgggcgtcggtgccatgtcgattgcctcactggtgtcgttctgcgcccacttcgggctgttcggtgccattgctcaagccgcaccgcccttgatttcgctggccatcgcgctggtcaccgccccgctgctcgcctggctgaccgacggcaagtactacatcgcccgcaccagctccgacaccctgctctacccgcaaggacggcaggaatcattgctgtgcggcctgtgcaacaacgcctttgaaacgcccgacatggcctactgcccggcctatcgaacgcccatctgttcgctgtgttgctcactggatgcgcgttgcggggaccagtgcaaaccacgggcgcggctgtccatgcagttcgaggacctgatcggcaaggtactgccacgctttccgcgccactacctgcacacccggctggcgcaatacctgggcctgttgaccatcctggtggcgggctcgtcgggagcacttgcgttgatctacaaccaggtcgcccatggcctgatcgaccaatcgccagaggcccatcacctgttgatgctggccttcctgaaagcgtttttgaccgtctgcgtgttcgccggggtcctcgcctggtgggtggtgctgacccgagaaagccgccgggtggcgcaggaagagtccgagcgccaaacctccctgctcatacaggaaatcgacgcccacgaaaaaaccgaccaggcgctgcaaaaagccaaggaagcttcggaggccgccaacgcagcgaaaagtcgctacatcaccgggctgtcccatgaacttcgcacgcccctgaacagcattctgggcttcacgcagattctgcaacgcgacacaacgaccccgccccatcatcaggacccgctggcaaccatcatgcgcagcagttcgcacttgctgtcgctgatcaacgggttactggacgtggccaagatcgaggccggaaaactgaagcttgagcccaccgagattctgtttcaggaattcctccacgacctggaaaagatgttcgccggcaccgctcaggaaaaaaaccttggtttccgcctggagctggagggccgcatgcctatggtggtgcgcggtgacgagaaacgggtacggcagatcctgatcaacctgctgggcaatgccgtgaatttcaccgacagcggcgaagtggtgttacgggtcagttatcgccgcgagaccgccattttcgacatcgtcgacagcggcataggcattgccccggagcaaattgaacggatcttccagcccttcgagcgtggcggtcagacgcgccatgacaacggcgtcggcctgggcctgaccatcacccgcatgctgaccgcgttgatgggcggcgcgctgtcggtttccagcacgccgggcgaaggcacgcacttcaaggtgcgcctgtttctgtcggaagtgcgggtgcccaaggcggtgatcgacgtcaatcatgacgtggtcggctatgacggcgagcggcgtctggtactggtggtcgacgaccacatcgagcaccgcaaggtcatcagcggcatgctcgaaccgctgggcttcaccgtcgcccaggccgaaaacggtatggaagcagttcgccaggtgtccctgctgcacccggacctgatcctgatggacctgtccatgccggacatggacggctgggccaccctgcgcatgatccgtcgcaacgcacgctcgaacgcgccggtcatcgtgctgtcggccaacgccaatgcaagcaccgacgacgacatcggccacgactacctgtccaaacccgtgcacctgcgcgacctgctggatcgcctcaaacatcaccttaacctcaactggcaacatcgctcccgcactgccagcgaaacaaaaaccccgtggatcctgccgccgcgcgaagaccttgaagacctgtacaccctgtgcggtctggggtacgtacgcggtatccagaacaaactggacgccattgaaaccagcaacatcgcgagcggcagtttcgtcaccgacctgcgcgcgctggccaaaggttttcgtctggatgaactcagcctgcacctcaaggagatgcttgatgaacgccct

SEQ ID NO: 33257 - DNA, 852 bp, Pseudomonas syringae
atgtcactaaatttcccgctgttgttggtcatcgctgtcttcgtctgtggcgtgcttgcactgattgatctggtcttcctggcgccgcgtcgccgggttgccatttccaactatcagggtagcgtcggagaacctgacattgctgtcgtcgagcgcttgaacaaggagccgttgctggttgaatacggcaagtcgttcttcccggtgctgttcatcgtgctggtgcttcgatcgtttctggtagagccattccagatcccttcgggctccatgaaaccgacgctggacgtgggcgatttcattctggtcaacaagttctcgtatggcatccgcctgccggtactggaccagaaagtcatcgagctcggtgatccgcagcgtggcgatgtaatggtgttccgctacccaagcgacccgagcgtcaactacatcaagcgtgtggtcggtctgccgggtgatcgcatccgctacaccagcgacaagcggttgttcatcaatggcgagctggtggccaagaaactgatcggcaccgaacccggcacactgggcagtgcagagctgtacgaagagcaactgggcaccgtggaacaccagatccgtcaggaaatgagccgttaccgtgcgccgcctgacagcgaatggaccgtcccggctgcgcactacttcatgatgggcgacaaccgcgacaactccaatgacagccgttactgggatgatcccaacattcccaaggacgagctgggcatggttccggacaagaacatcgtcggcaaggccttcgctgtctggatgagctggccggagccgaaattgagtcacttccctaattttgcacgcgtagggttgatcaag

SEQ ID NO: 33258 - DNA, 1404 bp, Pseudomonas syringae
ttgatcgccgccgtgctgatgctcggccaggtcgctacagcccaggcagaaaacctgccggactttaccgggctggtcgagcaggcctcgcctgcggtagtgaacatcagtacacggcagaaactgccggatcgcgccgttgccaacaagcagatgcctgatctggaaggcttgccgccgatgttgcgcgaatttctcgagcgcagcatgccaccaggttcgcgcgcaccaggagccggcaagggtgatcgccagcgcgaggctcagtcgttgggttcgggctttatcatctcccccgatggctatgtgctgaccaacaaccatgtgatcgacggtgccgacgaaattctcgtgcgcctctctgaccgcagcgaattgaaagccaagctgatcggcaccgacccgcgcaccgatgtcgccgtgctgaaaatcgaaggcaaggacctgccgaccgccaagctgggtaattccaacacgctcaaagtgggcgagtgggtcttggcgatcggttcgccgttcggtttcgatcattcggtgaccaaaggtatcgtcagcgcaaagggccgcagtctgcccaatgacacctatgtgccgttcattcagaccgacgtagcgatcaacccgggtaactcgggcggtccgctgttcaacatggcgggcgaagtggtcgggatcaactcgcagatcttcacccgctcgggcggcttcatgggcctgtcgttcgccattccgatcgatgtcgccatggacgttgccaaccagctcaaggccagtggcaaagtcagccgcggctggttgggcgtggttattcaggaagtgaacaaggacctggcggagtcgttcggtctggacaagcccgccggtgcactggttgcacaggtgcttgaagatggtccggcggccaagggtggtttgcaggtcggtgacgttattctcagtgccaacggccagccagtcgtcatgtcggctgacctgccacacctgatcggcaacctcaaggacggcagcaaggccgagcttgaagtgattcgtgatggcaagcgtcagaaactgaccgtcactgtcggcgcgctgccggatgaaggcctggaaatgggcggtgctgcaggcgccagtgccgagcgcagcagcaaccgtctgggcgtttcggtgatcgagctgaccgccgagcagaagaagacgctggacatcaagggtggcgtggccatcaaggaagtcactgatggtcctgcatcgctgatcggtttgcagccgggtgatgtcatcactcacctgaacaatcaggcgatcacgtccgggaagcaattcactgatgtggcgaaaagcctgcccaaggaccgttctgtctcgatgcgcgtactgcgtcagggccgagcgaccttcattaccttcaaactgtcggaa

SEQ ID NO: 33259 - DNA, 252 bp, Pseudomonas syringae
atggtcgaagacgtcgaactcaaccgcctttactggcacagccgccgtggcatgctcgaacttgacgtgctgctggtgccgtttgtccgtgaggtctacccgcatttgaatgacgtggaccgcgatctgtatcgccgcctgctgacgtgtgaagatcaggacatgtttggctggttcatgcagcgcgccgagtccgaggacgccgaattgcaacgcatggttcgcatgattctggatcgtgtccagcccaag

SEQ ID NO: 33260 - DNA, 690 bp, Pseudomonas syringae
atgcgccttgatcgtttcctcagcaacctgccccgcttcaaccgcaagagcgtgcgtctggcactggccagcggcagggtgcaggtggacgggcaaatcaccacagacccgcattacgacgtgcgtgagttcagttgcgtagcgttcgatatgcaaatccttcagcccggcaaagccgcgcgctacttcatgctgcacaagccgcaaggctgcgtcagcgcaacgaccgacgcgcagcacgcaacagtgctcgatttgctcgacgagcctgacaaacacgaactgcacatcgccggacgactggacttcaacaccaccggcctgatgctgattaccaacgacggtcaatggtcgcgacggctgactcagccgcacaccaaaatgcccaaagtgtattacgtcgagaccgagcaacttatcgacgagcgctatgcgctgacattcgccgaaggtctgtttttctcattcgagaacatcatcacacaaccggcacaactgaccgtgctggggccgcgaagcgcgcgcttgagcatcatcgaaggccgttaccatcaagtgaaacggatgttcggtcacttcgacaataaagtgttgcaactgcaccgggaaagcatcggcgcgttgatcctcgacccggccctgccacccggcggctaccgctcgctgcaggctgcggaaatagccctgttt

SEQ ID NO: 33261 - DNA, 945 bp, Pseudomonas syringae
atgaccatggcccacacagcttttttctgcacgctatcccatgagggcgttctcgccgttcgcggcgtggatgccggcaaatttcttcagggtcagttgacgtgcaacctcaattatctcgacgagaacacctccagcctgggcgcacgttgcacccagaaaggccgtatgcagtcgagttttcgcctcgttttcgaaggtgacggctgtttgctggcgatggccagcgagctgatcgagccgcaattgctggacctgcgcaagtacgcagtgttctccaaatcaaaactgactgacgaaagttcagcctgggtgcgtttcggcctgcaggaaggtgacggtgcgctggtcggtctggggctggatctgcctcaggacaccggcactgtggtgcgcgccaacgaactgatcgcaattcgtgtctccccggcgcgcgctgaactctgggtccgcgccgaacaggccgacaccctcaaagcgcgcctggcatcacaactggccgaaggcccgctgaatgactggctgctgggtcagatccgagtcggtatcggtcaggtgttcggcagtacccgcgaggaattcatcccgcagatgatcaacctgcaagcggtcggcggagtcagcttcaaaaagggctgctataccggtcaggaaatcgttgcgcgaatgcaatatcttggcaaactcaagcgcaggctttaccgcctgacgctgcgcagcgatgaaatcccggcaccgggcactgcgctgttttccccagtgcatggcagcgcggtgggcaatgtggtgatcgccgcacaggccggccaggacgtcgaactgctggctgtcctgcagggcgatgcggcagaaaacggtcacatacatctcggctcgcccgagggcgctgcactgcacatgaatgaactgccctacacactggacagcaaactcgaaactcagcgc

SEQ ID NO: 33262 - DNA, 900 bp, Pseudomonas syringae
atgaatgatacaactgcaacccgctgtggctatgttgccatcgtcggccgtcctaacgtaggcaagtccacgctgctcaaccatattctgggtcagaagctggcgatcacctcgcgcaagccgcagaccactcgccacaacatgctgggcatcaagaccgagggcaccgtgcaggcgatctacgtcgatacccccggcatgcacaaaaatggcgagaaagcgctcaatcgctacatgaacaagactgcatcggccgcgttgaaagacgtcgacgtggtgattttcgtggtagaccgcacccgctggaccgacgaagaccagatggttctggagcgcgttcaatacgtgcagggcccggtcattctggcgatcaacaagaccgaccgcatcgaagacaagagtgacctgatgccgcatctggagtggctgcaaggccaactgccgaatgcgtccatcgtgccgatttctgcgcagcacgggcacaaccttgaagcgctggaaagcctcatcgcctctcatctgccggagaatgatcacttcttcccggaagaccagattaccgaccgaagcagccgttttctggctgccgagctggttcgcgagaaaatcatgcgccagttgggcgccgagcttccgtaccagatcaccgtcgagatcgaagagttcaagcagcagggccgtaccctgcacatccacgcgctgatcctcgtcgagcgtgatgggcagaagaagatcatcattggcgacaagggcgatcgcatcaaacgcatcggcagtgatgcacgtcgcgacatggaagtgctgtttgactccaaggtcatgctcaacctgtgggtcaaggtcaagggtggctggtccgatgacgagcgggcactgcgctcgctgggttacggcgacctt

SEQ ID NO: 33263 - DNA, 2709 bp, Pseudomonas syringae
gtgccttacgaggaaaaaacccaggcaggcctgtcgatcaccgactgccggggcgcgccgctgtatgagtttcgctacccgcaacagttttatgcgaccttcgccagcgttccgccgctgctggtgcacagcctgctgttcatcgagaaccgtgacctgctcgatccgcagcaacccttggccaacccggcggtggactggccccgttttgtgaaagctgcgtggtcgcaagtggcgaagatgttcgccctccccggccagtcggctggcggcagtacgttggcgacgcaactggaaaaataccgccattcaccggacgggctgacgcagtctggttccgagaagttgcggcagatgatttccgccagtgtgcgcgcttatcaaccgggggccgagacccttgaggtgcgccagcgggtggtgcgtgattacctgaacagcgtgccgttgtctgcggtgccgggccacggtgaggtgcatggtctggccgaggggttgcgggtctggtttggcgtggatttcgccagaaccaatcagttgctggcgtccggccccacggatcaacaggggctggccgacaaggcgctggcgctgcgagaagtgttgtcgctggtgattgcccagcgtcgtccgtcgcattatctggccaagggccgcactgaactcgccgagctgaccgacagccacatccgcctgctggctcaggccaatatcattgatccaccgttagccgaggctgcgctggccgcaaaagtgacttatcgcgactgggcgcagcagccgacccttcagccgatcgaaaccaacaagggcatcagcgtggcgcgcacccggctgtcgaacctgctcaatcgcccgctgtacgacttggaccgtcttgacctttcggccaccagcaccttgcacggcgatttgcagcgcagtgtcagccagtacctgcgcgatctggctgaccctgaattcgccgccaaagtcggcttgctgggcgagcgtttgctgacgcctgccagcaccactcaggtgcgctacagcttcacgctgttcgagcgcggcgtcgatggctcgcgcgtcagggtacagaccgacagcaccgatcagccgttcgacattaatgaaggcagcaagctggagctgggctcgacggccaagatgcgtgtgctgaccacgtacctggaaatcattgccgagctgcatggacgttacgcaggcatgagcacggcagagttgaggaaagtcacggtcgaggaacccgaccggctgacccgttgggcggtggattatctgctgctgaacaaggatcgcgacttggcaaaaatgctttcggcggcactggaccggacctattcggcaagccccgcagaagcgtttttcaccggtggcggcctgcaccgtttcaataattttcggcgcgaggataacgagcgtattccgaccctgcgcgagtcgctgcgtgagtcgatcaacctgccgttcattcgtctgatgcgtgacgtggtgcgctacagcacctatcaggcccccaacaatagtgcggcgctgctcaaggatgatgacgacccacgccgtcaggaatacctgagccagtttgccgaccgtgaaggcacggtatttttgctgcgtttctggaaacgttacaaggacaagactacgcaggaacggctcgatacctttctcgacggcatccatccgaccgcgattcgcctggcggccgtgcatcgctacctgctgccgggggccgaccaggcgacgttcaatacgtttgttcgcgctcatcttgaagagcccaaggcaacctcgacactgaccgacaaacgtctgaccgatctgtaccagagctacggaccgggggcttacaacctgcccgaccaaggctacatcgcgcgcgttcatccgctggatctgtggctggtgggctacctgctcaagcacccggacgcgcaattcaaagacgctgctgcagccagccgtttcgagcgtcaggaagtctatggctggctgttcaagagtcgccacaagggcgcgcgcgacagtcgcgtgcggaccatgatggaggtcgaggcgtttctggatatcgagcagcgctggcagcgcgtgggctatccgttcgaccatctggtgccgtcgctggcaaccgcgatcggcagctcgggtgatcgcccggcggcgctggccgagctaatcggcattatccagaacgacggcatccgcttgccgcccgtgcgcatcgacagcctgcattttgccgctgatacgccctatgacactgagctgatcatcaaccctgaactgggccagcgcgtgttgccgtccgaagtggccacggcgatgcgtgaggcgctgtcgcaagtggtggacggcgggaccgccaagcgtgtgcaaggcaccttcaaaatgcaggacggcagcgtgctggcaatgggcggcaagaccggcacgggcgataaccgcatcgagagcatcggcgcgggcggccgtattctcagttccagggcgatcaaccgcactgcgacctttgtgttttatatcggcgacaaccactttggcgcgttgactgcgtttgtaccgggacgcgccgccgaaggctttcgcttcacctcggcgttgccggtgcaggtgctcaaaggcatggcaccgatcctcacgccgtatctggaaaaccacgggcaagcgatgtgcaatgccccgctcgccgatccgcccacgggtgcc

SEQ ID NO: 33264 - DNA, 636 bp, Pseudomonas syringae
atgcccattcgtgagatccgtcatccgctgatccgccacaaactcggcctgatgcgccgcgccgacatcagcaccaagaatttccgtgagctggctcaggaagtcggtgccctgctgacgtacgaagcgaccgccgacctcactctggaaagctacgatattcagggctgggctggaaccgtctcggtggagaaaatcgccggcaagaaaatcactgttgtcccgatcctgcgcgccggtatcggcatgctcgacggcgtgctcagcctgattccgggtgccaaggtcagtgccgtgggcgtcgcccgcaacgaagaaaccctgcaggcgcacacgtatctggaaaaactggtgccggaaatcgacgagcgcctggccatgatcatcgacccgatgctggccactggcagctcgatggtcgcgaccatcgacctgctgaaaaaggccggctgcaaggaaatccgcgccatggtcctggtcgctgcaccggaaggtattgcggcagtggaacgggcgcacccggatgtgatgatctacaccgcgtccatcgacgagcgtctgaacgaacacggctacatcattccgggcctgggcgatgccggtgacaagattttcggcaccaagcaaaaggacgcg

SEQ ID NO: 33265 - DNA, 2052 bp, Pseudomonas syringae
gtggggttgacctccattagcctgggcctggtgcgcacgcttgagcgtgcgggcttgaaggtaggtttcttcaaaccgatagcgcaaccgcaccccggcgatctcggccctgaacgctcgaccgagctgatggcccgtactcacggcctgaaaccgcccaaaccgctgggtctggcgcacgtcgaacgcatgctgggcgatggccagctggacgaactgctcgaagaaatcatcaatctttatcagcaggcagccgtcggcaaggatgtgctggtggtcgaaggcatggtcccgacccgcagcgcgagctatgccgcacgggtcaacctgcacctggccaagagcctggacgccgaagtgatactggtttccgcgccggaaaacgaagtgctgaccgaactgtcgggaagggtcgagttacaggcgcagctgtttggcggccccaaggacccaaaagtattgggcgtcatcctcaataaagtgcgcaccgaagagagcatggaagtctttgctgcgcgccttaaagaacattcgccgctgctgcgcaacggcgatttccggctgttgggctgcattccctatcgcgccgaactcaatgcgccgcgtacccgtgatgtggccgagttgctgggcgctcaggtgctgaatgcgggcgactacgatcaacggcgcatgtcaagaatcatcatctgtgcgcgcacggtgctcaataccgtgccgctgctcaagcccggcgtattggtcgtaaccccgggcgaccgcgacgacatcatcctcgccgtgagcctggcagcgatcaatggagtaccgctggcaggcctgctgttgaccagcgataccgtgcccgacccgcgcatcatggaactgtgccggggcgcgcttcaggccggcctgccggtgctgtcggtgagcactggctcctatgacacggccaaccgcctcaatcagttgaacaaggaaatccccatcgatgaccgcgagcgcgcggaaatcatcaccgatttcgtcgccagtcatctggacgccagctggctgcaccagcgctgcggcaccccacgagagctgcgcctgtcacctgcggtgttccgctatcagttgattcagcgcgcccaggcggccaataaacgcatcgtgctacccgaaggcaacgaaccgctgaccattcaggccgcggcgatctgtcaggcgcgcggtatcgctcgctgtgtgttactggccaggcccgaagaggtgcaggcggttgcgcaggcacatggcatcgagctgccaccggggctggagattctcgacccggacctgattcgcgagcgctatgtcgcgccgatggtcgaactgcgcaagagcaaaagcctgaacgcgccgatggccgagcaacagcttgaagaccccgtagtgatcggcacggtgatgctggcactcgatgaggtagacgggctggtgtccggcgtggttcattccacggccaacaccatccgcccggccctgcaactgatcaagaccgcgccgggctgcacgctggtgtcgtcggtgtttttcatgctgtttcccgagcaggtgctgatgtatagcgactgcatcatgaatcctcacccaagcgccagcgaactgtccgagatcgccctgcaaagcgccgattcggccactgcgttcggcatctcgccccgcgtggcgatgattagttattccagcggcaattcggccagcggtgaagaagtcgagaaagttcgcgaggcaacgcaactggcacgcgaaacccgccgcgatctattgatcgacggaccgctgcagtatgatgccgccgccaacgaacacgtcgcccggcaactggccccggacagtcaggtggcaggacgcgccaatgtgttcgtgtttccagacctcaacactggcaacaccacgtacaaggcggtgcaacgcagcgccgactgtgtaagcttgggcccgatgctgcaaggcctgcgcaaaccggtgaacgacctgccacgtggcgcgcaggtcgatgacatcgtctacaccatcgcactgacggcgatacaggccgacacactttcc

SEQ ID NO: 33266 - DNA, 159 bp, Pseudomonas syringae
atgccgatgccggcgctggccctgaaagtgttgctgggcgagctgtcggtattgctgctcggtggccagcgcgcccggccggaacgtttgcaggaagctggcttcacgtttaagtacgccgaactcgacaccgccctgcaggatttgctgggtcgccac

SEQ ID NO: 33267 - DNA, 687 bp, Pseudomonas syringae
atgtttacctcgcgtcgtttgatcattgttgccactgccgtcgccttgctttccggctgtgcgacctccaatccgtatgacaatcaaggccaggcgcaaagctccggtggcatgagcaaaacggccaaatacggcgggctcggcgctctggccggtgcggtagccggtgcggctatcgaccataacaaccgtggcaaaggcgcactgatcggcgcagccgttgcgggcgctgcgtcggcaggttatggctactacgctgacaaacaggaagccgcgctgcgcgcgagcatggccaacaccggcgtcgaagtgcagcgtcagggtgatcagatcaagttgatcatgccgggcaatatcaccttcgcgaccgattcctcagccattgccagcagcttctattcgccgctgaacaacctggcgaactcgctcaagcagttcaaccagaacaacattgaaatcattggctacaccgacagcaccggcagccgtcagcacaacatggatctgtcgcaacagcgtgctcaaagcgtagcgacctacctgacttcccagggtgtcgaccaatctcacctgtcagtccgtggcgcaggccctgaccagcctatcgccagcaacgccgacgccaacggccgcgcccagaatcgtcgcgtagaggtcaacctcaagccgattccgggccagcagtac

SEQ ID NO: 33268 - DNA, 777 bp, Pseudomonas syringae
atgcaagccgtgctgagtgaccaggaactgctgcgctacagccggcagattctgctgcaacacgttgatatcgaaggtcagttgcgactcaaacaaagccgtgcgctggtcgtaggtatgggcggcctcggttcgccggtagccttgtatctggcggctgcgggggtcggagaactgcatctggccgacttcgaccacgtcgatctgagcaacctgcaacgccagatcattcatgacacgcagagcatcgggcaggccaaggtcgattcagccatggcccggctcgcggcgatcaacccgcaaataaagctgattgcccatcgtgcggcgcttgatgccgattcattgagtgcagcggtgcaggccgtcgatctggtgctcgactgttcggataactttgccacccgtgaagcggtcaatgccgcgtgtgtcgccgcaggcaagccgctggtcagcggcgccgccattcgcctggaagggcagttgtcggtgttcgacccgcgccgtgccgagagcccttgttaccactgcctgtacggtcacggcagcgaaacggaactgacctgcagcgaagcgggtgttatcgggccgctggtggggctggttggcagcttgcaggcgctggaggcgttgaaactgctggccggttttggcgagccaatggtcgggcgcctgctgttgatcgatgccttgagcacgcgttttcgtgagctgaaggtcaagcgtgaccctgcctgtagcgtgtgtgggcccataaacgggcagggcgaacatgcc

SEQ ID NO: 33269 - DNA, 1185 bp, Pseudomonas syringae
atgctgaaaaaaattccggtcgccgaccttgccctcggcatgcacatccacaaaatctgtcgtcgctggaccgatgatccgttctggatcagtctggtcgaagtcatgcttgaagatgccgatgtactcaagcgcatccagcaatcaggcacccgggaagtctggattgaaaccggtaaaagtcgtgtgctggcactaccacctgcagccgctacgacccaaggccagaacgacacggcaccggccagtctggacaaagaggtgttgcgtgcccggcttatctgcggcagagccaggaacgccgtcatggccatgtttaccgaggcccgtatgggtcaggccatggatgtcgacaacgtgcagttgctggtggaagaaatctccaattcgattctgcgccatccccatgcgctgatcagcctttcaaggctcaagacctccgacgagtacacctacatgcactcggtggcggtctgcgcgttgatggtcgcgctggccagacgcatgggcatgcctgacgaacaggtgcgcgaagcgggcgtcgccgggctgatgcacgatgtgggaaaaatgatgatcgccccggatgtgctcaacaaacccggccgcctgacccatgaagaattcgagaccatgaaggctcacccggaactgggcctgaagatcctcaaggaaaaccaacccgtggcggcaatggttatggacgtctgcctgcatcaccacgagaagatcgacggctctggctaccctcatggcctgcagggcgagcagatcagcatctttgcccgcatgggcgcggtctgtgacgtgtatgacgccattacctccgaccggccttacaaaaaaggctggggggtggcgcattcgattcgcgagatggcgtcgtggaaaggtcattttgacgagcgggtgtttcagagtttcgtcaaaaccgtcggtatttatccgatcggcacgctggtgcgtctggaaagcggtcgcctgggcgtggtggtcgagcagagcgaggaatctttgctcaaaccccgggtgaaggtgttcatgtcggcgcgtaccggcaagactttcgccgcacagatcatcgacctgggctgttctgcagacccggacgcgattgtgaaaatcgagctgcccggtgattggggcctggcagaggtcgatacgctgtgggccggcacgcctgcc

SEQ ID NO: 33270 - DNA, 831 bp, Pseudomonas syringae
atgaccatcatcgcaagcttgttaagaagcgccgagcttcccgattcaccgaccgcgcggctcgacatcgagctgttgctcgcggctgccctgggtaaaccgcgcagttttctgcacacctggcccgagcgcattgtcagcaccgaagccgccgtggcctttgcgggttacttgcagcggcgacgcacgggcgagccggtggcttacattctcggtcagcaaggtttctggaagctcgatctggaagttgcgccgcacaccttgatcccgcgcccagagaccgaaatgctggtcgaggcggcactggaactggtgccggcctttgccccggctcaggttctggacctgggcaccggcaccggagcgatcgccctggcgctggccaacgaccggcagcaatggaaagtgacagcggtggaccgcgtgcccgaagcggtcgcgctggccgaacgcaaccggcagcgtctgcaactggattacgcccaggtgctcaacagccactggttcagtgcgctggaagggcggcagtttgatctgatcatcagtaacccgccgtacatcgccgacgctgatccgcatctgtcggccggtgacgtgcgtttcgagccgagcagtgcgttgacggccggtgccgacgggctggacgatttgcgcacgatcattgccgacgcgcaggcgcacctcaacgccgatggctggctgctgctggagcacggctacgatcaaggcccggcggtgcgcgaactgttgactcgtcatggtttcgagcgcatccagacccgccgtgatctgggcgaacacgagcgcatcacgttcggatgcaagccgtgc

SEQ ID NO: 33271 - DNA, 1080 bp, Pseudomonas syringae
atgaaagcttcactgctcaataagctggatgttctcagcgaccgtttcgaggaactgaccgcactgcttggcgatgccgaagtcatcagcgatcagacacgctttcgcgcctattcccgggagtacgccgaagtggagccggtcgttgcgctctacaagcaactggccagggtgcaaggcgatcttgagggtgcgcaggctttgttgaaagacagtgaccccgacatgcgcgaaatggcagtcgaggaagtccgcgaaaccaagcagcaactggtcgagcttgaggcgcaactgcaacgcatgctgctgcccaaggacccgaacgacggtcgcaacgtgtttctggaaatccgcgccggcaccggcggtgatgaagccgcgatcttctccggcgacctgttccgcatgtactcgcgctacgccgagcgacgtggctggcgggtggagattctgtccgagaacgaaggcgagcatggcggttacaaggaagtcattgcgcgggtcgaaggcgacagcgtctatggcaagctgaaattcgagtccggcgcgcaccgtgtacagcgtgtgcccaagaccgaatcccagggccgcattcacacctcggcctgcacggttgcggtgctgcccgagcctgatgagcaacaggcgatcgagatcaacccggccgacctgcgcgtcgacacctatcgttcttcgggtgccggtggtcagcacgtcaacaaaaccgactcggccatccgcattacccacttgccatcgggtattgtcgtcgagtgtcaggaagagcgttcgcaacacaagaacagagcccgggcgatgtcctggctgtctgccaaactgaatgatcagcagaccagcgctgcggccagtgccatcgccagcgagcgcaagctgctcgtaggttcgggtgatcgttcggagcgcatacgtacttacaatttccctcaagggcgagtgacggatcaccgcgtgaacctgactctgtattcgctggatgaagttctggccggcggagtcgatgcagtgatagagccgctactcgctgaatatcaggctgatcaacttgcggcactgggtgag

SEQ ID NO: 33272 - DNA, 1935 bp, Pseudomonas syringae
atgacaaccacaaccccattctggcgtcgggccaagctgcccctggccgtcagcctcgcgtcttcactggccggcccggcttttggcgtgaccttcaacgtcggtgaaatcgaaggcagtttcgactcctcgttgtcggtgggcgcgagctggtcgaccgagaaagccaacaaaaacctgatcggggccaacaatggcgggcgtgggttgtcgcagacctctgatgacggccacttgaacttcaagcgtggggagacgttttcgaagattttcaagggcattcatgatctggagctcaagtacggcgataccggtgtgtttgtacgtggcaaatactggtacgacttcgaactcaaggatgaaaaccgcgagttcaaggacatcagcgattcgggccgtaaagagggcgccaaatcctccgggttccagttgcttgatgccttcgtctatcacaactattcgatcgcagatcaaccgggcgctgtgcgcttcggcaagcaggtcatcagttggggggaaagtacctttattcagggcggcatcaacagcgtgaacccggtcgatgtctcggcctttcggcgtccaggctcggaaatcaaggaaggcctgattccggtcaacatgttctacctgtcgcaaagcctgaccgacaacctgtctgccgaaggcttctaccagctggaatgggaccagacggtggtcgacaactgcggcaccttcttctcgcagccagacgtgatcgccgacggttgcaacaataaccttgcagtactgcgcagtcgcagcggcctgaacagttcgctgacagcggccggtttgccagcgggcgcgcgcggggcggtgttcaactcgctgtcgcagcagggcgtggtgttcggcaacccggacgagggcgctgtggtgcgccgtggtcctgatcgtgatgcgcgtgacagcggccagttcgggtttgccatgcgctacaacttcgagccgctggacaccgagttcggtgcctacatgatgaattaccacagccgcgcaccggttttcagcggtcgcggtggttcggcggcttcgttcagcccacaagggctggttggctcgctggttcgtaacggcttgccggccggcaccgctgcagcgttggcgccgaccttgctgcccgtcgtggtggctggcaactccagttattacgtcgaataccccgaagacattcgcctgtacggtttgagcttctcgaccacattgcctaccggcaccgcctggagcggcgagatcagctaccgtccgaatgcgccggttcaggtcaacaccaccgacatcctgtattcaggtatttcgccgctcaaccccaacgtatcgctgctgagcgggcggccgaacactgatcagcccggttatcgccgcaaagaaatcacccagatgcagaccacgttcacccagttcttcgatcaggtcatgggcgccgagcgtctgaccgtggtgggtgaagtgggctggacccacgtcggtggtctggaaagcacctcgaaaatccgttacggccgcgacccggtgtacggtccgggtccattgccaggcggtcaatgcgcaacgctgaacgccggcacattgaccggtgccgagcaaaacaacctgacccgctattgcgaagacgatggctttacgacggccaactcctggggttatcgcgcacgcgccatctgggattacaacagcgtgttcgccggggtcaacctgcgtccaagcgtggcctggtcgcatgacgtgaagggttattcacccggccccggcggtaacttcgaagaaggccgcaaagcggtcagcctgggcctggatgccgagtaccagaacacctacaccgcgaacctttcctacaccaacttttttgacgggaaatacaccacggtcgatgaccgggacttcgtggcgctcagcttcggcatgaacttc

SEQ ID NO: 33273 - DNA, 1113 bp, Pseudomonas syringae
ttgtacatcgaacacgagcacctcggcgcggacagcattctggcctggcttgccaattatcatcaccttagcctcgaagagttgcgcgccagcgcctatgttcacgaggacgatgcggccgtgcgacacatgatgcgtgtggcctcggggctcgactcgctggtgctgggcgagccgcagattcttggtcagatgaagtccgcgtacgccgtagcccgcgaagccggaacggtcgggcctttgctggggcgtctgtttcaggccacgttcagcgccgccaagcaggtgcgcaccgacaccgccatcggcgaaaacccggtctccgtagcctttgccgccgtcagcctggcaaaacagattttcagcgacctgcaacgcagccaggccctgttgatcggtgccggcgagaccattactctggtcgcccgccacctgcacgatctgggcgtcaagcgtatcgtggttgccaaccgtacgctggagcgcgcgagtatcctcgccgccgagttcggtgcccacgccgtgttgttgtcggatatcccggccgagctggtcaacagcgacatcgtgatcagctccaccgccagccagttgccgattctgggcaagggcgcggtggaaagcgcgctgaagctgcgcaaacacaaaccgattttcatggtcgatatcgctgtaccgcgcgatatcgagcctgaagtcggcgagctggacgacgtttatctgtacagcgtcgatgatctgcatgaagtggtggcagagaacctcaagagtcgccagggcgctgcgctggctgctgaacaactggtcagcgtcggtgccgaagacttcatgtcgcggctgcgcgagttggcggcggtggatgtactgcgcgcctatcgtcagcaaagcgaacggctgcgtgacgaagaattgagcaaggcgcagcgcatgctggccaacggcagtaatgccgaagacgtactgatccagctggcgcgtggcctgaccaacaaattgctgcatgcgcccagcgtgcagctcaagaagctgtctgccgaaggtcgcgtcgatgcgctggccatggcccaggaactatttgccctcggtgagggctcgacggataaaaccccgcaa

SEQ ID NO: 33274 - DNA, 996 bp, Pseudomonas syringae
atggacccgcgcagtgaagtgttactccgccaacccgagctgtttcagggctcgctgttgctggtcgggctgcctgccgatgacctgctcggaaaactgccgaacgcgcgtggttggtgctggcatgccggtgatcaggccgcattggatgcgcggtttgaagggcgcgtggatttcggcgttgaagcgccagaggccacctttgaggccgccgtgctgttcctgcccaaagcccgcgacctgactgattacctgctcaatgcgctggcgtcccgccttgccgggcgcgagttgtttctggtcggcgaaaaacgtggcgggatcgaagccgccgccaaacaactgagcccgttcggccgcgcgcgcaagctcgacagcgcccgccattgccagctctggcaggtcactgtcgaaaatgccccgcaagccgtcaccctggaaagcctcgcccggccttatcaaatcgaactgcaggacggcccgctcaccgtcatcagcctgcccggcgtgttcagtcacgggcgtctggatcgcggctcggcgcttctgctggaaaacatcgacaagctgcccagtggcaacctgctcgacttcggttgtggtgccggtgtgctcggcgcagcggtcaaacgtcgctacccgcacaacgacgtggtgatgctggatgtggatgcctttgctaccgcaagctcgcgcctgaccctggccgccaatggcctggaagcacaggttgtgaccggtgacggaatcgacgccgcaccgatgggcctgaacaccattctgagcaacccgccgttccatgtcggggttcacaccgactacatggcaacagagaacttgctgaaaaaagcacgccaacatctgaaatcaggcggcgaactgcgcctggtggcgaataactttctgcgttaccagccactgatcgaagagcatgtgggctactgccacgtcaaggctcagggcaacggtttcaaaatctacagcgccaaacgctct

SEQ ID NO: 33275 - DNA, 939 bp, Pseudomonas syringae
gtgtccaagatgatggtctttacggggaatgccaaccccgatctcgctcggcgtgtagtacgtcagctgcatatcccactgggtgatgtctctgtcggaaaattttccgacggtgaaatcagcactgagatcaatgaaaacgttcgcggtaaagacgtcttcatcattcagccgacttgcgccccgacgaacgataacctgatggaactcgtcgtgatggctgatgccttccgccgctcctcagcgtcccgaatcactgctgtgattccttactttggttatgcccgccaggatcgccgtccgcgctccgcacgtgttgctatcagcgcgaaagtcgttgccgatatgctcaccgtggtgggaatcgaccgtgttctcacggttgatcttcatgctgaccaaatacagggtttcttcgatattccggtagataacatctacggctcccctgttctggtggatgacatcgaagaccagcgctttgaaaacctgatgatcgtttccccggatatcggcggtgtcgtgcgtgcacgtgctgttgccaaatccctgggcgtcgatctcggtatcatcgacaaacgccgtgagaaagccaatcactctgaagtgatgcatatcatcggtgatgtcgaagggcgtacctgcattctggttgatgacatggtcgataccgccggcactctgtgccatgcggccaaggccctgaaagagcatggcgctgccaaggtctttgcctactgcacacaccctgtgctgtcgggtcgggcgatcgaaaacattgaaaattccgtgctggacgaactggtggtcaccaacaccatcccgttgtccgccgccgcacaagcctgcagccgtatccgccaactggatattgcgccggtagtcgctgaggcggttcgccgtatcagcaacgaagaatcgatcagcgcgatgttccgt

SEQ ID NO: 33276 - DNA, 609 bp, Pseudomonas syringae
atgaacgattttaccctgaatgccgaactgcgttccgacctggggaaaggtgcgagccgccgcctgcgtcgtctcgctagcctggttccagctgtagtctacggtggcgacaaagcccccgagtccatcagcatgctggccaaagaagttgccaaactgctcgagaacgaggcttcttacagccacatcatcgagctgaacgttggtggcaccaagcaaaacgtcatcatcaaggcactgcaacgtcacccggccaaaggccacgtgctgcacgctgacttcgtacgcgttgtagccggtcagaaactgaccgctatcgtgcctgtacacttcatcggcgaagaagctccgatcaagaaaggcggcgaagtttcgcacgtaacttccgagctggaagtttcctgcctgccgaaagatctgcctgagttcatcgaagtagacgtgtctgctctggaaatcggctcgatcgttcacctgtccgacgtcaaagcaccgaaaggcgttgagttcgtagcactggcgcacggcaacgacctggccatcgccaacgtccacgcaccgcgcgtcgtcaaagatgaagacgaagaagctgcagaaggcgctgccgag

SEQ ID NO: 33277 - DNA, 1098 bp, Pseudomonas syringae
atgggattcaattgcggcatcgtcggcctgcctaacgtcggcaagtccaccctgttcaacgccctgaccaaatccggtattgcagccgaaaacttccccttctgcaccatcgagccgaacaccggcatcgtgccaatgcctgacccgcgtctggcggccctggcggccatcgtcaacccgaaacgcatcctgccaaccaccatggagttcgtcgacatcgccggcctcgtggcaggtgcctcgaaaggcgaaggtctgggcaacaagtttctcgccaacatccgcgagaccgatgccatagcccacgtagtgcgctgcttcgaagacgagaacgtgattcacgtttccaacagcgtcgacccaaaacgcgacatcgagatcatcgacctggaactgatcttcgccgacctcgacagctgcgaaaaacaactgcaaaaggtcacgcgcaacgccaagggcggcgacaaggacgcagtggtccagaaaggtctgctcgagcaactgattgcacacttcagcgaaggcaagccggcccgcagcctgatgaaaagcatgagcaatgacgacaaagccgtcattcgtggtttccacctgctgaccaccaagccggtcatgtacattgccaacgtcgccgaagacggcttcgagaacaacccgctgctggacgtagtccgcgccatcgccgaagaagaaggcgcaatgctggtgccggtctgcaacaagatcgaagcagaaatcgccgagctcgatgacggcgaagagaaagacatgttccttgaagccctgggcctcgaagaacccggtctgaaccgcgtgatccgcgccggctacgaaatgctccacctgcagacctacttcaccgctggcgtcgaagaagtccgcgcctggaccgtccgcgtcggcgccaccgcaccacaggccgcaggcgtcatccacaccgactttgaaaaaggctttattcgcgccgaagtcgtggcctatgacgactttatccagttcaagggtgaagccggcgccaaggaagcgggtaagtggcgcctggaaggcaaggaatacatcgtcaaggacggtgatgtgatgcatttcaggtttaacgtg

SEQ ID NO: 33278 - DNA, 1014 bp, Pseudomonas syringae
gtgcgcagccgggtggcgggtgagctggtcaagctttacttccaggaaggccagaaggtcaaggccggtgatctgttggcggaaatcgatccgcgcagctatcaggtcgccttgcagcaggccgagggcacgctggcaaccaatcaggcgctgctcaagaatgcccagctcgatgtgcagcgttatcgcggtctgtttgctgaagacagtatcgccaaacagacgctggacaccgccgagtcgctggtgagccagtatcagggcaccatcaagactaatcaggccgccgtggctgacgcgaaactgagcctggacttcacgcggatccgagcgcctattgccggtcgcgtgggcctcaaacaactggacgtcggtaacctggttgccgccaatgacaccactgcgctggtggtgattactcagacccaaccaatctcggttgctttcacgctgccggaaaaagacctgtcggcggttatttcccgctatcgcaccggtgacaagctacccgtcgaagcctgggaccgtggcgacacgaaaatgcaggcgaccggcgttcttgccagcctcgacaaccagatcgacgtggccaccggcacactgaaattcaaggcccgtttcgagaacaacgacgaaattctgttccccaaccagttcgtcaatgtgcgtctgcgcgccgataccctgaaacaggcgattctggtcccgactgccgctgtgcagttcggcactgacggcacctttgtctatgtgctggacggcgacaagaaggtcaaactcaaactgctgaaaaccggcccgagcgacgagacgtctacggtgatcaccgaaggcctggctgccggtgagcgggtcgtgcttgagggcactgatcgtcttcgtgatggtgccgaagtcgaggtcgtcaacgacagcaaggacgtaccggcaggtccggggcagaagttgcagggcaaacctgacagcaagtcagaaaagtcggccgtacttggcaaggtggaaaaaccaaacgta

SEQ ID NO: 33279 - DNA, 1083 bp, Pseudomonas syringae
atggggcgcgcccatgcgctggcattcggcagtgccaatgccgcccttgagctgccggcacgtattcatctggccgctctggcggatgccgacagcgcaagggccgagcagtgtgcccaggcctggggctttgatcgcagccacgccgactggcagcaactggtcgaggacccacgggtgcagatcgtcgcgatcaccacgcccaaccacctgcactttcccatggccatggcagccatcgcggctggcaaagcggtgtactgcgaaaagccgctggcagtcagcctggcccaggcggatgaaatgcagcgcagcgccaaggccgcaggcgtggtgacccaggtgggctacaactaccagcacaacccgatgatcggcctggccagagaaatgatcgaagctggtgaactgggcgatatcgtcagttttcagggcgaattcagcgaggacttcatgggcagcgccacgtcgccctggtcatggcgttgtgaagcggcccatgcgggcggcgcactggccgacctgggcagccacctgctggcaatggcccgttacctgctgggcgacatcgaagccgtctgcgccgacgccaacaccgtgcatagccagcggcctgccagcccgggcagcaacgagatgcgcgccattgccgtggatgaccagacccacgcgctgctgcgctttgccagcggcgcgcgcggaaccttcagcagcagttggctcaagcacggctataaaaatcacctgagctttgaaatcagcggcacccagggcacgctgacgtacgatcaggagcgtttgaacgagttgcgtatctatcgccccggcgcgccggggcgcgatggttttcagcgcctgttggcggggcctgcgcaacccggttacgcagcgttctgccccgctccggggcatcaattgggttataacgaactcaaggcactggaggtgcaggcgctgattctcgcggtctgcggccagggcagccgaggcccggattttgaagaggcctggcagatcgagcgtctggccaccgccattcgcctcgccgcgcacgaacagcgctgggtcgcgctcgacgatatc

SEQ ID NO: 33280 - DNA, 1065 bp, Pseudomonas syringae
atggcactgactgaccagtccaccgacattcgcgctggcgaagagctggacgttgccgtgatagatccgtacctcaaagcgcacattgcgcagcttcatgggacgccgacgatcagtcagtttccgggcggcgcatccaacctgacgtatctgatccagtatgcgaacagagagctggtgttgcgtcgcccgcccttcgggcaaaaggcccgttcggcacacgacatggggcgtgagtaccgcatcctcaatcagctcagggatgcctttccctattgccccgaggcctatctgcactgcaccgacgagtcgctgatcggttcagagttttacgtgatgcagcgcctcaagggcatcattctgcgctctgacctgccgcccgagctggcactggacgcgcagcacaccgaaagcctgtgcaagagcttcatcgacaagctggtggacttgcaccaggtcgactatcaggcctgcggcctgggtgatctgggcaaaccgcacggttacgtgcaacggcagattgccggctggtcggaacgctacgaaaaagccatgaccccggacgcgccggcatggcagcaggtaaaggcctggctggtggacaaaatgcctgccgattcgcctgcctcaagcatcgtgcataacgactatcgcttcgacaacgtgatcctcgacccggcggaccccatgcgcatcatcggcgttctggactgggaactgaccacattgggcgatccgctgatggatctgggcaataccctcgcctactgggtgcaggcggatgatccgctggcagtacagatgacacgtcgccagccgagtaatgcgcccggcatgctgacgcgccaggcgttcgtcgactactacgctgaacgttcgggcattcgtatcgacaatttcgatttttactacacctacggcctgtttcgcctggccggtatcgtgcagcagatctattaccgttttttccacggccagactcaggacaagcgtttcgcccggttcattgacatgaaccggctgctggagcaaatgagcctgggcgtgatcgccaaatccagcctt

SEQ ID NO: 33281 - DNA, 1440 bp, Pseudomonas syringae
atgagcacaacaatcagcccgaccgcctacaactaccgagtggtgcgccagttcgccatcatgaccgtggtctggggcgtgatcggcatgagcctgggcgtcttcatcgcgtcgcaactggtatggccagggctgaacctcgaactcgagtggacaaccttcgggcgcttgcgaccgctgcacaccaacctggtgatctttgcgttcggtggctgcgcgctgttcgccacctcttattacgtggtgcagcgcacctgtcagacacggctgatttccgacgggctggcagcgttcaccttctggggctggcaagccgtgattgtcggcgccatcgtgacgttgccgatgggttacaccaccaccaaggagtatgccgagctcgagtggccggtggctatcttgctggccatcgtctgggcggcctatgcggcggtgttcttcggcactattgtcaaacgccggacccggcacatttatgtcgccaactggttctacggcgcgttcattgtggtgacgggcatgctgcacgtcgtcaaccacgtctccttgccggtcagcctgttcaaatcctattcggcctacgccggtgcaaccgacgccatgatccagtggtggtatgggcacaacgcagtggggtttttcctgaccaccggctttctcggcatgatgtattacttcgtgccaaagcaggctgaacgcccggtgtattcctatcgcctgtctatcgtgcatttctgggcgttgatcaccctgtacatctgggccggcccgcaccacctgcactacaccgcactgccggactgggcgcagtcgctgggcatggtaatgtcgatcattttgctggtgcctagctggggcggcatgatcaacggcatgatgacgctgtcgggcgcgtggcataaattgcgcaccgattcgattctgcgctttcttgtggtggcgctggcgttctatggcatgtcgacttttgaaggcccgatgatggccatcaagaccgtcaactcgctgtcgcactacaccgactggaccatcggccatgtgcacgccggggcactgggctgggtggcaatgatcaccattggctcggtctaccacatgatccccaaactctacgctcgcccacagatgcacagcgtcggcctgatcaacgcgcacttctggctcgcgaccgtcggcaccgtgctgtacatcacctcgatgtgggtcaacggcatcactcagggcctgatgtggcgcgcggtaaatgacgacggcacgctcacttattctttcatcgagaccatgcaggccagccatatgggctacatcgtgcgggtgatcggcggcgtcattttcaccagcggcatgctgctgatggcctacaacgtgtggcgcaccgtgcgcgcctcggacccgcaagcagcgcaggccgctgcgcgcatcgccgtcgcgggagcgcat

SEQ ID NO: 33282 - DNA, 642 bp, Pseudomonas syringae
ttgagttctatggtcaccccgcaacatgcccaagagttatccacaggtgcccgggaattgggcattgacctcagcgaggctcagcacgagcaattgctggcgtatctggcgctgttgatcaagtggaacaaggcttacaacctgaccgctgtacgcaatccggacgaaatggtctcgagacatctgctcgacagtctcagcgttgtgccattcatcgaaggtacgcgctggatggatgtaggcagcggcggcgggatgcctggtattcctatggccatcctgtttcctgaacgaaatatttcgctgctggacagcaacggcaagaagacccggtttcagacacaggtcaaactggagctgaaactggacaatcttgaagttatccacagccgtgcagaaaattatcagcctgatgtgccgttcgacgggatcatttccagggccttcagcagcctcgaagactttgctggctggacgcgccacatgggcgacgtcaatacgcgctggttggcaatgaaagggctgcatcctgctgatgagctggtagcattgccctcggattttcacctcgatagcgcacaagccttgaccgttccgggttgccaaggccaacgccatctgctgatactgcgccgcacggca

SEQ ID NO: 33283 - DNA, 582 bp, Pseudomonas syringae
gtggacaatcacattcgtccggtcgagctggaaaaggcctaccgattgctcaaccatggcccgaccgtgctggtgtcctccagtcatgaaggcacccataacgtcatggctgcggcctgggcttgcgcgctggacttctcgccgcccaaagtgacgctggtgattgacaagatcaccaagacccgtgggctggtggaaaaaagcggttactttgcgctgcaggtgcccaatctggatcaattgcagatgaccttcgacgtcggcacccaaagcaaggtgtttacccccgacaagctggacaaggccaatgtggacctgtttcgcattgaggatcaccacaccccgctggtggccggatgctccgcctggctgatctgcaaagtcatccccgagccgcacaatgaacagacctacgacctgttcattggcgaagtggtcggtgcctgggcggataaccgcgtgttcaacgaagggcattggcaattcgaaaaagccgatccgaaatggcgtagcctgcactacatcgcaggcgggcatttctacacgattggcgagcctgcggtggtggaaacgggcgaggag

SEQ ID NO: 33284 - DNA, 3717 bp, Pseudomonas syringae
atgtctgaccgcagcgcccgccatcaagcctttatcactgctctgaaacagagaatcctgattctcgatggcggcatgggcaccatgatccagagctacaggcttgaggaagaagactatcggggcaaacgttttgccgactggccaagtgacgtcaagggcaacaacgacctgctgatcctgacccgtcccgacgtgatcggcgccatcgagaaggcgtatctggatgccggtgccgacatcctcgaaaccaacaccttcaacgccacacaggtgtcccaggccgactacggcatggaatcgatcgtctacgagctgaacgtcgaaggcgcccgtctggcccgtaaggtcgcagacgccaaaaccctcgaaaccccggacaaaccgcgcttcgttgctggcgtgctcggcccgaccagccgcacctgttcgttgtcgccggacgtcaacaaccctggctatcgcaacgtcacgttcgacgaactggtggagaactataccgaggccaccaaaggcctgatcgagggcggcgccgacctgattctgatcgaaaccatcttcgacaccctcaacgccaaggcggcgattttcgccgtgcagggcgtgttcgaagagttgggttttgaactgcctatcatgatttccggcaccatcaccgacgcctccggccgcaccctgtcgggccagactaccgaagcgttctggaactcgatcagccatgcaaaaccggtctccgtcggcctgaactgcgccctgggtgccagtgaactgcgcccttacctgcaagagctggccaacaaggccaacactcatgtgtctgcgcaccccaacgccggcctgcccaacgcgttcggcgagtacgacgaactgccgagccagactgcgaagatcatcgaagaattcgctcaaagcggtttcctgaacattgtcggcggctgctgcggcaccacacctgagcacatcaaggcgatcgccgaggcagtgtctggttatgcaccccgtgaaattccagacatccccaaagcctgccgcctgtcgggccttgaaccgttcaccatcgatcgccagtcgctgttcgtcaacgtcggcgagcgcaccaacatcaccggctccgcccgctttgcccgcctgatccgtgaagacaactacaccgaagcgctggaggtcgccctgcaacaggtcgaagccggtgcccaggtgatcgacatcaacatggacgaggggatgctcgactcgaagaaggccatggtcaccttcctcaacctgatcgcaggcgagccggatatctctcgcgtgccgatcatgatcgactcctccaagtgggaagtgatcgaggccggtctcaagtgcattcagggcaagggcatcgtcaactcgatcagcatgaaggaaggcgtcgagcagttcattcatcacgctcgcctgtgcaagcgctacggtgcggcagtcgtggtgatggccttcgacgaacagggccaggccgacaccgaagcgcgcaagaaggaaatctgcaagcgctcgtacgacattctggtcaacgaagtgggcttcccgccggaagacatcatcttcgacccgaacatcttcgccattgccaccggtatcgaagagcacaacaattacgccgtggacttcatcaacgcctgtgcctacatccgcgatgaactgccgcacgccctgacctcgggcggcgtgtccaacgtgtcgttctcgttccgcggcaacaacccggtacgcgaagccattcactcggtgttcctgctccacgcgatccgcaatggcctgagcatgggcatcgtcaatgccgggcagctggaaatctacgaccagatcccggccgagctgcgcgactgtgtcgaagacgtggtgctcaaccgtaatcccgaaggcaccgaggcgttgctggccattgccgacaagtacaagggcgatggcagcgtcaaggaggctgaaaccgaagaatggcgcagctggccggtcaaccagcgcctggagcacgcgctggtcaagggcatcactacccacatcgtgcaggacaccgaagagtcgcgcctgggcttcacccggcctatcgaggtgatcgaaggcccgctgatgtccggcatgaacgtggtcggtgacctgttcggcgcgggcaagatgtttctgccgcaggtggtgaagtctgcacgggtgatgaaacaggcggtcgcgcaccttattccgttcatcgaactggaaaaaggcgacaagcccgaagccaagggcaagatcctcatggccacggtcaagggcgacgttcacgacatcggcaagaacatcgtcggcgtggtgttgggctgtaacggctatgacatcgtcgatctgggtgtgatggtgcctgccgagaagatcctgcaggtcgcccgcgacgagaagtgcgacatcatcggcctgtccgggctgatcaccccgtcactggacgaaatggtgcatgttgcccgtgaaatgcagcgtcaggacttccacctgcccctgatgatcggcggcgcgaccacctccaaggcgcacacggcggtcaagatcgagcctaaatacagcaacgatgcagtgatctacgtcaccgacgcctcccgagcggtgggggtcgcgacccagttgctgtcgaaagagctgaaaccggcgttcattgaaaaaacccgccttgagtacgtcgaagtccgcgaacgcacgtcggcgcgcagtgcacgcaccgagcgcctgagctatggcgcagcggtggcgaaaaagccgaagttcgactgggaaagttacacccctgccaagccgaccttcactggcacccgcgttctgcaggacatcgacctgaacgtgctggctgactacatcgactggacgccgttcttcatttcctgggacctggccggtaaatacccgcgcatcctgaccgacgaagtggttggcgaagctgccactgcactgtttgaagatgcccagcaaatgttgcgcaaactgatcgatgaaaaactgatcagcgcgcgcgccgtattcggcttctggccgaccaaccagatcaacgatgacgatctggaggtctatggcgaagacggcaagccgctggcgaaactgcatcacctgcgccagcagaccatcaagcctgacggcaaaccgaatttctcgctggcagacttcgttgcgcccaaggacagcggcctgaccgactacattggtggtttcatcaccaccgcaggcattggcgccgaggaagtggccaaggcttatcaggacaacggcgacgactacaactcgatcatggtcaaggccttggccgaccgtctcgccgaagcctgcgccgaatggctgcaccaacaggtgcgcaaggattactggggttacgcgaaagacgaagcgctggacaacgaggcgctgatcaaggagcagtacatgggcattcgccccgctccgggctatccggcgtgccctgaccataccgaaaagggcaccctgttcgccctgctcgacccgctgccggaaggcacgcccgagcacacgccgggcaaaagcggagtgttcctgaccgagcactacgccatgttcccggcggcggcagtcagcggctggtatttcgctcatcctcaagcgcagtactttgcagtcggcaaggtcgacaaggatcaggtcgaaagctacacagcacgcaagggtcaggacctgagcgtcaccgaacgctggctggcacccaaccttggctacgacgag

SEQ ID NO: 33285 - DNA, 1605 bp, Pseudomonas syringae
atggccattctgcacacccgaatcaacgtccgctctacggagtttgcccttaatcacgacgcacttctcaagcaagtcgaggaactgcgcagcctgctgggtaaagtccgccagggcggcggagccaaggctcaggaacgtcacacctcacgcggcaaactgctgccgcgcgagcgtatcaaccgcttgctcgacagcggctcgccatttctggagatcggccaactggctgcccacgaggtgtatggcgaagacgttccggctgccggagtgatcgccggcattggtcgtgtcgaaggcgtcgaatgcatgatcattgccaatgacgcgacggtcaaaggcggctcgtactacccgttgacggtgaaaaagcacctgcgggcgcagaccatcgcccagcagaaccgcctgccgtgcatctatctggtggattccggcggtgccaacctgccccgtcaggacgaggtgtttcctgaccgcgaacacttcgggcggattttcttcaatcaggcgaacatgagtgcccagggcattccacagattgccgtggtaatgggctcgtgcaccgcaggcggagcttacgtaccagcaatggccgacgaagcaatcatggtgcgccagcaagccacgatttttctcgctggcccgccgctggtcaaggcagccaccggtgaagtggtcagcgctgaagacttgggcggtgccgatgtgcattgcagaacatccggggtggccgatcattacgccgacagcgatgaacatgcgctggggctggccaggcgcagtatcgccaacctgaactggcgcaagcagggccaactgaacgcaatcgcgcccattgcgccgctgtacgccggcgaagagctgtacggcattatcccggcggataccaagcagccattcgatgtgcgggaagtgatcgcccggctggtggatggctcgacgctcgatgagttcaaggcgctgttcggcaccacactggtctgcggtttcgcgcgcctgcatggctacccgatcgcgattctggccaacaacggcattctgttcgccgaggctgcgcaaaaaggcgcgcacttcatcgagctggcctgccaacggggcattcccctgctgtttctgcagaacatcaccggtttcatggtcggccagaagtacgaagctggcggtatcgccaaacacggcgccaaactggtcaccgccgtggcctgcgcgaaggtgccgaaattcacggtgatcatcggcggcagtttcggagccggtaactacggcatgtgcggtcgcgcttacgatccgcgctttctgtggatgtggcccaatgcccggattggcgtaatgggcggcgaacaggccgccggtgtgctggtgcaggtcaaatgcgagcaggccgaacgtgccggtcaggcgttcagcgcgcagcagcaggcggagctgaaacaaccgatcctcgatcagtatgagcatcagggccacccttactattccagtgcgcgcctgtgggacgacggggtcatcgacccggcacagacccgcgagattctcgccctggccctctgcgcctcgctcaatgcgcccatcgaacctaccaccttcgggctgttccgaatg

SEQ ID NO: 33286 - DNA, 3324 bp, Pseudomonas syringae
atggctaagaagcccgatgccgcgacattcatcaaagacccgctctggtacaaggatgcggtgatctatcaggttcatgtgaagtcgtttttcgacgccaacaatgatggcatcggcgacttcgccggcctgatcgaaaagctcgactatattgccgcgctgggggtcaacacgatctggctgttgccgttttacccgtctccgcgccgggacgacggctacgacatttccgagtaccgcgacgtccatagcgattacggcaccatggccgacgccaagcgcttcatcgcccaggcgcacaagcgcggcctgcgggtgatcagcgaactggtcatcaatcacacgtccgaccagcatccttggtttcagaaggcgcgcaacgccaagcctggctccaaggcccgtgatttctacgtgtggtcggacaccgaccagaagtacgacggcacgcgcattatctttctcgacaccgagacatccaactggacttgggacccggtcgccggccagtatttctggcaccggttctactcgcaccagccggatctgaacttcgacaacccgcacgtgctggatgcggtgctggaagtcatgcggttctggctggatctgggtatcgatgggttgcgcctggatgctattccgtacctgatcgaacgcgatggcaccaacaacgagaacctgccggaaacccatcaggtgctcaagcgtatccgcgccgagatcgatgccaattacccggaccgcatgctgctcgccgaggccaatcaatggccggaagacacgcagctgtattttggtgacagcaaggggccggacggtgacgaatgtcacatggcgtttcactttccgctgatgccgcgcatgtacatggcgctggcgcaggaagaccgctttccgatcaccgacattttgcgccagacgccggaaattccggaaaactgccagtgggcgattttcctgcgcaaccacgatgaactgaccctggaaatggtcacggatcgtgagcgtgattacctgtggaattactacgcggccgaccggcgtgcgcggatcaacctcggcatccgtcggcgtcttgcgccactggtcgagcgtgaccgtcgccgcgtcgaactgctgaacagcatgttgctgtcgatgcccggtacaccgacgttgtattacggtgacgaaatcggcatgggcgacaacatttatctgggcgaccgagacggtgtgcgtacgccgatgcagtggtcgattgaccgcaatggcggtttctcgcgtgccgatccggccagcctggtgctgccaccgatcatggacccgatgtatggtttccagtcggtcaacgtcgaaagccaggagcgtgacccgcattcgctgctcaactggaaccgccgcatgcttgccgtgcgcaagcagcagaaggcgttcggccgcggcacactgaaaatgctttcgccgtccaaccgacgcattctggcctacacccgtgagtacactgcgccagacggtcacagtgaagtggtgctgtgtgtggccaacgtgtccagtgcggcgcaggcggcagagctggatctgtcgggctacgccggcacggtcccggtggaaatgcttggcggcagcgcctttccgcctattggccagttgaattacctgctgacactgccgccgtacggcttttactggtttctattggctacggagaatcaaatgcccagctggcacgttgaaccggcgcaaagcatgccggactttccgaccctggtgctcaagaagcgtcttgaagagctgctcgaagagccgctgcgcagcaccatggaagacacctcgctgacggtctatctgcccaagcgccgctggtttgcgggaaaggacaaggccatcgagaaggtcaacatcgcctatgcagtgcgttttggtgacgaggcgcacccggtgctgctcagtgaaatagaagtgaccgctggcgggcagactgatcgctatcaactgccgttcggcctgctgggcgaagacgacatcagcagcgcattgccgcaacaactggcactggcccgcgtgcgtcgcagccgcgatgtagggctgatcaccgatgccttcaccctggaaacctttattcgtgcagtaattcagggtatgcaatcggacacggtcatcccgtgtgccgacggccaattgcgtttcgagcaaagttcgcagcttgcgccgctgggcctgacccatgagtccgaggttcgttatctgtctgccgagcagtccaacagttcggtggtggtcggcagcagcctggtgctcaagctgattcgcaaagtcagcgccggcacgcaccctgagctggaaatgggggcattcctgacccatgccggcttcaagaatatctcgccattgctgggttcactggtgcgcgtcggcaacgacggtcagccgaatctgttgatgatcgctcaaggctacctgagcaatcagggcgatgcgtgggaatggacgcagaacaacctggaacgtgcggtgcgcgacgagttggcgcatggcgtgtccggtcaggaacagcattacaacgccttgcttgaactggcggacttttcgcgcagcctgggtcagcgactgggtgaaatgcaccagattctagcgtcgccgactgataacgcagattttgcggtcgaaattaccagcgctcaggacagcaaggcgtccgccaccagcgtcaacgcacagcttgagcgcgccctgcagttacttgagcagcgcaagggcgatctggacaaggatgatcagcagttggtcagcgacctgcttgcgcaccgcaagcagattcgccagcgtgtcgaaggccttgccaaacgctcggccggtggcctgcgcattcgggtgcacggtgacctgcacttgggccaggtgctggtcgtgaagggggatgcctacctgatcgactttgaaggcgagcccgcccgtgcgcttgaagaacgccgcgctaagcacagcccgttcaaggacgtcagtggcgtactgcgttcattcgactacgctgccgcgatggccgtgcgcagtgcgcaaagcgtcgatacctcgccgcaagccgcagccgcacgcaaacaggtcgccgagacgtacctagcgcaggcccgcgaagcgtttatcgaaggatatcgcttggcaacctccggcatcgcgcacgcctggaaagatgcaaaaggggaggactccgcactggagctgttcaccctggaaaaagccgcttatgaagtgatctacgaagccgagaatcgtccagcctggttggccgttcctttgcaaggcttgcgtgggttgctgcaaccgtctgatggagaaccgata

SEQ ID NO: 33287 - DNA, 1563 bp, Pseudomonas syringae
atgcagttcggcgccaaacccttgttcgagaacgtctcggtcaagtttggtgccggtaaccgttacggcctgatcggcgcgaacggctgcgggaaatccacgttcatgaaaatcctcggcggcgatctcgagccttcgggtggccaggtgatgctggagccgaacgtgcgtctgggcaagctgcgccaggatcagttcgcctatgaagaattcactgtgctcgacacggtgatcatgggtcacgaggagctgtggaaggtcaaggccgagcgcgaccgcatctactcgctgccggaaatgagcgaagacgacggcatggccgttgccgaactggaaaccgagttcgccgaaatggacggttacaccgccgaatcccgtgccggtgaactgctgctgggcctgggtatcggcatcgaacagcacaccggcccgatgagcgaagtgtcgcccggctggaaactgcgcgttctgctggcgcaggcgctgttctccgatccggaagtgctgttgctcgacgaaccgaccaaccacctggacatcaacaccattcgctggctggaaaacatcctgacccagcgtaacagcctgatgatcatcatctcccacgaccgtcacttcctgaacagcgtgtgcacgcacatggctgacctggattacggcgagttgcgcctgttcccgggcaactacgacgagtacatgaccgtagcgacccagtcgcgcgagcagttgctgtcggataacgccaagaagaaagcacagatttccgaactgcaatcgttcgtcagccgcttctcggccaatgcctcgaaagccaagcaggccacgtcccgcgccaaggcgatcgacaagatccagctggccgaggtcaaaccttcgagccgtgtgagcccgttcatccgtttcgagcaaaccaagaagctgcaccgtcaggcagtcattgtcgatcgcatggccaaaggctttgacggcaagacactcttcaaggacttcagcttccaggtcgaagcgggcgaacgcgttgcgatcatcggcccgaacggtattggcaagaccaccctgctgcgcactctggtcaacgaactgaccccggatgccggtactgtcaagtggaccgacgctgcggaactgggctactacgctcaggaccacgctcacgactttgaagacgactgcaacctgttcgactggatgggccagtggactcagggcggcgagcaagtggtgcgcggcacccttggccgcatgctgttctccaacgacgagattctcaagtcggtaaaagtgatttccggtggtgaacagggccgcatgctgttcggcaagctgatcctgcaaaagccgaacgtgctgataatggatgaacctaccaaccacctggacatggaatccattgaagcgctgaacctggcgctggagaactaccccggcacgctgatcttcgtcagccacgaccgcgagttcgtgtcctcgctggcaacccgcatcatcgagctcagcgctagcggcgtggtcgacttcagcggcacctacgatgactacctgcgcagtcagggcgttacgttc

SEQ ID NO: 33288 - DNA, 528 bp, Pseudomonas syringae
ttgacgattacccagcgcgacgcatcttcagcagatgccatttgcctcagcgcactgggcatgcaggtctttctcgacacctacgcgacgcagggcattcgggaatccatcgcacgcgaagccctcgacgctttctccccgcaggcgtttgcgcatctgcttgccgaaccggcaacgctcatcattgtggctgaatcccaggggcacctgatcggcttcgcccagttcgccttgcgcacagatcacccaatgcttggcatcccgacagccgccgagttgcagcgcttatatgtacaagagcgtttcaccgggcgtggcgtggggcggctgttgctcgaagctgccgagcagcgtgcagccgcggggaatgcgacgctgctgtgggccactgtatgggttggcaaccctcgcgcgttgggggtttatcctcgtcagggctacgaggtgaaaggctccccacgctatgtgttccagggcgaaacacacgagaactgcctgtttgccaaagcaatcgtcaaggcggtgcga

SEQ ID NO: 33289 - DNA, 903 bp, Pseudomonas syringae
atgagtaaaacaacaaaaattactgacccttcctacgagctgatggacgaccataacggcttgtcgatcatttatcgcgagcatggttttccgtgcccgctggtgcgctggcacttccacaaggaatacgagctgcatctgattgtcgccagctccggcaaggtcttcgtcggtgactacatcggtaacttcaaccctgccagcctgttcctgaccgggcctaacctgccgcataactggatcagccaggttgacgagggtgaagtcgtggcgcggcgcgacatgctggtcaatttcaccgatgaactgctggaaagtggcaatcaggtgtttgccgaactcaagaccctcaccccactgctggaacgcgcccgctacggcatcgaatttcgctgcaagcgcacaattcgtcaggccatgaagcagatgcagaaaattgccgactcgcgcggcattacacgtctggggcactttttcattcttctcgagctgttggccgccagcgatgattatcagttgctgtcaggcaccgccgtcgcccacacggccgatgagcacagcgtcgatcgtaccaaccgcgcagtggattatatttttgctcactacagccgggagctgccgctggaagaagttgccgagtacctgggcatgaaacccacttacttttccagggtattcaagcaggccacggggcgctgtttcgtcgagttcgtcaatcggttgcgcatcagcaagtcctgtgaactgctggccgacggcgacaaaacggtcactgacgtgtgtttcgagtccggtttcaacaatatttccaacttcaatcggcgtttccagcagctcaagggcatgaccccctcgcactatcgtcgcctcgccgttcagcgcctgaccgaacaaaacctgtac

SEQ ID NO: 33290 - DNA, 213 bp, Pseudomonas syringae
atgccagccgtcaaagttaaagagaacgaacccttcgacgtagctctgcgtcgtttcaagcgctcctgcgaaaaagccggtgttctggctgaagttcgtagccgcgaattttacgagaagccgacttcggagcgtaagcgcaaggcagcagctgctgtcaaacgccacgccaagaaagtccagcgcgaacagcgccgcgccgttcgtctgtat

SEQ ID NO: 33291 - DNA, 3657 bp, Pseudomonas syringae
gtgagcctgatcgcattactgctgctggtgatcgtcagtgcttcactgctgctcggcactcaggccggcagccgctgggcgctggcgagtgtgcccggcctgcaactggaaaatttccagggccgactgggcgggcagtggggcgctgagcggttggtgtggcagcagggcgaagaccgtgtcgaggtgcaagctgtcgactttgcctggacgccagcctgcctgctgaaaatgaccctgtgcatcgaccgcttgcacgccgggcaagtgctgttacgcttccctccaagcggtgcgccgagcgacgaaggccctgtcaatttgcccgcgctcaggctgccgctcgcgctgcaactggacgatgtacagctgggcagcctgcaacttgatggtgccgagcaattgcgcgacctcaagctggcggcgcactggactgcccaaggtttgcagatcgacagcgcgcacctgcaacgcgatgcgctgattctggacctcaatggcctgctgaagcccgagggtgactggccactgaccgcaaaagggcaattgcagcttccgccgcaggacggccagccgtggacgctggctctggatattcagggcgacgtgctcaagaccctgcaactgaaggctgacagcagcggttacctgactggtgtattgagcggcgagctgcaaccgctggcggagcacctgccagcccgattgaagctgacggccgagcacttcaaacccagcgccgccttgcccgacaccctgcaactggaccagttgctgctgaccgccgagggcaatctcgactcgggctacctgataaacggctcggccagcctgcccgcagaaaaagaccctgtggcccttgcgttgcaggggcgcgtagatgccaacggggcaagcattgctgcgctggacctcgccgccgacgaccaacagcgtttaaccatcaatggcacattgaactggcagaacggtttttccgccgatgcgaacatcgactggctggacttcccctggcagcgtctgtaccccgtggcgtccgaacctcaagtagcgttgcacgccttcaagggcgaggtttcctacactgacggcaattatctaggcaacttcaacgccagcctcaaagggcctgccggcgcgttcacagtggtcagcccgttcagtggcaacctgcaagagatccatctgccgcagctggaagtggttgcggggcagggcaaggccagcggtcacctgaatctgcaattcgctgacggtattggctgggacacggcgctggacctgagcgcgctggacccctcgttctgggttgccgagctgcccggcacgctggcaggtccgttgcgcagcaagggccagttcagaaacgagcagcttgaactcaacgcagacctggatttgaaagggcgtttgcggggtcagccagccgtgttgcaagccaaggccgacggtcgcgatcagcagtggactgtcagcagcctgaatattcgcctgggtgataaccgtatccaaggcaccggcagcctgcagcagcgcttgaacggtcagcttgacctcgatctgccgcggcttggccagttgtggccccgtttgcaggggcaggtcaaaggccggctggatctggccggaacactacaaacgccgcagggccaactggccttgcagggcagccagctcgcgttacaggacaatcgcctgcaaagccttgcgctcactgcccggctggatcaggcgcaacgtgcggccctcaatgtgaaaggcgtcggcattcaggctggcgacactgcgctgggcaccttgctggtcgatggtcagggcacgctcaaggcgcagcaggtgaagctggacctgcaaggcccgctgctcaagctggccatcgctctggacggcgggctggacaaaggcaactggcgtggccgactggccagcggtacggtgcagagcggcgggcagaactggcgcttgcaacagccggcaaaaatcgagcggctggccgacggcaggctgaatttcggcgcgcactgctggctgtccggggcggccagcctgtgcggtggcgatcagcgtctgatgcctgacccgcgcctgcgctatcaattgaagaacttcccgctcgacagtctggcgcaatggatgccgaaggatttcgcctggaagggcacattgaatgccaacgttcagctcgacataccggcggcaggccccagcggccagatcagcatcgacgcaggaggcggcacattacgggttcgcaacaacgaccagtggctggattttccctaccagaccttgaagctcgccagtaccctgacccccaagcgcatcgactcgcgcctggattttgaaggcggcaaactgggccgtctgctgttgaacgcgcagatcgacccgctggccaagaacaagacgctggcgggcgacttcaatctgtccggtctggacatctccgtggcacggccgtttgcgccaatggtgcaaaagctaagcgggcgcttgaacggcaatggtcggctgtcgggcagtttgctggcaccgctggtcaatggcagcgtgaccctggagggcggtgaagttgcgggtgccgaattgccgatggagctgcacgacctcaaggtccaggcattgattgctggcgaaagcgtgcagatcaacggcggctggaaaagcggcagtaccggacagggcagcatcggcggtcaggttgcctggggtcagagcctgctggtcgatgtgagcctcaagggttcacgcctgccgatcaatgtcgaaccctacgcggcggtagaggcagcgcctgacctgaagatttccatgcagggcgagcggctggccatctccggcaaggtgctggtgcccaagggcgcgatcaccgtgcgtgagctgccgccatcgacggtcaaactgtcgggcgacacggtgattgtcgggcagcagaccggggagggggcgccaccgctggccgtggccatggacatcaacgtggaagttggccaggaaaaactcagcttcagcggcttcgggctgaccgccaatctggttggccgcgtgcacattggcgacaatctggatacccgtggcgaactgaacctcaatgacggccgttaccgtgcctacgggcaacggctgacgattcgcaaggcgcgcctgctgttcgccggccccgtggaccagccttatctggacatcgaggccatccgccagaccgacgacgtgattgccggtatccgactgaccggcagtgccgagcagcccaccaccgaagtgttttccgagccggccatgagccaggagcaggcactgtcctatctggtcatgggcaggccgttgagcacttccggtgaagacaacaacatggtcgcccaggctgcgctggcgctgggtgtggcaggaagttcatcgaccaccggcaagttggccgataacctcggcatcaaggacttcgagctggacacctcgggaaccggcgacaagaccaatgtggtggccagcggcaaaatcaccgaaaaactcagcctgcgctatggggtgggtgtgttcgagccggccaataccatcgcgctgcgttacctgctgagcaaacgcgtataccttgaggcggccagcggggttgccagttcgctggatattttctataaaagagacttctgaacacgggcc

SEQ ID NO: 33292 - DNA, 660 bp, Pseudomonas syringae
atgaattatcaactgaattttgatgctgtatggcgcgacttttccaacttgctggccgggttggggctcggtctggaactggcgctgatctcgatcgccatcggttgtgtgatcggcttgatgaacgccttcgcattgttgtcgcgttaccgggcgctgcgaattgtggcctcgatctatgtgacggtggtgcgcaacacgccgattctggtgttgatcctgctgatctacttcgctttgcccggcctgggcattcgcctggacaaactggcgtcttttgtcgtcacgctgtcgctctatgcgggcgcgtatctgaccgaagtgttccgcgccgggttgttgagcatccacaaggggcagcgtgaagcagggctggccatcggtctgggtgaatggcaggtgcgggcctacattatcgtgccggtgatgttgcgcaacgtgttgccagcgctctccaacaactttatctcactgttcaaggacacatcgctggcggctgccattgccgtgccggagctgacctattacgcgcgcaagatcaacgtcgaaagctaccgggtgatcgaaacctggctggtcactaccgcgttgtatgtggtggcmtgctacgtgatcgccatgctgctgcgcaccctcgaacaacgtctggcgattcgccgc

SEQ ID NO: 33293 - DNA, 699 bp, Pseudomonas syringae
atgacgtttcgattttttgcattgttttgcaccaccctgctcatcaccgcttcactcccggcccaggcccaagccccgcgtacattcagtgaagcgaagaaagtcgcctggggtttgtatgcgccgcagtcgaccgagttttactgcggctgcaaatacaccggcaagcgggtcgatctcgccggctgcggctatgtaccgcgcaaaagcgccaagcgcgccagccgcatcgaatgggaacacatcgtcccggcctggcagatcggccatctgcgtcagtgctggcagaacggcggtcgcaagaactgcacgaagtctgaccccgtttacaaacgcgccgaagcagacctgcacaatctggtgcccagcatcggtgaggtgaacggtgaccgcagcaacttcagttttggctgggttcccgagcaaaaaggccagtacggctcatgcctgactcaagtggacttcaaggccaaaaaggtcatgccgcgcccatcgatacgcggcatgatcgcgcgcacttatttctacatgagcaagcaatacaacttgcgcctgtcgcgtcaggatcaacagctttatcaggcctgggacaagacctaccctccccagatctgggagcgccagcgtaaccagcaggttgcctgcgtaatggggcgcggtaatgagtttgtcggcccggtggacttgaaagcgtgtaaa

SEQ ID NO: 33294 - DNA, 1217 bp, Pseudomonas syringae
agcaatcaactgtttgatgcctatttcacgcagtccgatatgcgcgacattttctcggacgaaggccgggtgcagggcatgctcgatttcgaggctgcgctggctcgggcgcaggcgcgagtcggcctgatcccgcaacaggtcgtggctgatatcgagcagagctgccgcgccgagctgttcgatttcgacgaactggccattgccataggcagcgccggcaattcggcgatcccgttggtcaaggcgctcggcaggcagattgctgcgcgcaacccgcaagccgagcgttacgtgcacatgggcgcgaccagtcaggacgtgatggacagcgggctggtgctgcaaatacgccgggcgatcgtcttgctggagcgtgaccttgcgcaactggccaaggcactggctgaacaggcgcagcgccatgctgctacgccgctggccgggcgcacctggttgcagcaggccacgccggtcacgctggggatgaaaatcgccggttggctgggcgccatcactcgccatcgccagcgcctgaacgagatcaaaccgcgcctgctgtgcctgcaattcggcggcgcgtccggcagccttgcggcgctgggcgaccgggccttcccggtggcgcaagcactggcgggtgaattacagctggaactgcccgagcagccctggcacacccagcgtgatcgtctggtggagtttgccagcgtcctgggcctgatcgccggcagcctcggcaagcttgggcgtgacgtcagcctgttgatgcagaccgaagtgggcgaggtattcgagccttccgcaccgggcaaaggtggctcttcgaccatgccgcacaagcgcaacccggtgggtgcagcggtgatgatcggcgcagccactcgggcaccggggctggttgcgacgatgctgtcggccatgccacaggagcacgagcgcagcctgggcctgtggcacgccgagtgggaaaccctgcctgagctgtgctgcctggtgtccggttcgctgcaacaggcattgcaggtgatacccggtctgcaagtagacgccgagcgcatgcgggtcaatctggaatctacccaaggcctggtgctggccgaagctgtgagtattgcgctggcccagcgtatcggccgtgacgcggcccatcatctgatcgaacaatgctgtcggcgtgcggtggagcagggcgcgcatctgcgtcaggtgctcgg

SEQ ID NO: 33295 - DNA, 927 bp, Pseudomonas syringae
ttgaatatcgacacccgcatcaaatttcgccatctggtgtgctttctggaagtggcacggcagggcagtctggcgcgggcctccgatgcgctggcgatcagtcagcctgccttgtccaaaagcctcaaggagctggaaaccctgctggccacgaccttgttcgtgcgcagcaagagcggtgcggcgctgaccgacgcgggcgtggcgttcatgcgtttcgccgggcctagcgtccaggcgttgcgcgacggggtcagcagcctacgctccggcgagcatgaaaccgttacggcgcggctgggcgtgctgtccaccgccgaaagcctgctggtgccagaggtcgtcaagcgcctgcacacgcgccacccggcgttgatcgtcagtgtgatgactggccccagcgcctatctgctctcgcaattgcgtgtcggcgagctggacctggtggtcgggcgcatgaccgacagcccgcagattcaggggcttactttcgagcacttgtaccacgagtcaatgacgctggtggtgcgcaatgaccatccgctgctggctgcgccgctcaagcgtgaaagcctggagcagttcccgctggtgctgccgctggcgggcaccaccatccgcaagtttgccgacagcctgttcgtgcagtgcggtattcagatgccgcgccagcgcctggaaaccctttcactgaccctgagccgccgttacgtgcagtgcagcaatgcgatctggattgcaccgctggacgctgtgttgctggagttgaaaggcggcactctggtcgaactggatatgggaattcgcgagccgggcggctcggttggcctgtgcagcaacccggccttgccactgacgcgcgcagcgcagtggtgcgtggatgagttgcgaaccgtcggtgcggcgtaccgggaagggcagtatgca

SEQ ID NO: 33296 - DNA, 1215 bp, Pseudomonas syringae
gtgctgatgaacaacgagccaaaaaccctgttgccggttgaagaggccattgcccgactgctggcaatggccgaggccacgccaatcaccgaacgccagcgcgtctcgctggccgatgccgaaggccgtgtgctggcggtggatctggtttccacgctggacctgccgccctggccgaacagcgccatggacggttatgccttgcgccatacggactggaccggcgagccgctgaccgtcagccagcgcatttttaccggccaggcacccgagccactggcccccggcacctgcgcacggatcttcaccggtgcgccgatgcccgagggtgctgattgcgtcgagatgcaggaaaacgccgacgtgatggcagaccagcgtgtgcgcttcggcgagccgctgagcgtcgggcagaacattcgcccgcagggccaggaaacccgtatcggcgacagcgtactggcagccggcacgcgcctgggtcctatcgaactgggcctggccgcttctttgggccttgccgagctggaggtgattcgtcgcgtgcgcgtggcggtgctgtccaccggtgatgaattgatcgagcccggccagccactggggccggggcagatctacaacagcaatcgggtgttgctgtgcagttggcttaagcgattgcactgtgacgtggtggacgcgggcattctgccggacgacctgctacagacccgcgcggcactggcaaacctgcacgacgtcgatctgatcctctcaaccggtggcgtctcggtcggtgaagcggattttctcggccatgctttgcgcgaagagggcgaactgacgctgtggaagctggcgataaaacctggcaagccgctgaccttcgggcatttccgtggtgtgccggtgattggcctgcccggtaatccggcctcgacgctggtcacgttcgccttgctggcgcgcgcttacctgctgcgtcgtcagggggtgatggaggtcgcgccgatgcagtttcccgtgccggcggggtttgtctggacgcgtcccggcaatcgtcgcgagtacctgcgcggtcgtctggaacagggccgggccgttgtctatcgcaaccagagttctggcgtgctgcgcagtgctgcgtgggctgacggtctgatcgaagtgcgtgagggcacgacagtggccgagggcgactgggtgagcttcattccactgagtgaagtgctcggt

SEQ ID NO: 33297 - DNA, 390 bp, Pseudomonas syringae
atgactctgggaacggaatcagcaccgcccgagggaactccgggctctacaccgcggcgcctcggcgctgccttccttggcctgttgcacagccacgtcgaactgttcggcatcgagctgcaagagcagaaggcgcgcactgtcagcctgttgctgttcgcagggctggcgctggttttcggcctgctgttgctcacggggctctcggcgctgctgctgattgttctgtgggacagctatcgactggccgggatcatcggcctgtgcacgttctactttctggccgcgatcttctgcggattgcgcctcaaagcagcgattttcgatgagtcgtcgccgtttcatgcgaccctcgaagaactggccaacgaccgtgagcgattgatgcca

SEQ ID NO: 33298 - DNA, 852 bp, Pseudomonas syringae
atgacccatgctgaacacacctccgtactcgccggcctgatcggctccggcatccaggcttcgcgaacgcccgccatgcatgagcacgaaggcgatgcacagggcctgcgctacctgtaccggctgatcgatatcgacgcgctgcaactggacatcaacgccctgccccggcttgtcgaaagcgcgcagaactgcggttttaccggcctgaatatcacctttccctgcaaacaggcggtcatcccgttgctggacgaactgtccgacgaagcgcgcggcatcggtgcggtcaacaccgtggttttcaaggacggaaaacgcatcgggcataacaccgactgtctgggttttgccgaaggtttccagcgcgggctggacaaagcgccacgtcagcatgtggtgcaaatgggcgcaggtggtgcgggcgctgccgtggctcatgcgctgctgagcgcaggcgtcgagcgcctcaccgtgttcgaggtcgagccgcagcgtgcgcaaggcctggtggacaacctcaatgagcatttcggtgccggacgcgcgcaggtcggtcttgacttgcctgcggcaatggccgaagccgacgggctggtcaataccacgccggtgggcatggccaagctgccgggcacgccgttgccggttgaactgctgcggcccgcgctgtgggtggctgaaatcatttacttcccgctggaaaccgagctgctcaagcacgcccgcacactgggctgccgtacgctggatggcagcactatggcggtgtttcaggcggtcaaggcgttcgagctgttcagtggccggtccgctgatgcgcaacggatgatggcgcacttccacaccctg

SEQ ID NO: 33299 - DNA, 531 bp, Pseudomonas syringae
atgagacaagataaacgagctgcacccaaggccccgatcaatgagaatatctcggcccgcgaggttcgtttaattggcgctgacggcgagcagattggcatcgtctcgattgatgaagcgcttcgtatagccgaagaggccaagctggatctggtagagatttctgccgacgcagtacctccggtctgccgtgtgatggactacggcaaatcgatcttcgaaaagaagaagcaggttgctgcagcgaagaaaaaccagaagcagatccaggttaaagaaatcaagtttcgtccagggacggaggaaggggattaccaggtaaaactacgcaacctggtacgtttcctgagtgacggggacagggccaaggtatcgttgagattccgcggtcgtgagatggcccaccaggagctgggtatggaattgttgaagcgggttgaaggtgaccttcttgaatacggttccgtcgaacagcatcctaagatggaaggacgccagctgatcatggtcatcgccccgaaaaagaagaaa

SEQ ID NO: 33300 - DNA, 1920 bp, Pseudomonas syringae
atgccaactattactcttcccgacggcagtcaacgttcattcgatcatgcggtttccgtagccgatgtcgcgctttcaatcggcgccggtctggccaaggccaccgttgccggtaaagtcgacggcaaactggtcgacgcctgcgacctgatcgaaaacgatgccagcctgcagatcatcacccccaaggacgcagagggactggagatcatccgtcactcctgcgctcacctggtagggcatgcggtcaagcagttgtatccgactgcgaaaatggtcatcggcccggtgatcgacgacggcttctattacgatatcgcctacgagcgcccgttcacgcctgacgacctggcggcgatcgagcagcgcatgcagcagctgatcgaaaaagattacgacgtcatcaagaaagtcactccgcgcgccgaagtgatcgaggtgttcaccgcccgtcacgaggactacaagctgcgccttgtagaaggcatgccggatgagcaggccatgggcctgtattaccacgaagaatacgtcgacatgtgccgcggtccgcacgtgccgaacacccgcttcctgaagtcgttcaagctgaccaaactgtcgggtgcctactggcgcggcgatgccaagaacgagcaattgcagcgcgtttacggcaccgcttgggcagacaagaagcaactggcagcttacatccagcggatcgaagaagccgagaagcgcgaccatcgcaagatcggcaagcgcctcggcctgttccacacccaggaagaggcgccgggcatggtgttctggcacccgcagggctggaccctgtatcaggtgcttgaacagtacatgcgcaaagtgcagcgcgaaaatggctaccttgagatcaaaaccccgcaagtggtcgatcgctcgctctgggaaaaatccgggcactgggccaactacgccgacaacatgttcaccacgcagtccgaaagccgcgactacgccatcaagccgatgaactgcccgtgccacgtgcaggtgttcaatcagggcctgaaaagctaccgcgagctgccgctgcgtctggccgagttcggtgcctgccaccgtaacgagccgtcgggtgccctgcacggcatcatgcgcgtacgtggtttcactcaggacgacgcgcacatcttctgcaccgaagaccagatgcaggccgagtccgccgcattcatcaagctgacgctggatgtctacgccgatttcggtttcaaggatatcgaactgaaattgtccactcgccctgaaaagcgtgtaggctccgacgagctttgggatcgtgccgaatcggcgctggcttccgcactcgacagcgcaggcctgccttacgacctgcagccgggcgaaggtgcgttctacggtcccaaaatcgagttttccctcaaggattgtctcggtcgggtatggcagtgtggcaccttgcagctggacttcaatctgccgatccgtctgagtgcagagtacgtttcggaagacaacagtcgcaagaatccggtcatgttgcaccgcgcaattcttgggtcgttcgagcgtttcatcggaattctgatcgagcattacgaaggcgcgtttccagcctggctggcgccaacccaggcagtgatcatgaatatcactgacaaacaggccgattttgcccttgaagtggaaaaaactctggctgaaagcgggtttcgtgccaagtccgacttgagaaatgaaaagatcggctttaaaatccgtgagcatactttgctcaaggttccctatctcctcgtgattggagatcgggaagttgaaatgcaaactgtcgctgtgcgtacacgtgaaggcgctgaccttggctcgatgccggtcgcccagttcgctgaattcctcgcacaagcggtttcccggcgtggtcgccaagatacggag

SEQ ID NO: 33301 - DNA, 975 bp, Pseudomonas syringae
ttgtccctcctgagtaccgctgccgttcaggcggcagaaaaacgtgatctgatcatcgacaccgaccctggtgcggacgacgtggtcgcactgctgctggcgctggcgtcacccgaagagctgaacgtgatggccatcactaccgtggccggcaacgtcaggctggacaagacctcgcgcaacgccagactggcgcgtgaatgggccgggcgcgaagaagtgccggtgtatgccggtgcgcccaagccactggtgcgcacacctatttacgccgagaacgttcacggtcaggaaggtttgccgggtgttcccattcatgagccagccaaagggcttgccgaaggcaacgcggtcgattatctgattcgcacattgacccaggccaagccacacagcattaccatcgccatgctcggtccgcagaccaatctggcgttggcgctggtgcaggctccggaaatcactcagggcatcaaggaagtggtggtcatgggcggggcgcatttcaatggcggtaacatcaccccggctgccgaattcaacctgttcgccgacccgcacgccgcgcagatcgtcctggccagtggcgtgaagctgacctacgtgccgctcgacgtgacccacaaaattctcaccagcgaacagcgcctcaagcagatcgctgcgctgggcaacaacgctggcaagctggtggacgggattctcaatgaatacgtcaagctggacatggagcactacggcttgccgggtgggccggttcacgacgccagcgtcattgcctggctgctcaagcctgagctgttttccggccggcagatcaatgtcgccattgacacgcgcgagggcatcggtttcggtcagacagtcgccgactggtacggcacgctgaaacagccacagaacgtgttctgggtcgaagacggcaacgctcaggggtttttcgacctgctgaccgagcgtctgaaacgactcaag

SEQ ID NO: 33302 - DNA, 402 bp, Pseudomonas syringae
atgaaaaagacaccgctactcaatatcgccctgtcccgcgtcattgcttcgctggggcacggcgacatcctgatgatcgtcgatgccggaatgcccgtgccgccgggcgttgagctgatcgacctggcgctgacccgcggtgtacctgatttcgtcagtgtgctggacgtggtgctgagtgaaatgcaggttgaaagccacgtgctggccagagaaatggccgatatcaagccgcctgccttgcagatcatcgaaagcctgaatctcgacgatcaactggggcagcagcgctggatcagccacgaagacctcaaagccctgagccgcacggccaaggcgatcatccgcaccggagaatgtcagccgtacagtaatctggcgctggtgtccggagtcgttttc

SEQ ID NO: 33303 - DNA, 1014 bp, Pseudomonas syringae
atggcgaccatcaaggatgtcgcggcgctggcggggatctcgtacaccacggtctcccatgtgctgaacaagacccggccggtgagcgagccggtcaggctcaaggtcgaagcggccatcgcgcagctggattacgtgcccagcgccgtggcgcgttcgctgaaggccaagaccacctcaaccatcggcctgctgattcccaacggcatgaacccctacttcgccgagctggccaggggcatcgaggattactgcgagcgtaacggcttctgcgtgatcctctgcaactccgacgacaacccggaaaaacagcgcagttacctgcgcgtattactggaaaaacgcgtggacggcctgattgtctcgtcggtggctggcgataccagcgtcacctgcgggctgaccgaggtgcgcacaccgctggtgatcgtcgaccgcgagctgcagggcatcgacgccgacatggtgcgcatcgatcatgagcagggcgcctggctggccactcgtcacttgctggacctcgggcatcggcacattgcctgtattgccgggccgcgcgaaagtgcggtcgccgaacttcgtctggccggttatcggcgcgccatgcagcaggcgtccatcgaagtcggtgcaggctgggcggtgcacagcgagttcaccagcccggccggccatgaagcggcgggccggctgttggctgagcatgcgccgactgcaatcttcgccggtaacgatgtgatcgccatcggtgtgctgcgggcggcagccgagcgttcgattcgcgtgccacaggacctgtcggtgatcggttttgatgatatccagatcagtcgctacgtttatccggcgctgaccaccgtcgggcagtcgatcatgcaactgggtgaaaccgccgccgggatgctcctgagccggatcgccagcccccatgcaacccctgtcgagaaacgacttgtgaagccatgtgtcgtggtgcgtgaatccacggccgcgccgaacacgtcgtccaatgaa

SEQ ID NO: 33304 - DNA, 487 bp, Pseudomonas syringae
atgagccagatgagcttttccgatttcgaatatgccggcaagcgtaagcagacacgccgcgaacgttttctcgccgagatggatcaggtcgtgccctggacaggtctactgggcctgatcgagccgttctacccgaaggccggcggaggcagaaaaccttatcctctggaaaccatgctgcgcattcatctgctgcaaaactggttctccctgagcgacccggccatggaagaagcgctctacgaaatcacgcccatgcgccagtttgcacgcctgaccttgagcgccccgatacctgaagacaccacgatcatgaacttccggcacctgctggaaaagcatcaactggcccctgcgatcctcgcggtcatcaatggttatctgcaagacaaaggcctgtccctgcgccagggcaccatcgttgtcaacgccaactaaaaagtgacccccttccgtgctaaatcgccaacttagttttgacccccct

SEQ ID NO: 33305 - DNA, 492 bp, Pseudomonas syringae
atgcatcagacgaagaaaggtaaccaatacttcttcggcatgaaggcgcatatcggcgccgatgcggagtcgggactggttcatcatgttcatggcactgcggccaatgtggccgatgtcacgcaggtcgccgaactgctccacggcgaagaaagcgcggtgtatgcagacgctggatacaccggtgtcgagaagcgtgaagagcatgaaagtcgtgaggtcatctggcaaatcgcggcgcggcgcagcacgtattccaggctcaataaacgcagcgtgctctacaaggccaagcgcaagatcgagtactgcaaagctcagacacgggccaaggtcgagcatccgtttcgggtaatcaagcgtcagtttggctatgtgaaagtgcgctttcgtgggctgatgaaaaacacagctcagctgaccacgctgttcgccctgtcgaatctgtggatggctcgaaaacagctgatgggtatgggtgagttgcgcgtt

SEQ ID NO: 33306 - DNA, 774 bp, Pseudomonas syringae
atgggacgcggacttctgaatgccatggccagcctgcgcatagaagtcatcagtctgtttcccgagatgttttccgccatcagcgaatacggcattaccagccgtgcggtgaaacaagggctgttgcagctgacttgttggaatccgcgggattacaccactgatcgccatcacactgtggatgatcgcccatttggcggtggtccgggcatggtgatgaagatcaagccccttgaagatgctctggttcaggccaggcaggcggcaggggatgcggcgaaggtgatttacctgtcgccacaaggccgccagctgaatcaggctgcggtacgcgaactggcgcaggaggaagcgattatcctcatcgccggtcgttatgaaggcattgacgagcgtttcattgaagctcatgtcgatgaagagtggtcgattggtgactatgttctttccggtggcgagctgccggcgatggtcctgattgacgcggttacgcggctgctgcccggagctttagggcatgtggactccgcggaggaagattccttcacggatggtctgctggattgcccgcactacacccgacctgaggtgtatgcggatcagcgtgttcccgacgtgttgctaagtggcaatcacgcgcacatccggcgttggcgtttacagcagtcccttgggcggacctatgaacgacgcgctgatcttctggaaagccgctcgctttctggagaagagaagaagctgctggcggaatacatccgtgagcgggacgatagt

SEQ ID NO: 33307 - DNA, 3048 bp, Pseudomonas syringae
atgaaccccttatttagaatatccccccttgcctttgcgattactcttgcactgctcccggaggcccatgcagttgactatgtgctcactaacggtcaggacacctttagcagcgaccgcgtgatcgatggcgcgatcgacgtcaattcaactgacggcaacacctccaccctcacgatcaacagcggcgcgacggtgaccagcgaaggcggccgtatcgtgggtcaagccagccgcaccggcgtcaacatggctcaggccaacgttgtagttgaaggggccggttcgcgctgggtggtgcctcgtacctcattcgtgctcggtaacaccatcgttgtcggtggtgtaggccagggcgacctgacggttcgcaacgggggccaggtgtcggtacgggatctggatctgggtgacgtcagtggcgcccgttctaatgcattttcgaacgcgacgctgtcggtgagcggccagaactccctggtcgacgcagtcaacatcgaggccggtggagtgtttgtctatcgctcgagcatcacggccaacgagggtgccagaatcaacagccagcaggtcgacatcgactcggtcgtcaggctttctggtgcaggaacgcgctgggacaacagcggctccttccggaacagaaacgacctgaccctcgaaaacggcgcagtgctgacgagtaacgagctgcgactgggttcggccgttgtcaaccgtagcaatcaggtcaatgttaccggacagggcacccgcctcgacgcgcaaacgttgacgctcggcaccagcattgtccgtacttacctgacgctggccgacggtgccgaattgagcgccaccaacggtatgctcatcagcctcgtgaacgacagcaacacggcgacgcgcggtacgcttgccatcggcggctcggtcgcggtggaccctgaccgtaccgatgtcgattccatgactgccggcgcagctcaggcggcaggccgactgaacccgcaaaccgccgtcagctttggcaccggcaacggttccctggcgttcaaccataccgaccccgatctgcagttcgccaacacgctgaacggaacgggtcgagtgtatgcgttcagcggaaacactacgctgagcggcgacacctcggggttagccggtagcgtcgttgtacgcggtgggcggctggtgttgtcagggaacgtcgaccaggtcaatcagcgcggcaacacggccaccacccaaagcgtttcgcggtttaacgtaggcaacggcaccctggtggtcaacggcattgcgggccgcaccgagttcggaacctacaccaatagcgctcaggtactggacggaggtattctggctggcgtcggtcaagtgggcaccacccaggtctctgccggcggtacgctgtcgcccggcgaaaacgccatcggcgcactggccatacaaggcgacctggacatggccgccggctcacgctacgccgcagacatcgccggcgacggcagggcagacaagatcaacgtgagcggcacagcgaccctgcgcggtacgcaggtaaacgtgaccgcgctggatccagcgcaaagctatcagagcggcagaacctacaccctgctctccgctcagggcggcttggtcgacggcgctgccgcaggcactgcctatgcccaggcgctgaccaactcggcgttcctgaatgtcgggctgcaacgcaccgccaatgatctgaatctcaccatcgagcaaaaaagcgtagagccgactcctacacctacacctacacctacgccaactccaactccaactccaactccagagcccacaccgacgccaaccccgactccaacaccaacaccagagcctgtaccgacgccaacccctacacccactccagaacctgcgccaacgcctgctcccgaacctgcccctgccccgggcatctttcagacagtcatgctgacccagaaccagttcaataccgctggcgcgctaagcgtactggcgcaaagcggcgaacccctgcgtctctacaacaacctgctggttctggacgctgaaggggctcgtgacgctgccgatcaactgtccggcgactaccacagcagcacctcgaccgccctgatcgccaacagccaggtggtctccggcgttctgggcactcgtctgcgcaatcttctggatacgggcacgctgcgcatgccagccatggcactcaatctgatgccaagcgcaccgaccactcaaaacggcgcctgggtgcagccattcggcaactggaccaaggtagacggcaataacggtgccggcggtctgcaacaaagcaccggcggcctgctgttcggggcggacggcagctttacccctgactggcgcggcggcgtttacgccggctacagccgctcgaagttcgatgccgataaccgcgatgctgacggccacagcgacaactatcatctgggcctctacaccggtgctcagatcgacgctctgcgcctcagcgctgacgtcggttacacctggcacaagctggagagtgagcggaatgtggcgtttgccggattcagtgaccacttgaccggcaagcgcaacgcccagtcgctgcaggccagtggcgaagcggcctaccgcataccgattggccgcgtggccctggagcctttcgccggcctgtcctacgtgcgctacgatgccaaggacatgcacgaaaaaggcggaccagccgctctggacgtgtccagcgataaacaggacaccttcttctcgacgttgggtctgcgcgcgtcgtcgaacatcgatgtggccaacatcaacactcaggtttacggctcgctgggatggagacgcgcctacggtgacctggacccgcgcaacatccagtccttcgccggcggcccgaacttcgaagtacaaggggtcgctcaagcccgcaacacggccctcactgaagtgggcgcgaaactgcgcttgaatcagcgcaccgacctggacctgtcctaccaagggcagttcggtaccgacacgcgcttccattcggttaacgcgggggtgacggtccgcttc

SEQ ID NO: 33308 - DNA, 2781 bp, Pseudomonas syringae
atgaaggccggcctgccccagcgcgagccgcaaactctgcagcgctgggacagcattggcctgtaccagaagctgcgcgagattggcaaggatcgtcccaagttcgtcctgcacgacggtcctccgtacgccaacggcactattcacatcggtcatgcggtcaacaagattctcaaggacatgatcctgcgttccaagaccctggcgggcttcgatgccccctatgtgccgggttgggactgtcatggtctgccgatcgagcacaaggtcgaagtgacccacggcaagaacctctccgcagaccggacgcgtgagctgtgccgcgcctatgcggccgagcagatcgaaggccagaagtccgagttcatccgtctgggtgtgctgggcgactggagcaatccgtacctgaccatgaacttcgccaacgaagccggagaaatccgcgcgttggccgagatggtcaagggcggtttcgtcttcaagggtctgaagccggtcaactggtgcttcgattgcggttcggcattggctgaagctgaagtcgaataccaggacaagaagtcctcgaccatcgatgtggcgttcccgattgccgacgaggcgaagctggccgcagccttcggtctgccgtcactgggcaagcctgcgtccatcgtcatctggaccaccacgccgtggaccattccggccaaccaggcgctgaacgtccatcccgagttcgaatactcgctggtcgatgtaggcgacaaactgctggtgctggcgtccgagctggttgaaagctgtctggcccgttacaagctggaaggcacggtcgttgcgaccaccaccggtcaggcgctggaactgatcaatttccgccatccgttctacgatcgtctgtcgccgatctacctggccgaatacgttgaactgagtgccggcaccggtattgttcactgctcgcctgcctatggcgtggacgacttcacaatctgcaaacaatacggcctgagcaacgacgacatcatcagcccggtgcagagcaacggcgtgtatgtcgaatcgctggagttcttcggtggccagttcatcttcaaggccaaccagaacatcatcgacaagctggtcgaagtcggcagcctgatggacaccgaaaccatcagccacagctacatgcattgctggcgccataagtcgcccttgatctaccgcgccaccgcgcagtggttcgtcggcatggacaagcagcctgaaagcggcgaaaccctgcgcaagcgcgcggtcaaggccatcgaagacaccgagttcgtaccggcctggggccaggcgcgcctgcattcgatgatcgctaaccgtcctgactggtgcatctcgcgtcaacgcaactggggcgtgccgattccgttcttcctgcacaaggagagcggcgacctgcacccgcgtaccgtcgaactgatggaagaagtggccctgcgcgtcgagaaagaaggcatcgaagcctggttcaagctggacgccagcgaattgttgggtgacgaggccgccaagtacgacaagatctccgacacactggacgtctggttcgactcgggcaccacgcactggcacgtactgcgcggctcacacccgatgggccacgaaaccggcccgcgtgccgatctgtacctggaaggttctgaccagcaccgcggctggttccattcgtcgctgctgaccggttgcatgctggacgatcacgcgccgtaccgcgaactgctgacccacgggtttgtggtcgacgagaacggccgcaagatgtccaagtcgctgaacaacgtggttgcgccacaaaaggtcaacgactcactgggtgcggacatcatgcgcctgtgggtatcggcgactgactattcgggcgaaatggcggtgtccgatcagatcctgcagcgcagcgccgatgcctatcgtcgtatccgcaacactgcacgcttcctgctctccaacctgtcgggcttcaacccggcgaccgacatcctgcccgccgaagaaatgctcgcgctggaccgttgggccgtggatcgcacgctgctgctgcaacgcgagctgcaagagcattacggcgaataccgtttctggaacgtgtactcgaagatccacaacttctgcgtgcaggagctgggtggtttctatctggacatcatcaaggatcgtcaatacaccacggctgccgacagcactgcgcgtcgctcctgccagacggcgctgttccacatctccgaagcgctggtgcgctggatcgcgccgatcctggcgtttaccgccgacgagctgtggcagttcctgccgggcgagcgcaacgagtcggtaatgctcaacacctggtacgaaggcctgaccgaactgcctgccgactttgaaatggaccgcgcctactgggagcggatcatggcggttaagacctcggtcaacaaggaaatggaaaacctgcgcgctgccaaggcaatcggcggcaacctgcaggccgaagtgaccttgtacgctgaagactcgctggttgctgacctgtcgaaactgagcaacgagctgcgtttcgtgctgatcacctccaccgccagcgttgcaccgttcgtgtcggctccggcggatgccgtggtcaccgaggttgcgggcctcaagctgaaagtggtcaagtccggccacgccaagtgtgcccgttgctggcatcaccgcgaggatgtgggggtgaaccctgagcacccggaaatctgcggtcgttgcatagacaacatcagcggtgcgggcgaggtgcgtcattatgcc

SEQ ID NO: 33309 - DNA, 918 bp, Pseudomonas syringae
atgcagctggttagaggccttcacaacctgcgccccgagcatcggggctgcgtcgccacgattggcaatttcgacggtgttcaccgcggccaccaggcgatcctggcgcgtttgcgtgagcgtgccgtcgaattgggtgtgcccagctgcgcggtgatcttcgagccgcagccgcgtgagttcttcgcgccgcaaacggctccggcacgtctggcgcgtttgcgcgacaagcttgaactgctgggtgccgagggcgtggaccgggtattgtgtctgtccttcaaccagcgcctgagcaaactcagtgcggcaagcttcgtcgagaccgtgctgatcgacggtctgggcgtgcagcaccttgaagtaggcgacgattttcgttttggctacgaccgggtcggtgattttgattttctgcagcaggccggcacgacgtatggttttaccgtagaagcggcgcagaccgttgaaatcgatggcctgcgcgtcagcagcaccaaggtgcgtaaagccctggctgcggcggactttgcccttgccgagcgcatgctcggtcgcccgttccagataaccggacgggtattgcatggccagaagctggcgcgtcagttgggtacgcccaccgccaacgtgcaactcaagcgtcgtcgtgtaccgttgagcggggtttatctggtcagcatggacatcgacggcaagccttggccaggcgtcgccaacatcggtgtgcgtccgacggtggcgggtgatggcagcgcgcacctcgaagtgcatcttctggattttgccggcgatctttacggtcggcgtttaacggtggctttccaccacaagctgcgtgatgagcagcgtttcgcctcactggaggcgctcaagacggcgatcaatgcggacgtcgccgccgcccgtgcccattgg

SEQ ID NO: 33310 - DNA, 1479 bp, Pseudomonas syringae
ttgggcttcgtgcgcgacaccatcattgcccgcactttcggcgccggaatggccacggatgcgttcttcatcgccttcaaactgcccaatctgctgcgtcgcatcttcgcggaaggggctttttcgcaagccttcgtgccgattctggccgaatacaagagccagcagggcgaggaggcgacccgcacgtttgtcgcctatgtcaccgggctgctgaccctggcgctggcagtggtgacgctgctgggggtgatctttgcgccctgggtgatctgggccacggcgccaggctttgccgacacgccggaaaaattcgccctgacctcggacctgctgcgggtgacctttccttatatattgctgatttccctgtcctcgatggccggcgcgatcctcaatacctggaatcgtttctcggtgcctgcgttcgtgccaaccctgctcaacgtcagcatgattttcttcgcgctgttcctcaccccgtactttgccccgccggtcatggcgctgggctgggcggtgctggtcggtggcttgctgcaattgctttatcaactgccgcacctgaaaaaaatcggcatgctggtgctgccgcgtctgaatttgcgcgataccggcgtctggcgggtcatgaagcagatgctgcccgcgattctgggcgtctccgtcagtcagatttctctgatcatcaacacgatattcgcctcgttcctcgtcgccggttccgtgtcgtggatgtactacgctgaccgactgatggaactgccgtccggtgtcctgggcgtcgcgctggggacgattctgctgccgatcctgtcaaagacctacgcgcagcgcgaccgtcaggaatactcgcggattctcgactggggcctgcgtctgtgttttgtgctggtgctgccctgcacgctggcgctgggcctgctcgctgaaccgttgaccgtttcgctgtttcaatacggccagttcaatgcgctggacgcggccatgacccagcgtgcgctggtcgcctattcggtcggtttgctgggtatcatcctgatcaaagtgctggccccaggcttttatgcccaacaaaatatccgtaccccggtgaaaatcgcgattttcaccctcatagtgactcagttgctcaacctggcgtttatcgtgcctttgcagcatgccggtctggcgctggccatcagcgtgggggcgtgcatcaatgcggggctgctgttctggcaattgcgcagacaggatctgtttcagccgcaaccgggctggacgaaatttctgttcaagctgatcgttgctgtcgcggtcatgtctgctgtgctgctggggctcatgcatgtcatgccggcctgggacgaaggtcatatgctggagcgttttctgcgtctgggtgcgctggtcgcggcgggggtggtgacgtatttcgccatgcttctgatgctgggctttcgcctgagggatttcgcccgcaaggccattatg

SEQ ID NO: 33311 - DNA, 276 bp, Pseudomonas syringae
gtggccaacacaccttccgccaaaaaacgtgcaaaacaggctgagaagcgtcgcagccacaacgccagcctgcgttccatggttcgtacctacatcaagaatgtagttaaagccatcgacgcaaaagacgcagaaaaagcgcaagccgcttatgttctggcagtgcctgttatcgaccgtatggccgataaaggcatcatccacaagaacaaggctgctcgccataaaggtcgtctgaacggtcacatcaaggctctgagccttgctgctgcagcc

SEQ ID NO: 33312 - DNA, 975 bp, Pseudomonas syringae; identical to SEQ ID NO: 33042

SEQ ID NO: 33313 - DNA, 1083 bp, Pseudomonas syringae
atgatcgccgacgtcaacctgaacacgttggtcgactaccgctacacccgacacttcgatgccgagcgcggcgccaatggcggcagcgccgattgcaccggtcgtaaaggtgaagagttggtgctgcgtgtgccggtgggcaccaccatcattgacgccaccacccaggaaatcatcggtgacctgaccaaagacggtcagcgcctgatggttgcacaaggcggctggcacggtctgggtaacacccgattcaaatccagtaccaaccgtgcgccacgtcagaccagcccgggcaagccaggtgatcagcgtgatctcaagcttgagctgaaagtgctggccgacgttggcctgctgggcttgccgaatgccggcaagagcacgttcattcgttcggtatcggctgccaagccgaaagttgccgattatccgttcaccacgctggtgccaaacctgggcgtggtcagtgtcgatcgctggaagagctttgtcgtcgccgacattccgggcttgatcgaaggtgcatccgacggtgccggtctggggattcgcttcctcaagcacttggcgcgtacccgtctgctgctgcacctggtcgatatggcgcctctggatgaaaccagtgccccggacgctgcagaagtgatcgtcagcgagctggaaaaattcagcccgtcgctggcagagcgtgatcgctggctggtgctgaacaagtgcgaccagatccttgaagaggagcaggaagcccgcaagcaggagatcgttgatcgcctgggatggaccggccctgtctacgtgatctctgccattgccaaagaaggcaccgagcagctgactcgcgacatcatgcgttacctcgaagagcgcagcctgcgcatcgccgaagagcctggttacgccgaagagctggccgagctcgatcagcgcatcgaagacgaagcgcgcgcgcagttgcaggccctggacgatcagcgtgccctgcgtcgcagtggcgtgaagagcgtgcatgacatcggtgaagatgactgggacgaagaagatgtggatgatgaagacggtccggaaatcatttacgtccgcgac

SEQ ID NO: 33314 - DNA, 273 bp, Pseudomonas syringae
atggctcacaaaaaagctggtggtagtacccgtaacgggcgcgactcagaagccaaacgccttggcgtgaagatgtatggcggccaggctatcatccctggcaacatcatcgtgcgtcagcgcggcacccaattccacgctggctacggcgttggcatgggtaaagatcacaccctgttcgcgaaagtggaaggcgtgatcaagtttcaagtcaagggcgccttcggtcgtcgctacgtgagcatcgttccgaagactgaagtctccgcagcg

SEQ ID NO: 33315 - DNA, 966 bp, Pseudomonas syringae
atgcaaccccaagccttctaccgcgcggtggcggacgactttagtgccgttgaccttatcatcaaaaagcaactgacgtcgcgtgtaccgctggtctccaagatcggtgattacattacgtcggcaggtggcaagcgcctgcgcccgctgctggtgctgctgtgtggcaaggctctaggccgtgaaggcgacgacatccgcctgctggccgccaccatcgaattcctgcacaccgccaccctgctgcatgacgacgttgtcgacatgtcgggcatgcgtcgcggccgctccactgccaacgccctgtggggcaacgcgcccagcgtattggtgggtgacttcctttattcgcgctcgttcgaaatgatggttgaactgggctcgatggaagtcatgaagatcctgtccaaggcgacccgcatcattgccgaaggcgaagtgctgcagttgtccaagatccgcgacgccagcaccaccgaagaaacctacatggaagtgattcgcggcaagacagccatgctgttcgaggcctcgacccacagcgccgcagccctgtgcaaggcctccgaagcgcagaccgaagccctgcgcacgttcggtgaccatctgggtgtggccttccagctggtcgatgacctgctcgactaccgcggcgatgccgagaccctgggcaagaacgtcggtgacgatctggccgaaggcaagccgaccctgccgctgatctacaccatgcgcgaaggcagcccggaacaggccgcactggttcggcaggcaatccagaaaggtggcctggaagatctggaaagcatccgtaatgccgtggaaagtgccggtgcgcttgattacaccgcacaactggcccgcgactacgctgcgcgcgccattgcctgcctggacgccttgccgcccagcgaataccgcgatgccctgatcgaactcagcgagttcgccgtcgcccgtacgcac

SEQ ID NO: 33316 - DNA, 1725 bp, Pseudomonas syringae
atgaagttcgaacccctcgccaggtcgctgatcgcgacggcattgattgtcgcgtattcccccacattcgccgcgtcacaagccccggttgctgccgaaaacggcatggtcgtgactgcccagcatctggccacccatgtgggtgtcgatgtgctcaagaatggcggcaacgcggtcgatgccgctgttgcagtcggttacgcgctggcagtggtttaccccgcagccggtaacctcggtggcggcggcttcatgaccatccagctggctgacgggcgcaagacctttctcgacttccgcgaaaaggcgcccttggcagcgactgccaatatgtacctggacaaggacggcaaggtcattcctgatctaagtgccaaaggccatctggccgtcggcgtgccgggtaccgtgtccggcatggaaatggcgctgaacaaatacggcacgcgcaagcgcgaagaggtcattgccccggcgatcaagctggccgaagacggctttgtactggggcagggcgacgttgacatgctgtccagcgccaccgatgtgttcaaggccgacatggctgattccggctcgatcttcctcgacaagggcaagccgatgcaggtcggtcagaagctggtgcagaaagacctcgccaggaccctcaaggaagtgtccgagaagggcagcgacggtttctacaaaggctgggtggccaaggcgctggtcgattcgagccaggccggaaagggcatcatcacccaggctgaccttgatcactacaagacccgcgagctggcgccggtcgaatgtgactaccgcggctaccacgtagtgtcggcaccgccgccgagttccggcggtgtggtcatctgccagattctgaatattcttgaaggctacccgatgaaagaactgggtttccgttcggcgcagggtatgcattatcagatcgaagccatgcgccatgcctacgtggatcgcaacagctacctgggcgaccccgatttcgtcaagaacccggtcgaacatctgctggacgtcaagtacgcggccaagctgcgcgaagccatcgagccacagaaagccggtgactcgaacaagatcaagccgggcgtcgcgccacacgagggcagcaacaccacgcattattcgattgtcgacaaatggggcaacgcggtatcggtgacctacaccctgaataactggttcggcgcgggcgtcatggccagcaagaccggcgtgattctcaacgacgaaatggatgacttcaccgtcaaggtcggcgtgcccaacatgtacgggctggtgcagggcgaagccaacgccatcgcgccaggcaagacgccgctgtcatccatgagcccgaccatcgttaccaaggacggcaagactgtcatggtcgtcggtacgccgggcggcagtcgcatcatcaccgcaaccctgctgaccatgctcaacgtcatcgactacggcatgaacattcaggaagccgtggacgcgccgcgtttccatcagcaatggcagccggaagcaaccaacatcgacaccttcgccgtgagccccgacacgctgaagattcttgagagctggggccacaagtttgccggcccgcaaccgctcaaccacgtggcggccattttggtcggtgcgccctcgctgggtggcaagccggtcggtaacaaccgtttctacggcgccaacgacccgcgccgcaacaccgggttgtcgctgggttac

SEQ ID NO: 33317 - DNA, 2091 bp, Pseudomonas syringae
atgagccgttcgttcgacgatctgttgcccactgcgctggacgacatcagcctcgccgacttgagcccgttgacccgcgccgacgatctgctgatgctgctggaacgctgggtcgagcgcggttggttgcgcgccctggaccgggcttttgtcgcgttcctcagcgacctcgacccgcaggccgatccactggtgctggtcgctgcggccctcaccagccatcaactgggccacggccatgtctgcctcgatctttacgagaccttgaaagagccggacttcgccttgtcactgccgcccgaaggtgatcagcaagacggggcaatgctgctgccctcgcaattgctggcagcgctggatggcgcagcgtggtgccaggcgctggcgcgcagcatgctggtcgcgcaagccacagactcaagcgccgaggcgctgcaaaaacccttagtgctggcagaacgacgtttgtacctgcgccgctactggacctacgaacgccgcatcgctgcagccctgcgtcggcgtctggagcaagccgatgctccgcccgacgatctgccgcagcgcctgaacgctttgttcgggcctgcgaactcagcgccggacgccatcatcgactggcagaaactggcctgcgcactggcaacccgccgggcattcagcatcatcaccggcggccccggcacgggcaaaaccaccaccgtggtgcgcttgctggcgttgcttcaggctcctgccgtgcagagcggccagccgctgcgcattcgtttggcagcgccgaccggcaaggcggcagcacgtctgaccgaatccatcagccagcaagtgcaaagcctggacgtcagcgccgaggtgcggcagaaaatccccagtgaagtcaccaccgtgcaccgcttgctgggcagccgccctggcacgcgccatttccgtcaccacgcaggtaacttgctgccactggacgtgctggtcgtcgacgaagcgtccatgatcgacctggaaatgatggccaacctgctcgacgcactgccgccgcacgcgcgcatggttctgctcggcgacaaagaccaattggcttccgtcgaggcgggcgcggtactgggtgatttgtgtcgcgacgccgaagacggcttctacagcccgcaaacccagacctggctcgaagctgtcagcggcgaagacctcagcaaaggcacattgcgccaaggcgatgcgcagcaacatccactggcccaacaagtggtcatgctgcgccactcgcgccgttttggccaaggcagcggcatcggccagttggcccggctggtcaaccagcaacaggatcaacaggcgagggcgctgctgtcggcaggcagtcacaccgatctgttcgccctggcgctcaagggcgagcaagacctcaagttcgagcggctggtgctggaaggccttggccaaggcgagcaaggcccgcagggttataggcattacctgaacgtgctcggcgccgagcgcccggcagtcggcgctgaactggacgatgaatgttggacccgatgggcacgctcggtactcgacgccttcgactcgttccagttgctctgcgctgtacgcaaaggcccgtggggcgtagaaggccttaaccaacgcatcacccatgcgttattcaatgcgcagctgatcgaaagcgatcagcagtggtacgaaggccggccagtcctgatgacccacaacgactacggcctgggcttgatgaacggcgacatcggcatcaccttgcgattgcccgagcgcgatggcgagggcaaacaggtcctgcgcgtcgccttcccgcgcaacgatggcagcggcggcgtgcgcttcgtcctgcccagccgcctcaacgaagtcgaaaccgtctacgccatgaccgtgcataaatcccaaggctcggaattcgcccacaccgccctgattctgcccgaagccctcaacccggtactgaccaaagaactcatctacaccggcatcacccgcgccaaacactggttcagcctgatcgaaccgcgccagggcatcttcgaggaagccctgcgccgcaaagtcaaacgcctgagcggcttgatgctcgggctt

SEQ ID NO: 33318 - DNA, 3666 bp, Pseudomonas syringae
atgagtaatcaatcgctccctctggcgctacgctttccgttacgtggcagccaactgatcgaagccagcgccgggaccggcaagaccttcaccatctctgcgctgtacctgcgcctggtgctcggccacggctccgaacagtcaggttttggccgcgaattgctgccgccgcagatcctcgtcgtgaccttcaccgacgctgccaccaaagagctgcgcgaccggattcgtacccggctggccgaagctgcgcggttctttcgtgacgaaatttgtgcccccgatgaactgatcagccaattgcgcgagcagttcgaggccgagcagtggcctgcctgtgccagccgtctggacatcgccgcgcaatggatggacgaagccgccgtctcgaccatccacagctggtgccagcgcatgttgcgcgagcatgctttcgacagcggcagcctgttcacccagaccctcgaaaccgatcacagtgacctgctcggcgaagtcctgcgcgattactggcggcgattctgctaccccatgagcggtgacgcgctggcctgggtgcgggaaaactggagcggtccggcggcactgttgccccgcgtacgtggcttgtttggccatgaccgcagcaccaacacccaagcgccggccgagctcatcgaggcgtcgttgctggagcgtcgggcagcgcttgccgccctgaaagccccttgggccgtatggtctgacgagctctacacgctctgccaggacgccgtggcccgcaaggtggtcgatggccgcaagatgcaggagcgattcttcaaaccctggtttgaaaagctcgccgcgtgggccgctgacgaaactcaggaagcgctggacctgggcaccggcttcacacgcttgaccccagacggcgtcgccgaggcctggaaaagtgatccaccgtcgcacccggcgtttgcagcaatggcgcaactgaaagcagcgctcgacggtctgcccaagccagatgcggccgtgctgcaacatgccgcgcagtgggtcagtgcgcgttttgaagaagagaagcgccgccgtgccgaaatgggttttgacgacatgctgctcaggctcgacggcgcattgcacggcgctggcggcgagcggctggcgacgctgattcgcgagcagtttccggtggcgctgatcgatgagtttcaggacaccgatccggtgcagtaccggatcttcgacagcatctatcgtctggaaggcaacgatgagcaaaccggcttatttctaatcggcgaccccaagcaagccatttacgccttccgtggcgccgacatctacacctacctgcgcgcccggcaggccaccgatggtcgctggcacacgctggacaccaactatcgctccagccacgcgatggtcgagtcggtcaaccatgtcttcacgcgagcagagcaacgcccggaaggtaaaggtgcgtttctgttccgtgacgaggaaggcaatcaggtgccgttctccgatgccttggcccaaggtcgcaaggaaactctggaagtcgatggcgccgcgctcaccgcattgaccgtatggcatcttgagagcgagcagccggtgtccggtgtcgtctatcgccagcagcttgcaagccgctgcgccagcgagatcgtgcgcctgctcaacgccggtcagcagggccgcgcgggcttcactgcaccgggcaatgcccagcgtgggctgcgcccggccgacatcgcgattctggttcgcgacggcaaagaggcgcaggcggtgcgctctcaactgacggcgcgtggcgtgcgcagcgtgtacctgtcggacaaggattcagtgttcgccgcgcaggaggcgcacgacctgctgtcctggctcaaagcctgcgccgagccggattccgaacgtacgctgcgcgcggcactggcctgtattaccctcgacctgccgcttgccgaactggaacgcttgaatcaggacgaactggcgtgggaacagcgtgtgatgcagttccgtggctatcgcgctgtatggcgcagtcagggcgtgctgccgatgctgcgtcgcctgctgcatgactttgccctgccgcaaaccttgatgacccgcaccgacggcgagcgagtgctgaccaatctgctgcacctgtccgaactgctgcaacaggccgccgccgagctggatggcgaacaggcgttgattcgtcatctgggcgatcacctggcgctgtccgggcaggccggagaagaacagatcctgcgcctggaaagcgacgagcaactggtcaaagtcgtcaccattcacaagtccaaggggctgcaatacccgctggtgttcctgccgttcatctgctcgtccaaaccggtcgacggcagccgcctgccactgcagtttcatgatgccgatggccgcgcgcagatcagtctgcagcccaccgaggcgctgattcagcaagccgatgacgagcgcctggcagaagacctgcgcttgctttatgtcgcgctgacccgttcggagcatgcctgctggctaggcgttgccgacctcaaacgcggcaatgccaacagctcgatgttgcaccgctcggcgctgggctatttgctgggtggcggtacggcgctgcccgagtcggctgacctcaaggtctggctgcgtgatctggccgagggttgcagcgcgattgctttgcagccggttcccgaacccaccgatgacagctttagtgcgccgcgtaacgaggcctcgctggtcaaactgctggtacccaaacgccgtgctgccgagaattggtggatcgcctcctacagcgcgctgcgtattggcgacacggtaacggcaggtgccgacgagtcacctgacagcccgcaggcacaaaagctgtttgacgacgagcgccttgatcccgaagcgcctcgcgacatactggtcagcggcggcgatatccaccgcttcccgcgtggcccgaaccccggcacctttctgcacgggttgctggaatgggcaggcaacgaggggtttgcgaacacggcgcatgattcggtccaactgcaagacgccgtggcgcgtcgttgtaatcgacgcggttgggccggctggatcaacaccctgcgcgactggctgcagcatatgctgaacatgccgctgcgcctctcgcctgattccacgccggttgcattaggcgacctgaatcagcccaatcagtaccgcgtcgaaatggagttctggttcgccagcactaacgtcaacgtggcgcagatggatacccttgtgcgccgtttcacccacgacaatgcgccacgggccgccaccgaaaccgtctcgctcaacggcatgttcaaaggcttcatcgacctgacattcgagcacgaaggccgttactacgtggctgactacaagtccaactggttgggcagcgatgacgacgcctacaccgatctggcgatggaaacggcgattctcgacaaccgctatgacctgcaatacgtgctttatctgctggcgctgcatcgacagctcaagacacgcatggccgattatgactacgaccagcacatgggcggcgcgctttacctgttcctgcgcggcagccgttccgcctctcaaggcgcgtatttcactcgtccgccacgcgaactgatcgagagcctggacctgctgtttcagggcaaacccttaacg

SEQ ID NO: 33319 - DNA, 1194 bp, Pseudomonas syringae
atgtccctgcctagcttgcgcctcaaagccaacgccgaccgccgcctgcgcgcgggtcatctgtgggtctacagcaacgaaatcgacgtagccgccactccgctgaatggttttgcggccggtgatcaggcattgcttgaagcggctggcggcaagccgctgggcatcgtcgccatgagccccaacaacctcatctgtgcacgcttgctgtcgcgtgacatcaagctgccgctcgacaaatccctgcttgtgcaccgcatcaacgtggcgctttcgctgcgcgaacgtctgttcgacaagccgttctatcgcctggttttcggcgattccgacctgctgccgggcctggtggtggatcgcttcggtgacattctggttgtccagctggcctcggccaccatggaaaaccacaaggaagacatcattgcggcgctggttcaggtcatcaagcctagcggtattctgttcaagaacgactcggcggcccgcgacgcggaaggcctgaatcgttacgtcgaaaccgtgttcgggctggtgccggagtgggttgcgctggaagaaaacggcgtcaagtttgaagcaccggtcatggccgggcagaagacgggctggttctatgaccatcgcatgaatcgcgcacgcatcgccccttacgtcaaaggcaagcgtgtcctggacctgtacagctacatcggtggctgggggattcaggccgcagcgtttggcgccagtgacgtgacgtgcgtcgatgcctcgtcctttgctctggatggcgtggagcgcaacgcagcgctgaacggttttgcggaaaagatgacctgcatcgaaggcgacgtttttgaagcgttgaaagagctgaaagccggtgaagagcgtttcgacgtcatcgttgccgatccacctgcgttcatcaaacgtaaaaaagacatgaagaacggcgaaggtgcctatcgccgcctgaacgaacaggccatgcgcctgctgtccaaggacggcatcctgatcagcgcgtcgtgctccatgcacctgccggaagacgacttgcagaacatccttctgaccagcgcccgccatctggatcgcaacatccagctgctggagcgcggcggtcagggcccggaccatccggtacacccggcgattgccgagacgcgctacatcaagagcattacttgccggttattgcccaatagc

SEQ ID NO: 33320 - DNA, 810 bp, Pseudomonas syringae
atgcctgaattaccagaagtcgaaaccacccgccgtggcattgcgccccacctcgaaggccagcgcgtcagccgcgtgatcgtgcgtgatggccgtctgcgctggcccgttcccgaggacctggacatccgtctttccgggcagcgcatcgttcaggtgagtcgccgcgccaagtacctgctgattcaggccgaagtgggcacgttgatcagccatttgggcatgtcgggcaatctgcgtctcgtcgaggcggggcttgcggcgctcaaacacgagcacgtcgatatcgagctggaatccgggctggcgctgcgttacaccgacccgcgtcgtttcggggcgatgctttggagtcatgatccgcataatcacgaattgttgatccgtcttggtcccgagccgctgaccgatctgttcgacggcgagcgtctttacgagcgctcgcgcggcaagtcgattgccgtaaagccgttcatcatggacaacgccgtggtggtgggcgtgggcaatatctacgcgacagaagcgctgtttgcggcgggcatcgaccctcggcgcgaagccagggggatttccagggcgcgttacctgaagctggccatcgagatcaaacgcattttggcgtatgccattgagcgcggtggcacgacgttgcgcgacttcatcggcggcgatggcaagcccggctattttcagcaggaattgtttgcctatgggcgcggcggtcagccttgcaaggtctgtggcacaacgttgcgcgagatcaagttgggccagcgcgccagcgtttactgtcccaagtgccagcgc

SEQ ID NO: 33321 - DNA, 156 bp, Pseudomonas syringae
gtgatcaatccgaacctgtgcaccgaatgtgtggggcattacgacgagccgcaatgccagcaggtttgcccggtcgactgcatcccgctggatgaaaatcacgtcgaaagcaaagagcaactgatggacaagtaccggatcatcaccagcaacgtc

SEQ ID NO: 33322 - DNA, 1704 bp, Pseudomonas syringae
atgaccacgcaatccgaatacgactacatcatcattggtgccggctctgccggtaacaccctggcagcccgtctcaccgaagacgcaggcgtcactgttctactgctcgaagccggtggcccggactatcgtctggacttccgtacccagatgcccgccgccctggcgttcccgttgcagggccgtcgctacaactgggcctacgagaccgagccagagccgcacatggacaaccgccgtatggaatgcggtcgcggcaagggcctgggcggttcgtcgctgatcaacggcatgtgctacatccgcggcaacgcgatggactacgacggttgggcgaaagagccgggcctcgaagactggagctacctcgactgcctgccgtactttcgcaaggctgaaacccgtgacatcggcccgaacgattaccacggtggcgaaggcccggtcagcgtgaccacgcccaaggccggtaacaatccgttgttccacgcgatggtcgaggcgggcgtgcaggccggtttcccgcgcaccgacgacctcaacggttatcagcaggaaggcttcggtccgatggaccgcaccgtgaccccgaaaggccgtcgcgccagcactgctcgcggttacttggacgaagcgaaaaagcgtgacacgctgagcatcgtcacacacgcgctgaccgaccgcattctgttcgaaggcaagcgcgctgtgggtgtggcctatcttgtgggtgacagcgacacgcgcattgaagtccgtgcccgcaaggaagttttactgtgtggcggcgccatcgcttcgccgcagattctgcagcgctccggtgttggcccggccgaggtcctgaacaagctggatattccagtggttcatgatcttccgggtgtgggtcagaaccttcaggatcacctggagatgtacctgcaatacgcctgcacccagcctgtgtcgctttacccttcgttgaagtggtggaaccagcctgccattggcgcagagtggatgttcctcggcaccggtatcggcgcgagcaatcagtttgaagccggtggtttcattcgttccagcgaagcctttgagtggccaaacattcagtatcacttcctgccggtcgcgattaactacaacggcaccaagggtgttcaggaacacggcttccaggcgcacgttggctcgatgcgttcgccaagccgtggtcgcgtacacgtcaagtccaaggacccgcgtgaatacccaagcattctgttcaattacatggcatcggatcaggactggcaggaatttcgcgacggcatccgcctgacccgcgagatcatgcagcaaccggctctcgatccgtaccgcggccgcgaaatcagcccgggcatcgacgtgcagtctgacgaagcgctggaccagttcgtgcgtgaacatgccgaaacggcgtatcacccatcttgctcctgcaagatgggcaccgacgaaatggctgtggtcgatggtcagggccgtgtgcacggcatgcagaacctgcgtgtggtggatgcctcgatcatgccgatcatcaccaccggcaacctgaatgcgccgacgatcatgatcgccgagaaaatcgccgacaagatccgtggccgtcagcccctgccacgcagcaccgccgactacttcgtcgcaggcgacaagccagcacgcggcaagccgctgcgtgagatcagccaccaggcc

SEQ ID NO: 33323 - DNA, 516 bp, Pseudomonas syringae
gtgtcgtcagtcccaagcgctcatagcgagatcgttggtgcgttgtatcgcgatcatcgcggctggttgctggcctggctgcggcgcaatgtcgcttgcccacaacgggctcaggacctgagccaggacacgtttgtgcgcctgctggggcgcgatgaactgcaattgccccgcgagccgcgtgcttttctggcgaccatcgccaaaggtctgatgttcgattacttccggcgggccgcgcttgaacaggcttatcttggggaattgctgcaggtccccgaggccgagcagccgtcgcccgaagagcaactgctgattctggaagacctcaaggctatcgatcgcatgctgggcacgctgtccagcaaagcgcgggctgcgtttctctataaccgcctcgacgggctgagccacggcgagattgccgagcgcctgggtgtttcggtatcacgcgtcaggcagtacctcgcccaggctgtgcgccagtgctatgtcgcgctgtacggcgagccgaca

SEQ ID NO: 33324 - DNA, 1350 bp, Pseudomonas syringae
atgaatgctctagcccgccgcgccgcaggcctgctgctcagcacgatttgtctgcctttgacagcattggctgctgacccgcaaccgacccatgaatttaccctggataacggcctgaaggtggttgtccgcgaagatcaccgcgctccggtggtggtttcccagatctggtacaaggtcggctccagttacgagacgccgggccagacaggtctgtctcatgcccttgaacacatgatgttcaaaggcagcagcaagaccgggccgggggagtcctcgctgattctgcgcgatctgggcgctgaagagaacgccttcaccagtgatgactacaccgcttactatcaggtgctggcccgcgatcgcctgagcgttgcgctggagctggaagccgatcgcatggcaacccttaaactgcccgccgacgagttcggccgcgagatcgaagtcatcaaggaagagcgccgtttgcgcaccgatgacaaaccgatgggcaaggctttcgagcgtttcaaggcaatggcctacccggccagcggctaccacacgccgaccatcggctggatggccgaccttgaacgcatgaaggttgaagagctgcgccattggtacgaatcctggtacacgccgaacaacgccacgctggtggtggtcggtgacgtgcagccggacgaggtcaaggcactggcagagcgtttcttcggcccgatcccgcgccgcgacgtgccgccttcgaaaaagccgcttgagctggccgaacccggcgagcgcaagattaccctgcacgtcaaaacccagttgccgagcctgatctacggcttcaacgtgccgagcgtagccaccgccgaagacccacgctcggccaacgccttgcgcctgatcgccgccctgctcgacggcggttacagcgcgcgcattccgacacgcctggaacgtggcgaagagctggtgtccggtgcttcgtcgcgctacgacgccttcgctcgtggcgacagcctgttcatgatcagcgccacgccgaacatgcaaaagaagaagaccctggccgatgtcgaagccggcatctggcgtctgctcgatgacttgaaaaccaaggcgccgtccgctgaagaacttgaacgcgtccgtgctcaggtcatcgccggcgtggtttacgaacgtgactcgatcaccagccaggcgaccatgatcggcgagctggaaaccgtcggcctgtcctggaaactcatggacaaggaactggaagacctgcagagcgtgaccccgcaggacattcagaaagccgccaacacctatttcacccgtgagcgcctcagcgttgcgcacgttttgcctgaggagaaagccaaa

SEQ ID NO: 33325 - DNA, 1539 bp, Pseudomonas syringae
atgtttggttccagcgacgacaagaagaccccagctgcggctggtgagaagaaaggcctgttcggatggctgcgcaagaagccgcagcaagaagccgaaccaacgccgccagaatcatcgccggcgcaacccgaaccggtcatcgatcaggttataaagacccccctggtcgagccatctgctgccccgcaacctgcgcccgagagcatcccccaggcggatgcgcctgccccgcagatcaatgtagagccgggcgcgccgtcacctcagccctggctgaccttgccggtcaacgaagagtcggtggcgctgagtgatgagcgcgagccgcacgtaaccccggcgattccgctacagggtcatgttcatgtcgtgcctgagccggtggtgtccgaacctgtcgcctatgagccgcaagccgaacctgtagccgatatcctgccgctcagcgctcaagagtcggtattggttgagcctgctgcagaacctgctcctgaacctgaacctgtcgcggcccagcccgtccttcagccagtgcagcctgctcagacagtggttccgatcatagcgccagcagcaccggcacctgtgccagaggcagaagccggcaaggtcggtttcttcgctcgcctcaagcagggcctgtcgaagaccagcgccagcatcggcgaaggcatggccagcctgtttctgggcaagaaagccattgatgatgacctgctggaagaaatcgaaacccgtctgctgaccgcagatgtcggcgtcgaggccacgtcagtcatcatcaagagcctgacccagaaagtcgcgcgcaagcagttgaccgacgctcaagcgttgtacacctcgctgcagggtgagctggcagcgatgctcaagccggtcgagcaaccgctggtgatcaaggccgagcacaagcccttcgtgattctggtggtaggcgtcaatggcgcaggcaagaccacgactatcggcaaactggccaagaagctgcaactggaaggcaagaaagtcatgctggcggcgggtgacaccttccgcgctgccgctgtcgaacaattgcaggtctggggcgagcgtaaccacattccggtcatcgcccagcacaccggcgccgattccgcctcggtgatcttcgatgccgtgcaggccgccaaggcccgtggcattgatgtgctgattgccgacactgccgggcgtctgcataccaaggacaacctgatggaggagttgaagaaggttcgccgtgtgatcggtaaactcgacgccgacgctccccatgaagtcctgctggtactcgacgctggtactggtcagaacgccatcaatcaggccaaacaattcaaccagacggtcaccctgaccgggctggcacttactaaactggatggcacagccaagggcggcgtgattttcgccctggccaagcagttcggcctgcctattcgctatatcggcgtgggcgagggcattgatgatctgcgtaccttcgaggccgaaccctttgttcaggctctgtttgcggagcgggagcgtcca

SEQ ID NO: 33326 - DNA, 627 bp, Pseudomonas syringae
atgtccgcgcccacgatgacgttgtacttcaacgccgcttcgcctttcgcccgcaaagtgatggtgatgcttcatgaaaccggtcagctcgaccgtgtgcagttgcagcctaccgtgttgacgccggtcagcccgtctgccgaactcaatgaagacaatccggcgggcaagctcccggccttgcgcctggccgatggcaacgtgatccacgacagccgtgtcatccttgattacctcgaccaccagcacgtggggcagccgctgatcccccgcgaaggctctgcgcgctggagacgcctgaccctggcgtcgctggccgatgccgtactcgacgctgcggtgctgattcgctatgaaaccgccttgcgcccgcaggaaaaacactgggatcaatggctggacaatcagcagcagaagatcgaacgctcgctgagttatttcgagcgcgatgcaattaccgaactcagttcgtcgttcgatgtggcctccatcagcgtggcggccgcattgggttatctcgacttccgccagcccgaactgcgctggcgcaacacgtacccacggctggccaactggtacctggaagtcagtcaacggccgtcgatgctggcaacccagccgccggcg

SEQ ID NO: 33327 - DNA, 501 bp, Pseudomonas syringae
gtgaaaccgatcctggcgctattgtctctgctggctctgccggtcatggccgctgaacccacgctgtatggccgctacgagaacatcaaggttctggaaataggccagaccttcaaggccaagatggacaccggcgcgctgaccgcttcgctgtcggccaaggacatcgagctgttccagcgtgatggcgatgactgggttcgcttccgcctggcaaccaagggcgcggatgacaaggtgtacgagcacaaggtgtcgcggatcagcaagatcaagggccgtgccgaaggtgatgatgaggacgacgaaggcatcaaccccgccaaacgccctgtcgttgatctggagctttgcctgggcaacaagaaacgcaccgtcgaagtcaaccttgtagaccgcagccacttcaacttcccgctgctgatcggggccaaggcattgcgcgagttcggcgctgccatcaacccggcacgccgttataccgctgacgagcctgattgc

SEQ ID NO: 33328 - DNA, 213 bp, Pseudomonas syringae
ttgctgggcggcaactcggccaacaactcgatgctcaacagcgcgctgggcaatgtgcagaacatgaacgacgtgaacactgccttcaaggcactgggcatggacagcaccatggtcagccagtttgccccgctgattctgcaatacctcggccagcaaggcgccagcgggtcggcattgcagagtttgagcgggttatggggtgccggcagc

SEQ ID NO: 33329 - DNA, 1098 bp, Pseudomonas syringae
atgtcccaaagtttcctcagcccggttaccacccagacatgggccaacgggcgtcacctggttcgggtcgtcaaggtgatccaggaaacctgggatgttcgcaccttttgcttcatggccgaccagccgatcatgttctttttcaagcccgggcagttcgtgaccctggagcttgagatcgacggcgtgccgatcatgcgctcgtacaccatctccagctcgccgtcggtgccctacagtttctcgattaccgtcaagcgcgtgccaggcggcaaggtctccaattacctgcatgacacgctgagtgaagggcaggagctggcggtgcatggcccggtcgggctgttcaatgccatcgacttcccgaacccgaaaatcctgtacctcagtggcggtgtcggtatcacgccggtgatgtccatggcgcgctggttctacgacaccaacgccaatgtcgacatggtcttcgtgcacagcgcgcgctcgcccaaggacatcatctaccaccgcgagctggagcacatggcctcgcggatcgacaacttcagcctgcatctggtctgtgaaaagcacgggctgggcgagccgtgggccggttatcgcggctacctgaaccagaaaatgctcgagctcatggccccggatttcatggaccgcgaagtgttctgttgcgggccgacgccgtacatgaccgcggtcaagcgcctgttgcaggaaaacggcttcaacatggcccaataccatgaggagtcgttcggcgcgacaccgcccgaagcccgcgccgatgcggtcgaacaggctgaaatcgctgccgacgcacctgatgtcgacgccgctgacctgcatcaggtcgagtttaccgacaccggcaagagcatccgcgtggccccgggcgaaaccgtccacgccgccgccgccaagctcggcctgatgatccccaaagcctgcggtatgggtatttgcggcacgtgcaaggtcatgaagctgagcggcgaagtggaaatggaacacaacggcggcatcaccgacgaagacgttgcagagggctacatcctgtcgtgctgcagcgtgccgaagggcgatgtgcggatcgagtat

SEQ ID NO: 33330 - DNA, 834 bp, Pseudomonas syringae
atgaattaccgtcacgcctaccatgccggcaaccacgccgacgtgttcaaacacctcaccctgactcgcttgatcgccctgatggcgcgcaaggagcagccgtttgcctacctcgacacccacgccgggctcgggctttacgacctcaagggcgatcaggctacccgcaccggggaatggcttgagggcattggccgcctgtggaatatcccagacctgccagcgctggcggctgattatctgcaagtgctgcacgacatgaaccccgatggcgaactgcgctattaccccggctcgcctgaactggcccgtcgattgacccgcgagcgcgagcgtgtgctgctcaatgagaagcaccccgaagacggacgtctgctcaaggaaaacatgaagggcgaccggcgtgtggcggtgcatctgggtgaaggctggcatgtgccgcgtgccttgctgccggttgctgaaaagcgcgctgtcatgctcatcgacccgcccttcgagcagctcgatgaaatgaagcgttgcgcggtggcgctcaaggaaaccatcgggcgtatgcgtcagacggtggcagcgatctggtacccgatcaaggacccgcgcctgttgcggcgtttttatcaggacctggccgagaccggcgcacccaagctgctgcgcgtcgaactctacgtccacccgctggacaccccggcaagcctgaacggctccggtctggccatcgccaacccgccgtgggggcttgaagaagaattgcgcgagttgatgccgtatctggccgaaaagctgggccagacccagggcggctggaagatggactggttgattgccgag

SEQ ID NO: 33331 - DNA, 852 bp, Pseudomonas syringae
atgctcgttccgtttttgatcatgctgcgcgaaggcatcgaagccgccctcattgttggcatcatcgccagctacctgaaacagaccggccgcggcgagtggatgcctgcggtgtgggttggcgtgttcctcgccgccgccctttcgctgttcgtcggtggcgggctggaattgatgagcgctgaattcccgcaaaagcagcaggaattgttcgaaggcattgtcggccttattgccgtgggcattctcagttcgatggtgttctggatgcgcaaagtggcgcgctcgatcaagcacgcgctgcacgaatcactggacgccgccctcgccggctcgaaaaaccagacctacgcgctgatcgccatggtgttcttcgccgtggcccgcgaagggctggaaaccgtgttttttctgcttgccgtgtttcaacagagcgaaggctcaagtgcgccactcggtgccctgctcggcctgttgctggccgtcggtttcggcgtggctatctacagcggcagcatgcgcctgaacctgggcctgtttttccgctggaccgggctgttcattctggtcgtggcggcgggcatcctggccaactctgtgcaggcgctgcatgaagccggcgtgtggaatcacctgcaaggcgtggtgttcgacatcagcgcgctgctgccgatggacggcccggcaggctcggtactggccggcatgttcggttatcaggatgcgccgacggtcagcaccctgagcgtttatctgatctacctgatcggggcactggtgctgtttttcatgccgcacaccccgaaggccggcaagccggtccagccacacccatcttctgttacgaacgaa

SEQ ID NO: 33332 - DNA, 666 bp, Pseudomonas syringae
atgcgctcgcgggtgcaggcccagctttcccggggcgtgaccatcaccagtgcgctgtacgaggcgggctacaactccaacagtcgtttctatgaggcttcgcagaacatgctcggcatgaaaccttccgaataccgggccggcggcgccaacatcgatatcagattcgcgttgggtgaaagttcgctagggtcgattctggtggcgaccagccgcaaggggatctgcgcgatttccctcggggatgaccccgatgcactgattcagggttttcaggaccagtttcccaacgccaacctgatcggcgcagacgcacagtttgaagcgctgattgcgaccgtcgtcggctttgttcaatcgccagcgaccggtctcacgctgccgttggacatccgtggcacggtatttcaggagcgggtatggcaggcgctcagagacatcccggccggatcgaccgccacttacaccgaaatcgcgcggcaattgggtatgcccagcgcagttcgggccgtcgccaatgcctgcggtgccaacaagctggcggtggccattccctgccaccgggtggtgcgcagtgatggctcgttgtccggttatcgctggggtgtcgagcgcaagcgcaagctgctggacatcgaatcgggcggcggcacagggctgttcagt

SEQ ID NO: 33333 - DNA, 675 bp, Pseudomonas syringae
atgaaaatcctgatggttctgacttcccatgaccaactgggcgacaccggcaagaaaaccggtttctggctcgaagagtttgctgcgccgtactacgtgtttaaagatgccggcgccgaagtcacgctggtttcgcctgctggcggtcaaccgccgcttgacccgaaaagcgatgagcctgacgcacagaccgctgaaaccgagcgtttcgccaaagacgccgatgctcagaaagtgctggccaatactggtcttctcgccgaggtcaacgctgccgatttcgacgcagtgttctatccgggcggccatggcccactatgggacctggcagaagaccagcattccattgctctgatcgaagcattcgccaaggctgacaagccgcatggcctggtgtgccacgcgcccggcgtgctgcgtaaagtcaaagcgcaaaatggcgagccgctggtcaagggccgtcgcgttaccggctttaccaacagcgaagaagaagcagttggccttaccgacgtggtgccgtttctggtcgaagacgcactcaaggaactgggcggcgactactccaagggcgatgactggagcgtttacgtgctgaccgacggcaagctggtcaccgggcagaacccggccagttctgcgcaggcggccaaagacgtgctgaccttgctgagc

SEQ ID NO: 33334 - DNA, 875 bp, Pseudomonas syringae
atccgcatcggtattaacccgatctcctggagcaacgacgacttgccggccctcggcggcgaaacaccgttgagcactgccctgagcgaaggcaaggacatcggttacgaaggtttcgagctcaacggcaagttccccaaggatgccaagggcgtcggcgatgtgctgcgaccttacggcctcgcgctggtctccggctggtattcaagccgtctggcgcagcgctcggtggccgaggaaatcgaagccattaccccgcacgtgcagttgctcgccgagacggcgcttcggtgctggtgtacggcgaagtggccgactccattcagggccagcgcatcccgctggtcgaacgaccgcgctttcacagcgatgcggcgtggcgtgagtacgccgaaaaactcaccgaactggcgcgcttcaccctgtcccgtggcgtgcgtctggcgtatcaccatcacatgggcgcttacgtcgaatcgcctcaggacatcgacaagctgatggcgttgaccggcaacgaggtcgggctgctgttcgattcggggcattgctatatgggcggcggcgagcctttgcaggtgctgggcaaacacatcgagcgcgtttgccacgtgcatttcaaggacgtgcgcaaacctgtggtgcaactggcgcgcaacaatctctggagttttccggactgcatcatcaatggcacgttcacggtgcccggcgacggcgacatcgatttttcggcactgctcaaggtgttgttgcaggccgactacagcggctggctggtggtcgaggccgaacaggacccggcggtagcgcccagttatgtgtatgccaaaaaaggctacgacacgctgcgccaactgctggccgatgcgcga

SEQ ID NO: 33335 - DNA, 1158 bp, Pseudomonas syringae
atgagccgcttcgccactgtcatcacccgcaacgcacccttcaccgctttggcaagcccacgcgaagccatccgccagttcacgcccaactggttcgccgtcaccatgggcaccggcattctgtcgctggcactcgcccaactgccgggaaatctggcctggttgcgcgacgcaggtgaagcgctgtggtttctcaatgtggcactgttcgccctgttcagcgtgatgtacgcgagccgctggatgctgtttttcgacgaggcgcggcagatctttggccattcaacggtctcgatgttcttcggcaccatccccatgggcctggcaaccattattaacggcctgctggtgttcggaccggcgcgctggggcgatgcagtggtgccggtcgccgaagccttgtggtggctggatgtagcgatggcattggcttgtggcgtgctgatcccgttcatgatgttcacccgtcaggagcacagcattgaaaagatgacggctgtgtggctgttgcctgtggtcgcggcagaagttgcagcggcctgcggtggttcactaaccgcgcatcttgcaacgacaagcgcgcagttcaccgtgctgatcaccagttatgtgctgtgggcctattcggtgcccgtggcgctgagcattctggtcattctgctgctgcggctggcgctgcacaaactgccccacgagagcatggcggcgtcgagttggctggcacttgggccgatcggtacgggcgcactgggcatgctggtgatgggcagcgacgccccggagatctttgctgcgcatgggctggcatcggtcgggactgtggcggcaggcgtgggcgtgattgtcggtacgcttttctgggggctgggcctgtggtggatggcgctggccgggctgatcacgctgcgttatttcaagcagggcctggcgttcaatctgggctggtgggcgttcacctttccgctcggtgtgtacgcattggcaaccctcaagcttggcgcgacattgaacatgagttttttcgatgtgtttggcgtgggcttggtcgcgatgctggccgtcatgtggtcgattgtggcagtgcataccctggctggcgcgtatcggggtcatctgttcgtttcgccctgtattgctgcacgagcatgtgcccgccgg

SEQ ID NO: 33336 - DNA, 1386 bp, Pseudomonas syringae
atgcgacgccagccttccctgaccctgcgctcgaccctggcctttgcgctggtggcaatgctcacggtcagcggcgcaggcctttatctctaccagtccatcgaacagacggtgctgcaacgcagcgaccacgcggtcctggcgcggctcgatcactttcgcaaactgctgcgctacgacctgacgatggacaacctcaaaggcagcccgcaactgttcgagaacatgctcgacagcgaggaagacatctttattatcggcgagccaggcaagccgccggtggtttcggtcaacccgcaacacgcaccgctgccggacttgccgacggttgcccaggatcagccgctgcgggtcgatgacctgcgcagcggcatgagtctgcaaggcgtgccgttgcgcgcggcggcggcgcaagtcatgtccaacggcgtcgaagtgcgcttgcaggccgcgcacctgatggtcaaggaaatggccatgctcgccagcttccgccagagcatttacatcgccgtggcactggcgtttctgatcaccgccgtgctgggttacgtactgctgcgacgcggtctgcgcccgttgcgcaaaatggccgcgcacgctgcagcgatcaccccggccagcctgcacaaacgcctggacagtcacgacacgcctgtcgagttgcagcagttgagcaatgccttcaatgccatgctcgaccggattgacgacggttatcgacgcctgatgcagttctccgccgatctggcccacgagatccgcacgccggttggctcgctgatgggccattgccaggtggcgctgcgtcaggaccgcagcgtcgatgaataccaggcattgctggcttccaatctggaagagctggagcgcatctcgcggctggtcgaaagcattctgtttctggccagggcggacgaggcgcaagcggccctggaacgccagccgctcgacctgcacgatgaattgcagcgcgtggccggttatttcgagggcctggccgacgagcgcaatctgaagttgagccccagtgggcgaggtacgctgctggccgatccgatattgctgcgtcgcgccctgagcaacctggtggccaacgccatccgttatgcggatgaagacagcgagattctgattcgtgtagtgaccgttgatcagcagtggcgaatcgaagtggaaaaccaggggccggtgctgccacacgccaccctggcccggctgttcgaccgcttttatcgtggcgacgcctcgcgccatgaacgctcagactccaacggcctggggctggccatcgtcacggcaatcatgcacctgcatggcgggtgtgtcgaagtggcgcaaccggctgtcggcaggatttgtttcagtctggtgtttccggcggcc

SEQ ID NO: 33337 - DNA, 618 bp, Pseudomonas syringae
atgaaaacccgccccattcatccgtggccggtgcgcctgacgcattgggtcaatgccgtgggcatggtctgcatgttcatgagcggctgggccatttataacgcatcgccattgatgccattcacgttccccaaattcctgacactcggcggctggctgggcggctccatcgcttggcactttgcggtgatgtggctgttggtcgtcaatggcctgatttatgtgctgtacggcgtgttcagtcgccatttcaggcgagatctgttgccggttcggccgtccgaggtaaagcgcgacatgagtgacgcgctgcattttcgcctggcccacgtcaaaggtcagtacaacgcggtgcaacgcttgatgtactggctggtgttgattatgggcgtgttggtcgtggtgtccggtctggccatctggaaaccggtgcagtttcaggggctggttgccttgctgggcggttttgattttgcccgctgggtgcattttggcgcgatgacggcgatcggcgcgtttgtcgtggttcacctggtgttggtcgtgctggtgcccagtaccttgttaccgatgattaccggcggccgccagccgaacgaagatggaactgctcaacca

SEQ ID NO: 33338 - DNA, 768 bp, Pseudomonas syringae
atgaacgaacctcgtaaacgcatcacccagcgtattcgcctggagcctgcacagcagagccaactgatcgatatccagcgtcgttcgttcctgcgcgcagggctgaccgtaggcgctatgtcgatgctcaccggctgtaatctgcaggacggtgatcaggtggacaaggtgctgtgggccatgtcgcgctggaacgaccgggttcaggcctggctgttcaacggccagaaactggccccgacttataccaaggcgcagttgaccaacccgttcccgttcaatgcgttttaccctgaatacaacgtgcctgagctggagcttgccgagtatcggctggcggtgtccgggctggtacgcgacaagcagccgtggacgatagacgcgctgcgcaaattgccgcaacgcacggacatcacgcggctgatctgcattgaaggctggagcgcgatagggcagtggggcggtgtgccgctgaaaacgtttctggagtacatcggagcggatactacggcgcgcttcgtcggcttcaagtgcgccgaccgctattactcaagtttggacatgcccaccgcgctgcacccgcagaccctgctggcgctggacttcggcgaagtcgcgctgcctccggactacggttacccgctgcgcgtgcgggtgccgaccaaactgggcttcaagaaccccaagcacatcgtcgagattttcgtcagtaacgaaaaccccggcgggtactgggaagatcagggctacaactggttcagcgggatc

SEQ ID NO: 33339 - DNA, 1320 bp, Pseudomonas syringae
atgaaaaccccagacagcaatccagacgccactaacgcccctgtttccctgcagcgtcgccgtgtcctgatgggcctcggtgccgcaggtgccgcgctggctggcagcagcctgagcggcaacgtgctggccgccgcgcctgcgcaggtcaccgaagcaccgaacagcgaaaagacacaggaccacaacgacttccacggcctgcaccagaccggcatcgtcaacccgcgcccggccgccggcatgctggtggcattcgatgtgctggccgccgaccgtgacgacctggaacgcctgtttcgcacgctgaacgaacgcatcgcgttcctgatgaccggtggcccggtgccggagatcgacccgaaactgccgccgccggactcaggcattctcggcccgatcgttaccccggataatctgaccattaccgtgtcagtgggcgagtcgctgttcgatgagcgttttggtctggctgcgctgaagcccctacgcctgagccgcatgaccggctttcccaatgacgcgctggacccggccagctgccacggcgatttgagcattcagttctgcgccaacaccgctgacagcaacattcacgccctgcgcgacatcgtcaagaacctgcccgacctgctgctggtgcgctggaaacaggaaggcaccgtgccgccccaggcaccgaaaaaacccggccagccggcggaaagcgcacgcaactttctgggcttccgagatggctcggccaatccggattccaacaaccagaagaccatgaacgaactggtctgggtgcaaccgggcagcgacgagccggcgtgggccgccaacggcagctatcaggcggtgcgcatcatccgcaacttcgtcgaacgctgggaccgcacgccgctgcaggaacaggagtcgatcttcggccgcagcaaaaccactggtgcgcccatggacggcaaggtcgagagcgatgtgcccaactacgcggctgaccccgaaggcaagaaaacccggctggattcgcacatccgcctggccaacccccgtactgccgaaagccagcgcaacctgatcctgcgtcgcccgttcaactattccaacggggtgaacaagaacggccagctggacatgggcctgctgttcatctgctaccaggccgacctggaaaaaggctttatcaccgtccagagccgcctcaacggcgaaccgcttgaggaatacctcaaaccggtcggtggcggctacttcttcaccctgccgggggtaaccggcgaacaggatttcatcggtcgctcgttgctggcggctgcatcgtccactcaaaccgca

SEQ ID NO: 33340 - DNA, 915 bp, Pseudomonas syringae
atgacacaacgcagggcaatgctcattcttcacggcaagcagtcactcaacgaagacgtgcgtgatgctgtcgcggacaagcgcaagcagggctgggagctggatgttcggctgacctgggaggcgggcgatgcgcagcgtctggtcaatgaagcgctggcggctgggcaccggcatatcgtggcgggcggcggtgacggcaccttgcgtgacattgccgaagcgctggcgctggctgcaaccaaggccagtctgaccatcctgccgctgggcactgccaacgattttgcccgtgctgccggtgtgccgcttgatgtgtccaaggccctgcagctcatggacgtggcgccgcgcgctgtcgatctgggcgaggtgggcggcaagctgtttctcaacatggccacgggtggttttggcagccaggtgacggccaatacttccgaagacctgaagaaagtgctgggtggcgcggcctatctgttcaccggcctgacgcgcttcagcgagctgcatgccgcgcatggcgaactcacggggccggattttcactggcgtggcgatctgctcgcgctgggcatcggcaatggccgccaggcgggcggtgggcacgagctgtgcccgaccgcgctggccgacgacggtctgctcgacatcagcatcctgccagcaccgcaggaagtggttggcacgctcagaagcctgctggaaggcggcctgggcatcgacaacatgtttattcgtgcacgcctgccctgggtggaactcaagtcggctcaggggctggacatcaatcttgacggtgagccgctgtcgggcgaggacctgcgtttcgtcgcgcggccgggggccttgcaagtgcacttgcctgcaaactcgccggtgctgggcagcacgccgctgctcaatcgtccagac

SEQ ID NO: 33341 - DNA, 1188 bp, Pseudomonas syringae
atgaagtccttccaggagggcttcggcggcgtgctgggtttcgtcggtatcatccttggcctgggcaccatgctcggcaagctgatggccgattcggggggtgcggaccagattgcgcagaccctgatccgcacctttggtaaacagaaagtgcattgggcaatgatgttctccgcgtttctggtgggcatcccgctgttcttcgagatcggttttgtgctgctgatcccgctggtgttcatcgtcgcccgtcgtaccggcgtgtccatcgtcaagatcggcatcccgttgctggctggcctgtcggccgtacacggcctggttccaccgcacccgggcccgctgctggccatcggcatttttggtgctgatatcggcaagaccattttttatggcctgatcgtcgcgctgccaaccgccatcatcgcgggtcccatctacggcaactggatctccaagcgcatccccggtacgccgtcgcaggagttgatggaccagatcgccaaggagtcgagcactgaaaacctgccgggctttggcatcacgctgatcaccatcctgctgcctgtgttcctgatgctgctcaagacctttgctgacgtggtgttgccggaaaacaacatgttccgcatctggatggacctgatcggtcacccgatcactgccctgctggcagcgctgttgctggcgttctacacctttggtgcggcacgcggctttgaccgcaccaaaatcatgaaactgctggaccagagccttgcaccggttgcagccatcgtcctgatcgtcggcgcaggtggcggcttcaagcagatgctggtggccagcggtgtgggtgatgtcatcgggcacatggccgtacaggcacagatcaacccgatcatgctggcttggctggtggcggcggtgattcgcattgcgactggmtcggctaccgtggcgaccattaccggtgcagggattgtggcgccagtggttggcctgattccaggcgtcaatcgcgagctgctggtgctggccacgggtgccggctcgttgatcctgtcgcacgtcaacgatgccggtttctggctggttaaacagtatttcaacatgaccgttgccgaaacgttcaagacctggacagtgatggaaaccatcctgtcggtggtcggcctgatcttcatcatgctgttgtcgatggcactt

SEQ ID NO: 33342 - DNA, 978 bp, Pseudomonas syringae
gtgagagacatgcaaaaaaaagcatctcggaacacaagcgcgttgactcacatgacagaaccggtcagccccggagcgcctctggacatcgcttggctgaccggcatcatccctctgggttttgtgcccgcagagatcgcaatcagtcccgatgaaacgacgctatacgtggcccacgagagtggtcgcgaggtcagcgtggtcgacatcgccaccatgagcgtggtgggcagcatcaagagagccggggcgggtgctatcaccctgagccccgatggcaaacggctttacaccatcggccagaaacgttgctacgtggtcgatacacgcttgcgtgaggtcatcaggatattgccggcggccaacgtcaacaggatcctgtgcagcccggatggccgtttcatctgtctgtcgtttcagaacgcgcgcggcgggctgatccgcctgatcgaaaccgaaaactacacggtcgagaatgagttcgatctcggcgcgttgaccaacgcgtcgctggccctcgggatcagcccgttgaacgacaggttctacgccaccatgctggtagaccgcaccgcacctaccgatgtcatggcgatcaaccggatcgattacctgcaacatgacatcccggggttttccgatccgcgctcaatggcgttcagttccgacggcgcgtggctgtatgtgggtggaatcgacgaggtctatatcgtcaatgcggccactcacaaaacgttttatcgggaaaagctgggcactcaggggtacccggtaaaagtcatcggtgtcacgccggatgatcgctatgtctacgcgatctatacctgcaattacgacgtctaccggatcgacaccgtgaagggcattgcgacctgcatcgcgtacttcccttccgtggggggcgccgtgctcaacaagaccgcgacctacatctactccacgcatccggacatgagctggatttccatttaccggctg

SEQ ID NO: 33343 - DNA, 1908 bp, Pseudomonas syringae
atgaccctgctcaaattcagcgatgtgtcccttgctttcggcgccatgccgttattggacaaggtgtcctggcagatcgcccgtggtgagcgggtgtgcatcattggccgtaacggcacaggcaagtccagcatgttgaagctggttaaaggcgttcagaagcccgatgacggcgctgtctggcgtgcgccaggcctcaagatcggcgaattgccccaggaattgccggtagccgacggacggacagtgttcgacgtggtggccgaaggtctggatggcgtcggtgccttgctggctgaatatcaccacctggcgcagaactgcgtcaccgaggaagacctgaacaagctgatgcatgttcagcaggacctcgaagcccgtgacggctggcgtttgcagcaactggtcgacagcaccctgagccgtctgcagttgcctgccgacaagacgctggccgagctgtcaggtggctggcgtcgtcgcgtcctgctggcccaggcgctggtttccgagccagacctgttgctgctcgacgaaccgaccaaccacctggacatcggtgccattgcctggcttgaagaagccctcaaggaattccagggggcggtgctgttcatcacgcacgaccgggcattcctgcaaaacctcgctacgcgtattctggaactggatcgcggcggcctgatcgactggaacggcgactacgccagcttcctggttcacaaggaagctgcgctggcagccgaagagaccgccaacgcgctcttcgacaagcgtctggctcagragraggtctggatccgcmagggtatcaaggcccgccgtacccgtaacgaaggccgcgtgcgcgccytcaaggagctgcgtgtagagcgcagcgaacgccgcgagcgtaccggcaaggccaacatccagctggacaccgccgagaaatccggcaaacaggtcatgatcctcgacaacgtcagctttgcccatccgggcggcccgatgctgatcaaggacttctccatggtcctgcagcgcgaagaccgtatcggcctgctgggtgcgaacggtaccggcaagaccacgctgctcaagctgatgctcgacaacctgcagcctaccggtggcaaggttgaagtgggtacgcgtctggacgtggcgtatttcgaccagttgcgtcaccagctcgatctggaaaagaccgtgatcgacaacgtcgccgaaggccgtgacttcatcgacatcgatggccagagccgtcacgtcctgagctacctcggcgatttcctgttcagtccgcagcgtgcccgcacgccagtcaaggcgctgtctggtggcgagcgtgcccgtctgttgctggccaagctgttcagcaagccggccaacctgctggtactcgacgaaccgaccaacgacctcgacgttgaaaccctcgagctgctcgaagaagtgctgttgaccttcaagggcaccgtgctgatggtcagtcacgaccgggcattcctggacaacgtcgtcaccagcacgctggtgttcgaaggcgagggcaaggtgcgcgagtacgtggggggttatcaggactggctgcgtcagggcggttcgccgcgtctgctgggcgttgccgacaccaagtcgggcaaggccgaactggccagtgcggtggtgcaggctgcacctgtggcggctcaggacatgccggtcgcgaaaaagaaactcagctacaagcttcagcgtgagctggaagcgttgccggcgcagatcgacgaagtggagggcaagatggccgtcctcaacgccgagatggccgagccgggtttctaccagcgttcggcagagcagaccgcggcggttcttgctcagctggagaacctgcaggccgatctggacaagctgctggagcgttgggccgaactggacgag

SEQ ID NO: 33344 - DNA, 2163 bp, Pseudomonas syringae
atgatttacgaaggtaaagccatcacggttaaggctcttgaaagtggcatcgtcgaattgaatttcgacctcaagggtgagtccgtcaacaagttcaaccgcctcaccctcaacgagttgcgtcaggcggtcgacgccgtcaaggccgacgcatcggtcaagggcgtgatcgtcaccagcggcaaggacgtgttcatcgtcggtgccgacatcaccgagttcgtcgacaacttcaagttgccggaagccgaactggttgcgggcaatctggaagccaacaggattttcagcgatttcgaagacctgggcgtgcccaccgttgtcgccatcaacggcattgcgctgggtggtggtctggaaatgtgcctggccgcagactatcgagtcatctccagcagcgcccgtgtcggcctgccggaagtcaagctgggcctgtatccaggtttcggcggtaccgtgcgcctgccgcgcatcatcggcgccgacaatgctatcgaatggatcgcatcgggcaaggaaaactccgcagaagacgcgcttaaagtcggtgttgtcgatgcaatagtggctcccgagaagcttcaggccgcagcgcttgaccttatccagcgcgctatttccggcgagttcgattacaaggccaagcgtcaaccaaagctggacaagctcaaactgaacgccatcgagcagatgatggcattcgagaccgccaagggttttgtcgcaggtcaagccgggccgaattacccggcgccggtcgaagccatcaagaccatccagaaagccgccatctttggccgtgacaaggcactggaaatcgaagccgccggtttcgtgaaaatggccaagacttcggccgcgcagagcctgatcggcctgttcctgaatgatcaggagctgaaaaagaaagccaagggctacgacgaagtggctcgcgacgtgaaacaggccgccgtgctgggggccgggatcatgggcggcggtattgcctatcagtctgcggtcaagggcacgccgatcctgatgaaggacatccgcgaagaagccattcaactgggcctgaacgaagcctccaagctgctgggcggtcgccttgaaaaaggccgtctgaccgctgcgaagatggcagaagcgctaaacgcgattcgtcctacgctgtcctacggcgatttcggcaatgtcgacctggtggttgaagcggttgtcgaaaaccccaaggtcaaacaggccgtactcgctgaagtcgaagccaacgtcggtgaaaacaccattctggcttccaacacctcgaccatttccatcagcctgttggcgcaagcgctcaagcgcccggaaaacttcgtcggcatgcacttcttcaatccggtgcacatgatgccgctggtggaagtgatccgtggcgagaagtccagcgaagaggctgtcgccaccaccgttgcctatgccaagaaaatgggcaagaacccgattgtggtcaacgactgcccgggctttctggtcaatcgcgtgctgttcccgtacttcggcggtttcgccagactggtcagcgcgggcgtggatttcgtgcgcatcgacaaggtcatggaaaaattcggctggccgatgggccctgcgtacctgatggacgttgtcggcatcgacaccggccaccacggccgtgacgtgatggctgaaggcttccccgaccgcatgaaagacgaccgtcgttctgccgttgacgcgttgtatgaagccaatcgtctgggccagaagaacggcaagggcttctatgtctacgagaccgacaagaagggcaagcccaagaaggtcaacgatccggcggtgctggacgtgctcaagccgattgtctacgagcagcgtgaagtcagcgatgaagacatcatcaactggatgatgatcccgctgtgcctggaaaccgttcgctgcctggaagacggcatcgtcgaaacggctgccgaagctgacatgggcctgatctacggtattggtttccctccattccgtggcggtgcgctgcgctacatcgattccatcggtgttgccgaattcgttgccctggccgatcgatatgccgagctgggtgccctgtatcaaccgaccgcaaagctgcgtgagatggccgccaatggccagagcttcttcggtcaagcgtcttccgaggta

SEQ ID NO: 33345 - DNA, 1023 bp, Pseudomonas syringae
atgagcaacgcgattctgcaaaacaagccggccctggcgccgaccggaaaaaaaagaaggctgccgaccgagctgagtatttttctggtgctgatcggtataggcctgatctttgaactgttcggctggatcgttcgcgatcaaagctttctgctcaactcccagcgtttggtactgatgattcttcaggtgtcgatcatcggcctgctcgctatcggcgtcacgcaggtgatcatcaccacgggcatcgacctgtcgtccggctcggtattggcgttgtcggcgatgattgccgcgagtctggcgcagacctcggatttttcccgcgcggtgtttccttcgctgactgacctgcccgtatggattccgatcgtggtcgggctcggggtggggttgctggccggcgccatcaacggcagcatcatcgcgatcaccggcatcccgcccttcatcgccacattgggcatgatggtctctgcacgcggcctggcacgcttctacaccgaaggccagccggtgagcatgctctctgattcctacacggccattggccagggcgcgatgccggtcatcatctttctggtggtggcggtcattttccacattgcgctgcgctacaccaagtacggcaaatatacctacgccattggtggcaacatgcaggcggcgcgcacctcggggatcaacgtcaagcgtcacctgatcattgtctacagcatcgccgggctgctggccggattggcaggcgtggttgcctcggcgcgagccgcaaccggccaggcgggcatgggcatgtcctatgagctggatgcgatcgcggcggcagtcatcggcggcaccagcctggcgggcggcgtcgggcgaattaccggcacggtcatcggtgcgctgattctcggggtaatggccagcggcttcacgtttgttggcgtggacgcctacgttcaggacatcatcaagggtctgatcattgtggcggcggtggtaatcgatcaatatcgcaacaagcgcaagaccaagcgc

SEQ ID NO: 33346 - DNA, 1149 bp, Pseudomonas syringae
gtgattgtcgacttcggtcgcaccccgatgggccgctccaagggcggtatgcaccgcaatacccgtgctgaagatatgtcggcgcacctgatcagcaaactgctcgagcgcaacaacaaggtcgatccggccgaagtcgaggacgtgatctggggctgcgtcaaccagaccctggagcagggctggaacatcgcgcgcatggcgtcgttgctgacccagatccctcacacttccgccgcgcagaccgtgagccgtctgtgtggttcgtccatgagcgcgctgcacaccgctgcgcaggcgatcatgaccaacaatggcgacgtatttgtcatcggtggcgttgagcacatgggccacgtcagcatgatgcacggcgtggaccccaacccgcatatgtccctgcacgccgccaaggcgtccgggatgatgggcctgaccgctgaaatgctcggcaagatgcatggcattactcgcgagcagcaggatgcattcggtttgcgttcccaccagttggctcacaaggccacgctggaaggcaagttcaaggacgagatcatcccgatgcaggggtacgacgagaacggctttctcagggtcttcgactatgatgaaaccattcgtccggacaccaccctggaaagcctggcggccttgaagccggcgttcaatccaaaaggcggcaccgtgacggcgggtacttcttcgcagatcactgatggcgcgtcgtgcatgatcgtcatgtcagcccagcgcgcccaggacctcggcatccagcctctggcggtgattcgctcaatggccgtggccggtgtagaccctgcgatcatgggctatggtccggttccggcgacgcaaaaagcgctcaagcgcgctggcctgagtatcagcgatatcgacttcttcgagctcaacgaagcgttcgctgcacaggccttgccggtgctgaaagatttgaaagtactcgacaagatgaacgagaaggttaacctgcacggcggcgccatcgctctgggccatccatttgggtgttccggtgcgcgcatctccggcaccttgctcaatgtcatgaagcagaatggcggcacctttggcgtgtctaccatgtgtatcggtctgggtcagggcatcgcgaccgttttcgaacgcgtc

SEQ ID NO: 33347 - DNA, 2607 bp, Pseudomonas syringae
atgggcaaatcgctggtcatcgtggaatccccggctaaggccaagaccatcaacaagtatttgggcaaccagtacgtggtgaagtcgagtatcggccatatccgagacctgcccaccagcggttcggctagtgctgccaaagaccctgccgccaagcgcggcaaggctgctgcgggcgaaggcccggtactgacgcccaaggaaaaggctcagcgccagttggtctcgcgcatgggcgtcgacccggaacacggctggaaagccaaatacgagatccttcccggcaaggagaaggttatcgaagagctgcgcaagctcgccaaggatgccgacaccatctatctcgcgacggacttggaccgcgaaggggaagccattgcctggcacctgcgcgaagccatcggtggggatgacagtcgttacaagcgcgtggtgttcaacgaaatcaccaagaaggccatccaggaagcgttttccagaccgggtgagctggacatcgcccgagtcaatgctcagcaggcgcgtcgtttccttgaccgcgttgtgggctatatggtctcgccgctgctgtggcagaaggttgctcgtggcctgtccgcagggcgtgtgcagtcggttgccgtgaagctggtggttgagcgcgaacgcgaaatccgcgccttcaaccccgaagaatactgggaaatccacgccgacctcggcactgccaaaggcgcaaacgtgcgcttcgacgtggcgcgtgaaaaaggcgaagcgttcaagccgttgaacgaaaagcaggcgatggccgcacttgaaaagctcaaggcgtccagctatagcattgtcaagcgtgaagacaagccgaccagcagcaagccgtcggcaccgttcatcacctcgactctgcaacaggctgcgagcaatcgcctgggtttcggcgtgaagaaaaccatgatgatggctcagcgcctgtacgaggcgggctacatcacttacatgcgtaccgactccaccaacctgtcggccgatgccgtcagcatggcgcgcgactacatcgaaaccgagttcggcaagaagtacctgccggaagcggcgaatgtctacagcagcaaggaaggcgcacaagaggctcacgaagcgattcgtccgtccgacgtcaacacccatccttcgaagctgaccggcatggaacgtgatgcagagcgcctctacgagctgatctggcgccagttcgtggcctgccagatgcttcctgcgcagtacctgtcgaccaccgtcacggttgcagccggcgatttcgaactgcgtgccaaaggccgcatcctgaagttcgacggttatacccgtgcgttgccgcaaatggccaagccaggcgatgacgacgtgctgccagacatggcgcagggcgaagttctgaagctgaacacgctggaccccagccagcacttcaccaagccgccggcgcgttactccgaagcgagcctggtcaaggaaatggaaaaacgcggtatcggtcgcccgtcgacctacgcagcgatcatttcgaccattcaggaccgtggctacgtggcgctgcataaccgccgcttctactcggaaaaaatgggcgatatcgttaccgggcgtctgtccgagagctttgccaacttgatggactacggttttaccgccgggatggaagaaaatctcgacgacgtggccaaggggcagcgcgactggaagaacgtgctggacgagttctacggtgatttccgcaagaagctggaagtggccgaagccccggacagcggcatgcgtgccaatcagccggtgatgaccgatattccgtgcaaggtgtgcgctcgtccgatgcagatccgtaccgcctcgacgggcgtgtttctcggttgctccggctacagcctgccgcccaaggaacgctgcaaggcgactgtcaatctgacccccggtgatgaaattgccgatgatgatgacgagtccgaatcgcgtgttctgcgcggcaagcatcgctgcccgatctgcagtacggcgatggacgcctacctgctggacgagaagcacaagctgcacatctgcggtaacaacccggattgcacaggttacgagattgaagagggtacttaccggatcaagggctacgaaggcccgagcctggagtgtgacaagtgcggcagcgagatgcagctcaagaccggtcgtttcggcaagttcttcggttgcaccaacgccgagtgcaagaacactcgcaagctgctgaaaagtggcgatgcagcaccgccgaaaatggacccggtgaagatgccggagctcaagtgcgacaaggttgacgacacctacatcctgcgtgacggcgcttcgggtctgttcctggctgccagccagttcccgaaaaaccgtgaaacccgcgcaccgctggtcgccgagatcgcgccgcacaaggacgagatcgatccgaagtaccacttcctctgcgaagcgccgaagcaggacccggacggtcgtccgacggtgatccgttacagccgcaagaccaaagagcagtatgtgcagaccgaagtggaaggcaagcctaccggctggcgcgcgttctacgatggcagtgcctggaaggttgaagacaagcgt

SEQ ID NO: 33348 - DNA, 1008 bp, Pseudomonas syringae
atgagttctggcctgcaaggctccctgatggtcgatgtcgccggtacctggctgaccagcgaagaccgtcagtttctgcgtcagcccgaagtgggcggcttgatcatctttgcccgcaacatcgagcatccgcgtcaggttcgtgagctgagcgcagcgattcgcgccgttcgcccggacctcctgctggcagtggaccaggagggcgggcgggttcagcgcctgcgtcaggggttcgtgcggctgccgccgatgcgcgccatcgctgacaagcctgaggcgctgctgctggccgaacattgcggttggctgatggccaccgaagtgctggcggtcgggctggacctcagttttgccccggttctggatctggactatcagcgcagcgcggtggtaggcacgcgcgcgttcgagggcgatccggagcgtgcagcgttgctggcgggtgctttcattcgtggcatgaacgcagcaggcatggccgcgaccggcaagcattttcccggccacggctgggcggaagccgactctcatgtggccattccgaatgacgagcgcagcctggagcagattcgcgccaacgacctggtgccctttgcgcgcctgagtcagcaactggcggcagtcatgccggcgcatgtcatctacccgaaagtcgattcgcagcccgccggtttttcaaggcgctggttgcaggacatcctgcgcgacgaactgaaattcgacggtgttattttcagtgacgacctgtcgatggccggcgcccacgtggtgggtgatgcggccagccgcatcgaagcggcgctgactgcgggctgcgacatggggctggtgtgcaacgaccgtgcagccgcagagctggcactaattgcggctcagcgcttgaaggtcaagccttcgccgcgcatcgcccgcatgcggggtcaggcgtctgccagtaccgattatcggcaacacccgcgctggcaggccgcgcttcaggcgctacgcacggctcaactgattgat

SEQ ID NO: 33349 - DNA, 1431 bp, Pseudomonas syringae
atgccagagtggcgcctcggtctgtttaaaggagtacgcatggctgtctacaactacgacgtggtagtactgggttccggccctgccggagaaggcgcggcaatgaacgccgccaaggcggggcgcaaagtcgccatggtcgacagccgtcgggaagtgggcggcaactgcacccatttgggcaccattccgtccaaggccctgcgtcactcggtcaaacagattatccagttcaacaccaatcccatgttccgggccatcggcgagccgcgctggttttcgtttccggatgtgttgaagaacgcggagatggtcatctccaagcaggtggcctcgcgcaccagctactacgcccgcaaccgcgtcgatgtgttcttcggcaccggcagctttgccgacgagaccagcgtcaatgtggtctgtgccaacggtgtggtggaaaaactggtcgccaaccagatcatcatcgccaccggctcacgcccttatcgcccggccgatatcgatttcagccacaagcgtatctacgacagcgacaccatcctcagcctgggccacaccccacgcaaactgatcatctatggcgcgggcgtgatcggctgcgaatacgcctcgatcttcagcggtctgggtgttctggtcgagctggtggataaccgcgatcaactgctgagcttcctcgattcggagatctcccaggcgttgagctatcacttcagcaacaacaacgtgatggttcgtcacaacgaggaatacgagcgggtcgaaggcctggacaatggtgtggttctgcacctcaagtccggtaagaagatcaaggcggacgccttgctgtggtgcaacggtcgtaccggcaataccgataagctggggctggaaaacatcggtctcaaggccaacggccgcggtcagatcgaagtggacgaggcttaccgcaccagtgtttccaacgtctatggcgcaggtgatgtgatcggctggcctagcctggccagcgctgcttacgatcagggtcgttcagcggctggcagcatggtcgacaacggcagctggcgctatgtcaacgacgtgccgaccgggatctacaccatccccgagatcagttcgatcggcaagaacgagcacgaactgactcaggccaaggtgccctacgaagtcggcaaggcgttcttcaagggcatggcccgtgcgcagatctccggtgaacgggtcggcatgctgaagattctgttccaccgcgagacgctggaagtgctcggcgtgcattgcttcggtgaccaggcgtccgagatcgtgcacatcggccaggcgatcatgagccagccgggcgaagccaacacgatcaagtatttcgtcaacaccacgttcaactacccgaccatggccgaagcctaccgggttgcggcctatgacggcctcaaccggcttttt

SEQ ID NO: 33350 - DNA, 7925 bp, Pseudomonas syringae
ttgtcctatgcccagcagcgcatgtggtttctctggcaactggacccgcacagcgcagcctacaacctgccgatgtcggtgtgcctgaacggcccgctggagctgccgctgctggagcgggcgttcagcgcgctggtcgagcgccacgagagcctgcgcacgaccttcggtcaggaaggcgatcggacgtttcagcgtgttgcgccacccgcgccggtcaatatccgcctgatcgacctgagcccgttgccgccgcagcagcgctggtcgaacgcgcggcaggcgatggccgagcagtcggcgcagaccttcgacttgcagcgcgggccgctgtttaccgtacaggtgttgcgcctcgccgagcaagaacatctgctgctgctcaacctgcaccacatgatcaccgacggctggtcgatgaacgtgctgatcgatgaatggctgcgcggttacgacgcgttgctgggcggcaagccactgcctttccagccactggctgtgcagtaccgcgattacgccgtctggcaacgcagctggctggaggctggcgaacaagagcgccaactggattactggcgcaagcacctgggtgaagaacacccggtactcgaactgcccaccgaccgcccgtacccggcattgcccagtcatgaaggcgcgcgtctggaactggcgcttgcgcccgagctgctgcgcaacctgaaaatccttgcgcaacggcagggcgtgaccctgttcgtggtgttgctggcgaccttcaaaagcctgctgcatcgctacagcgggcagaccgatattcgcgtcggcggcctgatcgccaaccgcacgcgcagtgaaaccgaaggcctgatcggctgcttcatcaacacccaggtactgcgcagtgaagttacggcgcagacgcgctttgtcgatttgctgcacaccgtgcgcgatgcctcgaccggtgcccaggcgcatcaggagctgccattcgacgccatcatcgacgccttgcagcctgagcgaagccaaagccacaacccgctgttccaggtgatgttcaatcaccagccggtggtggccgacttgctggacaagcaactgagcggcggcctgcgcgtggccaatctgtccgccgagcaacaagcactggcccagcgctcgcacgccgctgccagtgacctgatgctcgccaccagcggtgagggcgagcaactgaacgccgccttcacctacgccaccgacattttcgatcagccgaccatcgctcgcctggccgcgcactggcgcaacctgttgacgtcggtctgcgctgacccgctgcaaaccattgccgagctgtcgatgctctcggccgacgagcgcacgcacctgctggctgtcgacagcgccatcaaggcagacaccaccaccccggcgcatcgccagtttgaagcgcaagtgcagcgaacgccggacgcactggcgctgatcctcgccggtgaaagcccgtcaccgagcctgacctattgcgaactgaacgagcgcagtaaccgcttggcctggcaattgcgcgagcagggtgtcggcccggacgtgctggtcggagtggcgctgggccgttcgctggacatgcccgtcgcgctgctggccgtgctcaaggcgggtggtgcctacgtgccgctggacctcagcgcgccgagcgagcgtttgcgtcatgtgttgcaagacagcggcctgaaacggctgctgacccacagcgaacagcggccgacgctgcctgaactggcgggcattcagtgcctgtgcattgatcagatgaacagcgaagcagccagcgcagaaaatccggttgtcgatatcgatccggcccatctggcctacgtgatctacacctcgggctcgaccggccggccaaaaggcgtggcgatcagtcatggcgcactggccgagttcgtcaccttgggcgcggactacagcgacctgcgcgaaggcgatcgggttctgcaatttgccacgcaaagtttcgacggcttcgtcgagcagttctacccgccgctgtgtcgcggcgcggccgtggtgctgcgtgacgagcgtttgtgggacagcgccaccttccatcacgccatcgtcgaacacggcgtgaccctcgcggacctgccagcagcctactggctgaccctggttcaggattttgccgccagcccgcccgtgcattacggcgcattacggcagattcacgtcggcggcgaggcgatggccgttgaaggcctgcgtctgtggcagcacgccgggctggggcatgtgcgcctgctcaacacctatggcccgaccgaagccacggtggtgtcgagcattcacgattgcagcgcgctgaccccggagcaggtgtcgtggcgcggcgtgccgatcggcaaaggcctggcggggcgtcgtttgtacgtgctcgacgatcaactgaacctgctgccgcaaggcgcgctgggcgagctgtacatcggcgggccgggtctggcacggggttatcacgcccagccaggcctgagcgccgagcgtttcgtggcggatccgttcgttgccggcgagcgactgtaccgcactggcgaccgtgcccgactgcgcgctgatggcgccatcgaatacattggccgggtcgatcatcaggtgaagattcgcggtttccgcatcgagctgggcgaaatcgaatcgcgcctgcagcaatgcacgggcgtgcgcgaagcggtggtactggcggttgcgctggccggcagtgcgcaactggtcgcctacgtagtgccaagtgtcgtggcaaacagcgataccgaacaaatggctttgcgccggcgcatcaagggtcaactgcaagccagcctgccggattacatggtgccgacacacttgttgctgctggcgcaattgccactcacgcccagcggcaaactggaccgcaaggcgttgcctgcgcccgattcaagccagttgcaggcccgttatcgcgcgccgcacagcgaggtggaaatctgcctggcggctatctggcaggaagtcctgcacgcgcagcaggtcgggctggacgatcacttctttgagctgggcggccattcgctgctcgccgcgcaagtcattgcgcggatcaagacccgactgggcgtcagcctgccgctacgcgtgctgtttgaaaaaccgctgctgggcgaactcgccgccgaagtggcgctgctgaccgacaacgcaacggataacgactggagcgacatggaccagttcatggattcactggaggaatttggcgcatgaccgcgaccactgctgcacgtatcgcgaaacgttttgttggcctttcgctggaacaacgccaacagttccttacccgcctgcgtcaggaaggcaaggatttcagcctgttgccggtgccggtcagtcgtcatgatttcagcgcgattccactgtcatttgcccagcagcgcctgctgttcctctggcagctcgacccgctgagcgatgcctacaagatgaccaccggcctgcgtctgcaaggcccgctgaacgagtcagcgctaaggcgtgcgttcgatcacctgatcgaacgccacgaagtattgcgcacagtgttccagaccgatggcgatcaggcgctgcaagtgctgctgcacaaccagagcatcgcgctggacagcattgacctgtcggttctggccgatagcgaattgcgtgacgctgaactggcgctgcaagtgaccacgctcaccagtcagccgttcgacctgcgcacgggcccgttgctgcgtgcgcacctgttccgcctcgccagcgacgagcatgtgctggtggtgaacatgcaccacatcgtctccgacggctggtcgatggacgtgatgattcaggagtttgtccactgctatcaggcgtatgtcgaaggtcgcgaaccgagtctgccggcgttgccgctgcaatacgccgactacgccatctggcagcgccgctggctggaggcgggcgagggcgagcgtcaactggattactggcgcggccagttgggtgacgagcagccgctgctggacgccgcgcaggacttcccgcgcccggtcacgcaaagctttcagggcgagcacctgcgcttcgacttcggcgctgagttgtcgcaccaactcaataccttcgcccgcacccaaggcatgagcctgttcatgctggtgctggccggtttttcgttgtttttgtcgcgcaaggccgggcagcgcgatatccgcatcggcgtgcccaacgcaaaccgtggccgcgcggaaaccgaagggttgattggtttcttcatcaacactcaagtgctgcgctgccagatagacgagcgcctgagttacctcgatttgctggcgcagattcgcgacacctcgttcggcgcgcaggcgcatcaggacgtgccattcgagcagctggtcgatcacctcgcgccggagcgcaacctggggcacaaccctctgttccaggccaagttcaaccagaacgtggtcctcaaacagaaaaccgccctcaagctggcagggctggaggtcagcgaatatgcgtttgaaaagcagggtgcgcatttcgatctggcactggacattaccgacgacggcacgctgatccacggtgacatgacctacgccagcgacctgtatcggcgtgcgaccgtcgagggcttcatccccgaattgctcgacctgttcaagaccttgctcaatgcaccggatgtgccactgttcagccttggcgcgctggcggtggagctgccgcgcgaagttcgtgagcccgcacctcaggtattgcagctctgggaccggcaggtcgaaagccagcccgatgcgctggccgcccgctgtctggatcgtaccctgagcacacgcgagctggatcaggcggccaatcagctggctcatcacctgatcggactgggtgtccgcgaaggccagccggtcgcggtgttgatggagcgctcgctggactggctgacggcggtgctggcgatcttcaaggccggtggcgtgtacatgccattggacgtcaaagcccccgatgcacgcctgcaacagatgttgagcaatgcccagaccaaggtgctgctgtgtgccgaaggcgacaggcgtgaaacatctttgaacgttgcgggttgtcagggcctggcctggacgcctgcgctgtggcagagcttgccgaccagccgtcccgatatcgagttgccagccgattctgcggcctacgtgattcatacctccggctccaccggccagcccaaaggcgtagtggtcagccagggcgcgctggccagttacgtgcgtggcttgcttgagcagttgcaactggcccccgaggtgagcatggcactggtctcgaccatcgccgccgacctcggccataccgtgttgttcggcgcgctgtgttcagggcgaacgctgcatgtgctgaccgaatcgctgggtttcgacccggacgcctttgcgacctacatggccgagcatcagatcggcgtgctgaaaatcgtgccgggtcatctggctgcgctgctgcaagccgctcaacccgccgacgtgctgccgcagcatgcgctgatcgtcggtggcgaagcctgttcgccagcgctggtcgagcaggtgcgtcagctcaagccgggttgccgggtgatcaaccactatggcccgagcgaaactacggttggcgtactgacccatgaggtgcctgctttatcggagttgaatgcgatcccacaggtctcacgtttcccacaatgctctgcacactctggcgaccctctgcgtagcgtgccggtcggcgcgccattgccgggggccagcgcttacgtgctggatgacgtgctcaaccccgtcgccacgcaggtcgcaggcgagctgtacatcggtggtgacagcgttgcgctgggctatctcggccagcctgcgctgactgccgagcgcttcgtgccggacccgtttgcgcaagatggcgcacgggtttaccgcagtggcgaccgcatgcggcacaatcatcagggattgctggaattcatcggccgcgccgacgatcaggtcaaagtgcgcggctatcgtgtcgagcctgctgaagtggcgcaggtgctgctgagtctgccttctgtcgcgcaagtcagtgtgttggcgttgcctgttgatgaagacgaatcgcgcctgcaactggtggcctattgcgtcgccgcagccgctgccagcctgactgtcgacagcctgcgcgagcaactgacggcgcgcttgcccgactacatggtgcccgcgcagatcctgctgctggaccaactgccgctgaccgccaacggcaagctcgacaagcgcgccttacccaagccgggcgtagtcaaacagcgctataccgcaccggtcggcgagatcgaagaaaagctcgccgccgtgtgggccgacgttctgaagctggagcaggtcggcagcaccgacaacttcttcgaactgggcggcgattcgatcctcagtctgcaaatcatcgcccgcgccaagcgccagggcatcaagctcagccccaagcaattgttcgaaaaacagaccatcggccaactggcttctgtggccagactgatcgagaaaaagcccgcagcggcggcagagcaggtcagcggttcgctgccgctgctgccgattcaggcgcgtttctttgaaatggacatccctgagcgtcagcactggaatcaggcgctgatgctcaagcccctgcaaacgctggatgtaacccatcttcaagcggcactcacggcactgatcgaacagcatgacgcgctgcgtctcggtttcacgcaacagaacggccagtggcaagccacgttcggcgcgctgaacactcgggatttgctctgggttcacgaattggacagccctgaacgattgaccgaactggctaacgaagcacaacgcagcctggacctgaaaaacggtccgttgctgcgcgcagtgctggtcaacctgccacacggcgagcaacgtttgctgctggtgattcatcatttggcggtggacggcgtgtcctggcgggtgctgctggaagatctgcaacaggcttacgtcgccttgacgaagggccagcctgtggcgttggcagcgaaaaccacgtcgctcaagcgctgggccgagcaattgcagcagtatgcgaccggcgccgtgctgacggccgagcgcgattactggctgcgcgctttacagggcgacgatcagccgctgccccgcgacaagcccgaaggctcgatgcgcactcgcgacgcggcccatgcctcgtcatggctgagcaaggacctgacccacaaactgctgaaagtcgcgcctgccgcctatcgcacgcaggtcaacgacctgctgctgaccgcgctggcgcaagtgctctgcgagtggagccagcagccgtcggtgctggtgcagctggaagggcatggccgcgaagacctgtttgacgacactgacctcagccgcacagtcggctggttcagcagcctgttcccggtccgccttaccccgcacattgcgccgggtgcgagcctgtgcggcatcaaagaacagttgcgtgccgtgccgaacaaaggcattggttacggcgtattgcgtcatatggctgactcgacgtttgcgcagccattggccgcgctgccccaggcgcgtgtcacgttcaattacctgggccagttcgacggcaccttcaatgagcaacaaggcgcgctgttcgtgccaagcgccgacagtgtcggtatagcgctgtgcgaagacggcccgctgggcaactggctgagcctcaacggtcaggtgttcgatggccagttgcaactggactggaccttcagccgcgaggtgtatcaggcttcgaccatcgacaccctggcgcgtcgttacgagcaggcgctgactacgctgatcgaacactgcatcgccgggcatcaaggcgtcacgccgtctgacttccct

SEQ ID NO: 33351 - DNA, 9590 bp, Pseudomonas syringae
ctggcgcatctcactcaggcacaactcgacgcgctgccgattgcggcgggcgagatcgaagacatttacccgttgtcaccgatgcagcagggcatgttgtttcactcgttgttcgactcaggcgcgggcaactacatcaatcagatgcgggtgaacatcagtgggctggatgtgccgcgattccacaacgcctggcaatcagcggtcaataatcacgaggtgctgcgcagctgttttgtcagccagagcgagcagtcgctgcaagtggtacagagtcaggtgacgctgccgtttgtcgagctggatgcgcggggcaaaccccaaaactggctcgatgactgggcgcaggccgaccgtcagcagggtttcgatctggcgcaagggccgctgttgcgcctcgcggtactgcgcactgcagatgaccgttggcaattgatctacaccagccaccatattttgatggacggctggagcagctcgcggcttctgggcgaagtgctgcaacgctacagcggtcagatgccgccgaaacaggcggggcgttaccgcgattacatccagtggttgcaggatcaggacgctgatgtcagcgagcgcttctggaccgcagagctggccgaactggatgagccgagccgcttgttgcaagccttcaaaacatcaaccgatcagcagggctatggcgattacattcagttgatcgacgccgacggcactcgccgcttgaacgagtttgcccgcgagcagcacgtgaccctcaatacgctggtgcaatctgcctggctgttgctgctgcaacgctacaccggccagtccagcgtgacctttggcgccacggtggccgggcgtccggctgaattgtcgggcgtcgaagagcaactgggcttgttcatcaacaccctgccggtgatcgccagcccgcgttcggaacagaccgtcggcgactgggtgcagcaggtgcaggcgaaaaacatcgccctgcgcgaacatgaacacacaccgctttacactattcagcgtttggcacggcacagtggcgaagcgttgttcgacaacattctggtgtttgagaactacccggtgtccgaagccttgcagcgtgcgccggacggtcttgtcttcagcgacctgcgcaatcaagagcaggcacattacccgctgaccctggtggtcgaggccaacgacgtgttgtcggtacgtttcagttacgaccggcaacacttcagtgccgaaggcattctgcaactggcggcgcacttcgatcacctgctgcagagccttagtgcatcagcaacggcgcgtcttggcgaactggccctgccagccgtctggacgcaaaccgtgcagcgttacccgagcgagcactgcgcccatcagcgcatcgaagctcaggctgcacgcacgccgcaggccatcgccctgagcttgggtgccgagcaattgagctatcagcagctcaaccgccgcgccaaccagttggcccacaaactgcgcgagcagggcgtaggcccggatgttcgcgtggggctggcggctgagcgcagcctggagatgattgtggggatgctggcgatcctcaaggccgggggcgcgtacgtgccgctggacccggattacccgcaggatcgcctgagctttctgatgcaggacagcggtatcgaattgttgctgagccaaacgcagttgctgggccagttgccgattcctgcacacgttcagacgctggatctggcggatgcgctagatggctacagcaccgaaaacccgatcaaccagacctcgccagacaatctggcctacgtgatttacacctcaggttcgaccggcaaacccaaaggcaccttgctggctcatcacaacctgatgcgcctgttcgcggctacggacgactggttcaagttcaacgaaaaagacgtctggacgctgttccattccttcgccttcgacttctcggtctgggagattttcggcgcgctgctgcacggtggccgactggtaatcgtgccttgcgaggtaacccgttcgccggaagagttccatgcgctgctggttgaccagcaggtcacggtgcttaaccagacgccatccgccttcaagcaattgatgcgcgtggcttgtgattccacttcggtgttatcgctggaaacaattatctttggcggcgaagcgctggacgttgccagcctgaaaccctggttcgcacgcttcggcgatcagacgccacgactgatcaacatgtacggcattaccgaaaccaccgtgcatgtgacctacagacccatcaccctggccgacacgcacaacccggccagcccgattggcgaggcgattgcggacctgtcgtggtacgtgctggacgccgatttcaacacggttgcccagggttgcagcggcgaactgcacatcggccacgccggtctggcgcggggttatcacaaccgcgctgcactgaccgctgagcgctttgtgccagacccgttcgccaacgacggcggccgtttgtaccgcaccggcgatctggcccgctataaaaccgcaggaaccatcgaatacgccgggcgtatcgaccatcaagtgaagatccgtggcttccgcatcgaactgggcgaaatcgaagcgcggctgcaagcgcattcggctgtgcgcgaagtgattgtgctggcagtggacgggcaactggcggcgtatctgctgccggctcagcctgaccaggatcaacaagcgctacgtggaaccctgaaagccgagctccgtgcgaacctgccggattacatggtgccgacccacttcatcttcctcgacaagctgccgctgacggccaatggcaagctggaccgcaaagcgctgcctgcgccggacgccggtcagttgcaagcggcttacgtggcgccgcaaggcgagctggaagaacagttggcgtcggtctggagcgccgtgctcaaagtcgagcaagtcggacgcagcgacaacttcttcgagctcggcgggcattcgctgttggcggtgcagatgctggtgcgggttcgcgagcagttacagcgcgaggtcggcctcaaggacctgttcgaacagccggtgctggctgacttctgcgccgcgctgcaagaaaaaaatggcgaaagtgatcatgcactggacgaattgactaaatcactggaggcactcaaacgtttatcagcggaggaaattgataatttgattgcttagcaggagagaccccagtgcaacagttgcttgactccgttaaatcgctgtccgcccgtgaacgcaaggcgctggcgatcctgctcaagcgccagggggtgaatctctacggggtcacgccgattgccagacgagagacgccggcagcgtctgcgctgtcgtatgcgcagcagcggcaatggatcatctggcaactggaaccgcacagcgcggcctacaacattccgctggcgctgcgcctgcatggcgcgctggatgtcgaggcgttgcggcgcagcgttgaacagctgatcgagcgtcacgaaaccctgcgcaccacgtttgaacagcagggcgacgaggcgttgcaggtggtgcatcccgcgtcgccgtttgcgctcaacgttgatcaactggcgctgggcgaaacggtcgaaagctatgttgatctggaagtacagcggcctttcgatctgcaacatgggccgctgttgcgggtcaggctgcttgaactgagcgaacaggaacacgtgctggtgctgacccagcaccacatcgtctccgatggctggtcgatgccgatcatggttgacgagctgatgcagtgctatcaggccgcctcgctgggtcgcgaggccgaactggcccaactgccaatccagtacgccgactacgcgatctggcagcgtaactggctggagatgggcgagcaggaacgccaactggcttactggacgcagcaactgggcgatcagcagccgattcttgaattacccaccgatcgaccgcgcccggcgctgcgcagctacgacggcgcgcgactgaacatcgaactggacgccgcgcttttgaacaccctcaaggcactggcgcggcagcagggcatcaccctgttcatgctgttgctggcgtcgttgcagaccttgctgcaccgctacagcggtcaggccgacatacgcgttggcgtacccgtcgccaaccgcacccgcagcgaaacccaagggctgatcggcttcttcgtcaatacccaggtgctcaaggccgagttcggcgcgcagaccaccgtggccgacctgctgcaacagatcaaacagactgccgtgcaggcccaggcccatcaggacctgccgttcgagcaactggtcgaagccttgcagccgcagcgcgacctgagccgcagcccgctgtttcaagtggcctacaaccaccagagcgaaggctacaacgaagcccgcgagctggccggtctgcgcctggagtatcaggtgtcggacaagcacaccgcgcagttcgacctgaccctggacacttgcgaacgccagaacggcctggctgcctcgctgacctacgccaccgacctgttcgacgccacaaccatcgagcgcatggccgggcactggcgcaacctgctgagcggcatgtgccgcgacgccaatcagcgcatcgccgacttgccattgctgagcgttgaagagcggcagaataccctgcgcgactggaaccacaagcttgcggtttacccgactgagcagtgcgcccatcaacgcatcgaaacccaggcagaacgcaccccgcaggccattgccctgagcttgggtgccgagcaattgagctaccagcaactcaacagccgcgccaaccagttggcccacaaactgcgcgagcagggcgtcggcccggatgttcgcgtggggcttgcggctgagcgcagcctggagatgatcgtggggatgctggcgatcctcaaggccgggggcgcgtacgtgccgctggacccggattacccgcaggatcgcttgagcttcctgatgcaggacagcggtatcgaattgttgctgacccaaacgcagttgctgggtcagttgccgattcctgcacacgttcagacgctggatctggcggatgcgctagatggctacagcaccgaaaacccgatcaaccagacctcgccagacaatctggcctacgtgatttacacctcaggttcgaccggcaaacccaaaggcaccttgctggctcatcacaacctgatgcgcctgttcgcggctacggacgactggttcaagttcaacgaaaaagacgtctggacgctgttccattccttcgcattcgacttctcggtctgggagattttcggcgcgctgctgcacggtggccgactggtcatcgtgcctcgcgaggtaacccgttcgccggaagagttccatgcgctgctggttgaccagcaggtcacggtgcttaaccagacgccatccgccttcaagcaattgatgcgcgtggcttgtgattcgcctgtgccgatgtcgttacaaaaagtcatcttcggcggcgaagcgctggacgtcgccagcctcaagccgtggttcgcacgcttcggcgatcagatgccacgactgatcaacatgtacggcattaccgaaactaccgtgcatgtgacctacaggcccatcaccctggccgatacgcacaacccggccagcccgattggcgaggcgattgcggacctgtcgtggtacgtgctggacgccgatttcaacccggtcgcccagggttgcagcggcgaactgcacattggccatgccggtctggcgcggggttatcaccaccgtgctgcactgaccgctgagcgctttgtgccagatccgttctccaacgacggcggccgtttgtatcgcaccggcgatctggcccgttataaaaccgcaggaaccatcgaatacgccgggcgtatcgaccatcaagtgaaaatccgtggcttccgcatcgaactgggcgaaatcgaagcgcggctgcaagcgcattcggctgtgcgcgaagtgattgtgctggccgtggacgggcaactggcggcgtatctgctgccggctcagcctgaccaggatcaacaagcgctacgtgaaaccctgaaagccgagctccgtgcgaacctgccggattacatggtgccgacccactttatcttcctcgacaagctgccgctgaccgccaacggcaagctggaccgcaaggcgctgccagcgccggacgcgagccagttgcaggcggcctacgtcgcgccgcaaggtgaattggagcagcagttggcagctatctgggccgatgtgctgaaagtcgggcaggtcggtcgcagcgacaatttcttcgaactcggcggccattcgttgctggccacgcaggtgatctcgcgtattcgtcagcaactggatgttgaactctcgttacgcgacctgtttgaagcccgcgatctggcagcctttgcccaagcggcgggcgcagggcagggcaatgacgcgccacgcttcatcaaggccgaccgcaaccagccgctgggcttgtcttacgcgcagcagcgtcagtggtttctctggcagctcgaccctgaaagcaccgcttacacgattcctgcagccctgcgcctgagcggctcgctggacatcgcggcgctggagcacagcttcagcgcgctgatcgcccgtcacgaaaccctgcgcaccaccttccgccagcagggcgaacaggcggtgcagatcattcatgcgccgcgtgccctgaccctgacggttgaatccgtgcccgccgggcagacccttgaggcctgtgtggagcaggaaatgcagcgcccgttcgatctggaacagggtccgctgctgcgcgttcgcctgctgaatctggccgccgatgaacacgtgctgatcctgacccagcaccacatcgtctccgatggctggtcgatgccgatcatggtcgatgaactggtgcgcctgtacgaaggctacagccagggccgcgaggtgctgctcgctgaactggacatgcagtacgccgactatgcgctgtggcaacgcagctggatggacgccggtgagcaggcacggcaactggcgtactggaagcagcaactgggcgaccagcagccgattctggagctgcctgccgatcatccacgcccggtcgtgcaaagccacgtcggtgcgcggctggcggtcgaactggcgccagcgttgatcgacgacttgaaacaggtcgcgcggcaacagggtgtcacactgttcatgctgttgctggcgtcgtttcagaccttgctgcatcgccacagcggccagctggacattcgtgtcggtgtgccgattgccaaccgcacccgcgcggaaaccgaaggcttgatcggctttttcgtcaacacccaagtgctgcgcgccgaatttgacttgcacacaaccttcagcgaactgctgcaacaggtcaaacacaccgcgctgcaagcccaggcgcatcaggagctgccgttcgaacaactggtcgaagccttgcagccacaacgcagcctcagccacagcccgctgtttcaggtgatgttcaaccaccagagccaggccagcgccgaagtgcgcgcgttgcccggtttgcaggttgaagcgctggtgtcggagagctacccggcgcagttcgacctgaccctgaacaccgccgaacagaacggcggcctgagcgcagccctgacctacgccaccgcgctgttcgagcgcagcactattgaacgcatggccgggcactggctcgcgttgctgcaggccatttgcgccaatgccggtcagcgcatcgctgatgtgccgatgcttgacgctgccgaacagcagcagatcgtacgtgagtggaacgccacggctgcgcaattcccgagtgagctttgcctgcacagcctgatcgaagcccaagtgctggccacgccaaatgccccggcgctgatctttgcggacgaacaactgagctacacgcaactcaatgcccgcgccaaccagcttgcgcatcgcctgcgtgaagcgggcgtcgggccggacgtgctggtggggatttgcgttgagcgcagcctggaactggtcatcggcctgctggcgatcatcaaggctggtggcgcgtacgtgccgctggacccggattaccccgaggatcggctggcgtacatgatgcaggacagcggcattggtttgctgttgacccagacgtcgttgctggagcgcttgccggttcaggtgcagagcatgtgtctggatcaggacggcgactggcttgaaggttacagcactgccaacccggtcaacctcagtcatccgcagaacctggcctacgtcatttacacctccggttcgaccggcaagcccaagggcgcaggcaacagccatcgcgccctggtcaaccgactgcactggatgcaaaaggcctatgcgctggatgacagcgatacggtgttgcagaaaaccccgttcagtttcgatgtatcggtctgggagttcttctggccgctcctgaccggcgcacgcctggccgtggcgttgccgggcgatcatcgcgaccccgagcggctggtgcaaactatccgccaacatgaggtcaccaccctgcattttgtgccgtcgatgctgcaggcgtttatgactcacccgcaggtagaaagctgtaacagcctgagtcgtgtgatgtgcagcggtgaagcattgcctgccgaactggtcggccaggtgctcaagcgtctgccgcaggtcggcttgttcaacctgtacggaccgaccgaagccgctatcgacgtgacccactggacctgcaccacggacgacgtgctcagcgtgccgattggtcgccctatcgacaacctgaaaacccatatcctcgacgacggtttgctgcctgccgcgcaaggcgttgcggcagagctgtatctgggcggcgtgggtctggcgcggggttatcacaaccgtgcggcgctgaccgccgagcgttttgtgcccgatccgtttgacgggcagggcgggcgtctttatcgcactggcgatctggcgcgttatcgcgacgagggcgtgatcgaatacgccgggcgcatcgaccatcaagtgaagattcgcggcctgcgcatcgaactgggcgaaatcgaagcctgcctgctggaacacgacagcgttcaggaagcggtggtcatcgacgttgatggtccgtccggcaagcaactggcggcgtatctggtggttgaacagcgcagcgatcacctgcgtgagctgttaaaggcgcatctgaaagcgtcgctgccggattacatggtgcccacgcacttcatcgtgctggacagcatgccgctgaccgccaatggcaagctggatcgtcgggcgctgcccgcgccggacgccactcaattgcagcgccagtacgtcgcgccggtcagcgaacaggagcagcagatggcggcgatctgggccgatgtattgaaggttgaacgggtcgggctgagcgatgactttttcgagctgggcggccattcgctgctggccacgcaactgatttccagaatccacacgggccttgggatcgacatcccgctgcgcctgattttcgagaaaccgcaattgaacgaatttatt

SEQ ID NO: 33352 - DNA, 1182 bp, Pseudomonas syringae
atgcaaagcccaccccacgacccggcaagcgcgctggccatccgcaaccattatcgccagtcgcaaagccgtgccgcacgccttcgtctgctggtcgatacgggtcaggaactgatccagttgccccccgaagccatgcgcaaatgcgtgttgcagcgagcgtgcgcgtttgtggcgatggaccacggcctgctgctggaatggggcgccgacaacggcgtgcagaccaccgcccgtcatggcagcaaagaacgcctgagcaccctcgaaacgactgccgacccgctggccatcggtccgcaatggctggagcggccgggcactcacctgccctgcgtactgctgctgcctttgcgcggcgccgatgagggctctttcggtacgctggtgctggccaacagcgtcgccatcagcgcacccgatggtgaagacatcgagtctctgcaactgctcgccaccctgctcgcggcgcatctggagaacaatcgcctgctcgaagcgctggttgcgcgcgaccgaaccatgtcacaactggttcgtcagctgttcacagcgcaggaagacgaacgcaaacgcgtggcctacgacctgcatgacgggctggcccagactctggctggccttcaccagcgcttgcaggggtttgccggtcgctgcccggaactgccagcgcaactggacgccgatctgcaggccatcctgaaactggcgcagcattgcgttggtgagggtcggcaattgatcagcggcctgcgaccggccgtgctggacgatttcgggctgtggcaggccgtcgacaaggaagccgatcggctgcgtgaagcgggcatcatcgtgcagtggacgtcgcagtctctggagcgcctgcccagccacctggaaatcgcactgttccgcatcgctcaggaaggcatcaataacgtgctcaagcacgccaatgccagttgcgtagaactggcgctggaactgagtgacggaaacgtttcactaaggctgcaggacaacggccgtggtttcatcaccgaaaaaccaatcaacggcacgggcgtgcagaagctgggcctggtggccatgcaggaacgcgccagcctgctgggtggccgcctgacctgcgtcagccgccccgggcgtggcacccggctacgcaccatcgtcccttttactgcagacaaggcaataaca

SEQ ID NO: 33353 - DNA, 8646 bp, Pseudomonas syringae
atgaaatggcgggtatctgacatggacaagtctgcagcagagcgtatcgcccagcgtttcaccgggttgcccgtggaacagcggcggcagatcctcgccaagatgcacgagaccgggcaaagcttcaaactgctgcccatcgccgtcacccggcatggcgcagcgcgcatcccgctgtcctacgcgcagcaacgcatgctgttcctctggcagatggaaccggacaccgctgcttacaatgttcccatggcggtgcgcctcagcggtccgctggaccgtcaggcgttgagcgcagcgctggaccaactggtgcagcgccacgaaaccctgcgcacgcggtttgtttccgaggacggcgcgttctatcaggagattcttcagcaggcgaccgtcgcgcttgagttcgcctcagttgagcctgccgacattgcagaccaggtgcgtgccgagctgcacaagcctttcgacctgctgagcggcaccttgctgcgggtcaaactgtttcagttgggcgacaccgaacacgttctgacggtgtgcatgcatcacatcgtatcggatggctggtccggcgaagtgctgattcgcgaatgtgtgcagttgtatcaggcgcaggtgtccggtcagcccgcgcaattgcctgcgttggcgattcaatacgccgactacgccatctggcaacgcgcctggctggaggccggggagggcgagcggcaactggagtactggaaacagcaactgggcagcgagcatccgttgctgagtctgccgctggaccacgagcgtccgctgcagcccagtcagcgcggcgcaactgtgcgtgttgatctgccggaacacctgtccgcacaactgaaaacccaggcgcgcaacagcggccagaccttgttcatgctgatgctggcggcgctgtcggtggtgctgtcgcgcttcagcggtcaggctgatattcgcatcggcgcgcccaacgccgggcgcacccgcagcgaactggaagggctgatcggcttcttcatcaacactcaagtgttgcgtgtgcaggtggacgagcggcagagctttgcgcaattgctggatcaggtgaaacaggtcgtgaccggcgctcagtcgcatcaggagctgccttttgaacacctggtggacgcgctggccccagaacgtaacctgggccacaacccgctgttccagttcaagatcaatcagcacgtgctggcggccgaagacagtgggcaacgtgtgtcgggcctgaccgtcgacgagtttccgatgggcagcagcgatgcgcgcttcgatctggcgttcgatttcaccgatacgccgggcggcatacgcggttatttcacctacgccaccgacctgttcgagccaccgaccatcgagcgcatggccaacgcactgcgtgctgtgctgcaagcgctggtcgcggacactgaccagcgtctggccgatcagccgcaaaccgtttcgttgcccgccgctgagcagagcgctgattttgcctgccgcgacttcctcagcctctggcaacagggcctgcacatcgggcgcggcaagaccgccttgcgtgtggggcagcaaacgctgagctttgacgaacttgaacagcgcagtaatcagttcgctcgctacctgcatacgcaggacatccagccgggcatggccgttgcgctgtgcctggaccgctctgtggagtgggtggtcagcctgctggcggtgctcaaactcggtgccgtttacctgccgctggacagcgcgcagcccgccgagcgtttgcagcaactaacccgtgacagcggcgcggcattgttgattcacgcgtccggcgacgacaaggctgcgcaattgggtgtgtgcccggtgctggccttcgatgctgcgttgtggtccgaggtcgatggcggtgagctgagcgtgcgcatcatcgccgagcaaccggcttacatcatctacacctccggctccaccgggcagccgaagggcgtggtgatcagccacggcgcgctggctaattacgtacagggcgtgcttgcgcgcctgtcgctgaatgacggggcgagcatggcgatggtctcgacggtcgccgcagacctgggccatacgctgctgttcggtgcgctggcgtccgggcgcccgctgcatctgctgtcccacgagcaagcgttcgaccctgacggttttgcccgctacatggccgagcatcaggttgaagtgctgaagattgtgcccagccatttgcagggcttgctgcaagccgcacacccggccgacgtactgccgagccagttgctgatgctgggtggcgaggccagttcctgggcgttgatcgagcaagtccgcgcgctgaaaccgggctgccggatcgtcaatcactatggcccgaccgaaaccacggtcggcatcctcacccatgaggtggcggagcgtctcaatgcctgccgcagcgtgccggtcggtcagcccttggctaactgcaaggcgcgggtgctggacgcctatctgaacccggtcgccgaacgtgtgtcgggcgagctgtacctgggcggtcaagggttggcgcagggctatctgggccgtgcggcgatgaccgccgaacgcttcgtgccggacccggacgccgatggccagcgtctgtatcgggctggcgaccgagcgcgctgggtggatggcgtgctggagtacctgggtcgtgcggatgatcaggtgaaaatccgcggttatcgggtcgagccgggcgaagtcggtcaggtgttgcaaaccctggaaaacgtcgccgaagccgtggtgctggcccagccgctggaaagcgacgaaacacgtctgcaactggtggcgtattgcgtcgcggcggtgggtgtgcgcctgaacgttgaatctctgcgcgagcaactggcggcgcgtctgccggaatacctggtgcccgcgcagttcatgttgcttgaaaagctgccactgaccgccaacggcaagctcgacaaacgcgccttgcccaagccgggcgtagtcaaacagcgctataccgcaccggtcggcgagatcgaagaaaagctcgccgccgtgtgggccgacgttctgaagctggagcaggtcggcagcaccgacaacttcttcgaactgggcggcgattcgatcctcagtctgcaaatcattgcccgcgccaagcgtcagggcatcaagctcagccctaagcaattgttcgaaaaacagaccatcggccaactggcttctgtggccagactgatcgagaaaaagcccgcagcggcggcagagcaggtcagcggttcgctgccgctgctgccgattcaggcgcgtttctttgaaaaggacatccctgagcgtcagcactggaatcaggcgctgatgctcaagcccctgcaaacgctggatgcaatccctcttcaagcggcactcaccgcgctgatcgaacagcatgacgcgctgcgcctcggtttcacgcaacaaaacggccagtggcaggccgcgttcggcgcgctgaacacgcgtgacgtgctgtggactcatgaactggacagtgtcgagcgcctgagcgaactggctgatgaagcgcaacgcagcctggacctgaaaaacggccccttgttgcgtgcagtgctgatcgacctgccgcagggtgagcagcgtctgctgttggtgattcaccatgtggcggtggacggcgtgtcgtggcgcgtgttgcttgaagacctgcaacaggcttatgtcgccatcgtggcaggcaggccattgtcgctgccggcgaaaaccagctcgctgaaaagctgggccgaacatttgcaggcctatgcgcaaagcccggcgctggagcaggaactgggttactggcaggcgcagttgcaggaggtcagcgacgccttgccttgcgattacccgcacggcggccagcaacagaagcacgcgctgtcagtggccacgcaactgaatggcgaactgacccggcaactgctgcaagacgcaccagcggcctatcgcacgcagatcaacgacctgctgctgaccgcgctggcgcgggtggtcagccgctggactgcgcagccgcacgcgctgattcgtctggaagggcatggccgcgaggacctgttcgacgcgctggacatcacccgcacggtcggctggttcagcaacctgtacccggtccggctcaccccgcaggccacgctggccgagtcgatcatgaccatcaaggagcaattgcgcgcagtgcctgacaagggcattggttacggcgcgttgcgttatctgggcagcgaatcggcacggcgcaccctgcaagcactgccgcaaggcagcatcgtgttcaattacctgggccagttcgacggcagctttgacgcacaaggcgcgctgttcacgccctcggccgacagcagtggcgcgtcgcagagtgccgatgcgccactggctgcgccgctcagcctcaatggtcaggtgtatggcggccaattgcgcctgagctggaccttcagtggtgcggtatttgaacgtgacaccgtgcagcggctggccgacgaatacgcggttgaactgcaacaattgattgcgcattgcaccaccgaaggcgtggctggggtaactccttcggacttcccgctggcgcgcctgacccagtcgcagctgagccggttgccgatgcctgcggcgcagatcgaggacatctacccgctggcgccgatgcagcagggcatgctgtttcacaccctgttcgagcaggaagcgggcaattacatcaaccagatgcgcgtcgaagtcagcggcctggacgtgccgcgtttccgtgccgcctggcaggcaacactggatgcccaagaggtgctgcgcagcgggtttgtcagtcacttggagcagtcgctgcaagtggtgttgcgcgatgtgagcatgccgtttgtcgagcgggatgctcgcgggcaagccagcgagtgggttgacgattgggcgaatgcggaccgtcagcagggcttcgatctgactcaagggccattattacgtctggccgtgttgcgtaccggcgagcagacgcatcaactgatctacaccagccatcacatcctcatggacggctggagcagctcgcggctgctgggcgaagtgctgcaacgctacagcggccagacgctgccgaggcaggtcagtcgttatcgcgattacatcgaatggctgcaacgtcaggatgctgcgctcagcgaacgtttctggaccggccagctggccgggctggacgagccgacccggctggttcaagcgttcaaagcgccagagaacgggcaggggcatggcgattatctgcaactgattgatgccgagaatacccgccagttgagcgagttcgcccgcgaacagcgcgtcaccctcaatacgctggtgcagtcggcctggttgctggtgttgcaacgctacaccggccaatccagcgtgaccttcggcgcaactgtggctgggcgtccggctgaactgccgggcgtcgaagagcaattggggttgttcatcaacaccctgccggtgatcgccagcccgcgcccggaacagcgggtggcggactgggtgcagcaggtgcaggccaagaacatcgccctgcgtgagcatgaacacacgccgctatacgacattcaacgctgggcacgcagtgctggcgaggcgctgttcgacaacattctggtgttcgaaaactacccggtgtccgaggcattacagcagtccgcgccgcaggggctggtgttcggcggcctgcacacgcaggagcagactcattacccgttgaccctggtggtcaatctgggcgaaacgttgtcgatgcgtttcagctatgcccgtcagtctttcagcgagctgcacatggcgcagttgtcggcgcatctgcggcaggttttgcaggcgctggcgcgtgatccgcaggcggcgattggcgagctggcgctgttggatgatcaccaacagcaacaggtattgcgtagctggaacacgaccactgccgacttcccgaacgaacactgcctgcacagcctgatcgaagcccaggtgctggccacgccaaatgccccggcgctgatctttgcggccgaacaactgagctacgcgcaactcaatgccctcgccaatcagcttgcccatcgcttgcgtgaagcgggcgtcgggccggatgtgctggtggggatttgcgttgagcgcagcctggaactggtcatcggtttgctggcgatcatcaaggctggtggcgcgtacgtgccgctggacccggattaccccgaggatcggctggcgtacatgatgcaggacagcgggattggcttgctgctgacccagacttcgttgctggaatgcctgccggttcctgagcacgtgcagagcatttgcctggatcaggacggcgactggctggccggctacagcactgccaacccggtcaacctcagtcatccgcagaatctggcctatgtgatttacacctccggttcgaccggcaaaccaaaaggcgcgggcaacagccatcgcgctctggtcaaccgtttgcactggatgcaaaaggcttatgcgctggacggtagcgacactgttttgcagaaaaccccgttcagtttcgacgtgtcggtctgggaatttttctggccgttgctgaccggcgcacgtctggcagtggcgctgccgggtgatcatcgcgaccccgagcggctggtgcagaccatccaggaacatcagatcaggacgctgcactttgtcccgtcgatgctgcaggcgtttctgactcatccgcaggtagaaagctgtaacagcctgcgtcgtgtggtgtgcagcggtgaagcattgcctgccgaactggctggtcaggtgctcaagcgtctgccgcaggcaagtctgtataacctttacggcccgaccgaagccgctatcgacgtgacgcattggacctgtaccacggacgacgtgctcagcgtgccgattggtcgccctatcgacaacctgaaaacccacattctggatgacggtttgctgcccgccgcgcaaggcgttgcggcagagctgtatctgggcggcgtgggtctggcgcggggttatcacaaccgtgcggcgctgaccgccgagcgttttgtgcccgatccgtttgacgagcagggcgggcgtctttatcgcaccggagatctggcgcgctatcgcaacgaaggcgttatcgaatacgccgggcgtatcgaccatcaggtgaagattcgtggcctgcgcatcgagctgggcgaaattgaagcgcgcctgcatgagcatgcaggcgtgcgcgaagccaatgtgatcgacatcgacgggccttccggcaaacagcttgttgcgtatcttgtgctggccgaccttgatcaaggcccggacgttctgcgcgaagccttgaagacgcatctcaaggctcacgtgccggattacatggtgccgacctggtttgtcttcattgatgtgatgccgctgaccgccaacggcaagctggatcgccgggcactgcccaaaccggatgtcagccggtcgcagcagggttacgtcgcgccgcgtacggaattcgagcagcgtttggcggcgctgtggcagcaggtattgcaggtcgaacaggtcggtctgaacgacaacttcttcgcgctgggcgggcactcgctactggcagtttcgctggcggggaggattcgcgagacgttcgatatctccatcaagctgcatgattttctgctgatgcagaccctcggtgaactggccgatttcatgcgcgccgatgaggccagggtcaagtcagccgttatcgccatgaacgccaatcaatcgggcgctgcgccactgatttgcctgccaccgggcggcggcggcacgtactcgtattacccgctggcgggtcaattgagcgacagccgaccggtttacgggctggtcaacaaggcctacgtggtgccgggctggttcgatacgtcctggcaggaaatggtcgcttattacgtcgagcagattcgtacgacacagccgcaggggccttacaacctgctgggctggtcgatgggcggcgcgctggctatcgaggtggcgcatgtactcgagcgtgagggcgacacggtgagttttctcgggctggtggacacgcaactgcctgcgtcgctggcgatggagtgggtcgaggaagcgcctgaagtcaccacacagaaacagggcgaaaactattaccgcagcctgatcaaaagcttgcaggcgtttgtgccgggcttgcaggaagcgtcgattgtcggcctgatcgacaccgctcggcactcggttgccagcgagggcgaggtgattgactgggtggtggacgaagttgcacagcaagccggaatgaacgccgacaacctgcgcagcatcttccaggacatcgccgtacaggacgagatcgaaaccggttacaaattactggaagccaacgcgcaactaagccaggcgtttaccctgaaaaagctcaacgtacaggccgattgctggtgggccgggcagagccgcgcgcccgggcagattgccaaagctgaaacggtgctgcttgaacagtgctcagtgaacgggctccgcagctcgacaacggttgatcagcggcatgacaacgtggtgctcgcggaggcttttctgcaggggcttgccgaacggcttgcg

SEQ ID NO: 33354 - DNA, 2373 bp, Pseudomonas syringae
gtgaaaacgcgtggcctgcgtctgggcgggatggggctggtgctggcattggcttttcagggcgaggcactggctgaagagttcgagttcgatatccccgcacaggccctgaacagcgccctcaaggaactggggcggcaaggcgacctgcaaatcctctacaaccccgacgatgtgaacggcaagctcggcagcgcggtgcacggcaggttgacgcctgaacaggcagtggcggacctgctgaaaaaagccgacgtggcacacagcttcgaggccaacaccctgatcctcggcgtcgccgcctccgcgcagcccatgaacctggggccggtggcgatcaaaggcgaccatttcggcatcaccaccgaaggcagcggttcgtatgcggccaccggtatcagcatcaacaagaccgcacaatcattgcgcgataccccgcagtcagtcaccgtcgtgacccgtcagttgatgaacgacaagaacctcaccggcctggacgaggtgatggcgcaaacgcccggcatcactttttcgcaacgcaactttggctctcatgtgttcagctcacgcggctttgcgctggaagacgagagctacaccatcgacggcgtggccggtcagggttacagcgtgaccggctggatgaccccggacatgcaaatctacgaccgcgtcgaggtgctgcgtggcgcagccgggttgctgatcggtgcgggcaaccccggtggcgcggtcaatctggtgcgcaagcggccgaccgccctcccgcagttttcgatcaccacccgcgccggcagttgggaccagtaccgcgtcgatctggacggcagcagcaagctcaacgattcgggcagcgtgcgcgggcgctttgtaacctcttacgaagaccgtggctctttcatcgacgggctgcaaaaaaccgcgccgctgctgtacggcattctggaaaccgacctgagcgaagacactactctgaccctgggtctgcgccatcagagcgcggacattcacggcttttcgattttcggcctgccccgctacagcaacggcaaggctatcgatctgccgcgctccacctcgctggcccagaactggaaccgccaccagacgcggaccgacgaagtgttcagtgagctggagacacactttgacgagaactggagcggcacgctgtcagcgacccactccgagggcgcgttcgagcagaaagtcgcctatgcacaaggggccatagaccctgcgacgcaaagcggttcgcgactggtcaaaaccctgtttcgctcggacgcgctgcgaagcgacggtttcgacagccatctggatggtcgtttcgatgcctttggcctgacccatcaggtgatggtcggtggcaattggtccgagcaaaaacgtgattctcgctacgccacggtcaacgccaatcaaccgctggacatcttcaataccgatcacaacgcgattaccgaacctgcgcgcccggcctggcgcagcaccgattacagcgacaagcgttatggcgtttacagcaacctgcgcctgagcctgaccgagtcgttgagcctggtcatgggtgggcgagtcagttggtatgactatcagagccagtccgcaggcgtgaccactcgcgcccaggaaaacaatcaggtcacgccgtttctgggtgtgatctacgacctgaaccgcgactggtcgtggtatgccagctacaccgatatctttctgccgcagagcggttatcgcagcgcatccggcgcattccttgacccggcgatcggcgccagccatgaaaccggtatcaagggcgagctgttcgacaagcgcctgaatgtgtcttttgcgctgttctatgtgaaacagaaagacgtggcggtcgaggacgatgcccatgcaggccagtgcctgagcaacgacgcttacggcacctgctatgtgaatggcgacatccggcgcagcaagggtatcgacatggaaatcagtggcgagccgctgcctgggttgcagaccctggccggttacactttcaaccttacacgcggcagcgatgggcaatctatttcggcagaaacaccccggcatatggtgcgcctgtccagcagctacaccctgcccggcacctggcgtcgcctgactgtcggtgccggtgtgtcggcgcagagcggctactcggaacacgagacgacccagcccatcgacaaccctggccgcgccatctgggacgcgcgggcctcgtggaagatcgacgaacactggtcagtggccctcaacggcaacaacctgctggatcataaatactacaaggccaccggcgacatcgaccgcggcaactactacggagacccgcgcaactacgtcatgacgttgcgcggggatttt

SEQ ID NO: 33355 - DNA, 2229 bp, Pseudomonas syringae
atgcacaacccgtcacgcctcaccccgctcagcaatgcgttgctgctccgtcagatgttccgttcccggccatccatggcggccatgggtcttgcgctctgcatgccagtcgccacacaggcgcaggaagccgccgcagacggttcgacccagacagccacggtcaatctggcgccgactgcaatcgactcgcagtacctgggcaccgccactgacggcaccggctcgtacaccacgggcgcggtgagcatcggcaagggcgcgccgcagtcgctgcgtgaaacgccgcaatcggtaagcgtgatgactcggcaggtcatggatgacaacaacctcaacagcttgagcaaagtgctggaagacacccccggtatctccttccagtaccgcaacttcggcggccacgtgtacacctctcgtggcttctcgttgctggcggaaagctttctggtcgacggcataggcggtcagggctatcagatcaccggctggatgcagccggacatggccatttatgaccgcgtggaagtgctgcgaggtgcgtccggcctgctggtcggtgccggtcagcccggcggtgcggtcaatctggtgcgcaaacgcccgacggcagacaacaagttctcgatcacgactcgcgcaggttcgtgggaccagtatcgcgtcgatctggacggcagcggcaagctcaatgattcgggcacggtgcgcgggcgcatggtggcggcctacgatgacagcggttcctacctcgacggccgcgacagccgcaccccgttgctgtacggcattgtcgaagccgacgtgagcgatgacaccaccctgaccatgagcctgcgccgccaggaacaggtcatcaacggctactcgatctacggcctgccgcgctacagcaacggccagtcgctgggtctgtcgcgctcgaccaacctggcgcagaagtggaaccgtctcgaaagcgacatgaccgaggtctttaccgaagtggcgcaccgcttcaatgaagactggatcagcaagacgtcgttgacctattcgcagggtgggtttgatcaggctattgcgtttgcaaggggagcggtcaaccctacgacactggcaggctctaccttccagaacacactctttcgcagagacgaagtggacagcaccggcctgaacactcaactggaaggaaacttcaacgctttcggcctcgagcatcaggtgacgctgggcgccgactggtcgaaacagaacgccaatacgcatcaggctactgccccaacccgatccgcgatcaacattttcgacgtcaaccagaacgctttcgccaagccagcgcgtccggcctggaccaccgacatcgacaccaccgaagaacgcgcgggcctgtacgccaacacgcgtattcacctgagcgagccgttgagcgtggtgctgggcactcgtctgagctggtacgactacacgtacgacgtcaaaaccggcgcagccaacagttacgaatccaaacagacccaggaattcaccccgttcgcgggcgtgatctacgacatcaatgacagttggtcgtggtacgccagctacgccgatatcttcacaccgcaggccaactatgtcaccgctggcggctcgccactggacccggccatcggctccaactacgaaaccggcttcaagggtgagctgttcgacaagcgcatgaacctgtcgatggcgctgttctacatcaagcagaaagatgtggccggtgtcgacgtaaacacgactcagctctgcccgaccagctccgacggctcctgctacctgcaggacggcatcagtcgcagcaagggtgtcgacgttgaagccagcggcgaagtgctgccgggactgcaagtgttcggcggctataccttcaacatgctgcgcaacaacggtgactcggatgtcgcgtacgaaacgccgaaacacatgttgcgcctcaacaccagctacaacctgccgggcgcctggaaccgcctgacgctgggcaccggcgtgtcggcggattcgggctacgaagtgccgtccaacaaacagctgggtgtcgctggcaaggccgtctgggatgcgcgggcctcgtggaaactggacgaaaactggaaagtgtcgctcaacgccgaaaacctcttcgaccgcaagtactacagcacctcgatcgccaacgaccgctccaacgtctacggcgaaccgcgcagctacgtcctgaccttgcggggggatttc

SEQ ID NO: 33356 - DNA, 6738 bp, Pseudomonas syringae
cagcaaagccgcgatctggcgggcatgactgtcgactacctggtcaacgatgcgcgggctaccaaattcgacctcaacctggaagtcaccgagctggatcaccgcctgggttgctgcctgacctacagcaccgatctgttcgacgaaccgcgcatcgcgcagatggccgaacattggctgaacctgctgcaagcgttgctcgtcaatccgcagcagcgtttgagtgagctgccgctgttgcagaacgccgagcgccagcagttgctcgacagcctcggtgttgaagcgggcgagcagcgtctcgatcagtgcattcacagcctgtttgccgaacaggcccgattgcgcccacaggcggcggcgctgacctttgccggcgaaaccctgagttacgccgagctgaacgcccgtgccaaccaactggctggaatgctgcgccagcgcggcgtcggcccgcaggtgcgggttggtctggcgctgccgcgctcgctggacatggttgtcggcctgctggcaatcctcaaggccggtggcgcctacgtgccgctcgacccggaatacccgctggaacgcctgcactacatgatcgaagacagcggcgtcggtctgttgttgagcgatcgagcgttgtttgccgcgttgggcgagttgcctgccggtgtggcccactggtgcctggaagacgatcagcctctgctggaggctttctcgtccgatgaactgccgtttatcagcctgccgcagcatcaggcgtacctgatttacacctccggttcgaccggcaagcccaagggcgtggtggtgtcccatggtgaaatcgccatgcattgccaggcggtgatgcgtcgcttcgacatgcagccggacgactgcgaactgcatttctattcgatcaacttcgatgccgccaccgagcgtctgttggtgccgttgctcagcggcgcacgcgtggtattgcgcgcgcaaggccagtgggacgccgaagaaatctgcacgctgattcgtgagcagcaggtcaatattctcggtttcacccccagctatggcagccagttggcgcaatggctggcgatccagggtcagaccttgccggtgcgcatgtgcatcaccggcggcgaagcgctgaccggcgaacacttgcagcgcattcgtgcagtctttcagccggaactgttcttcaacgcctatggcccgactgaaacggtagtcatgccgctggccagcctggcgccgcagcaactggaggaaggcgaagccagcgtaccgattggccgcatcgtcggggcgcgcgttgcctatattctcgacgccgatctggcgttggtgccgcagggcgccagtggtgagttgtacatcggcggtgccggtctggctcagggctatcatcagcgccccggcatgaccgccgagcgtttcgtggctgatccgttcgccagcaatggcgggcgtctgtaccgcaccggcgacctggtgcgccagcgcactgacggtctggtggagtacctggggcgtatcgaccatcaagtgaagattcgtggtttccgcatcgaactgggcgaaatcgaaagccgattgcttgagcatgagtcgattcgcgaagccgtggtgctggcgctggacacgccgtcgggcaagcaactggcaggctatctggtcagtgagatggccggtcagggcgatgaacagcaggcgcaactgcgtgaatcgctgaaagcgcacctcaaggcgcagttgccggattacatggtgccaacccacctgatgctgctcgccagcatgccgctgaccgccaacggcaagctggatcgccgcgccttgcctgcaccgggcccggagctcaatcgtcagcattacatcgcgcccgccagcgagctggagcagcaactggcggcgatctggtgcgcggtgctgaacgtcgagaaagtcggcctcaacgacaacttcttcgagctgggcggtgattcgatcctgtcgattcaagtggttagccgcgcgcgtcaggcgggtattcatttcagcccgcgtgatctgtttcagcatcagaccgtgcagaccctggccgctgtggcgaccacccgtgaactgattcaggccgaacaggggctgcttgaaggtgcgtccgcgctgacgccgattcagcactggttcttcgacacgccgatcccgcagcgccagcactggaatcagtcgctggtgctggagccggtcagcgcccttgatccacgtattctggagcaggcgttacgggccgtgcttgaacagcacgacgccttgcgcctgagtttcaccgagcagaacggcaagtggcaggccgagcaccgcgccgtcaccgctgaaaccctgctgatccaggcgcgggttgccgacatggccgaatgtgcagccttgtacgccgatacccagcgcagcctcgacctgcaaaacggcccgctgctgcgtgccttgctggttgacggggcgcagggccagcaacgcctgttgatggtcattcaccacctggtggttgatggcgtttcgtggcgtgtgctgctcgacgatttgcaaacggcttatcgccagttgagcgacgttacgccagtgcgtttcgccgccaagaccagtgcgttccgcgactgggccgcgcgcttgcaggcctatgcgggtaatgaatcgttacgtgaagagttgcatgtctggcagcgtcaactgggcggtcctgcgaccaatctgccgtgccataactcgcagggcggccagcagaatcgtcacgcgcaaacggtcagcgtgcggctggatgccgaacgtacccggcaactgctgcaacaggcccccagcgcctaccgcactcaggtcaacgaccttctgctgacggcactggcgcaagtggtctgccgttggagcgggcagccatcggccctgatccagctggaagggcacggtcgcgaaaccctgtttgacgacatcgacctgacccgcaccgtgggctggttcaccagcgcctatccgctgcgcctcacgccagcactggctgccgacgcagcgccgggcgactcgatcaaggcgatcaaggagcaactgcgccaggtgccgcacaaaggccttggctatggcatgctgcgctatctggccgacgctgccagcaaggccgccatgcaggcgctgccagtggcgccgatcaccttcaattaccttggccagttcgaccagagcttcgccgacgatgcgctgttccgtccgctggaagagtcggcgggcgcggcccacgatccgcacgcgccgctgcccaacgagctgagcatcgacagccaagtgtatggcggcgaactgctgctgcgctggaccttcagcgccgagcgttatcagcccgcggccatcgaagcgttggcgcaggcttatctgaatcagttgcaggcgctgattgcccattgcctgagcgatggcagcggtggtctgacgccttcggacttcccgctggccgatctggatcagacgcaactcgacgcgctgccggtccctgcgacgcacattgaggacgtctacccgctgacgccgatgcaggagggcatgctgctgcacaccctgctggaacccggcaccggcctgtattacatgcaggaccgctaccgcatcaacagcgcgctcgacccggagcgtttcgcccaggcctggcaggcggtgattgcccgtcacgaagcgctgcgtgcctcgttctgctgggacattggcgaaaccatgctgcaggtcattcacaagccaggcagcacgccgattgattatctggactggcgtgatgtgcttgcggacgaacaggaaccgcgcttgcaggccttgctcaagtccgagcgcgaggctggtttcgatctgctcaatcagccgccgttccacctgcgcctgatccgcgtcgatgaagcgcgctattggttcatgatgagcaaccaccacatcctcatcgatgcctggtgccgttcgctgctgatgaacgacttcttcgacatttacaccgcgttgggtgaagggcgtgaagcacaactgacgcctgcgccgcgctatcgcgattacatcggctggctgcaacgccgtggcctggtgcaggcgcgcgactggtggcagcacaacctgcgcggctttgaacggccgacgccgatccccagcgaccgtccgttcctgcgtgaacatgccggtgacagcggcggcatggtggtgggcgattgttacacccgtcttgatgagcgcgacggcgcacaactgcgtgaactggcccagcagcatcaactgaccgtcaacacgttcgcccaggcggcgtgggccttgaccttgcggcgcatgagcggtgatcgcgacgtcgtgttcggcgttaccgtggccgggcgaccggtggaattgccgcagatgcagcgcaccgtcggcctgttcatcaacaccatcgccctgcgcgtgggcatgccgggcgacgaacagcgctgcacggttcgtgactggctaagccagttgctggacagcaacatgcaactgcgcgagtacgaatacctgccgctggtgaccattcaggaaaacagcgagctgcccaagggccaaccgctgttcgacagcctgttcgtgtttgaaaacgcgccggtggaagtctcggtgctcgaccgtgcgcaaagcctcaatgccacctctgattccggccgcacccacactaactatccgctgacggccgtgtgctatccgggtgatgacctgggcctgcacctgtcctacgaccagcgttatttcgacgaatccaccgtgcagagcatgctcgacgagttcaagcgcctgctgctggcgctgatcgaaggtttccatggcgacatggccgggctggcgctggtcagcgagcaggagcgcacgttcctgatcgagggctgcaaccagagcgatcacgcttacccgctggataagagctacgtcgaactgtttgaagcgcaggttgaagcgcatccagagcgtattgcggtcagttgtctggatcgccagcttggctacgccgagctgaatatcgccagcaatcgactgggccatgcgctgatcgaggccggggttggcttcgatcagccggtggctttgctggccgagcgcgggcctgaattgctcggcatgatcatcggcagcttcaaggccggtgccggttacctgccgctggacccggcgctgccgaatgtgcgattgagcggcatcatcgcccagagccgcacgccggtgctggtgtgcagtgcgcaatgtctggatcagggcagggcgctgcttgaggtgctgcccgagtcccatcgtccgcagttgagggtctgggaagacgtgcagcagagcgaatcagcgcagcacaatccgggtcgctacagcgcggcggataacctggcttacgtgattttcacttccggctccaccgggctgccgaagggcgtgatggttgagcagcgcggcatgctcaataaccagttgagcaaggtgccctacctgaacctgcgcgacagcgatgtgatcgcccagaccgcttcgcaaagtttcgacatctcggtctggcagttcctcgccgcgccgctgtttggcgcgcgggtggacatcgtgccgaacgatatcgcccgcgacccgcaggccctgttggcgcatgtgcaggcgcagcgcatcagcgtgctggaaagcgtgccgtcgctgattaccggcctgcttgccgaacagcacgccaccctcgacagcctgcgctggctgctgccgaccggcgaagccatgccgccggagctggccagccagtggctgcaacgctacccggctatcgggctggtgaatgcctatggtccggctgaatgttccgacgacgtggcgttcttccgcgttgacgcggactccacacgcagcgcgtacctgccgatcggttcgccgactgacaacaatcgcctgtacctgctcgacgacgcgctggaccttgtgccgctgggcgcagtgggcgagttgtgcgtcgccggggccggggtcggtcgtggttatgtcgcggatccttcgcgtaccgtgccggtgttcgtgccgcatccgttcggtgcgccgggcgagcgtctgtaccgcaccggcgacctggcgcggcggcgcaaggacggcgtgctggagtacgtcggccgggtcgatcatcaggtgaagattcgcggctaccgcatcgagctgggcgaaatcgaaacccgtctgctggagcatccggcgatccgtgaatcggtggtgctggacatcgacggtccgctgggcaaagtgctggcggcgtatctggtgccaagcgctgccacgcaggatcacgatgcgctgcgagacgcgctgaaaagccacctcaaggccagcttgccggactacatggtgcctgcgcatctggtgattctggacgcgatgccactgacgccgaacggcaaactcgaccgcaaggctctgcccgcgccggacgtcagccaggcgcagcaggaatacctcgcgccgcagaccgaaatggagcaacaactggcgaccatctgggccgatgtgctcaaagtcgagcgggtgggcatcactgacaacttcttcgaattgggcgggcattcactgttggccacgcaagtggtcacccgtgcgcagaagctgctgcaacgtaacgtgccattgcgggcgatgttcgaattcaacaccgttcaggcgttggccgagcatcttgaaagccttggcggggcgcaggtcgacgagcagaaattcgaccgcctggcggacttgatggcggaactggaa

SEQ ID NO: 33357 - DNA, 699 bp, Pseudomonas syringae
atgcccgtcactggtgcaggctttatcaagcgtttgacgcaattgtccctctgcgccggcatggcgctggtcccggtggccgtacaggcagccgaaagcgatccttgggaaggcatcaaccgttccattttcagcttcaacgatacccttgacgcttatacgctcaagccgctggcaaagggttatcagtacatcgctccgcagtttgtcgaagacggtattcataacttcttcagcaatatcggcgatgtcggcaatctggcgaacaacgtcttgcaggccaaacctgaagcggccggtgtagataccgcacgccttatcgtcaacactacgttcggtctgctgggcttcattgacgtcggcacccgcatgggcctgcaacgcagtgatgaagacttcggccagacactgggctactggggtgtgccaagcggcccgttcgtggtgattccgctgctgggcccaagcacggtgcgtgacgccattgccaagtacccggacacctacacctccccgtaccgctatattgatcacgtacccacccgcaacacggcgttgggcgtcaatctggtcgacacgcgtgccagcctgctgtccgccgagcgcctggtcagtggtgatcgctacaccttcatccgcaacgcttacttgcagaaccgcgaattcaaggtcaaggacgggcaggtcgaagacgatttt

SEQ ID NO: 33358 - DNA, 1632 bp, Pseudomonas syringae
atgacgatttctcgacgagggttcatggcagggctggcgctgaccggcgcggcgcttccggctgcttattacgcgcaccgcgaactcacccgcgtcgaggaacccgtgacgccgggcgaggccacggccgggcctgcggacaccgccactcagcgtctggccgacaaactgcgtggcgtgtggaccctgcgtttcgagggtcgtgatgccggactgagcggagctccgctgcaaggcctggaaatgtttctcgacattgccccgcgtgggcgcggcctgcgcggctatatcgacacggccgagcagttgcgcggcgagggcatgccgcgcttccgggtgatcggcgacctgcaaccggccaatgccgcgaaactgtatctgcgggtcatggacggccatgcgggcaacgatccgcacagcgacaccccggattacgaattcagcctgaccctcgatgaagtctggggcgcgttcggcaatgccggcagcggcacgctcagcgggcgtgtcgagcgactggatcggccattggccctgccggagctggaaaaccgcctgatcgccatcaaacaggttttccccgaagcgcgggagcgggtggctttgagtccgccatttctggcctggctggtttccagggagcatcgcctgtttcaccagctctggcatgcgtctcgggacaaatggcacaaactgcccgaggataaacgcgatgccctgcgcggtatcggctggcagccggggccacgcgacaaagaacgtgatgcccgtggaccgcgcaaggaccgtaatgggtcgggtgaagactttttctacatgcaccggcacatgctgatccaggcgcgcaagattcaagacctgccgtcgtggccgcgctttccgttgccgcaaccggagctggagcgtgaccggctgggctttgcccgctacttcgacaatcacgacggctgcgccttgccgcccaactggctggcgcagggtgatgaggagtacacgcagctggtcagcgacatcaaaagccacgagacgtaccacacgcattttgaggtgtgggaatcgcagtaccgcgatccgcgttttctgtcgaagctgacgttggggcagttcggttcgcaggtcgagctggagctgcacgactggctgcacatgcgctgggcctcggtggcgcgcgacccggccaatggccagccggtgccgatggcacgccgctcggatgacttcgccgagcgctggttcgagccggaaaacgactttctcgccgacccgttctcgtcgcacgtgaacccggtgttctggatgttccacggctggatcgacgaccgcatcgacgactggttccgcgcccatgagcgctttcatccgggcgaagtgaaacgcctggacgtcaacggcgtgccatggttcgcaccgggccgctgggttgaagtcagcgacccgtggctgggaccggaaacccacggttgcagcaccgtgccggggcagacggcgggcacgaccatggaaatggacccggaagtgatgaagcttgcgctgcgcattacctttgcggcggatgacaaattgagcaacctgctgcgccgcgtaccgcgcagaccttggtatgcaaggaatctgttgccggagaggtggttt

SEQ ID NO: 33359 - DNA, 927 bp, Pseudomonas syringae
atgacttccaagctggatcaactcaagaaattcaccactgttgttgccgataccggcgatttcggcgccatcaaaagcctcaagcctcaggacgccacgaccaacccttccctactgctcaaggccgcttcgagcgaaagcaacgatcagatgcttgccgacgcgttcagcggtgccaagggcgacatcggtctggcctgcgaccgctttgcagttgccatcggccaggagattctcaaggttgtaccgggtcgcgtgtccactgaagtagacgcacgcctgtcgttcgacaccgacgcgctgatcgagcgcagtgagcgcattatcggcctctacgatactgcgggcatcagtcgtgatcgggtactgatcaagctggcggcgacctgggaaggtattcgtgctgccgagaagctcgagaaggacggtattcagaccaacctgacgttgctgttttccttcgcccaggccgttgcttgcgctgaagcgggcgtgtttctgatctcgccgttcgtgggccgcatttacgactggtacaagaagtcgtcgggcaccgattatgtcggcgcagacgatcccggcgtgcagtccgtgacgcgcatctacaactactacaaggccaatgacttcaagaccgtggtgatgggtgccagcttccgcaatctgaaccagatcgaacaactggcgggctgtgatcgcctgaccatcagcaccgagttgctcaagcaactggctgaagacactggcacgctggagcagaaacttgcgccgggcaatgcaggtgaagcgcgtcagagcctgaccgagagccagttccgctgggcgtccaacgaagatgccatggccactgaaaaactggctgaaggtattcgtcagttcgcccgcgatcaggaaaaactggaagcgctgctgtctgccaaaaagtcc

SEQ ID NO: 33360 - DNA, 900 bp, Pseudomonas syringae
atgcggctgctctccagccaggcattgctctacaccgagatggtcactaccggtgccttgctccatggcgaccgtgagcgtttcctgcgtcacgacgaaaccgagcacccgttggcattgcaactgggcggcagcacggcggcgggcctggcggcgtgtgcgcggctagcggaggcggcggggtatgacgaggtcaatctgaacgtcgggtgtccgagtgatcgggtgcagaacaacatgatcggcgcgtgcctgatggcgcacccgcagttggtggctgattgcgtgaaggccatgcgcgatgcggtgggcattccggtcacggtcaagcatcgcatcggcatcaacggccgcgacagttatgccgagttgtgcgatttcgtcggcacggttcatgatgcgggttgccagagttttacggttcatgcgcgcatcgcgattcttgaggggctgtctcccaaggagaaccgcgatattccgccactgcgttatgacgtggttgcgcaactgaagactgattttcctgaactggagatcgtccttaacggcggcatcaagacgctggagcagtgcagtgagcatctgcagacgtttgatggcgtcatgctgggtcgtgaggcgtatcacaacccgtatctgctggcgcaggtggatcagcaattgttcggcagtgttgcgccggtcataagtcgtcacgcggcactggagtcgatgcggccttatatcgccgcgcacattgccagcggcggcaacatgcaccacgtgacccggcatatgctcgggcttggtctggggttccccggcgcgcggcgttttcggcagttgttgtcggtggatatccacaaagcggaaaatccgctgctgttgctggatcaggcggcgaagtttctcgaagggcat

SEQ ID NO: 33361 - DNA, 3321 bp, Pseudomonas syringae
ttgaccgccgacagccagagcgccgagcggcttgagcaagagctgaagttttttgcgcccacgctgccggttctgcacttcccggactgggaaaccctgccctacgatctgttttcgccgcaccaggacatcatttcccagcgcatcgccagcctttatcgcctgccggagctggagcatggcgttttggtagtaccgatcaccaccgccctacacagactcgcgccgaccaaatttctgctcggcagcagcctggtgctggacgtcggccagaagctcgacgtgaacgccatgcgcacacgcctggaagccagcggttatcgttatgtggatacggtttacgagcacggcgagttcacagtgcgtggtgcgctgatcgacctgttcccgatgggcagcaagctgccgtttcgcatcgatctgttcgacgatgaaatcgaaaccctgcgcactttcgacccggacacccagcgctccatcgacaaggtcgaatcggtacgcctgctgccggcccgtgaattcccgttacagaaagaagaagtcacccgtttcaaggcgcgattccgcgaacgcttcgacgtggacttccggcgcagcccgatcttccaggacttgagcagcggtatcacgccagccggtatcgagtactacattccgctgttcttcgaagaaacctcgaccctgttcgattacctgccgcaggacactcaggtgttttccttgccgggcatcgagcaggccgccgagaatttctggaacgacgtgcgcaaccgctacgaagaacgccgcgtcgatccagcccggccgctgctccccccggccgagctgttcctgccggtggaagactgctttgcgcgcctgaaaaactggccgcgcgtagtggccagccagcaggatgtcgacgccggagccgggcgcgagcgcttcccggcccaggccctgccggacctttcgattgaagccaaggccactcagccgttggctgcgctggcaaagtttctggatgattttcccggtcgcgtgctgttcactgccgagtccgcaggacgccgggaagtgctgctggaactgctcgaacgtctgaaactgcgaccgaaaaccgtcgacggctggctggacttcgtcgagggcgaggatcgcctggcaatcaccattgcgccgctggacgaaggcctgctgctcgaccagccggcactggcactggtcgcggaaagcccgctgttcggccagcgcgtcatgcagcgccgccgtcgcgaaaaacgcaccgatggcggtaataacgacgccgtcatcaagaacctgaccgaactgcgcgaaggcgcgccggtggtgcacatcgatcacggtgtcggacgctacctgggcctggccacgcttgaggtcgaaaatcaggtcgccgaattcctgatgctggcctacgccgaggacgccaagctgtacgttccggtcgccaacctgcacctgatcgcccgctacaccggcagcgacgacgaaatggcgccgctgcatcgcctgggctcggaaacctggcagaaggccaaacgcaaggccgccgaacaggttcgcgacgtggcagccgaactgctcgacatctacgctcgccgtgcagcccgcgaaggctatgcgtttgccgacccgaaagccgattacgccacgttcagcgcaggctttccatttgaggaaaccccggatcagcagaccaccatcgaagccgtgcgcgccgacatgctcgcgccccggccgatggaccgcctggtgtgcggcgacgtgggcttcggcaagaccgaagtggccatgcgcgccgcattcattgccgtgcacggcgggcgtcaggtcgcgattctggtgccgaccaccctgctcgcccagcagcactacaacagcttccgcgaccgctttgccgactggccggtgacggtcgaagtcatgagccgcttcaagtcggccaaggaagtcagcgcagccgtcgccaatctggccgaaggcaagatcgacatcgtcatcggcacgcacaagctgctgcaggatgacgtgaagatcaaaaacctcggcctggtgatcatcgacgaagaacaccgtttcggtgttcgccagaaagaacagctcaaggcgttgcgcagcgaggtcgacattctgaccctgacggcaacgccgatcccgcgcaccctgaacatggccgtgtcgggcatgcgtgatctgtcgatcatcgccacgccaccggcgcgcaggctgtcggtgcgcaccttcgtcatggagcagaacaagccgacgatcaaagaagccctgttgcgcgagttgctgcgcggcgggcaggtctactacctgcacaacgacgtcaagaccatcgaaaaatgcgcggcggacctggccgaactggtgccggaagcccgcatcggcattggccacggccagatgcgtgaacgcgacctcgagcaggtgatgagcgatttctaccacaaacgcttcaacgtactgatcgcctcgaccatcatcgagaccggcatcgacgtgccgagcgccaacaccatcatcatcgagcgtgccgacaagttcggcctggcgcaattgcaccaactgcgcgggcgcgtcgggcgcagtcaccaccaggcttatgcctacctgctgacaccgccacgcaaacagattacctccgacgccgaaaagcgtctggaagcgattgccaacactcaggacctcggcgcgggcttcgtactcgccaccaacgacctggaaatacgcggtgctggcgaactgcttggcgacggccagagcggccagatccaggccgtgggcttcacgctgtacatggagatgctcgagcgcgcggtcaagtcgatccgcaaaggcgaacagcccaaccttgatcagccgctgggcggcggcccggaaatcaacctgcgcgtaccggcgctgatcccggaagcctatctgccggatgtgcatacgcgcctgattctctacaagcgcatcgccaacgcggctgacgaagacgccctgaaagacctgcaagtcgagatgatcgaccgtttcggtttgctgccggagccgaccaagaatctggtgcgcattaccctgctcaagctgcaagccgagcaactgggtatcaagaaagtcgacggcgggccgcagggtgggcgtatcgagttcgcgaccgaaactccggtcgatccgttgaccctgatcaaactgatccagagccagcccaaccgctacaagttcgaaggtgccacactgttcaaattcatggtgcccatggagcgccctgaagagcgcttcaacacgatcgaagcgctgtttgagcgcctgaccccgaaaactgcc

SEQ ID NO: 33362 - DNA, 1257 bp, Pseudomonas syringae
atgcttgagctcgctgctggttttatctgcctcacctcgctgctgacctatgtgaattatcgttttatcggtctgccccccaccatcggcgtaatggtcactgcgctgatgttctcgttgctgctgcaaggcctgagctttctgggctatcccggcctggaagatcgcgtccagcagttgatcggtcagatcgacttcggcgatctgctgatgaactggatgctgtcgttcctgctgttcgccggggcgctgcacgtaaaccttgccgacctgaagagctatcgctggcccatcggcctgctggcaacgtttggtgtgttgattgccaccaccgtcatcggcgcgttggcttactggatttttgccctgttcggctggcacgtcagcccgctgtactgcctgctgttcggcgcgctgatctcgcccaccgacccgattgcggtgctcggcgtgttgcggaccgccaatgcgtccaagccgctgaaaaccaccatcgtcggtgaatcactgttcaacgacggcacggcggttgtggtgttcaccgtgttgctgggcattgcgcaactgggcgagacgcctactgtaggcgaaaccgcgctgttgtttgttcacgaagcggtgggcggtgtgctgttcggcgggctgatcggctacgccgtgtacctgatgatcaagagcatcgagcagtatcagatcgaagtcatgctgacgttggcgctggtgatcggcggctcggcaatggcttcggagctgcatgtgtccggccctatcgcgatggtcgtggccgggctgatcatcggtaatctggggcgcaatctggcgatgaacgacatgacccgtcgctacatggacggtttctgggagttgctggatgacatgctcaacgcattgctgtttgcgctgatcggcatggagctgttgctgctgccgttctcgtggcagcacttgattgcagccagcctgctggccgtggcgattctgctctcgcgctttgtcaccgtggccccggccattctgctgctgcgtcgctggcgcaaggtgccgcacggcaccatccgcattctgacctggggcggtttgcgcggcggcgtctcggtagcgctggcgctggccctgcccaacgggccggaacgcgacttgctgttgagcatcacctatatcgtggtgttgctgtcgatcctctttcagggcctgaccatcggcaagctggtgaatgcagtcactcgcgagccacaggcgaaagacccggcaggtcac

SEQ ID NO: 33363 - DNA, 1440 bp, Pseudomonas syringae
atgcagcttaaagattccaccctgttccgccagcaagcctacatcaacggccagtggctggatgcggacggtggtcagtcgatcaaggtcaacaacccggcgaccaacgagatcctcggcactgtgccgaaaatgggcgcggccgagacgcgtcgggcgattgaggcggctgacaaggcgctgccggcctggcgtgcgctgaccgccaaagagcgcggtaacaagctgcgtcgctggttcgagctgatgatcgagaatcaggacgacctgggtctgctgatgaccctggagcagggcaagccgctggctgaggccaagggcgagatcacgtatgcagcgtcgtttatcgagtggttcgctgaagaagccaagcgcgtgtacggcgatgtgatccccggtcaccagccggacaagcgtctgattgtgctcaagcagccgattggtgtgacggcggcgattacgccgtggaatttcccggcagcgatgatcacccgcaaggccggccctgcgctggcggcgggttgcacgatggtgctcaagcctgcgtcgcaaacgccgttttctgcgttggcgctggctgaactggccgagcgtgcgggtattccggccggcgtgttcagcgtggtgacgggcagcgcgggcgatatcggcagcgagctgaccggtaacccgatcgtgcgtaaattgtccttcacgggttcgaccgagatcggtcgccagttgatggctgaatgcgccaaggacatcaagaaagtgtcgctggagctgggcggtaacgcgccttttatcgtgttcgacgacgccgacctcgacaaggccgtcgaaggcgcgatgatctccaagtaccgcaacaacggtcagacttgcgtctgcgccaaccgcatctatgtgcaggacggcgtgtatgacgcattcgccgagaagctcaaggtggcggtcggcaagctgaaaataggtaacggcctggaagacggcattaccactggcccgttgattgatgaaaaggccgtggccaaggtcaaggagcacattgccgacgctgtcagcaaaggtgcgaccgtgctgaccggtggcaacagcctggaaggctcgttcttcgagccgactattctggtcaatgtgtcgaaagatgccgccgttgcccgagaagagacgttcggtccgctggccccactgttccgtttcaaggacgaggctgaggcgattgcgctggccaacgataccgagttcggtctggcgtcgtacttttatgcgcagaacatgagccgcgtgttccgggtggccgaggcgctggaatatggcatggtgggtatcaacaccggcctgatctccaacgaactggcaccgttcggcgggatcaagtcgtccggcctgggccgtgaaggttccaagtacggcattgaagattatctggaaatcaaatacctctgcctgtcggtc

SEQ ID NO: 33364 - DNA, 3159 bp, Pseudomonas syringae
atgtttgaacggttgattcaattcgcgattgaacagcgcatcgtcgtgatgctcgctgtgttgctcatggctgggctgggcattgccagttaccagaaactgcccatcgatgccgtccccgacatcaccaacgttcaggtgcagatcaacacctccgcgcccggcttctcaccgctggagaccgagcagcgggttaccttcgccatcgaaaccaacatggccggcctgcctggcctgcaacagacccgctcgctgtcgcgctcgggcctgtcccaggtcacggtgattttcgaagacggcacggacttgttctttgctcgccagctggtgggcgagcgcctgcagattgccaaggaccagttgcccgaaggcgtcgatgccatgatggggccgatttccaccggcctcggcgagatttttctgtggacggtcgaagcccgcgacggcgcgctgaaagaagacggcacgccttacacgccgacggacctgcgagtgatccaggactggattatcaagccgcaactgcgcaacgtgccgggcgtggccgagatcaacaccatcggcggtttcgccaagcaataccagatagcccccgacccgaaaaaactcgcggcctacaagctgaccctaaacgacctggtggccgcactggagcgcaacaacgccaacgttggcgcgggttacatcgagcgcggcggcgagcaactgttgatccgcgcaccgggccagctcggcacggtggacgacatcgccaacatcgtcatcgccaatgtgcagggcacgccgatcagaatcagcagcgtggccgaggtcggcatcggcaaggaaatgcgctccggcgccgcgactgaaaacggtcgggaagtggtgctcggcacggtgttcatgctgatcggtgaaaacagccggaccgtctcgcaggccgtggcggccaagcttgccgacatcaaccgcacactgcccgaaggcgtcgaggcggtcacggtgtatgaccgcaccaacctggtcgaaaaggccatcgcgacggtgaaaaagaacctgatcgaaggcgcgattctggtcatcgtgattctgtttctgttcctgggcaacatccgcgccgcactgatcaccgccatggtcattccactggccatgctcttcaccttcaccggcatgttcaccaacaaggtcagcgccaacctgatgagcctgggcgcgctggacttcggcatcattgtcgatggcgcggtggtgatcgtcgaaaacgccatccgcaggctggcacatgcccaaaagaaatacggccgcatgctgacccgcagcgagcgcttccacgaagtgttcgccgccgcccgagaagcccgtcggccgctgatattcggccagttgatcatcatggtcgtgtacctgccgatctttgccctcaccggcgtggaaggcaaaatgttccacccgatggccttcaccgtggtcatcgccctgctcggcgccatgatcctctcggtgaccttcgtgccggccgccatcgccatgttcgtcaccggcaaggtcaaggaagaagaaggctttgtgatgcgcaccgctcgccagcgctatgcgccgatcctgagctgggtgctgagccatcgcgccatcgccttcggcatggccttcgtgctgatcgtgctgtccggcttcactgccagccgcatgggcagcgagttcatcccaagcctcagcgaaggcgactttgccttgcaggcgctgcgcgtacccggtaccagcctgagccagtcggtggacatgcagcagcgtctggaaaaagccatcatcgaaaaagtgccggaagtgcagcgcgtcttcgcccgtaccggcaccgccgagatcgccgccgacccgatgccgcccaacatttccgacagctacgtgatgctcaagccgcaaagcgaatggccggacccggacaaatcccgcgaaacgctgatcgccgacctgcaaaaggccgccgccagtgtgccgggcagcaactacgaactgtcccagccgatccagttgcgcttcaacgaactggtttccggggtgcgcagtgacgtggcggtgaaagtgttcggcgacgacatgaacgtgctcaaccagaccgccgccaaaatcgccgccacgctgcaaaaagtgccgggcgcctcagaagtcaaagtcgagcagaccaccggcctgccggtactgaccatcaacatcgaccgcgacaaggctgcgcgttacggcctcaacgtggccgacgtgcaggacgccatcgccattgcgctgggcggtcgtcaggcgggcaccttgtatgaaggtgatcggcgtttcgacatggtggtgcgcctgtccgagcaactgcgtaccgacgtggacgggctttccagcctgctcattccggtgcctgcgaacgcgagcagccagcagatcagcttcatcgccctgtcccaggtcgccagccttgatctggtattaggcccgaaccagatcagccgcgagaacggcaagcgcgtggtgatcgtcagcgccaacgtgcgcggtcgcgacctcggctcgtttgtcgaagaagcgggcaccaccatcgacagcggcgtgcagatcccggcgggctactggaccaattggggcggccagttcgagcaactgcaatcggccgccaaacgcctgcaaatcgtcgtgccggtggcattgctgctggtcctcgcactgttgttcatgatgttcaacaacctcaaggacggcctgctggtgttcaccggcataccgttcgccctcaccggcggcgtcatggccctgtggctgcgcgacattcccctgtcgatctccgcaggcgtgggcttcatcgccctgtcgggtgtggccgtgctgaacggcctggtgatgatctctttcatccgcagcctgcgcgaagaaggccgctcgttgcacgacgccatcaacgaaggcgccctcacccgcctgcgcccggtgctgatgaccgccctcgtcgcctccctgggcttcatccccatggcccttgccaccggaactggcgcggaagtgcagcggccactggcaacggtggtgattggcgggattctgtcgtctacggcgctgacgttgctggtgctgccggcgttgtatcagtgggcgcatcggcgcgaggaggagcaggaagaggatgaggtcaaggcgctgaaa

SEQ ID NO: 33365 - DNA, 1188 bp, Pseudomonas syringae
atgagcgaatactcacttttcacctccgagtccgtgtccgaagggcatccggacaagatcgccgaccagatttccgacgcggttctggacgccatcatcgctgaagacaaatacgcccgtgtagcgtgcgaaacgctggtcaagaccggcgttgcaatcatcgctggcgaagtgtcgacttcggcctgggtcgatctggaagacatcgtgcgtaacgtcatcctcgacatcggctacaacagctccgacgtcggcttcgacggcgcgacctgcggcgtgatgaatatcatcggcaagcagtcggtggacatcgctcagggcgttgaccgcagcaagcctgaagatcagggcgctggcgaccagggcctgatgttcggctatgccagcaacgaaaccgacgtgctgatgccagcgccgatcaccttctctcaccagttggtacagcgtcaggccgaagcccgcaaatccggcctgctgccgtggttgcgcccggatgcaaaatcccaggtcacttgccgctatgaaaacggcaaagtggtcggcgtcgatgccatcgtcctgtcgacccagcacaacccggatgtgtcctacaaagacctgcgcgaaggcgtaatggaactgatcgtcaagcacgtcattcctgcgcacctgctgcacaaggacacccagttccacatcaacccgaccggcaacttcatcatcggtggcccggtaggcgactgtggtctgaccggtcgcaagatcatcgtcgacacctacggcggcatggcccgtcacggtggcggtgcgttctccggcaaggatccatcgaaggttgaccgttcggcggcctacgccggtcgttacgtggccaagaacatcgtcgctgccggtctggccgagcgctgcgaaattcaggtgtcctacgccatcggtgtggctcagcctacgtcgatctcgctgaacaccttcggcaccggcaagctgtcggacgacaagatcatcaagctggtccgcgacaacttcgatctgcgtccttacgcaatcaccaccatgctcgacctgctgcacccgatgtaccaggccactgcggcctacggccacttcggtcgtaccccggtcgaaatgaccgttggcgatgacaccttcaccgccttcacctgggaaaaaaccgaccgcgccgacgccctgcgcgccgctgccggcctg

SEQ ID NO: 33366 - DNA, 1941 bp, Pseudomonas syringae
gtgcaaaaagccaacagcggccatccgggtgccccgatgggcatggcggatatcgcggaggttctgtggcgcgattatctgaaacacaacccgaccaacccgtcgtttgccgaccgtgaccgcttcatcatgtccaacggccacggctcgatgctggtctattcactgctgcacctgaccggctatgacctgtccatcgacgatctgaaaaacttccgtcagttgcacagccgcacgccgggccacccggagttcggctacaccccaggcgttgaaaccaccactggcccactgggtcagggttttgccaatgccgtcggtttcgccgctgccgagaagacactcgctgcacagttcaaccgtccaggccactccatcgttgatcaccatacctacgtgttcatgggtgatggctgcatgatggaaggcatttctcacgaagtcgcctccctggccggtacgctgcaactgggcaaactgatcgcgttctacgatgacaacggcatctccatcgacggcgaagttgaaggctggttcaccgatgacacgccaaagcgctttgaagcctacggctggcaggtcattcgcaatgtcgacggtcatgacgccgacgagatcaagaccgccatcgacacggcccgcaaaagcgatcagccaacgctgatctgctgcaagaccaccatcggtttcggctcgccgaacaagcagggtaaggaagaatcccacggtgcaccgctgggcgctgacgaaatcgccctgacccgcgctgccctgaagtggaaccatggtccttttgaaatcccggctgatatctacgccgagtggaatgcgaaggaaaaaggtctggctgttgaagccgagtgggaccagcgctttgctgcctactctgctgccttcccggagctggccaatgaatttatccgtcgcatgagcggcgaactgcctgctgactttgccgagaagtcggcggcttacgttgccgaagtcaacgccaagggcgaaaccattgccagccgcaaggccagtcagaacgcgctgagcgcactgggcccgttgctgccggaaattctcggcggttcggctgacctggccggttccaacctgaccatctggaaaggctgcaagagcatcaccggcgaagaccctaacggcaactacctgcattacggcgttcgcgaattcggcatggccgccatgatgaacggtatcgctctgcacggtggcttcgtgccatacggcgcaaccttcctgatcttcatggaatacgcgcgcaatgcggtgcgtatggcctcgttgatgaagaagcgcgtgatctacgtgttcacccatgactctatcggtctgggcgaagacggtccgactcaccagccaatcgagcagctgaccagcctgcgtaccacgccgaacctggacacctggcgtccggcagatgccgttgaatcggctgtggcctggaaatactcgctggagcgtaacgacggcccgtccgcgctgatcttctcgcgtcagaacctgactcaccaggcgcgcgaacagcagcaaatagatgccatcgctcgtggtggttatgtattgcgcgactgcgctgcagaacccgagctgatcctgatcgcgaccggctctgaagtcggtctggccgttgaagcctacgaaaagctgaccgctcagggtcgcaacgttcgtgtggtttccatgccatgcaccagcgtgttcgaagcgcaggacgcgggctacaagcaagccgttctgccgcttcaggtcagcgcacgtatcgccatcgaagcggcccatgccgactactggtacaaatacgtgggcctggaaggccgcgtgatcggcatgaccaccttcggcgagtcggcgcctgcgccgctgctgttcgaagagttcggcttcacgctggaaaacgtcctgagcattgctgaagagctgctggaagac

SEQ ID NO: 33367 - DNA, 1080 bp, Pseudomonas syringae
atgggacagcgtacccccctgttcgacctgcacctcgcccttggcgcgaaaatggtcgattttggtggctgggacatgccgttgcattatggatcgcaggttgaggagcaccaccaggtgcgccgcgactgtggggtcttcgacgtctcccacatgaacgtcattgatgtgctcggccgtgaggccaaagcctggctgcgccggttgctggccaacgacgtcgacaagctcaagacccctggtcgcgccctgtacagcgccatgctggatgagcaggccggtgtcattgatgacatgatcgtctacctcaccgccgatggttaccggctggtcgtcaacgccgcgaccggtgccaaggaccttgcctggatgcagtcgcagttgggcgatttcgatgtgcagttgctcgcacgcagcgaaatggcgatgctggcaattcaagggccacaggccagaaaccggattgcccagctggtttccagcgctcgcgcagaactgatccgccagcttaagccgtttgaaggcctcgatgatggcgactggttcattgcgcgcaccggttacaccggcgaagacggtctggaaatcatgctgcctgccgacgaagcccagcgttttttcaatgaactggttggcgcgggtatttcgcccatcggtctgggcgcgcgtgacacgctgcgccttgaggcaggcatgaacctctacggtcaggacatcggcgaacatgtttcgccgctggcctcgaatatggcctggagcatcgcctgggagcctgccgagcgtgatttcatcggccgtcaggcgctggaaagcgaacgggctgaaggaaccgccttcaaactcgtaggattggtgctcgaagagcgcggcgttttacgggcgcatcaggtggtacgtgtcgcagaaattggcgaaggagagatcaccagtggtagtttctctcctacgttgagcaaatccattgcactggctcgcgttccgatggcgactgccgaccgggccgaggtggaaatccgcggcaaatggtacccggtgcgggtggtgcagcctgcgttcgtgcgccatggcaaaaccttgatc

SEQ ID NO: 33368 - DNA, 1782 bp, Pseudomonas syringae
atggcagccctggccccctcttcacaggatcgctggctcgacctgaacgacgtgttgcgtgaactggtcaccgaaggctatctgagccaggacgacacggaaacggcactcagccagcgtcgcagtgcggtgaatatccagctgcatccgctcgagtttctcgcgtcgcagcagtttgatgacttgaagcgaccgggcaaaaaactcgacctggaaaccctgacggcctggctggcgaaagcctccggtcagccctacatgcgcatcgacccgctgaagatcaatgtagcggccgtcacgcccctgatgtcctacgccttcgcccagcgccacaagattctcgccgtggcggtggaccgcgagtcggtgaccatcgccagcgcccagccatacgtgcgctcatgggaagcggacctggcgcacgtgctcaagctgcagatcaaacgtgtggtcgccaacccgactgacatccagcgcatggcgatggagtttttcaggctggcgaagtcggtcagcggcgccaatgcgtctgagcagaaaatgagcaacatgggcaacttcgagcagttgctcaagctcggtgccagtgaccaggagccagacgccaacgacgcgcacatcgtcaacatcgtcgactggctgttccagtacgcattccagcaacgcgccagcgacatccatatcgagccgcgccgcgaacaaggcacggtgcgctttcgcatcgacggggtgctgcacaacgtctatcagtttccagcgcaggtcatcatggcgattgtcagccgcctgaaaagcctggggcggatgaacgtcgctgaaaaacgcaaaccgcaggacggacgggtcaagaccaccacgcctgaaaatcgcgaggtggagttgcgtctgtcgaccctgccgaccgcgttcggcgaaaaaatggtcatgcgcatcttcgaccccgaggtgttgctcaaggacttcgaccaactgggcttctccagtgacgatctgcggcgctggcaggaaatgacccgccagcccaacggcatcattctggtcaccggcccaaccggttcgggcaagaccaccacgctgtacaccaccctcaagaagctggcgacctcggaggtcaacctctgcaccatcgaagaccccatcgagatggtcgagcccgccttcaatcaaatgcaggtgcagcacaatatcgatctgagctttgccgctggcgtgcgcgccttgatgcgccaggacccggatatcatcatgatcggcgaaattcgcgacctggagacggctgaaatggccattcaggcagcattgaccggtcacctggtgctatcgacgctgcacaccaacgacgcacccagcgccatcagccgcatgcttgaactgggcgtgccacattacctgctcaaagccaccatcctcggcgtcatggcccagcgtctggtgcgcacgctgtgcccgcactgcaaggcgccgatcaacctgaacgagacagactggcaaaccctcacccgcccctggcaagcgcctgtaccgcccggcgcgcatcaggcggtcggctgtgtggagtgtcgcgataccggttatcggggccgggcaggtgtgtacgagatcatggtcatgtccgacaacatcaaggcattgatctcggcggacctggacctgaccgccatgcgtcgtcaggcgttcaaggaagggacgcgcagcttgcgtctgtctggtgcgcaaaaagtctcggccgggctgactacacttgaggaagtactgcgggtgacaccgcagagcgaacagcgc

SEQ ID NO: 33369 - DNA, 1413 bp, Pseudomonas syringae
atgggctgcgctcccgttatcagtatcagcgtttggattcccccggccatgcaaaaagaaacagaaatcaaactccgcgtcagccgcgagaccctcgctgcactgcgcgaacacccgttgctcaagaagcgcaacaaaagtggctgggagcgcctggaactgtcgaaccagtatttcgatacccctgagcgcgagctggcccatgccaaggtggcgttgcgcatccgtcgtgacggcgatcagatcatccagaccatgaagacccgcgggcaaagcgtggccggcctgtccgaacgcaacgagtacaactgggacctgaccaaggccaagctggacctgaaaaagctcgaaggcgattgctggcccgagcaactgaccgaactggacaagaaatccatcaagccgctgttcaccaccgatttcatccgtgaaaaagccgaaattgcctggggtcgcggcaaaaccaaagtcgtgatcgaagccgcgctggacctcggccaggtggttgcaggcaagcagaaagaagaaatctgcgagctggagcttgagctgcgcgagggcgaccctgcggcgctgctggaactggccgctgaactggctgcaacgctgccgttgatgccgtgcgacatcagcaaagccgagcgcggctatcgcttgcttgatgccagcagttattcgctgagcctgcctgcgccaaccctgaacgcagaaaccccgctggacgacgcctactccgcgctggcctggcacctgctgggcagcagccagcgtctggccgagcaataccgtttcaacggccactggcgcctgctgcaggactgggtcgagatgctcggcgaactgcgcgccctgaccagcagcctcggccaggcggcgccacgcacttcgaccgctcagctgcgtaccgcgctggatgcgttgctggaagactggcgtccgctggttcaggccggtcaggaagatgccgatgtccgtggtgcagcccacgagcagtttctggaagaattgcaggacacccgctggggcgagttctcgctgaacacctcacgctggttgctggcccgcagctggaccgcagaacgcaacacccgcggcaaccgccagggtgctgcgctgttgagcagctggctgccccgtttgctgggtgaagaagcgacatccctgcaactgagccgttatcagcagcagccggaagacctggccgagcaactgccgcgcattgagcgcatccaggcctggctgcactgggcccgcggcgcgctggacctgccagagctggaccgcctgtacggcgaactgcgcaaactcgaagaactggcccatctggacatcagcgacgaaatcctcgatgcccgcgtgcaacaggccatcaccgtcttccagagccgcgcgtggaagaccttgttgcgtttg

SEQ ID NO: 33370 - DNA, 690 bp, Pseudomonas syringae
atgattaagctggtgacgttcgatctcgacgacacgctctgggacaccgcgcctgccattgtcggcgcagaagccgcgctgcgtgactggctggccgagcaggcgccaaagctcgggccggtccccgtggagcatctgtgggaaatccgctcacgcctgctggacgaagacccttcgttcaagcaccggatcagtgcactgcgacgccgcgtgctgtttcacgcccttgaagatgctggctacgactccgacgaagctcagcaactggccgacgagagctttgaagtctttctgcatggccgccatcaagtgcagattttcccggaggtgcagcccactctggaaattctcgccaagaccttcacgctcggcgttatcaccaacggcaatgctgacgtgcgtcgcctggggctggccgactactttgcctttgccctgtgtgccgaggacctgggcatcggcaagcccgacccggccccgtttctcgaagcgctgcgccgtgcaaaagtcgatgccagcgcggccgtgcacgtcggcgaccaccccagcgacgacattgccggcgcacaacaggcgggcatgcgcgccatttggtacaacccgcagggcaaggcatgggacgcagatcgcttgccggatgccgagattcacaacctgtcgcaattgccggaagtactggcgcgctgggcc

SEQ ID NO: 33371 - DNA, 897 bp, Pseudomonas syringae
gtggaacagcatctggacgcctactgcatgcacctgcgcagtgagcgccaggtgtcgccgcacacacttgaagcctaccgacgcgacctgagcaaggttctggcgtattgccagaaagcccggctgtcgagctggaatgatctggatatccagcacctgcgcagcttcaccgcccgccagcatcagcaaggccagtcctcgcgcagcctggcgagaatgctgtcggcagtgcgcggcttctacaagtacctgaaccgtgaaggcctctgccagcacgaccctgccaacggcctgtctccgcccaaaggcgaacgacgcctgcccaagacgctggataccgaccgcacggcgcaattgctggacggtggcgttgaagatgattttctggctcatcgcgatcaggccatcatggagctgctttactcatcagggttgcggctgtccgaactgaccggcttgaacctcgaccaactggacctgcgcgacgggctggtgcaggtgctgggcaaaggcagcaagacccgcgtattgccggtcggcagcaaggcacgccaggcactggaaacctggctgccgcttcgcgccctgaccaacccgcaggacgacgccgtgttcgtcagccagcaaggcaaacgcctcggcccgcgcgccgttcaactgcggatcaagaccgccggtgagcgcgaactggggcagaacctgcacccgcacatgctgcgtcactcctttgccagccatctgctggagtcgtcacaggacttgcgcgcggtgcaggaactgctcggtcacgcggacatcaagaccacgcagatatacacgcacctggacttccagcacctggccactgtctatgacagtgcccacccccgagccaagcgtaaaggagctgcagatgat

SEQ ID NO: 33372 - DNA, 2319 bp, Pseudomonas syringae
atggacagcatcaacagccgcatcgccgaagaactcggcgtacgcccacaacaggtcgcagcggccgtagcactactggatgaaggctcgaccgtgcccttcatttcccgctaccgcaaggaagtgaccggcagtctcgatgacacgcaattacgccatctggaagaacgtctgcgctatctgcgcgaactggacgaccggcgcgtcagcattcttgccagcatcgaagagcaaggcaagctgaccccggaactggctcgcgacatcaagctggccgacaccaagacccgccttgaagatttgtacctgccttataagcagaaacgccgtaccaagggccagatcgcccttgaagcgggcctcggcgagctggctgatggcctgttcaacgacccgagcctgaccccggacgccgaggccgcccgttttgtcgacgccgagaaaggcgtggccgacgtgaaagctgcgctggaaggcgccaagtacatcctgatggagcgcttcgccgaagacgcctcgctgctggacaaactgcgcagctttctcaagcaggaagcggtgatcagcgcgcgcgtggtgccgggcaaggaagaggaaggctccaagttccgtgactacttcgaacacgacgagccgctcaaaagcatgccgtcgcatcgcgcgctggcaattttccgtggccgcaacgaaggttttctcagctcagcactgaaagtcggtgaagaactgccaggtgccatgcacccgtgcgaactgatgatcggcgagcgtttcggcatccagaaccagagccgtgcggcggacaaatggctggccgaagtggtgcgctggacctggaaggtcaagctgtatagccatctggaaaccgatctgctgggtgagttgcgtgaaggcgctgaaaccgaagccatcaacgtgttcgcccacaacctgcacgacctgctgctcgccgccccggctggccagcgcgccacgcttggcctggacccgggcctgcgcaccggctgcaaggtcgcggtcgtggatgccaccggcaaactgctcgactacgcgactgtttatccgcatgtgccgaaaaatcagtgggatcagaccatcgccgtgctggccgccctgtgcgccaagcattcggtcgacttgatcgccatcggcaatggcaccgccagccgcgaaaccgacaagctggccgccgacctgatcaaaaaatacccaggcctgaaaatgaccaaggtcatggtttccgaagctggcgcatcggtgtactcggcgtcggaactggccgccaaggaattcccggacctcgacgtgtcgatccgtggcgcagtatcgattgcccgccgtttgcaggacccactggccgaactggtgaaaatcgacccgaaatccattggtgtcggccagtatcagcacgacgtgtcgcagctcaaactggctcgcggcctggacgcggtggttgaagactgcgtgaacgcagtgggcgtggacgtaaacaccgcgtcggtggcgctgctggcgcgaatttccggcctcaacaccacgctggcgcagaatatcgtcgcgcatcgcgatgaaaacggtgcgttcaagacccgcgcagcgctgaagaaagtcagccgtctgggcgagaagacctttgagcaggccgcaggcttcctgcgcgtcatgaccggtgacaacccgctggactcttctgccgttcacccggaagcctacccgctggtgcagcgtattgcggctgaaaccgaccgcgacatccgttcgctgatcggcgacgccagctttctcaagcgtctggacccgaagaagttcaccgacgagacctttggtctgccaaccgtcaccgacattctccaggaactcgaaaaaccgggccgcgacccgcgtccggagttcaagaccgctgaatttcaggaaggcgtcgaggacctcaaggacctgcaaccgggcatgatcctcgaaggtgttgttaccaacgttaccaacttcggtgctttcgtcgacatcggcgtgcatcaggacggtctggtgcacatctcggcgctgtccgagaagttcatcaaggacccgcgcgaagcggtcaaggccggtgatgtggtgaaagtgaaggtcatggaaatcgacatcccgcgcaaacgcgtcggcctgtcgatgcgcatgagcgacacgcccggcgagaaaatcgacggtgcgcgcggcgcacgccctggtgcctcgcctcgccagcagaacagcgccccgcgcaaggaaaccactgctccggcaccggccaacaacgccatggcctcgctgttcgccaacgccaagcaattgaagaagcgc

SEQ ID NO: 33373 - DNA, 1254 bp, Pseudomonas syringae
gtgctcatcgtcgtgctgttttccaaggccctgacgctggtttacctgttgatgaacgaagacgtgctggtcgacaggcagtacagccacggcgtcgcactgaccttgcgtgcctactgggctgccgatgaaaacgatcgggaggcgattgccgaggcggctggtctgattcgggtagtggggggaggcgtgccggaaggcgagcagcactggccgtacagcgagatctatcagcggcagatgcaggctgaactgggtgccgataccgaagtgcgtctgcgcgtgcatgcaccgcccgcgctttgggttcgcgcgccgagcctgggggatggctggctgaaagtgccgctttacccgcatccgttacgcggccagaaaatctggagcgtgctgggctggttcctggccatcggcctgttgtccaccgcgtcggcgtggatcttcgtgcgtcagctcaaccagccgctcaagcgtctggtctttgccgcccggcaactggggcaggggcgcagcgtgcgcttaccggtcagtgatacacccagcgagatgaccgaagtctatcgggccttcaaccagatggccgaagatgtcgaacaggccgggcaggagcgcgagctgatgctggctggcgtctcccacgacctgcgtacgccgctgacacgcctgcgtctttcgctggagctgatgaacgacaacgagttttccgagggcatggttcgcgatatcgaggacatggacgccattctcgaccagtttctggcgtttatccgtgatggtcgcgacgaggaaattgaagaggtcgacctgggcgatctggtgcgtgacgtggttgcgccctttaataatgctgaaggcagcatccgcctgtgcctggagccaattccgccgtttccgctgcgccgggtgtcgatgaaacgtctgctgaccaatttgatcggcaacgccaggcatcatgcgggcaacggtatcgaagtggctgcttacgtctcaggtgacagaaacgcgccctacgtggtgctgagtgtgctggacagaggggcgggcattgatccgtccgaactggacacgatcttcaacccgttcatccgcggcgatcgcgcacgcagcggcaagggaaccggccttgggctggccatcgtcaagcgtatcgctgcgatgcacggcggtaatgtcgagttgagaaatcgttcgggcggcggtctggaggcgcgcgtgcgcttgccgctgggcttgatgctgccaagggatgcgatt

SEQ ID NO: 33374 - DNA, 1773 bp, Pseudomonas syringae
atgaagctgcgcactcgcctctttctgagcatttcggcgctgatcacggttgccttgctcggactgctgctggggctcgtcagcgtcatgcagatggcgcgcacgcaggaatcgctgattcagcacaacttcgccattctggatctgggcttgaagttgcgtcagaacctgggtgaccaactggtgttgatgaccggggccacccgtaatccgcccgagctggaaaagattcagcgtcagttcgaggagttgctggaggaagcgtcggcgcaggacacacaggaggacgtgcgcaacgggcttgaggggacctgggtcgattaccggcgattcatcgatgccttgaaacaattcggcaccgacccgcgaggcatacgtggcaatccgcagttgagtgaaagctttgacagcttgcgtaacggcttgctgaatgtgcaccgcaaggcgctggaaaacatcagcagcgccgagatcaattcccgcgatcgcgcgctgtggatcgcgggccttctggggctggtcgggctggcggtgctgtgcatcggctttgtgaccgcgcacggtattgcccgtcgctttggtgcacctatcgaagcgctggccaaggctgccgaccgcattggcgaaggtgattacgaggtcacgctgcccatttcctcggccgccgaaatgaacctgctgacccggcgattcggcatcatggcagaggccttgcgtcagcaccaggcgaccaatgtcgatgagttgttggccggccagcagcgcctgcaggcggtgctcgacagcattgacgacggcctgctgatgatcgatcgccaaggccatctggagcatttgaaccctgttgctcagcgccagctcggctgggacgagagtcgcctcgggcagagtctgggggaggcgctgagtcgtcccgaactggacgagcaattgcatctggtcctgcgtggcgggaccctggagcgcgccccggaagacctggccatcgacatcgacggtgagtcgcggctgctgacctacagcatgacgccagtgagtcacaccaagggccatatcctgggtgctgtgatggtgctgcacgacgtcaccgagcagcgggcatttgaacgcgtgcgcagcgaattcgtcctgcgcgcctcccatgaactgcgcacgccggtcacgggcatgcacatggcgttcggcctgctgcaggagcgattgcacttcgcccccgaatcccgcgaagccgatctgctcaataccgtcaccgaagagatgcagcgcttgatgcagctcatcaatgacctgctgaatttctcgcgctaccagaacggcctgcaaaaactcaaactggcaccgtgctctatcgaaaccttgctggaagaagccagagcccgatacgaagggcaggcgcaggagcaggagatcgtgctgatgctggacatccaggaaccgatgccgcgcctgcatgcggaccagtcccagctggagcgggtgctggacaatctgctcgacaacgcattgcgtcatacaccgcccaacggcctgatccgcttgcaggcgaggcgtcacggcgagcgggcgatcatcagtgtcgaagacaacggcgaaggcatcgcctatgggcagcaaggacgaatcttcgagcccttcgtccaggtcggccgcaaaaaaggcggcgctggccttggcttggcgctgtgcaaggaaatcgtccagttgcacggcgggcgcatgggcgtctactcaaggccggggcagggcactcagttctatatggcgctgctgctt

SEQ ID NO: 33375 - DNA, 792 bp, Pseudomonas syringae
atggagcgcgacgtgacagattttccaacttcgttgaccgcccccaaaaaggggtgtgagggctgcaccggcagtccggaactgggcttttcgtttgattacgcctaccaacccatcgtcaacctgcacgaccagtcgatcttcgcccacgaagcgctggtccgcggtccgaatggcgagggcgcaatgtcggtgctgaaccaggtcaccgaccagaatcgctatcgcttcgatcagaagtgccggaccacagccatcgccggcgcggcaaaactgggcatgaccgagcgtttatcgatcaactttctgcccaatgccgtgtatcgtcccgagctgtgtatccgcagcacactggaggcggccaagcagcatgactttcctatcgagcggttgattttcgagaccatcgaaagcgagcatgtggataacaacaaccatttgagcaacattttgcgcgagtatcgcgagttcggtttcatgaccgccatcgacgatttcggtgccggctactccgggctgaccctgctggctgattttcaacccgacctgataaagctcgacatgaatctggtccgcgatattcatcgtgatcgcgcgcgtcaggctattgttcggggtgttgtcacaatgtgtaaggacttggggattaagctcatcgccgaaggtatcgaacacattgaagagcgggattttctggctgattgcggcatatccctgatgcaaggctatttgttcgccaaacctgcattcaaagccctggctcagatagcacctgaggcctggcagaagcct

SEQ ID NO: 33376 - DNA, 984 bp, Pseudomonas syringae
atggctccagacactttcgagtgcaggacggcgcttttcccgccgcgagccattcactgtcattacctcagatacccacttcttatgcatgatttcccggacatcgatttcacccagcgttttatcttcgacgaaagcgacgtacgcggagagctggtagccctggagcgcagctacgccgaagtgcttgccaaacacccctacccggagccggtcgcgcaactgctcggcgaactgatggcggccgcggccctgctggtcggcaccctcaagttcgacggcttgctgattctgcaggcgcgctccagcggcgccgtaccattgctgatggtcgagtgctcaagcgagcgcgagctgcgtggcattgcccgttacgacgaagcgctgatcacccctggcgccggcctgcaggacctgatgccggacggctcgctggcattgaccgtcgacccgcgtcagggcaagcgctatcagggcatcgtggcgctggacggcgtcgacctgtcggaaagcctctccaactacttcgtgatgtccgaacagctgggcacccgcttctggctcaaggctgacggtcatcgcgcccgtggcctgctgctgcaacaactgcccgccgcccagatcaccgacccggaagaacgcgacgccagctgggagcacgtcgttaccctggccagcaccctgacggccgaagaaatgctcagcctggacaaccagaccgtgctgcatcgcctgtatcacgaagacccggtgcgcctgttcgatgtccagccaatctgctttcgctgcagttgctcacgcgagcgctcggccaatgcgctggccagccttgggctggaggacgcgcagcaactggttatcgagcacaacggcagcatcgagatcgactgccagttctgcaacgagcgctacctgttcgatgccactgacgttgcgcagctgtttgctggcggcggtgtcgattcgccatctgatacgcgtcat

SEQ ID NO: 33377 - DNA, 1542 bp, Pseudomonas syringae
atgacgcaaatcaacaacgctgtgcacaccgatctgagcaccgacgaactggtcaaggaagcccttgcccgcaacgaaggcgtactgtccgacactggcgcactggttgtggagacaggccatcgtactggccgttcgccggtcgatcgtttcatcgttgaagagccgagcacccaggacgccatcgcctggggcccgatcaaccgcaagtttcccgccgagaaattcgacgctttgtggaaccgtgtcggtgcgtaccttgccgagcgcgagcgcttcgtttcccacgttcatgtaggctccgatcctgcgcactacctgcctgtcaagatgaccaccgaaacagcgtggcacaatctgttcggccgttgcctgttcatcaaccctgaacagtacaacccggctggcaaggacgagtgggaaatccagaacgcgccatggttcgtctgcgaccctgagcgtgatggcaccaactccgacggcaccgtcatcatcaacttcgccgcccgcaaggtgctgatcgcaggcatgcgttatgccggcgaaatgaagaaagccatgttctcggtgcagaacttcctgctgccggccgtagacgtactgccgatgcactgcgctgccaacatgggcgaagagggtgatgtaaccctgttcttcggcctgtccggcaccggcaagaccaccctgtccgctgatgaaagccgttacctgatcggtgacgacgaacacggctggggcgtgggcgtggtgttcaacatcgaaggcggttgctacgccaagtgcatcgacttgtccgagaagaacgagccggtcatctggaaagccatccagcacggcgctgtactggaaaacgtcgtactcgacccggtcaccaagaccgctgactacgccgacagcagcctgacccagaacagccgtgccgcttacccgcgcgaactgatcgaaaaacgcgccccgaaaaacctcggtggcgagccgaacgccgttatcttcctgacctgcgacctgaccggcgtcctgccgcctgtgtcgatcctcagcgaagaacaagccgcttaccacttcctgtcgggctacaccgcactggtcggttcgactgaaatgggttcgggttcgggcatcaagtccaccttctccacctgcttcggcgcaccgttcttcccgcgtccggccggcgaatacgcagaactgctgatcaagcgtatccgcggcttcaaatccaaggtctacctggtcaacaccggctggaccggcggcggctacggcgtcggcaagcgcttcaacatcccgaccacccgtggcgtgattgcagccatccagagcggcgcgttgatcggtgcagaaaccgaacacctcgacaccatcaacctcgacgtaccgaaactggtacccggcgtagacaccggcctgctcaacccacgcaacacctgggctgacaaagccgcctacgacgaagccgccaaggcgttggctggcctgttcgtggagaacttcaagaagttcgacgtgagcgacgccatcaaggctgcgggtccgaagttg

SEQ ID NO: 33378 - DNA, 2763 bp, Pseudomonas syringae
atgacccaagcgccgctcgtcctggtggacggttcttcttacctctaccgcgccttccacgccctgccacccctgaccacgtccaaagggttgccgaccggcgccgtcaagggcgtgctcaacatgctcaaaagcctgcgccgtcaatacccggacagcccgctcgcggtcgtcttcgatgccaagggcgggacgttcagggacgcgctgtacaccgactacaaggccaaccggccgagtatgccggatgacctgcgcgtgcaggtcgatctgctgcacgcttgcgtgaaaggcatgggctatccgtttttgtgcgttgaaggcgtcgaagcggatgatgtgatcggcaccctggcgcgcagcagcgcggcggctgatcgtccggtggtcatttccaccggcgacaaggacatggcgcagctggtcgatggccatatcacgctggtcaacaccatgaccggcagcgtgctggacgtggcgggcgtaaaagaaaaattcggcgtcggcccggagcacatcatcgactacctcgctctgatgggcgacaaggtcgataacatccccggcgtgcccggcgttggcgaaaaaaccgctgtcggcctgctggtgggcgtgggtggcgggatcaaggagctttacgacaacctggaaatggtcgcgaccctgccgatccgcggcgccaagaccctggccgccaagcttgaagaacaccgcgcgatggccttcctctcttacgagttggcgaccatcaagatcgacgtgccgctggacatcgagctggagcagttgcattgcagcgagccagaccgcgacaagctgatggaactgtacgccgagctggaattcaagagctggatcgaagacctgcaacgcgatgccaaacgcgcaggccaggagctggtggtcgaagagccgaccgtggcagccaaggaagcagcgtacgaggtcattcttgagcaagggcagttcgacgcctggctgaaaaagcttcaggcggcaccgcttttcgccttcgttacccagagcaacggcaccgacgcccagcgtgcgcaactggtgggcctgtctttcgccatccagccccacgaagccgcctacatcccgctgacccactcctatatgggcgtgccgcagcaactggatcgcgacaccgtcctcaagacgctcaagccgctactggaagacccgaacaagatcaaggtcggtcagcacgccaaatttgccatcaacctgctcgccaactgcgcgatcggcggtgatcaggcgcagggcatcgagctgcagggtgtgcgctttgacaccattcttgaatcctacgtactggactccaccgccactcgccacgaccgcgacagcctggtggccaagtacctgacgcatacgccgatcaacttccaggacatcgccggcaagggtgccaagcagctgaccttcgaccagatcgccatcgagcaggccggtaactacgccgccgaagaggccgacctgaccctgcgcctgcatgaagtcttcgaagcccgcctggccgcgattccgaccttgcagccggtgctcaacgagatcgagatgccattggtgccggtgctggcccgcatcgaacgtcagggcgcgctggtcgatgccaacctgctgggcatccagagcgttgagctgggcgacaagatgaccgcactggagcgcgaggcgttcgccattgccggtgaagaattcaacctcggttcgcccaagcagcttggcgtgattctctacgaaaaactcggcatgccgatcctgagcaagaccgccaccggccagccatcgacagccgaggcggtgcttgccgagctcgccgaacaggacttcccgctgcccaaggtgctgatgcagtaccgctcgatgagcaagctcaagagcacctataccgaccgcctgcccgagcagatcaacccgcgcaccgggcgtattcacacctcctatcatcaggcggtagccgtgaccgggcgtttgtcttccagcgacccgaatctgcagaacatccctattcgtaccgccgaaggccgccgcatccgtcaggcgttcgtggcgcccaagggttacaagctgctggcggcagactattcgcagattgaactgcggatcatggcgcacctggccaaggacgaaggcttgctgcatgcgttccgcaacgacctggacgtccaccgcgcgacagcgtcggaagttttcggcgtcgaactggagaacgtcaccaccgacatgcgccgcagcgccaaagcgatcaacttcggcctgatctacggcatgagcgcatttggcctggccaaacagatcggcgtggaccgcaagcagtcgcaggcgtatgtcgatcgctattttgcccgctaccccggcgtgctggactatatggagcgcacgcgcacccaggccgccgagcagggcttcgtcgagactattttcggccgtcgcctgtacctgccggacatcaacgccaagaacccttcactgcgcaacggcgcgcaacgcatggcgatcaacgcgccgatgcagggcacggcggcggacatcatcaaaaaagcgatggtggcggtgaatggctggctggacgaatccggcctggatgcacgggtcatcctgcaggtgcacgatgaactggtactggaagtgcgcgaagacctggttgatcagatcagcgagcagatccgtccacacatgagcggagcggcagaactggcagtgccgctgctggtggaagtcggggtcggcaacaactgggacgaggcacat

SEQ ID NO: 33379 - DNA, 1035 bp, Pseudomonas syringae
atgacctatatcgctgccgaaaatcgttacaaagacatgccgtatcgccgtaccggccgcagcgggctggtgcttccggcactgtcgttgggcttgtggcacaacttcggtgacagcacgccgatcgacactcagcgcgccatgctgcgcaccgcgttcgatctgggtatcaaccatttcgacctggctaacaactatggcccgccctacggcagcgccgagatcaactttggtcgtttgctgcgtgaagacttcaagcgctaccgcgacgagctgatcatctccagcaaggctggctgggacatgtggccggggccttacgggcagggcggtggctcgcgcaaatacgtgctggccagccttgatcagagcctgcaacgcatggggctggattacgtcgatattttctactcgcaccgcttcgacccggacactccgctggaagaaaccgccagcgcgctggccactgcggtgcagcagggcaaagcgctttacatcggcatctcgtcgtattccggggccaagacccgtgaaatagccgcgctgctcaaagagtggaaagtgccgttgctgattcaccagccggcttacaacctgctcaaccgttgggtcgagaaagacctgcttgatgcgaccgaagaactgggtgctggcgtgattgccttcactgcgttggctcaggggttgctatcggacaagtatttgaacggcgtgcccaaggacgcacgggtcaatcgtccgggcggtggctcgctgcaggcttcgcacttgtccgagcagaacatcgcccacgtgcgcgccctcaatgaaattgcccagcgtcgcggtcaaagcctggcacaaatggccctggcctggaccctgcgagacccgcgcgtaacctcagcgttgatcggcgcgagccgtccggagcagatcatcgaaaacgttggcgctctgcagaacctggcgttcagcagcgaagaactggccgagatcgacagctttgcggtggaaggcgggatcaatctgtgggaaaagccatctctggctgag

SEQ ID NO: 33380 - DNA, 1503 bp, Pseudomonas syringae
atgtgttcgatgcccgcagcccctcgtttccttgagcattaccgtaaggccgaccgcatcatgctgggtctgatctggctgttgtttgtgtacgcgctgggcctggggttctggtttgatacgtttacccaggcggttgtggtcggtggtggcaccgcgctggtgctgaccgggctgtatcgcgtgatcgggggcactcgattgatgcgctgctgcgtcggtatcgggctgatggtcatggccgcgctgcacatcaatcaggcacatgggcagattgaaatacacttcggcatcttcgtatttctcgccgtgctgaccttctaccgcgactggctgccgattctggtcgccgccgtcaccatcgctatccaccacatcggctttcatgccctgcaccactcgggcttcccggtgtacgtcatgcaacatggcggcggctggagcatggtggctatgcatgcggtttacgtggtggtcgagagtaccattctggtctacctggccgtgcagaatcaggccgaggcggtcgagaatcaggacatgctcgaccgcatgctggccaccaccaaccagttctcccccgatagccggatcgacgagcgatcgggcaaacacgtctcgctggcgcagcgtttcgagcagtttctggcgcagatcaccggccttgtcgacggtgttgtgcgcgacacgcgcgggcttggcgaactgggccatgacctcgccaaagccagtggcacgctggaaaccggtgcgcagcaccagttgagcgagatcgcccgcatgaccggcgcaatgcagcgcatgggcgatgccatgaatgacatttccggccacgtcgcgcaggccgtgcagcgtgccggtgacgccagtgatcaggtggcccacgggcgcgacagtgtcgaccgggcgcagagcgaaatcacccagcttgcggcgcgcatcagcaccaccgacgaaaccgtgcaggcacttgccaatcagtcagaacagatcggcaaggtgctggacgtgatcggcagtatcgccgagcagaccaacctgctggcgctcaacgctgcgattgaagccgcccgcgcgggtgagcagggccggggctttgcggtggtagccgacgaggtgcgcaacctggcacaacgcaccgcgtcatccaccaaagagatccagaccatcatcgaagacctgcaaaagggcagtcgccaggctgcaacggccatgagcgacagcctgcaaggcgtcggtcgttgtgtggaaaacagtcagcgcgcgtctgaatccctgcgctcggtgggcgaaggcatcgggcacatcacgcagctcaacggcctgatcgccacgaccaccgaacagcaggccaccgccagccgcgaaatcgccgatcaactgcgttcggtgcaggccatcgccgaacacactgccgccaatatcggcgtactggcgagcagcagccagagcctgtcgccgctggccgtacgcctggcagcgctgggccagagtttccataat

SEQ ID NO: 33381 - DNA, 1404 bp, Pseudomonas syringae
atgtcgaagtcggttcaactcatcaaagatcatgacgttaagtggattgatctgcgcttcacggacactaaaggtacgcagcaccacgtgaccatgccagctcgcgatgcgctggaagacgacttcttcgaagtcggcaagatgttcgacggctcctccatctctggctggaaaggcatcgaagcctccgacatgatcctgctgccggacgacgaaaccgcagttctggatccgttcaccgaagagccgaccctgattctggtgtgcgacatcatcgaaccgtcgaccatgcaaggttacgaccgtgacccacgcgccattgctcgtcgcgccgaggaatacctgaagtccaccggtatcggtgacaccgtattcgcaggtccggagccagaattcttcatcttcgacgaagtgaaattcaaatccgacatctccggttccatgttcaagatctactctgaacaaggttcgtggatgtccgaccaggatgtggaaggcggcaacaaaggccaccgccctggcatcaaaggtggttacttcccggttccgccgtttgaccatgaccacgaaatccgtaccgccatgtgcaatgctctggaagaaatgggccagaccgttgaagttcaccaccacgaagtggcgaccgctggccagaacgaaatcggcgtgaagttcaatacgctggtcaagaaggctgacgaagttcagaccctgaagtacgttgttcacaacgttgctgacgcttatggccgcactgcgaccttcatgccaaagcctctgtacggtgacaacggttcgggcatgcacgtgcacatgtccatcgccaaagatggcaaaaacaccttcgcaggtgaaggctatgccggcctgtccgacatcgcgctgtacttcatcggcggcatcatcaagcacggtaaagccctgaacggcttcaccaacccggcaaccaactcctacaagcgtctggttccaggcttcgaagccccggtcatgctggcctactcggcacgtaaccgctctgcctcgatccgtattccttacgtcaacagcccacgcggccgtcgtatcgaagcacgcttcccggatccggcagccaacccgtacctggccttcgcggctctgttgatggctggcctggacggcatccagaacaagatccaccctggcgacgcagctgacaaaaacctgtatgacctgccgcctgaagaggccaaagagatcccacaggtttgcggcagcctgaaagaagcgctggaagaactggacaagggccgtgcgttcctgaccaaaggcggcgtattcagcgacgacttcatcgacgcttacatcgcactgaaaagcgaagaagaaatccgcgttcgcaccttcgtgcacccactggaatacgagctttactacagctgc

SEQ ID NO: 33382 - DNA, 1818 bp, Pseudomonas syringae
gtgatcgaaaatctacgcaacatcgccatcattgctcacgttgaccatggtaagaccaccctggtagacaaactcctgcgtcaatccggcactctggagcgcggcgagctcaacgatgagcgcgtgatggactccaacgaccaggaaaaagagcgcggtattaccattctcgcgaagaacaccgcgatcaactggaatggctaccacatcaacatcgtggacaccccgggccacgccgacttcggtggtgaagtagagcgcgtgatgtcgatggttgactccgtactgctgctggtcgatgcccaggacggccctatgccgcaaacccgctttgtgaccaagaaggctttcgaagccggcctgcgtccaatcgtggtcatcaacaaggttgaccgtccaggcgcgcgtccggactgggttctggatcagatcttcgacctgttcgacaacctgggtgctaccgaagaacagctggacttcaaagtcgtctacgcctctgccctgaacggcattgccggtctggaccacaccgaaatggctgaagacatgaccccgctgtatcagtccatcgtcgacaacgttccggcacctgccgttgaccgtgacggcccgttccagatgcaaatctcggcactggactacaacagcttcctgggcatcatcggcgttggccgtattgctcgcggcaaggtcaagccaaacacccaggttgtggctatcgacgccaacggcaagcgccgtaacggtcgtatcctgaaactgatgggtcaccacggtctgcaccgtgtagacgtcgaagaagcagctgccggcgacatcgtctgcatcagcggcttcgaagagctgttcatctccgacaccctgtgcgacccacagaacgttgaagcgatgaagccgctgaccgttgacgaacctaccgtttccatgacgttccaggtaaacgactcgcctttctgcggtaaagaaggcaagttcgtcaccagccgtaacatcaaggaacgtctggacaaagaactgctgtacaacgttgccctgcgcgttgaagaaggcgacaccgccgacaagttcaaggtctccggccgtggtgagctgcacctctcggtactgatcgaaaccatgcgtcgcgaaggcttcgaaatgggtgttggtcgtcctgaagtgatcatccgcatggttgatggcgtcaagcacgaaccgttcgagaacgtcaccatcgacctgccggaagaatcccagggttccatcatggaacagatcggtatccgtaagggcgacctgaccaacatggttccggatggcaagggccgtgttcgtcttgaatacaacatccctgctcgtggcctgatcggtttccgtaacgaattcctgaccctgacttccggcgcaggcattctgaccagcatcttcgaccgttacgacgtgatgaagtctggcgacatgtccggccgtcagaacggcgttctggtttcggttgctaccggcaaggcactgacctactccctggaaacactgcaagcccgtggcaagctgttcctgggtcatggcgaagatgtgtacgaaggtcagatcgtcggcatcaacagccgcgacaacgacctgggtgtaaacccaaccaagggcaagaagctcgacaacatgcgtgcttccggtaaagacgaaaccatcgctctggttccgcctatccgcttcactctggaacaagcgctggaattcgtacaagaagacgaactctgcgaagtgactccaaagtcgatccgcctgcgtaagaaaatccttggcgaaagcgagcgtacccgcgctgccaagaagtcgggcaac

SEQ ID NO: 33383 - DNA, 1404 bp, Pseudomonas syringae
ttgcaggatcgcctggctcaggtcgtcgatctgctgcagcgccagcgtattgttgaagacctgacccaccgtcaggagggtcagaatcaagaccgcgtagaaaacctggttcaccggcagaaccttgtcgagctgcagcgcaagctcgaagaccttcactccgccgacgtcgcttatattctcgaagcccttcctctggaagatcgcctgaccgtctggcagctggtcaaggccgatcgcgacggcgacattctgcttgaagtatccgattccgttcgtgaaaccctgatcgccgacatggacgatcatgagttgctcgcggcggcacgggacatggacgccgacgaactggccgaccttgctcccgaattgccccgcgacgttgttcatgaactgatggaagcgctggactctcagcagcgcgagcgtgtccggtctgccttgtcctatgacgaggaccaggttggtgcgttgatggacttcgagatggtgacgatccgcgaggatgtcagccttgaagttgtattgcgctacctgcgcaggctcaaagagctgcctggtcataccgacaaattattcgtggtcgactccgagggcgttctcaagggcgtgttgccgatcaagcgactgctggtcaatgatccggagaagcaggttggcgaagtcatggccaacgacccggtcagctttcaccctgaggacgatgcgtacgatgccgcgcaggctttcgagcgttacgaccttatctccacgccggttgtggacaaaaacggcaaattgattggccgtctgaccatcgatgaaatcgtcgacctgattcgtgaagagagcgaaaacgaagtcctcaacatggcgggtctgcgagaagaggaagatatcttcgcttcggtatggcgctcgctgcgcaaccgctgggcgtggctggcggtcaacctggtcactgcattcctcgcttcgcgggtaattggcctgtttgaaggctccatcgagaagctggtggcgctcgctgcgctgatgcccatcgtcgccggcattggcggcaactcgggtaaccagaccatcaccatgatcgtgcgcgcaatggcgctggatcaggtcaacaccggcaatacgtcccggctgctgcgcaaggagctggctgtgggcctgatcaacggcctgctgtggggtggggttatcggggttgtcgcttacctgttgtatggcagctggtcacttggcgtggtcatgacggcagctatgacgcttaacttgctgctggccgccttgatgggcgtatccatccctatggcgcttgcgcgtctgggtcgcgaccccgcaatgggtgcgagcgtcatgattacggcgatgactgacagcggcgggttcttcatctttctcgggctggcgacgatcttcctgctc

SEQ ID NO: 33384 - DNA, 462 bp, Pseudomonas syringae
atgcgcaagaccctgatcgctttgatgttcgccactgccctgccagctatcgcaatggccgctccgccagcacctcccgccggtgcccctgatgcagacgcacccggcatgcacatgcagcgtggtgaccgaggccctggtatgcaccgtggcccaggcccgctcaaagagctggacctgacccgcgaacagcgtcagcagatcgaccgcttgatgcgcgagcagatgcatgagcgccgcgagatcactcagaactacctggaaaaaatgccggctgccgatcaaaaggcaatgcgcgacgagatcgaagccaaacgctccaagaccgacagcgaagttcgcgcactgctcaagcctgatcagcagaagcagttcgacgaaatcaaaaagaaagaagacgagcgccgcgccgaatgggcagaattcaaagcctggaaagcggcaaaaacagccaaggcccaa

SEQ ID NO: 33385 - DNA, 1230 bp, Pseudomonas syringae
atggctttgatcgtacagaaatttggcggcacctccgtgggctctgtagagcgcatcgagcaggtggccgacaaggtcaagaaattccgtgaggcgggcgacgacctggtggtcgtgctgtcagccatgagcggtgaaacaaatcgtttgatcgagctggccaggcagatcagtgatcagccggttccccgtgaactggacgtgatcgtctccacgggcgagcaagtgaccattgcgctgctggcgatggcgctgatgaagcgcggcgtgcctgcggtttcctacaccggcaaccaggtgcgcattctcactgacagcgcgcacaacaaggcgcgcatcctgcaaatcgacgaccagaagattcgttccgacctgaaagccggtcgggtggtggtggttgccggtttccagggtgtcgatgagcacggcaatatcaccacgcttgggcgtggcggctctgacaccaccggagtggccctggcggctgcgctgaaggctgacgagtgccagatctacaccgacgtcgatggtgtgtacaccaccgacccacgtgtggtgtcgcaggctcagcgtctggacaagatcacctttgaagagatgctggaaatggccagcctcggttccaaggtgttgcagatccgcgcggtcgagttcgccggtaaatacaacgtcccgctgcgcgtcctgcacagcttcaaagaggggccgggcacccttattacaatcgatgaagaggaatccatggaacagccgatcatttccggcatcgccttcaaccgcgatgaagccaagctgaccatccgtggtgtgccagacacccccggcgtggcgttcaagattctcggcccgatcagcgcggccaatatcgaagtggacatgatcgtgcagaacgtttcgcacgataacaccaccgatttcaccttcacgatccatcgcaacgactatcaggcggccttgcaggtgcttgagacgaccgcgcgtgaaatcagtgcccgtgaagtttccggcgataccaagattgccaaggtgtccatcgtcggtgtcggcatgcgctcgcacgcgggtgtcgccagtcgcatgtttgaagcactggccaaggagagcatcaatatccagatgatctccacatcggagatcaaggtctctgtggtcatcgaagagaagtacctggagctggctgtgcgcgcattgcacaccgcgttcgagctggatgctcctcggcagggtgaa

SEQ ID NO: 33386 - DNA, 558 bp, Pseudomonas syringae
atgcaggcgcttgaggttttgctcaatcgagtatcggttccacggctggtcgacccggccccggacgctgcgcagcgagaaatcatgttcggcgcagccctgcgctcgccggatcatggccagctcaagccgtaccgcttcctgaccgtcgaaggctcggcccgcgagcgcatgggcgatttgctggttgaagcgctgcaacagagcggcaacgaagtcaccccacaggcgctggaaaaggcccgtctcggcccgttgcgtgcgccgctggtcgtggtggtgattgcctgcctgcaggatcacttcaaagtcccccgcaaggagcaactgatcaccgccggatgcgctgcccacggcgtgctgctggcagcgtatgcgctgggtgtcggtgcggtctggcgcacgggggatttgtcctatgcgtcgcaggttgcccaaggcttcgggcttgccgcgggcgaagaggtgattggctttctgtaccttgggacgcccttgaacccgccgcgcgaggccccgaaggttgacgttggcgagtttgtcagtgagtggcagggc

SEQ ID NO: 33387 - DNA, 2499 bp, Pseudomonas syringae
atgaaccagttcaaggattgcttcctgggccaggaaaaacgcgcctacacccgcgccgtgaccagtcagaaatgcgtgcgtgccggtggcaagcacaacgacctggaaaacgtcggctataccgctcgtcaccacacttttttcgaaatgctgggtaacttcagctttggtgactatttcaagcgtgatgccattacctacgcctggaccttcctgacttccgagaagtggctgaacctgcccaaggaaaaactctgggtcaccgtctacgcgaccgacgacgaagcctacgatatctggaccaaagagatcggcgtcccggccgaacgcatggttcgcatcggtgacaacaaaggcgcgccttacgcctccgacaacttctggaccatgggcgacaccggcccgtgtggcccgtgcagcgagattttcttcgaccacggcgcggacatctggggtggcccgccaggctcgccggaagaggacggcgaccgttacattgaaatctggaacaacgtttttatgcagttcaaccgtaccgctgatggcgtgctgcacccgctgccagcgccgtcggtcgataccggcatgggtcttgagcgggtcagtgccgttctgcagcacgtgcattccaactacgaaatcgacctgtttcagagcctgcttaccgcatcggccaatgccatcggttgcagcaacgacaaccaggcttcgctgaaagtcgtggctgaccacattcgttcttgcggcttcctgatcgccgatggcgtactgccttccagcgaaggccgtggctatgtgctgcgccgcatcattcgtcgcgcctgccgtcacggtaacaagctcggtgccaagggcagcttcttctaccagatcgtcgccgcgctggtcgccgagatgggttcggcattccctgaactggtgcaacagcagtcgcacatcgagcgcgtcctcagaggcgaagaagagcagttcgccaagactctggaacaaggcttgaagatcatcgagcaggatctggccgagctcaaaggcaccgtggttcccggcgaaatcgtgttcaagttgtatgacacctacggtttcccgatggacctgacaggtgacatcgcccgtgagcgtaacctgacgctggacgaagagggctttgagcgcgaaatggaagcccagcgcgtgcgtgcacgttcggccagctcgttcggcatggactacaacagtctggtcaaggtcgatgtggccacccaattcaccggttactcggcgaccaccggcagcgccagcgtcgttgccctctataaagacgggcagtcggtgactcatctgaacgcaggcgaagagggcgtggtgattctcgacaccaccccgttctatgccgaatcaggtggccagatcggcgacagcggcttcctgctggctggtgatgcgcgcttcgacgtcagtgacaccaccaagaccggcggggcattcctgcaccacggtgttgtggcgtccggcagcctgagcgtcggcgtacaggttgaaacacaggtggccgatgaagttcgtgatgcaaccaaactgaaccattcggccactcacttgctgcacgccgcattgcgtcaagtgctgggcgagcacgtgcagcagaagggctcgctggtcgacagtcagcgtctacgctttgacttcagccacttcgagtcgatcaagcctgagcaactgcgtgcactggaagacatcgtcaacgccgaaattcgcaagaacacgccggtggtcaccgaagaaaccgacatcgacaccgcgaaaaagaaaggcgccatggcgctgttcggcgagaagtacggtgacagcgttcgtgtgctgagcatgggcggcgagttctccgtcgagctgtgcggcggtattcacgccagccgcaccggtgacatctcgttgttcaagattgtcagtgaaggcggcgttgccgcaggcgtgcgccgtatcgaagcggtgaccggcgcggctgcgctggcctggctgaactcggctgaagatcaactcaaggaagccgcgacgctggtcaaaggcaatcgcgacaacctgctggacaagctgacggcggtgcttgagcgcaaccgtctgctggaaaaacaactggaacaactgcaagccaaggcagccagcgccgccggtgacgacctgtcgtcggccgcgctggatgtcaaaggggtcaaggttctggctacgcgcctggatggccaggacggcaaggcgctgttggcgcttgtcgaccagttgaagaacaagctcggccgcgcagtgatcctgctcggcagtgttcatgaagacaaggttgtcttggtcgcaggcgtgaccaaggacctgactggccaactcaaagccggtgatttgatgaaacaggcggcaaccgcagtaggcggtaaaggcggtggtcgtcctgatatggctcaaggcggtggtgtcgatgcaactgcgctggattcagcgctggcactggccgttccttttgtagagcagggtatc

SEQ ID NO: 33388 - DNA, 1452 bp, Pseudomonas syringae
atgtcgttgccgacctttcgcattatcggtttcattatcggcatcttcctgatcaccctggctgtggccatgatcgtgccgatggccacgctggtcatctacgaccgcttcgaagacctgcgctcgtttctgtgggccagcgccatcacctttatcgcaggccttgcgctggtggtgcccggacgccccgacaacgtccagttacgccctcgtgacatgtacatgctcacggtttccagctggatcgtggtgtgcatcttcgctgccctgccctttctgctgacccagcacatcagctacaccgactcattttttgaaagcatgtcgggcatcaccgccaccggttcgacggtgctcagccatctggatagcatgtcgccgggtattctgatctggcgttcgatgctccactggctgggcggtatcggtttcatcggtatggccgtggcgattctgccgttgctgcgcatcggcggcatgcgcctgtttcagaccgaatcgtcggaccgctcggaaaaggtcatgccccgctcgcacatggtggccaagttcatcgtgctggcctacgtcggctttaccgcgctgggcagtctggcgttctgggcggcgggcatgagcctgttcgatgcgatcaaccacgcgatgtcggcgatttccacgggcggtttctccacttccgacctgtcgctggccaggtggccgcagcctgcggtgcactgggtggcgattgtggtgatgattctcggtagcctgccgttcacgctgtatgtcgccacgctgcgcggcaaccgcaaggcgttgatcaaggatgaacaggtgcagggattgatcggcctgttgctgatcacctggttggtgatgacggtgtggtacgccaacaccactgacttgccgtggaccgaagcgctgcgccatgtggcgctgaacgtgacgtcggtggtaaccactacgggttttgcactgggtgactacagcctgtggggcaatttctcgctcatgctgttcttttatctgggttttatcggtggctgttccggttcgacggcaggcggggtaaagattttccgctttcaggtcgcttatattctgctcaagaccaaccttaatcagttgattcacccacgcgcggtgatgaagcagaaatacaacgggcatcgactggacgacgaaatcgttcgctcgattctgaccttttcgttctttttcacgatcaccatctgcctgattgcgttgatgctgtcgctgctcgggctggactggatgactgcgctgacgggtgcggccagtacggtttccggtgtcgggcccgggctgggcgaggtcattggcccggcgggtaacttctccaccctgccggatgctgccaagtggattctgtccggcggtatgctgctcggccgtctggagattattaccgtgctggtgttgtgtgtgccggcgttctggcggcat

SEQ ID NO: 33389 - DNA, 1881 bp, Pseudomonas syringae
gtgcggctgggcattgacgaactgatcaatccgctggaaaagcacacttggcttttcatcagtgcgccgctggcggccattccgttgttcatccgttttggcatgtaccgtgcggtcatgcgctattttggcaacgacgcactgattgcgatcatcaaagccgtcacgatgtcgtcgttgattctcggttgtatggtgtacgtatacagcaatcaccagcaactggtgccacgctcggtcatcttcaactattggtggctgagcctggtaatgatcggcggtctgcgcctggccatgcggcagtacttcctcggtgactggtttgcggcggcgcaacacgtaccgtttgccaaaagcgataacggcctgcaaaaagtcgccatctacggcgcaggcgcggccggcaaccagttggtggctgcattgcgtatggggcgtctgatgcaccctgtggcattcattgatgatgacgagtcgatctccaaccgggtgatttccgggctgcaagtctacaagcctcgaaatatccagcgcatgatcgattccaccggggctcaggaaatactcctggccatcccttcgtcatcgcgcgggcgtcgccgggagattctggggtttctggaaggctttccgttgcacgtgcgaagcgtccccggtttcatggacctggcggctggccgggtcaaggttgacgaccttcaggaagtcgatatcgccgaccttctgggacgagacgcagtgcctgcccgggaaaacctgctggagcattgcatcaagggcaagacggtgctggtgactggcgcgggcggctcgatcggttccgagttgtgccggcagatactgcttctgcagcctgtccagttgctgttgctcgaccacagcgaattcaatctttacagcattctgtccgagcttgaacagcgttctgcccgtgagtctctttcggtcaagttgctgcccatactcggttcggtgcgcaatcaccccaagctgctgtcgatcatgaaaacctggaaggtcgacacggtctaccatgcggccgcctacaagcacgtaccgatggttgagcacaacattgccgaaggtgtgatcaataacgtcgtcggtacgctcaataccgcgcaggcggcgttgcaggcgggggtttccaactttgtcctgatttccaccgacaaggcggtccgtccaaccaacgtcatgggcagcaccaagcgccttgccgagttgatcctgcaggcactgagccgcgagaccgcgccggtgatcttcggcgacaaggccaacgtctatcaggtcaacaagacccgtttcacgatggttcgtttcggcaacgtgcttggctcatcgggctctgtgattccgctgtttcacaagcagattcagtcgggcgggccgctgacggtgactcatcccaagatcacccggtacttcatgaccatccccgaggccgctcaactggttattcaggcgggctcgatggggcatggcggggatgtgttcgttctggacatgggcgagccagtcaagattgtcgaactggcggagaaaatgatccacctttccggcctggccatccgctccgagaaaaacccgcatggcgatatctccattgagttcaccgggctgcgtcccggtgaaaagctgtatgaagagctgctgatcggcgacaacgtggtcgcgaccgaacacccaatgatcatgagcgccagcgaagactgtctggcgtgggatgtattgaaaggccggctggtaaaactgctggatgccgtggagcgagacgattacaacagcgtgcgccagttgctgcgagaaacagtcagcggttatacaccagagggtgaaatcgttgactggatgtatcaggaacgcagcggcgagcct

SEQ ID NO: 33390 - DNA, 1005 bp, Pseudomonas syringae
atgctcgccctcggcaaactgcttgaactgaccctggctggacgtgaaccagcggaaaagactcaactgaccgtcgaaggcgtgcggatgcgctggctggctgagggggctctggaagtccgcccgccacaggctcgtgacaatggcactgacctgctgctgtctgccggtattcatggtaacgagacagcgcccatcgagctgcttgatgaactgatccgcagcatcgcgcgtggcgacctcaaaccgcgcgcacgtattctgtttctgtttggcaaccctgctgccatgcggctgggtgcgcgttatgtcgagcaggacgtcaaccggctgttcaatggccggcacgaacaaagcggtggcgcggaagccctgcgcgcttgtgaactggagcggctggctgccagctttttcagcctgccggaccgctatcggctgcattacgacctgcacactgccattcgcggctcaaagatcgagcagtttgcgctgtatccgtggaaagagggccgtcagcactcacgctttgaactggcccggctgcgtgcggcgggcatcagtgcagtgctgctgcagaacaaaccctccatagtgttcagcgcctacacctacgaacagctcggggccgaggcttttacactggaactgggcaaggcccgcccgtttggacagaaccggcacgttaatctcgcgccattgcgtttgcgtctggagcagatcattgaaggcagcgaaccccagccggatgagcgtcttgaggggctgcaactgttcagcgtcgcacgtgaagtgatcaagcgcagcgatgcgttcaccttcaacctggcggatgatgtggagaacttctccgagctggaaaaaggctacgtgctggccgaagacgtgagtgattcacgctgggtggtgaaagaagagggcgcaagaatcatcttccccaaccccaaggtcaaaaatggcctgcgggcgggcattgtgattgtgccggctgatgcggatgggcttggt

SEQ ID NO: 33391 - DNA, 1689 bp, Pseudomonas syringae
atgagcgaaagctttgcagaactttttgaagaaagcctaaagaccctcaaccttcaggccggttcgatcatcaccgctatcatcgttgatatcgactaccaggcaggttgggttacggttcacgccggtctgaaatctgaaggcctcatcccgctggagcagttccacaacgacgctggcgagctgaccatcaagatcggtgatgaagttcacgttgcgctggacgcggtcgaagatggctttggcgaaaccaagctgtcccgcgaaaaagccaagcgtgccgagtgctggatcgttctggaagcggctttcgcagctgaagaagtggtcaagggcgttatcaacggtaaggttaaaggcggcttcactgtcgacgttaacggcatccgtgcgttcctgcctggttctctggttgacgtccgccctgtgcgtgacacgactcacctggaaggcaaagagctcgagttcaaggtcatcaagctggaccagaagcgcaacaacgttgtcgtttcccgtcgcagtgtcctggaagccgagaacagtgccgagcgcgaagctctgctcgagtccctgcaggaaggtcagcaagtcaaaggtatcgtcaagaacctcaccgattacggcgcattcgtcgatctgggtggcgtcgatggcctgctgcacatcaccgacatggcctggaagcgtatcaagcatccatcggaaatcgtcaacgttggcgacgagatcgatgtgaaggttctgaagtacgatcgcgagcgcaatcgtgtttccctgggtctgaagcaactgggtgaagacccatgggttgctatcaaggctcgctacccggaaagcacccgcgttaccgcgcgtgttaccaatctgaccgactacggctgcttcgcagagctggaagaaggcgtggaaggcctggtacacgtttccgaaatggactggaccaacaagaacatccacccttcgaaagtcgttcaggttggcgacgaagtggaagtcatggttctggacatcgacgaagagcgtcgtcgtatctccctcggcatcaaacagtgcaaatccaacccgtgggaagatttctctggccagttcaacaagggcgataaaatctccggcaccatcaagtcgatcaccgatttcggtatcttcattggtctggacggcggcatcgacggcctggttcacctgtccgacatctcctggaacgaagtgggcgaagaagccgtacgtcgcttcaagaagggcgacgagctcgacaccgtgatcctgtcggttgatcctgagcgcgagcgcatctcgctgggtatcaagcagctggaaagcgatccgttctccgagtacgtcactgtcaatgacaagggcgctatcgttcgcggtatcgttaaagaagttgacgccaaaggcgccatcatcaccctggccgacgacatcgaagcgaccctcaaagcctccgaaatcagccgtgaccgcgttgaagacgcgcgtaacgttctgaaagaaggcgaagagatcgaagccaagatcatcagcgttgaccgcaagagccgcgtaatcagcttgtccatcaagtcgaaagacgttgaagacgagaaagaagcgatccagagcctgcgtagcaagcctgaagtcgctgaaagcactggtcctaccactattggtgacctgctgcgcgcgcaaatggaaaaacagaac

SEQ ID NO: 33392 - DNA, 2784 bp, Pseudomonas syringae
atgggcgaactggccaaagaaatcctcccggtcaatatcgaagacgagctgaagcagtcctacctcgactacgcaatgagcgtaatcgtcggtcgggcactgcccgatgcgcgcgacggcttgaagcccgtgcaccggcgcgtgttgttcgcaatgagcgagctgggtaacgactggaacaagccgtacaagaaatccgcccgtgtggttggtgacgtgatcggtaagtatcacccacacggcgacaccgccgtgtacgacaccatcgttcgtatggctcagccattctcgctgcgctacctgctggtagacggccagggcaacttcggttcggtcgacggcgacaacgcggcggccatgcgatacaccgaagtgcgcatgaccaagctggctcacgagctgctggccgacctgcacaaagagaccgtcgactgggtgccgaactacgacggcaccgaaatgatccctgcggtcatgccgacccgtattcccaacctgctggtcaacggctcgagcggtatcgccgtgggcatggcgaccaacattccgccgcacaacctcggtgaagtcatcgacggttgcctggcgctgatcgacaaccccgagttgacgatcgacgaactgatgcagtacatccccggcccggacttcccgacggcggcgatcatcaacggccgcgccggcatcatcgaagcctaccgcaccggccgcgggcgcatttacatgcgtgcccgctccatcgtcgaagacatcgacaaggtcggcggtcgccagcagatcgtcatcaccgagctgccttaccagttgaacaaggcgcgtctgatcgaaaagatcgccgagctggtcaaggaaaagaaactcgaaggcatcaccgaactgcgcgacgagtccgacaaggacggtatgcgcgtggtcatcgagctgcgtcgtggcgaagtgcctgaggttgtgctcaacaacctgtatgcccagacccagctgcaaagcgttttcggtatcaacatcgttgccctgatcgacggtcgtccgcgcatcctgaacctcaaggacctgctggaagccttcgtgcgtcaccgccgcgaagtggtcacccgccgtaccgtgttcgaactgcgcaaggcgcgcgagcgtggccacatccttgaaggtcaggcggttgcgctgtccaacatcgatccggtcattgccctgatcaaggcgtccccgacacctgccgaagccaaggaggcgctgatcaagacgccttgggaatcgagcgcagtggtcgagatggtcgagcgcgccggtgccgattcgtgccgccccgagaacctcgacccgcaatacggcctgcgtgaaggcaagtatttcctgtcgccagaacaggctcaggccattctggaactgcgtctgcaccgcctgaccggtctggaacacgaaaaactgctgggtgagtaccaggaaatcctggctcagatcggcgagctgatccgcatcctcaacagcgccacgcgcctgatggaagtgatccgcgaagagctcgaactgatccgcgccgaatacggcgatgcgcgtcgcaccgagattctcgatgcacgcctggacctcaccctcggtgacctgatcaccgaagaagagcgcgtggtcaccatctcccacggcggctatgccaagacccagccattggctgtctaccaggctcagcgtcgcggcggcaagggcaagtcggccaccggcatcaaggatgaggactacatcgctcacctgctggtcgccaacagccacaccacgctgttgatgttctccagcaagggcaaggtgtactggctcaagacctacgagatcccggaagcgtcccgcgctgcccgtggtcgtccgctggtcaacctgctgccgctgagcgaaggtgaatacatcaccaccatgctgccggtcgatctcgaagccatgcgcaagcgtgccgacgaagaaggcgaagccctcgaaggcgagctggacgacgcggaaaacagcagcgagaccgaagaagagcgcaaggcgcgcatcaaggctgccgacaagaagaaggcgccgttcatcttcatgtccacggccaacggcacggtcaagaagactccgctggtggccttcagtcgtcagcgtagcgtcggcctgatcgcgctggaactcgacgaaggtgacatcctgatttccgcagccatcaccgatggcgagcaggaaatcatgctgttctccgacggcggcaaggtcacccgcttcaaggaatccgacgttcgcgccatgggccgtacggctcgcggtgtgcgtggcatgcgtctgccagaagggcagaagctgatttcaatgctgatcccggaagaaggcagccagatcctcaccgcttccgagcgtggtttcggcaagcgtaccgccatttccgagttccctgagtacaagcgtggcggtcagggcgttatcgccatggtcagcaacgagcgtaacggccgtctggtcggcgcggttcaggtgctggatggtgaggaaatcatgctgatttccgaccagggcacactggttcgtacccgcgtcggcgaagtctccagcctgggtcgtaacacccagggcgtgaccctgatcaagctggccagcgacgaaaaactggtcggcctggaacgcgttcaggagccctcggaagtcgaaggcgaagagcttgagggtgacgaggttgttgatggcgtgatcgttgatgtggacggcgccgacgcagacgaggcaggtgaagacctgcaggcggacgcggccccggacgacgacgaaccgcagaac

SEQ ID NO: 33393 - DNA, 1467 bp, Pseudomonas syringae
ttgatgagtaccctgtatatcgcaggtgcctggcaagccgggcagggcgagctgttccattcgttgaacccggtgaccctgcacgtgttgtggtccgggcaaggcgcgaccgctgaacaggtggatcacgctgtacaggccgcgcgccaggcgtttcccgcctgggcgctgctttcacttgatcagcgcatcgccgtgctggacgcttttgctgtcagcctcaaggcgcacgctgacgaactggcgaattgcatcggtgaagaaaccggcaagccgttgtgggaatcggcgaccgaggtgaccagcatggtcaacaagatcgccatttcagtgcagagctatcgcgaaagaaccggcgagaaaagcgctccgctgggcgatgctaccgctgtgttgcgccacaagccgcacggtgtggttgccgtattcgggccgtacaactttccgggccacctgcctaacggccatatcgtcccggccttgctggcaggcaatacggtgctgttcaaaccgagcgagctgacgccgaaagtcgccgaactgaccgtcaaatgctggatcgaagccggcttgcctgccggtgtcctcaacctgctgcaaggtggacgcgaaaccggtatcgccctggcggcgaatccgggtatcgatggcctgttcttcaccgggtcgagccgcactggcaacgcgctgcatcagcagttcgccgggcgaccggacaagattctcgccctggaaatgggcggtaacaatccgttggtggtcgatcaggtccaggacatcgacgcggcggtttacaccatcattcaatcggcgtttatctccgcaggccagcgctgcacctgtgcgcgtcgtctgctggtgcccgagggcgactggggagatgcgttgctggcgcggctggttgccgtcagcgcgaccctcgacgtgggggcgtttgatcagcaacctgcgccgttcatgggctctgtcatttcgcttgaggccgcgcgggctttgctcgacgcgcagcgtcatctgctcgccaatggcgcggtgaccttgctggaaatgcgtcagccgcaacccggtgcggcgctgctgacgcccggtattgtcgatgtcagcgcagtcgcaaacaggcccgatgtagagctgttcggcccgctgttgcaggtcgtccgctacgccggttttgatgcggcgatcgccgaggccaacgccactcaatacggtctggcggcgggcctgctctcggactccgaagcgcgttatcagcagttctggctgcaaagccgcgccggcatcgtcaactggaacaagcaattgaccggggccgccagcagcgcgccgttcggtggcgtcggggcgtcgggcaatcatcgcgccagcgcctattacgcggccgattactgcgcctatccggtggcgtcgctggagaccggcagcctgactctgcccgcgacgttgaccccgggtgtgcggctgagc

SEQ ID NO: 33394 - DNA, 1473 bp, Pseudomonas syringae
atgactcagcgagggagtaatgcaatgacagaccaacgcccggccggatacagcccgcgcctgcacaacgacgacctggggccggtgccgcagaaatggacctggtacaacattctggcgttctggatgagcgacgtgcacagcgtcggcggttacgtgttcgccgccagcctcttcgcgcttggcctggccagttggcaggtgctgatcgccctattggtcggtatctgcattattcaggtgattgccaacctggtcgccaaacccagccagcaagccgccgtgccctacccggtgatttgccgtctggccttcggcgtcttcggcgccaacatcccagccatcattcgcgggctgatcgctgtggcctggtatggcattcagacctacctggcgtccagcgccctggtgattgtggtgctgcgtttcttcccggacctggccgcgtaccagagcgtgacctttcttggcctgtcgtggcttggctggttcggttttctcgcgctgtgggtggtgcaggccgcggtattctggaccggcatggagtcgatcagacgcttcatcgactgggccggccctgccgtttacgccgtgatgttcgcgctggctggctggatcgtctggcgtgccggctgggaaaacatcagttttaccctggcggaaaaagagctgtctggctgggctgcgttcggccaggtggtcatggccatcgcgctggtggtttcgtatttttccgggccaaccctgaacttcggtgatttcagccgctattgccgcagcatggcggacgtgcgccggggcaacttctggggcctgccggtgaattttctggcgttctcgctggtgacggtggtgattgtctcgggcaccctgccgatcttcggcgaaatgatccacgaccctatcgccaccgtcgcacgcatcgacaacaccacggcagtgctgcttggcgcgttcacctttgtaaccgccaccgtcggcatcaacatcgtcgccaacttcgtctccccggccttcgatttcgccaacgtggcgcccagccgcatcagctggcgcgtgggcggcatgattgccgccgtggcgtcgattttcatcacgccctggaacctgttcaacaaccctgaggtaatccattacacactggacgtgctggcagcctgcatcggcccgctgttcggcatcctgctggtggattactacctgatcaagaaacagcagattgatgtcgacgcgctgttcaacgacacgccgagcggccgctactggtacaccaacggcatcaactggattgccgtcaaagccttgctgctgacggcgctggtcggcctgtgcttcaccttcatcgagtggttcaagccgattgccaatttcgcctggttcaccggctgcatcctcggcggtgcgctgttttatgcaatgacccgctggtcgcccgtgcagtcggcgaacatgccgacacccgtcgcccagagc

SEQ ID NO: 33395 - DNA, 762 bp, Pseudomonas syringae
atgcttattggcgcgctggcgttgtccgtgcttgcccagccgacattcgctgacgaaaaaccactgaaaatcggtatcgaagcggcgtatcctccgttcgcgtccaaggcaccggacggcagcatcgtcggtttcgactacgacatcggcaatgcactgtgtgaagaaatgaaagccaagtgcacgtgggtcgagcaagagttcgacggcctgatcccggcgctcaaagtacgcaagatcgacgcgatcctgtcgtcgatgtcgatcaccgacgaccgcaagaagtccgtggatttcaccggcaagtattataattccccggcgcgcctggtgatgaaggacggcgtgaccgtcagcgacagccttgccgagctcaagggcaagaagatcggcgtacagcgcggttcgatccacgagcgtttcgcccgtgaagtcctcgcccctaaaggcgttgaagtgaccccgtacggttcgcagaacgaaatctacctggacatcggtgcgggtcgtctggacggcaccatcgctgacgccacgctgctgcaggatggcttcctgaaaaccgactccggcaagggctttgcctttgtgggcccggcgttcactgacccggattacttcggcgacggcatcggcatcgccgtgcgcaagggtgacaaggccaacctcgatcgcctcaatgctgccattgccgcgatccgcgccaacggcaagtacaaggccattcaggacaagtatttcgacttcgatatctacggcaag

SEQ ID NO: 33396 - DNA, 1875 bp, Pseudomonas syringae
atgtaccagcagtcggtggtcaacccggatggtttctggcgtgagcaggcgcagcgcctcgactggatcaagccgtttagcgtggtcaagcagacctcgttcgacgaccatcgcgtcgacatcaaatggtttgccgatggcacgttgaacgttgcctacaactgcctggaccgtcacctggccgagcgcggcgacaccatcgccatcatctgggaaggcgacgacccttccgagcaccgcgaaatcacctaccgcgagctgcacgaagaggtctgcaaattcgccaacgccctgcgcggccaggacgtgcaccgcggcgacgttgtcaccatctatatgccaatgatccccgaggctgtggtcgccatgctggcgtgcgcccggatcggtgcgattcactcggtggtgttcggcggtttctcgccggaagcactggcggggcgcatcatcgattgcagctccaaggtggtgatcacggccgacgaaggcctgcgtggcggtaaaaaaaccgcgctcaaggccaacgtcgaccgcgccctgaccaacccggaaaccagcagcgtgcagaaggtgatcgtctgcaagcgcaccggtggcgagatcgagtggaaccgtcaccgcgacatctggtatcacgcgctgcttgaagtggcgtccagcacctgcgcacccaaagagatgggcgcggaagaatcgctgtttatcctttacacctcgggctcgaccggcaaacccaaaggcgtgctgcacaccacggcgggctacctgctctacgccgcgctcacccacgagcgcgtgttcgactacaagccgggcgaaatctactggtgcacggccgatgttggctgggtcaccgggcacagttacatcgtctatggcccgctggccaatggcgcgaccacgctgctgtttgaaggtgtgccgaactacccggacatcactcgcgtgtcgaagatcatcgacaagcacaaggtcaacatcctctacaccgcgcccaccgcgattcgcgccatgatggctgaaggcaccaagtccgtcgaaggcgcggacggttccagcctgcgcctgttgggttcggtgggcgagccgatcaatccggaagcctggggctggtactacaacaccgtcggcaagcagaactgcccgattgtcgacacctggtggcagaccgaaaccggcggcatcctgatcagcccgctgccaggtgcaacagcgctgaaaccgggctcggccacacggccgttcttcggcgtgattccggcactggtggacaatctgggtaacctcatcgagggcgcggccgagggcaatctggtgattctcgattcctggccgggtcagtcgcgcaccctgtacggcgaccatgaccgttttgtcgacacctatttcaagaccttccggggcatgtatttcaccggtgacggtgcccgtcgcgatgaagacggctactactggatcaccgggcgcgtggacgatgtgctcaacgtatccggccaccggatgggcacggctgaaatcgagagcgcgatggttgcgcaccctaaagtcgcggaagccgccgtggtcggcgtgccgcacgatctgaaagggcagggcatttacgtctacgttaccctcaatgctggcgaagagccgagcgatgcgctgcgcaccgaactgcgcaactgggtgcgcaaggaaatcggcccgattgcctcgccggacttcatccagtgggcacccggcctgccgaaaacccgttcgggcaagatcatgcgccgcatcctgcgcaagatcgccaccgctgagtacgacgcgctgggcgatatctccaccctggccgatccaggcgtggtgcagcacctgatcgaaacgcacaagagcatgagcgcggcc

SEQ ID NO: 33397 - DNA, 1726 bp, Pseudomonas syringae
ttcgccgctctcgaacttcatccaaatatcgttgcagctgtcgtcgccactggctacgaagagccttcggccattcagcagcaatcgatcccgatcattcttgccggtcacgacatgattggtcaggcgcagaccggtacgggtaaaaccgccgcgttcgcactgcctatcctgcatcgcatcgatccgaccaagcgtgagccgcaagcactgattctggccccgacccgcgagctggcccttcaggttgccaccgcgttcgagacctacgccaaacaaatgccgggcgtgactgtcgttgcagtctacggcggcgcgccgatgggccctcagctcaaggccatccgcaacggcgcacagatcgttgtcgccacaccgggccgtctctgcgaccacctgcgtcgtgacgagaaagtcctggcgaccgtgaaccacctggttctcgacgaagcggacgaaatgctcaagctgggcttcatggacgacctcgaagtcatcttcaaggccatgcctgaaacccgccagaccgtactgttctcggccactctgccacagtcgatccgtgccatcgccgaacgccatctgcgcgatccgaagcacgtgaaaatccagaccaagacccagaccgttaccgcgatcgagcaggctcacctgctggttcacgctgaccagaaaacctcggctgtattgagcctgctggaagttgaagacttcgacgccctgatcatgttcgtccgcaccaagcaggcgaccctggacctggcaagcgcccttgaagccaaaggctacaaggccgctgcactgaacggcgacatcgcccagaaccagcgcgagcgcgttatcgaatccctcaaggatggccgtctggacatcgttgtggcgaccgacgttgctgcccgtggtcttgacgttccacgtatcacccacgttttcaacgtggacatgccttacgatccagagtcctacgttcaccgtatcggccgtaccggccgtgcaggtcgcgaaggccgtgcgttgctgctggtcactcctcgcgagcgtcgcatgctgcaagtgatcgagcgtgtgaccggtcagaaggttgcggaagtccgcctgccggatgcccaggccgttctggatgcccgcatcaagaaactgaccaacagcctggcgccgctggttgctgatgccgaatcgactcatggcgatctgctggatcgtctgactgccgacatcggttgcagcccgcgtgccctcgctgctgcactgctgcgcaaggctaccaacggtcaggctctgacccttgcagccatcgagcgtgaccgtccgctggttccgaacaacgcccctcgcggtgatcgtccagagcgtagcggtagcagcgatcgtggtgaccgtggcgatcgtcctgagcgtgagcgtcgtgcgccggttccattggccgaaggtcgtgctcgttgccgtaccgcgctgggtgcgcgtgacggtatcgctgccaagaacctgctgggtgcaatccttaacgaaggcggcctggcccgcgaagcgatcggccgtatccaggtccgtgacagcttcagcctggtcgagctgccggaagatggccttgagcgtctgctgaccaaactcaaggacacccgtgttgcgggcaagcagctcaagctgcgtcgctatcgcgaagactgatctgcccttgagctgatcggccaataaaaaatccccgactggttcggggatttttttg

SEQ ID NO: 33398 - DNA, 738 bp, Pseudomonas syringae
atgtttgattactccgcgcacccggaactgctcaagggccgggtcattctggtcaccggcgcggctcgcggcatcggtgctgccgccgccagagcctatgctgcgcatggcgcgagtgtcgtgctgctgggccgaaccgaggccagccttgccgaggtcagtgaccagataaagagcgcaggtcagccgcaaccgctgatcattgcactaaatctggaaaacgccacggcgcagcagtaccgcgagctggcagcacgggtcgagcatgagttcggccgtcttgacggcttgctgcacaacgcatcgatcatcggtccgcgcacgccactggagcaattgcctgacgaagacttcatgcaagtcatgcacgtcaacgtcaacgccactttcatgctcacccgcgcattgctgccactgctcaagcgctcggaagacgcttcaatagccttcacttccagcagcgtcggccgcaagggacgcgcgaactggggcgcgtatggcgtctccaaattcgccaccgaagggctgatgcagaccctcgcagatgagcttgagggcgttacggccgtgcgcgccaacagcatcaacccaggcgcgacacgtaccggcatgcgagcgcaggcctaccccgatgaaaacccgctgaacaaccctgcccccgaagacatcatgccggtctacctgtacctgatgggccccgacagcacaggtatcaacggtcaggcgctgaatgcccag

SEQ ID NO: 33399 - DNA, 1674 bp, Pseudomonas syringae
gtgccgatcccgttgctgttgccgttgctggtcgacgaagtattgctggggcgcggcgacgctgccctcaacgtcatgaaccacctgctgcctgacagcttgcaaaaagctgtgggttacatcggcctgatgctcttgctgacgctggtgctgcgggtcggggcgctggtgttcaatgtgttgcaggcgcggctgtttgccgggctggccaaggatattgtctatcgcatccggctgcgtctgatcgagcgcctcaagcggatttccctgcgcgaatacgaaagcctgggcagcggcacagtcaccacgcatctggtgaccgacctggacacgctggacaagttcgtcggcgagaccctcagtcgcctgctggtgtctacgctgaccctggccggcacggcgggcatcctgatgtggatgcactggaagctggccctgctgatcatgctcttcaacccgttggtgattctgctcacggtgaagctgggcaagcgggtcaaacacctcaagaaactggaaaacgacagtacctcgcggttcactcaggcgctgagcgaaaccctggatgcgattcaggaggtcagggcaggcaaccggcagggctttttcctcgggcgtctgggcgcaaaagcgcaggaagttcgcgattacgcgatcaattcacagtggaaaagcgacgcttccgggcgggccagcgggctgctgttccagttcggcatcgacatctttcgcgcggcggcaatgctcaccgtgctgttctcggacctgtccatcgggcagatgctcgcggtcttcagttacctgtggttcatgatgacgccggttgagcaactgctgaacctgcaatacgcctattacgcggcgggcggggctctgacgcgcatcaacgaactgctcgcgcgtgccgacgagccgcactacgcgggcggcgcggaccctttcaaggggcgcgaaacggtcagtgtcgaggtgcgcggtctgagtttcggctatggcgaggatctggtgctggaccaactgaacctgagcattgcaccgggcgagaaggtcgccattgtcggtgccagtggtggcggcaagagcaccctggtgcagttgctgctgggcctgtacacggcccgtaccggagtcatccgctttggtggcgtcagtcagcaggatatcggtctggacacagtgcgtgagaacgtcgccgtggtcctgcagcacccggcactgttcaacgacactgtgcgcgccaacctgaccatgggccgtgactgcagcgacgaagcctgctggagggcgctggaggttgcgcaactggaatcggccattcgcgacctgccgcaaggcctgggcagcgtgctggggcgttccggtgtgcgcctgtctggcgggcagcgccagcgcctggccatcgcgcgcatggtgttgtccgatccgaaagtggtcatcctcgacgaagcgacctcggcgctggacgccgccaccgagttcaacctgcaccaggccctggcgcggtttctgcgcagccgcacaacgctgatcatcgcccatcgtctgtcagccgttaagcaggcggaccgggtgctggtgttcgacggcgggcgaatcgtcgaagacggcgaccatcagcaactgattgccgatggaggtctttacgccaagctgtacggacatctgcaacaaatc

SEQ ID NO: 33400 - DNA, 951 bp, Pseudomonas syringae
atgactcaagagtcgatcaatcagccgatcgtcgtagcggcgctatacaaattcgtgaccctcagcgattacgtagcctttcgtgagccactgctgcaggccatggtcgataacggcatcaagggcacgctgttgattgccgacgaaggcatcaacggcacagtgtccggcagccgcgaaggcatcgacggcctgatggcctggctcaagagcgatccgcgcctgatcgacatcgaccataaagagtcctactgcgacgagcagccgttctatcgcaccaaggtcaagctcaagaaagagatcgtgaccctgggtgtcgagggcgtcgaccccaacaagagcgtgggcacttatgtcgagcccaaagactggaacgacctgatcaccgaccctgaagtgctgctgatcgatacccgtaacgattacgaagtgtcgattggcacgttcgagggcgccatcgatccgaaaacgacgtctttccgtgagtttccggagtacatcaaggcgcatttcgacccggcggtgcacaagaaggtcgccatgttctgtaccggtggcattcgctgcgaaaaagcctcgagctatatgctcggcgaggggttcgaggaggtttatcacctcaagggcgggattctcaaatacctggaagaagtgcccgagcaggaaagtcagtggcgtggcgagtgtttcgtgtttgacaaccgggtcacggtacgccatgacctgaccgaaggtgactatgatcagtgccacgcctgccgcactccgatcagcgccgaagaccgcgccagcgagcattacgcgccaggcgtcagttgcccgcattgctgggactcgctgagcgagaaaacccgccgcagcgccatcgaccggcaaaagcagatcgaactggccaaggctcgcaatcagccccaccctatcgggcgcaactatcgcctaccctccgaggcc

SEQ ID NO: 33401 - DNA, 1224 bp, Pseudomonas syringae
atgagtgaaaaagacaagcaggacagccaggaaatcggacccgcaggcgaaaagctgcagaaggttctggcgcgcattggcgtgggttcacgccgtgacgtagaggcctggattacccagggccgtatcaaggtcaatggcaaggacgcgaccctcggtcagcgcgttgacctgcatgacgccatcagtgtcgatggtcgcgtcatcaagcgcgaagaagcggctgaaacagtccgtcgcgtcatcatgtacaacaagcccgatggcgaaatctgcacccgtgacgacccggaaggccgtccgaccgtgttcgatcgtctgccgcgtcctaaagaaggtcgctggatcaacatcggtcgtctcgacatcaacaccaccgggctgctgatgttcaccaccgacggtgaactcgccaaccgcctgatgcacccctcgttcgaaatggaccgtgaatacgcggttcgtgtgcgtggcgaagtcgatgacgacatgctgctgcgcctcaagaacggcgtgatcctcgaagacgggcctgcccgttttaccgacatcaagcaggcgccgggcggcgaaggcttcaaccactggtaccactgcgtggtgatggaaggccgtaaccgcgaagtacgtcgcctgtgggaatcccaggggctggtggtcagccgtctgaagcgtgtgcgttacgggccggtgttcctcaactccgacctgccgatgggccgctggcgcgaaatgagccagtacgaagtcgacattctgtctgccgaagtcggtctgcaacctgtggctcagccgcagatgaacgccaagaccaaggacaagatggagcgtctgcaacgtcaatcctcgcgcccgctgggcaaaggcgagcgcgtagttcgtacgctgcgtcctgcggctggcgctccggcgaccggcgatcgtacgccgcgtcagccgcagatcaccggcagcgagcgtgatcgtccgcgtggcggcgactctactcagcgtcctgtgcgcaaggactcgggcaagcccggttcgcgtgcaccgcgtccggctgacaacagccgtggcacaccggtcgccgagcgtccgagcgacatgaacaagcgtccggccaagcctgggcccaagcgtgtcggcatcaagctggtgaacgatgatgcgccgtcaggcaagcgtcgcggtccaccggcaggctcgggccagcgccctggcttcggtcgtcgcaagcctgag

SEQ ID NO: 33402 - DNA, 861 bp, Pseudomonas syringae
atgaatgttgacctgcattgccacagcaccgcctccgacggggcactctcgcccacggcgctggttgcccgtgctcatgaatacggcgtgcgcgtcctttcgctgaccgaccacgacaccctcgaagggcttgaagaggcccgtacagcggcgcattcacttggcatgcagctggttaacggggttgagctgtcctgcacctggggtggcgcgaccattcatgtactgggctacgggttcgacacccaggccccggcattgaccgaagccatcgcccgtctgcatgaaggacgctggctgcgcgctgaagaaatcagccgtaaattggcgatcaaaggtatgcctggcgcgctggaaggtgcccgggccatccagcaggcgctgggtgacagcggcaatgcgccggcgcgtccgcacttcgccgacttcatggtgcgcgccggtttcgtcaaggatcgcgccgaagcgtttcgcaaatggctgggggcgggcaagctgggcgacgtcaaacagcactggccgacgctggaagacaccgtggccacgttgcgtgcctcgggcgcatgggtcagcctcgcgcatccttcgcattatgactttacccgcagtaaacggcgtaaactggtcggcgatttcgtccaggccggtggccacgccatcgaagtggtcaatggcatgcaacctgccgatcaggtcggcaccctggccatccttgcccgcgagttcggtctgttggtttcggccggcagcgacttccacggtcccggcaactggggcgagatcggcacttaccgtccggtgcctgaggatctaccgcctttatggtgcagattcaaacatgaacagcctactgccgccgtc

SEQ ID NO: 33403 - DNA, 1188 bp, Pseudomonas syringae
atgctcggattgttcggtaccgccattggcgcaggtacgctgttcttgcccatcaacgcaggcatcggcggtttctggccactgctggctctcgcgctgctggcattcccgatgacgttttatgcacaccgtggcctgacccgcttcgtactgtccgggcgtgagggtgccgacatcacggaagtggtcgaacagcatttcggcaaaagcgccggggcaatgatcaccttgctgtacttcttcgcgatcttcccgatcctgttgatttacagcgtggccctcaccaataccgtgggcagctttcttgaacaccaattgcacatagcgccgccgccgcgtgccgtgctggcgttcttgctgatcatgggcctgctggcgctggttcgctgtggcgagcggttcatcgtcaaggccatgagcgtgatggtttatccgtttatcgtcgcgctgctgtttctggccatgtttctgattccacactggaccggcggtatcttgagcaccgcaaccaccttgcctgagccctcggcgtttttgtcgaccctttggctggcgattccggtgatggtgttttctttcaaccatgcgccgatcatctcggcttttgcggtcgatcagaaacgccagtacggcgagaatgccgaggtgcgcagttcgcagattctggcacgcgcccacgttttgatggtggtgatggtgctgttcttcgtgttcagctgcgtgctgaccctttcgcccgctgaactggctgaagccaaggcgcagaacatctcgatcctgtcttacctggccaaccacttcaacaacccgaccattgcattcgtcgcgccgctgattgcgtttgtggcgatttccaaatcgtttctcggccactacatcggcgccagcgagggcttgaaagggctggttctgaaatcgggacgtcgtccggcgcccaaggtactggaccgtatgaccgccgcgttcatgctggtggtgtgctggatagtggcaacgctcgacccaagtattctggggatgatcgagaacctgggcgggccagtgatttcggtgttgctgtttctgatgccgatgtatgcgatctacaaggtgccttccatgcgcaaatatgcaggtgcatggtccaactactttgtcattgccgcaggtctggtggctatttcggcgctgatcttctcgctgacgcgc

SEQ ID NO: 33404 - DNA, 612 bp, Pseudomonas syringae
atggttgacgccaaaagcggcgcgacacccctggaaggcaacggcaaacgcatcctgatggtttacggtacgccgaaagccatcagtttttgccacgcactgggcgacgcctacgcgcagactgcacggggcgaggggcacgtggtgcggatcatcaggctgggcgagctggacttcgaccccattctgcacaacggctacgatcagacccagaccctggagcctgacctgctcgaggcgcagcgccagattcactgggccgagcatctcgtgttcgtctatccggtctggtggggcggcttgccggccctgctgacgggtttcttcgaccgggtgttgacgcccggctttgcctccaaggcccacggccgcaagcagcacgccaacgaattgctcaggggtcggacggcagaactgctggtggcaatggacactccgccgcgctactttcgctggatctacggcgcaccggctcaccgacagatggtgcgcactatcttgagcttttgcggcatcaagaccacgcgcctgaccgagtttgccccgatacacagcgccaccgagcaacagcgtcaggagtggattgtgcaagcgcaggccttgggcaagcgc

SEQ ID NO: 33405 - DNA, 546 bp, Pseudomonas syringae
ttggtgacggtgctgctttccacgcggagcagcacctggttgtggattaaggtttatgtaccgatcttcgtcgaaatagatctttccttgcaggcttttcccttcaacctactacactgtactagccacccgggctctgatgacagggtctggttcacgccgaggaactgtatgaaatttcgctttcttctttggatgctgggccgaatgatggcccgcgccagtagagacaatcctgatttccagcagcagttggctggcaagaaccttacctttcagttgcagaccatagacggcaggattgcgcgccatttcgtggttcaggatcaacgcattcgcacagcgagcggtgtagtggcagagcctgcctttgccatcgcgtttcgtgacgcagcgttcggttttgccacacttcaggcaaaaaacaagcaattggcgttcatgaggggcgttcaggacaaggacattcagatcaagggcaacccggctctggtaatctggttccagggccttaccaagtacctcaagccgaaaaagaaagcagcc

SEQ ID NO: 33406 - DNA, 2064 bp, Pseudomonas syringae
gtgctggtgcatcgcatcgcctggctgatgcaggtcgagcaagcctccccgcattcggtcctgtcggtgacgttcaccaacaaggcagctgccgagatgcgccaccgcatcgagcagctcatgggcatcagccctgctggcatgtgggtaggcactttccacggcctggcgcaccgcctgttgcgggcgcactggcaggaagccgggctggtgcagaccttccagattctcgacagcgatgaccagcaacgtctggtcaagcgcgtgatgcgcgagctgggtctggacgagcaactctggcctgcgcgtcaggctcagtggttcatcaatggtcagaaagacgaaggcctgcgcccgaaacatattcaggccagcggcgatctgttcctgaccaccatgaaaagcgtttacgaagcctacgaggctgcctgccagcgtgcaggcgtcatcgacttctctgagttgctgctgcgcgcgctggacctgtggcgtgacaaccctggcttgctggcgcactaccagcgccgcttccgccacgtactggtggacgagtttcaagataccaacgccgtgcaatatgcctggctgcgcctgcttgctcagggtggcgacagcctgatggtggtcggcgacgacgatcagtccatctacggctggcgtggcgcgaagatcgagaacatccatcagtattccgatgatttcccggacaccgaagtgatccgcctggagcagaactaccgctccacggcgagcatcctcaaagccgccaacggtttgatcatcaataacagcgggcgtctgggcaaagagttgtggaccgacgtcggcgatggcgagctgatcaatctgtatgccgccttcaacgaacacgacgaagcgcgttacgtggtcgagaccatcgagagcgccctgaaaaccggcatctcacgcaacgacatcgccattctgtaccgttccaacgcccagtctagggtgctggaagaagccctgctgcgcgagcgtattccgtaccgcatctatggcgggcagcgctttttcgagcgcgccgagatcaagaacgcgatggcctatatgcgcctgctggaaggtcgcggcaacgatgccgcgctggagcgggtgatcaacgttccggcacgcggcatcggcgagaaaaccgtcgaagcgattcgcgagcacgcgcggcatgccgacgtgtcgatgtgggaagccatgcgcctgctggtcgccaacaagggcctgactggccgcgctgccggcgcgctgggcgggtttatcgagctgatcgagaacctgtcggccaaggtcatggaaatgccgctgcacctgatgactcagacagtcatcgagcagtccgggctgattacctatcacgaacaggaaaaaggcgagaaaggccaggcccgggtagaaaaccttgaggaactggtcagcgccgctcgggctttcgaaaatcacgagagcgacgaagaattgaccccgctggccgccttcctcggccatgcttcgctggaagctggcgacactcaggcgcaagagcatgaagacagcattcagttgatgacgttgcacagcgccaagggcctggaattcccgcatgtgtttctggtgggcatggaagaaggtctgttcccgcacaagatgagcctggaagaaccgggccgtcttgaagaagagcggcgtctggcctatgtcggcatcacccgtgccatgaaacagctggtgatgacctacgccgagacacgccgcctgtacggcagcgaaacctacaacaaggtttcgcgtttcgtccgcgagattccgcctgcgctgattcaggaagtccgtttgtccaacagcgtgagccgtcctttcggcggcactccgaagttcaacagcggcagcttgttcaacggcaccggcattccggaaaccgagttcgccatgggccagcgcgtgcagcatgcggtgttcggcgaaggcgtgatcctcaacttcgaaggcgctggcgcccaggcacgcgtgcaggtcaacttcgccgaaggcagcaagtggctgatgatgggctatgcgaagctggtggcgttg

SEQ ID NO: 33407 - DNA, 1338 bp, Pseudomonas syringae
atggacccttctcctagttttaacctgtcttcactctttgccgacttcggcatgattctctttgctctgttcctggtcctgctcaacggctttttcgttgcggcagagtttgccatggtcaaactgcgctcgaccaaggtcgaggccatcgccgacaagaacggctggcgcgggcacattctgcgcaaggtccacggccaactggacgcctatctctcggcctgccagctgggtatcaccctcgcctctctcggcctgggctgggtgggcgaaccggcgtttgcgcacctgctggagccactgctcgcagcaatgggcgtcgacaccccggaactgatcaagggcgtgtcgttctttaccgccttcttcatcatttcctacctgcacatcgtcatcggcgagctggcccccaagtcatgggcaatccgcaagccggagctgctgtcgctatggacggcggcaccgttgtactttttctactggctgatgtacccggccatctacctgctcaacgccagcgccaacgccattctgcgcatcgcaggccagggcgagcctggcccgcaccatgagcacagctacagccgcgatgaactgaaactgattctgcactccagccgtggtcaggacccaagcgatcagggcatgcgggtgctggcatctgctgtggaaatgggcgagctggaagtggtcgattgggccaactcccgcgaagacatggtctcgctggacttcaacgcgccgctcaaggaaattctggccttgtttcgtcgccacaaattcagccgttatccgctgtacgacgccgaacgtggcgagttcgtcgggctgttgcacatcaaggacttgctgctggagctggccgcgctggatcatattcccgaatccttcaacctggctgaactgacccgcccgctggagcgcgtgtcgcggcacatgccgctgtcgcaattgctggagcagttccgcaagggcggcgcgcatttcgccgtggtcgaagaagccgacggcaagatcgtcggctacctgaccatggaagacgtactcgaagtgctggtcggcgatattcaggacgaacaccgcaaggtggagcgcggcattctcgcttaccagccgggcaagctgttggtgcgtggcgatacgccgctgttcaagatcgagcgtctgctgggcatcgacctggatcacatcgaagcggaaaccctggcaggtctgatctacgaaaccctcaagcgcgtgccggaagaagaagagcagatggaagtcgagggcctgcgcatcatcatcaaaaagatgaaaggcccgaaaatcgttttggctaaagtgctgaagctggat

SEQ ID NO: 33408 - DNA, 399 bp, Pseudomonas syringae
atgatcgagctcgaacaagaagatccaactccgcaaggcgaccttgcgctgcaaattactgctcttccccgtgaaaccaacggcttcggcgatatcttcggcggctggctggtgtctcagatggacctggccgggactgcaatggccagcaaagtggccggcggtcgcgtggcgaccgtggctatcgatcgcatggcgtttctggtgccggtcgcagtcggcgagcagctttccttttatacgcgcaccctggaagtggggcgcacctcgatcaagatgatggtcgaagtgtggagcgatgacccggttaccagcgagtggcgtaaggtaacagaggctgcgttcgtgttcgtggccatagattccagcggccggacacgctcggttcctgcacgacgg

SEQ ID NO: 33409 - DNA, 1755 bp, Pseudomonas syringae
atgcgtgatgtgaatgatcagcgcttcaccacccacgatggcgtggagctgttctaccgccactggcctgttgcacacccgacgcccggtgcgccacggcaagcggtgttgctgtttcatcgcggccacgagcattccgggcgaattgcgcatctggttgatgaactggacctgccaggctttgattttttcgcctgggatgcccgcggtcacggccagtcgcccggggcccgtggtgacagcccgagctttgcgaccagcgttcgcgacgtgcagaccttcgtcgatcacctgcgcgtcacgtttgatattgccgaagagaacatggcggtgatcgcgcaaagcgtaggcgccgtcattgcagcgacatgggcgcacgactacgcaccgaagatccgcgcactggtcctcgcctcccccgccttcaaggtcaagctgtacgtacctttcgcccgcacggggctggcgctgctgcgcaggttcaagggcaatttcttcgtcaacagctacgtcaaggcgcgcttcctgagccacgatccgcaacgtatcgcgtcctacgacagcgacccgctgatcaccaaggccatttcagtgaatgtactgctgggcctgtatgaagccgccgaccgtgtggttgccgatgcccaggcgatccagatcccgacccaattgctgatttccggctcggatttcgtcgtgcatcgcgcgccgcaggagcgttttttcgaacaactgggcagcttgcgcaaggagaaacacatcctgccagggttcttccacgacacgttgggcgagcgcgaccgtcacttggcgctgagccgcgcgcggcgctttgttttgcagagttttgaaacgccgatgcaccgcccgtcgttgctggacgctgaccggctgggcgcaacctgtgcggagtccgaagagctggccgcgccgttgccgcacaattcgttgcgcgacctgtactggcgcatgacccacgccagcatgcgccttggcagcaagttatccacaggggtgaaactgggtttcgacactggtttcgattctggcagcacgcttgattacgtctatcgcaaccgacccgccggcaaaggcgcgctgggtcgcatgatcgacaagaactacctgcaatcgatcggctggcgtggcattcgccaacgcaagctgcatgccgaagaactgctgcgcctggccatggcgcatttgcgcaatcagggcaaaccggtacgcatcgtggacatcgccgccgggcacgggcgctacattctggagtcgttgcggggcgtagagccgctgccggaatccattctgctgcgcgactacagcgacatcaatgtgcgcgacggcagcctgctgatagagcagaaagatctggaagacatcgcgcgcttcgtcaagggcgatgcctttgaccgcaacgacctggcgacgctggaccccaaaccgacgctggcggtggtgtcggggctgtacgagttgttttccagcaaccagatggtcggcgattcgctggccgggctggcggcagccgtcgaaccgggcggttatctggtgtacaccgggcagccgtggcacccgcaactggagctgatcgcccgcgccctgaccagccatcgcgaaggccaggcctgggtaatgcgccgtcgcagtcagtcagagatggaccaactggtggaagccgcaggctttcgcaagatcacccagcgtgtggatgaatgggggattttcactgtgtccctcgcgcagcgcatccag

SEQ ID NO: 33410 - DNA, 1420 bp, Pseudomonas syringae
gtgcacattggtgttcctctcgaaacgcaagcgggcgaaaccagggtggctgctaccccggaaactatcaaaaagctgatcagccaaggacacaggatcaccgtgcagcgcggcgccggtattcaggccagcgttccagacagcgcttttgaggccgcaggcgcggtcataggtgaggcgagcgaagcgtttgcaggtgagctgatcctcaaggtcgtcgcgccgaacgataacgagttagcactgataaacagcggctcggtggtcatcggcatgctcaacccgttcaataacgagctgatcggcaagatggccgatcgcggcgtcaccgctttcgccctggaagccgcgccacgcacctcccgcgcccagagcctcgatgtgctgtcttcgcaagccaacattgccggctacaaagccgtgctgctcgccgcgcaccactacccgcgcttcatgccgatgctgatgaccgcagctggcaccgtcaaagcggcacgcgtgctgatactcggcgcaggtgtcgcaggcctgcaggccattgctactgccaaacggctgggtgcagtggtggaaggctccgacgtgaggccggcagtcaaagagcagatcgaatcgctcggcgcaaaattcattgatgtgccgtacgagaccgatgaagagcgcgagtgcgccgaaggggtcggcggttatgcccggccgatgcccgccagctggatgcagcgccaggccgcagccgttcacgagcgggccaggctggcggacatcattattactaccgccctgatccccggccgcaaggcaccggtgctgctcagcgccgaaaccgtggcgcagatgaagcccggctcggtagtgatcgacctggcggctgcacaaggcggcaattgcccgctgacggtggcggatgaggttgtcgtcgcgcacggcgtcaccctagtcgggcacaccaacctgcccgcactggtcgccgccgatgcgtccgcgctgtacgcccgcaacctgctggacttcatgaagctgctgttcgacaaagacggcacactctcgatcaaccttgaagacgacatcgtcgccgcgtgcctgatgtgccgcgacggtcaagtcgtacgcaaaaacggctgaggacacacccatggatgagctgatctcccccggcgtctataacctgatcatcttcgtgctggccatctatgtcggctaccacgtggtctggaacgtcacgcctgcgctgcacacgcccttgatggccgttaccaacgcgatctctgccatcgtgattgtcggcgccatgctcgccgctgccctcactgtcacgccgctgggcaagaccatgggcacgctggccgtcgcgctggctgcagtgaatgtgtttggcggttttctggtcacgcggcgaatgctggagatgttcaggaaaaag

SEQ ID NO: 33411 - DNA, 1407 bp, Pseudomonas syringae
atgaccgtcggcatgagcggcttcacccgcgcaggcgaagccaaggccgtgcctcatgcgctggccgagcgcgccaaggtgacacccctgaaaatcagcctgatgacgggtgccagcctgggcaatgacctggacaagcaactgaccgaatccggcgtgctgtcccggcgcatgccgtttcaggtcgacagcactctgcgcaaggcgatcaacaacggcacggtgatgttcatcgaccagcatttgtccgataccgtcgagttgttgcgcaatcggcagatcaaggccgtggacctggcggtgatcgagtgtgtggcaattaccgaggaaggccacctggtgctgagcacctccgttggcaactcggccagtttcgctattctggccaaacaggtcatcgtggaaatcaacctgtcccagcctctggagctggaaggcctgcatgacatctatatacccagctaccggccgacgcgcctgccgatcccggtgctggaagccgattcgcgcatcggcagccatgcggtgaagatcgacccggcgaagatcgtcggcatcgttatcagcaaccagcctgactcgccttccaccgtcacgccacctgacgcagacactcaggccatcgccaaccacctggtggagttcttcaagaaggaggtgcgcgaagaccggctcaccgacaaactgatgcccctgcaggcgggcattggcaacatcgccaacgcagtcatgcatggcctgctggaatcgccattcactgacctgaccatgtattccgaagtattgcaggactcgacattcgacctgttcgacgccggcaaactgacatttgcttccggcagctccatgaccctgtcagcggccaaacacgccgaagtatttgccgacttcaaccgctataaatccaggctggtgctgcgcccgcaggaaatatccaatcaccccgaagtcatccggcgcctggggattatcgggatcaataccgcgctggagttcgatctgtacggcaacgtcaactccacccacatctgtggcacgcggatgatgaacggcattggcggctctggggatttttcgcgcaacgcgcacctggcgatattcgtcaccaagtcgattgccaagggcggtgccatttccagcgttgtgccgatggtcagccatgtcgaccacaccgagcatgacgtcgacattctggtgaccgagcaggggctggccgatttacgcgggctggcacctcgcgagcgggcgcgggtgatcatcgataactgcgtacatgctgattatcgcgatgcgttgaacgcctatttcgacgccgcctgcgcgctgggcgggcatacgccgcacatccttcgggaagcactgagttggcacatcaacctggaagaaaacgggcgcatgctgccgacc

SEQ ID NO: 33412 - DNA, 243 bp, Pseudomonas syringae
atgggtatcattggaaccatctttatcggcctgatcgttggtctgttggctcgctttctgaagccgggcgatgacagcatgggctggatcatgaccattgtgctgggtatcgccggttcgctcgcggcaacctatggtggccaggcgttgggtatctatcacgcaggcgagggtgcaggtttcctcggtgcactggtcggtgcaatcatcctgctggttatctacggcatgatcaaaaagaaa

SEQ ID NO: 33413 - DNA, 870 bp, Pseudomonas syringae
atgtcaaaagtccgttttctcggcaaaaccattggttacgtcggttggtcgctgttctggctgctgatctgggacgtgatcgtcaccgtcgatttcatgctgtttctcgatcgcaagatcaacctgccatcgttgccgctgaccttgctcggttcggcgctggtggtgctgaccagctttcgcaattccagcgcttacaatcgctggtgggaggcgcgcacgctgtggggcgcgatggtcaacagctcacgcagcttcgcccgtcaggttctgacgctggtcgaagacgacaacggcatcaacccggtcaaggccatcttgttgcgtcgccatgtggcctacgtgaagtgcctgtccgcgcacttgaagggcgttgaaccgggcgacgagattcagatgctgatcccccgcgaggaatttgaacgccgtcgcgataccaacaacttccccaacgacctgctcaacacctcggctgcactgctggccaaggagtatcaggcagggcgtctggacagtattcgtctggcgcgtctggagtcgaccatggtcgatctctccaactgccaaggcggcatggagcggatcgccaacacgcctttgccttatccgtatgtggccttcccgaggctgttcatcacgctgttctgcctgatcgtcccgattggtctggtggaaaccctgggctggttcacgccgctggcctccaccgtggtgggcttcatgctgctggccatcgagaagatcggcaccgacctgcagagcccgttccgtgccagtgagcacgtgattcagatgaatgcgttgtgcgaaaacatcgagcgcaatctggattcgatgctcaggggcgcgcaggaagaaagcaaagcgtcg

SEQ ID NO: 33414 - DNA, 1806 bp, Pseudomonas syringae
atgaccaagaagatattcgtaaccgacaccatcctgcgcgacgctcaccaatcgctgctggcgacccgcatgcgcaccgaggacatgctgccaatctgcgacaagctcgacaaggtcggctattggtcgctggaaatgtggggtggcgcgacgtttgacgcctgcgtgcgttttctcaaggaagacccttgggagcgtctgcgtcagttgcgtgcggctttgcccaatacccgtctgcaaatgcttctacgcggtcagaacctgctgggctatcggcattacagcgatgacgtggtcaaggcgttcgtggccaaggcggcggtgaatggcatcgacgtgttccgtattttcgatgccatgaacgatgtgcgtaacctgcgcgttgccatcgaagcggtgaaggcggcaggcaagcatgcgcagggtaccatcgcctacaccaccagcccggtgcacaccatcgaagcgttcgtcgcgcaggcccggcaaatggaggcgatgggctgcgactcggtggcgatcaaggacatggccggtctgttgacgccgtatgccaccggcgagctggtcagggcgctgaaagccgagcagtcgttgccggtgttcattcactcccatgacacggcgggtctggctgcgatgtgtcagctcaaggccatcgaaagcggcgcggaccatatcgacaccgccatctccagcttcgcctggggcaccagccatccaggcaccgagtcgatggttgcggcgctcaagggcagcgagttcgacaccgggctggacctggagctgttgcaggaaatcggtttgtatttctacgcagtgcgtaagaaataccaccagttcgagagcgaattcacggcagtcgatacccgcgtgcaggtcaatcaggtgcctggcgggatgatttccaacctcgccaaccagctcaaggagcagggcgcgctcaatcgcatgagcgaagtactggcggaaatcccgcgcgtgcgcaaagacctgggttatccaccgctggtcacaccgacttcacagattgtcggcacccaggcgtttttcaacgtgctggctggcgagcgttacaagaccatcaccaatgaggtgaagctttacctgcaaggcgggtatggcaaagcgccggggcaagtggatgaaaaactgcgtcggcaggcgattggcagcgaggacctgatcgatgttcgtccggccgacctgctcaagccggagatgaccaagctgcgtgctgacattggcgcactggccaaatccgaagaggacgtgctgacctttgccatgtttccggacattggccgcaagtttcttgaagagcgcgccgccgggaccctgacgccggaagtgttgctgccgatccccgaagccggaagcgtggccaaagcaggcggcgagggtgtgccgaccgagttcgtgattgatgtgcatggcgagacctaccgggtggacatcaccggcgtgggcgtcaaggccgagggcaagcgccacttctacctgaccatcgacggcatgccggaagaagtggtgttcgagccgctcaacgaatttgtcggcggcggcgcgagcaaacgccagcaggccagcgcgccgggccacgtcagtaccaccatgccgggcaacatcgtcgatgtgctggtcaaggaaggcgatgtggtgaaggccggtcaggccgtgctgattactgaagcgatgaagatggaaaccgaagttcaggcatccattgccggcaaggtcgtggcgatccacgttgccaagggcgaccgcgtcaacccgggcgagatactggtcgagatcgaaggc

SEQ ID NO: 33415 - DNA, 1080 bp, Pseudomonas syringae
atgggcgacaagaccgaagcgcggcgcagcatgatcaaagccggtgtgccggtaacgccgggtactgaaggcaatgtggcagatatcgaagaagcgctggtcgaaggcgagcgtatcggttatccggtgatgctcaaggccacttccggtggtggggggcgcggtatccgccgttgcaacagccgccaagagctggagcaggctttccccagggtgatttccgaggcgaccaaagcctttggctcggcagaagtctttctggaaaagtgcatcgttaaccccaagcacatcgaagcgcagattctcggcgacagcttcggcaacgtggtgcacctgttcgagcgtgactgttccattcagcgccgtaaccagaagctgatcgagatcgctcccagcccgcaactgacccctgagcagcgcgcctatatcggcgatctgtcggtgcgtgcggccaaggctgtcggttacgagaacgcgggtaccgtggagtttctgctcgccgagggcgaggtgtacttcatggagatgaacacccgtgtacaggtcgagcacaccatcaccgaagaaatcaccggcatcgacattgttcgcgagcagatcagcatcgcgtccggcctgccgttgtcggtcaagcaggaagacatcattcaccgcggttttgccctgcagtttcgaatcaacgcagaagacccgaaaaacaacttcctgcccagcttcggcaagatcacccggtattacgcccccggcgggcctggcgtgcgcaccgacacggcgatttacaccggctacacgattccgccgtactacgactccatgtgcctgaagctgatcgtctgggcattgagctgggaagaggcgatggaccgcggcctgcgcgcgctggatgacatgcgcctgcaaggggtgaagaccacggctgcctattaccaggaaattctgcgcaacccggagtttcgcagcggtgagttcaataccagctttgtcgaaagccaccctgagctgaccaattactcgatcaagcgcaaacccgaagagctggccctggccatcgctgccgccattgccgcacatgcaggctta

SEQ ID NO: 33416 - DNA, 948 bp, Pseudomonas syringae
atgaacgccctgctcacccgcctggctttggtcatgttgttatgcagcccgatggcgcacgccgcctaccccgtcactgtgcaaagctgcgaccgctcggtgaccttcacggctgcgccgcagcgcgccgtcagcaacgacgtgaacctgactaaaatgatggttgccctgggtttgcaatcgcacatggtcggctacagcggcatcaccggctggaacaaacccgaccaggcactgttgcatgaccttggcaacctgccggagctggccagcaaatacccgtcgctggaaacactgctcaatgccaatgccgacttctattttgccggctggaattacggcatgcgcgtgggcggcgacgtcacgccgcagagcctcgcgccattgggtattcaggcctatgaactgaccgagtcctgcgcgcagatcatgcctcgcgctgaagcgacactggcggatgtctacaacgacctgctcaatctaggccggatattcgacgtgcagacccgggcagaaacactggttgcgcagatgcgccgcagcgtgagtgacgtccaggcaaacgtggcaggtaaaacatcgcccagggtttttctgtatgacagcggcgaagaccgacccatgaccgccggacgtctggctatccctcaggcactgatcagcgcggctggcgggcacaatatcatggcggacgtggcggccagctggacccacgtcaactgggagtcggttgtgcaaggcaaccccgaggtgatcgtgatcgtcgactacggcgaggtcagcgctgcgcagaaacagcacttccttgaaagcaacccggcgctgcaatctgtcgatgcgatccgcaaccgacgctatgtcgtgctgccttacgtggcggtaacgccagggctcgacaacgtctcggccatcgagacgcttgcagcggcatttcatgacttgaagcaa

SEQ ID NO: 33417 - DNA, 1056 bp, Pseudomonas syringae
atgagcgccagcaccaccgccactttgcgtcacgactggactttagccgaggtcagggcgctgtttgtacagccattcaatgacctgctgtttcaggcgcaaacgttgcaccgcgctcacttcgatgccaaccgcgtccaggtttctaccctgctgtcgatcaagaccggtgcctgcccggaagactgcaagtactgcccgcagtccggtcactacaacaccggccttgagaaagaaaagctgcttgaagtgcagaaggtcctcgaagaagctgcgcgcgccaaatccatcggttcgacccgcttttgcatgggcgcggcctggaagcatccttccgccaaggacatgccttatgtactggagatggtcaaaggtgtgaaagccatgggcctggaaacctgcatgaccctggggcgtctcgatcaggaacagaccgaagcgctggccaccgccgggctggattactacaaccacaatctggacacctcgccggagttctacggcagcatcatcaccacccgcacctatggcgagcgcctgcaaacgctggcctatgtgcgcgatgccggcatgaaaatctgctccggcggcattctgggcatgggcgagtcgctcgacgaccgcgccgggctgctgattcaactggcaaacctgccagagcacccggaatcggtgcccatcaacatgctggtcaaggtggccggtacgccgctggaaaacgccgaagacgtggacccgttcgacttcatccgcatgctggcggtcgcgcgtattctgatgccgcaatcccacgtgcgtctgtccgccgggcgcgaagcgatgaacgagcaaatgcaggcgctggcgttcttcgccggtgccaactcgattttctacggcgacaagctgctgaccaccgccaacccgcaagccgacaaggacatgctgttgttctcgcgcctgggtatcaagcctgaagcgggcgaaggccatgccgacgaagtgcatcaggccgccatcgaacaggcgctggtcgaacagcaaagcagcgccatgttctacgacgccgcctctgcc

SEQ ID NO: 33418 - DNA, 1047 bp, Pseudomonas syringae
atgggcctggccaaccatcccgaagtgatcgcggcctggcaggcaggtgccgagcgctggggcgtgggcggcggggcatcgcatctggtgatcggccacagcacgccgcaccatgaactggaagaagcgttggccgaattgaccggacgtccgcgagcgctgttgttctccaacggttacatggccaacctcggtgcggtcacagccctggtcgggcagggcgacacggtgctggaagaccgcctcaatcacgcttcgctgctggacgccggtttgctcagcggcgcacgcttttcccgctatctgcacaacgacgccggcagtttgaacgcgcgtctggaaaaagccgtgggcgatacgctggtggtgacagacggcgtgttcagcatggacggcgatatcgctgacttgcccgcgctggcgcaggctgccaaggccaagggcgcctggctgatggtcgacgatgcccatggcttcgggccgctgggtgccaatggcgcaggtatcgtcgagcatttcggcctgagcatggaggatgtgccggtgttggtcggcaccctcggcaaatcgttcggcacctccggggcattcgtggcgggcagcgaagaattgatcgaaaccctgatccagttcgcccgtccgtacatctacaccaccagccagccacctgcgctggcctgcgccacgctgaaaagcctgcaattgttgcgcagcgagcattggcgtcgtgagcatctggcgagtttgatcggccagtttcgtcgcggcgccgagcagctcggtctgcaattgatggacagcttcacgccgatccagccgatcatgatcggcgatgccgggcgcgcattgcgtctgtcgcagttgctccgtgagcgcggcttgctggtgacggcgattcgtccgccgaccgtgcctgcgggcagcgctcgtttacgcgtgacgttgtctgctgcgcacagcgaggctgacgtgcagctattattggaagctctggagcagtgctacccgctgctggatgcaagtgaatccacggagcccgtccatgcg

SEQ ID NO: 33419 - DNA, 1803 bp, Pseudomonas syringae
atgcctgactacaaggcccccttgcgtgatattcgtttcgtccgtgacgagctgctcggttacgaagcgcactatcagagtctgccagcctgtcacgacgccactccggacatggtcgacgccattcttgaagagggtgccaagttctgcgagcaggtgcttgcgccgctgaaccgtgttggcgataccgagggttgcacctggagcgagtcgggcgtgaagacgccgtccggtttcaagcaagcctacaagcagttcgtcgaaggtggctggccgagccttgcgcatgacgtcgcgcacggcggtcagggcttgcctgagtcgctgggcctggcagtcagcgagatggtcggcgaagccaactggtcgtggggcatgtacccaggcctgtcgcatggtgcgatgaacaccatctccgagcacggcacgcccgagcagcaggacgcgtacctgaccaagctggtctccggcgaatggaccggcaccatgtgcctgaccgaatcccactgcggtaccgacctgggcatgttgcgcaccaaggccgaacctcaggctgacggcacctacaaggtgaccggcaccaagatcttcatttctgctggcgaacacgacatggccgataacatcgtccacatcgtgctggcccgcctgccggatgcaccggctggcaccaaaggcatttcgctgttcatcgtgcccaagttcctctcggctgccgacggcggtgtgggcgagcgcaacgcggtgaactgcggctcgatcgaacacaagatgggcattcacggcaacgccacgtgcgtgatgaacttcgacggcgctaccggctacctgatcggcccgccgaacaagggcctgaactgcatgttcacgttcatgaacacagcgcgtctgggcactgcactgcaaggtctggcgcatgccgaggtcgcgtttcagggcggtctgaaatacgcccgggaccgtctgcagatgcgttcgctgactggccctaaggcgccggaaaaagcagctgacccgatcatcgttcaccctgacgtgcgccgtatgctgctgaccatgaaggccttcgctgaaggcactcgggccatggtgtacttcaccgccaaacaggtcgatatcgtcaagtacagcgaagacccggagcagaagaagtccgccgacgcgctgctggcgttcatgacaccgattgccaaggctttcatgaccgaagtgggttttgaagctgccaaccacggcgtgcagatctacggcggtcatggctttatcgccgagtggggcatggagcagaacgttcgcgacagccgcatttcgatgctgtacgaaggcaccaccggtatccaggccctcgacctgctgggccgtaaagtgctgatgacccagggtgaagcgttgaagggcttcaccaagattgtccacaagttctgccagagcaatgaaggtaacgaaggcgttcaggaattcgttacaccattggctgcattgaacaaggaatggggcgagctgaccctgaaagtcggcatggccgcgattaaggaccgtgaagaagtcggtgctgcttcggtggattacatcatgtattccggttatgcctgcctggcttatttctgggccgacatggcgcgtctggctgctgaaaaactggcagccggtacggctgacgaagcgttttaccgtgccaagatccagacggcgcgcttctacttccagcgcatcctgccgcgcacccgcacccacgttgccgccatcctgtcgggcgctggcaacctgatggacatgaaagaagaggacttcggcctggcttac

SEQ ID NO: 33420 - DNA, 1662 bp, Pseudomonas syringae
atgcagaccccggcgggtttgcgtctgtggttgttttccgatccgtatctgcgcgtatcgcaactgttgatcggtgaacgtgacggcagcaccgccgtggacctggaaaaactcgacagcctttccagggtcgcggtgcgtatgccaagcgctactgccgattacctgcgcagcaattttccgcacctgaacctgcaaggggtgccgctggagcgtcaggcgctgcaattgctgctcagccagcaggcacgctatgccgtggtggatgaagcacaactcagtcgcttgctgcgtgagccggagtttgccgggctggcggtggtcggcgataccggcctgccacaactgttgcgtgtggcgtcacgccgcgacgcgccagagctggcggcgatcgtcagcgaagccttgcgggcggttcctgccaaggagctggagcaactgcatgcgcgctggatgccgctgaccccgtcgcacttcagtgaatcgacgaagctctggaaaaacctgtgcattttactgttggtgatgctgctggcctgtttcgccatcgtgatctggcagcgccgtcagcagcaggcgctggagcaggaactgctggccgggcgtgaacatctggcccgtcgcgttgcaagcgaagaggcgctgcgactggcacaattctccattgatcagagcaccgtcggtattctctgggtcaattgggacagtcgcgtgcgctatgccaaccgggcggtggaatccatgttgggctatgcgccggggcaagtggtcgagcgtccgctgatcgacttcgagcccgacctgcacatggaccgctggcttaatctgtggaagaacgcacgctccagtgaggacagtgcgcaggtgttcgagacccactgcctgcgcgccgatggcagtcttctgcctgccgatgtctcgctgagcttcctgcgttttcgtgatgcggaatacctggtggtgtttctcagtgatgtcagcgaacgacgccgcgctcacgatcagttgcgtgaactgtcggcgcacctggaaagcgtgcgtgaagaagagaaggcgcgtattgccagggaagttcatgacgagctgggtcagatgctgaccgtcttgaagctggaaacatccatgtgcgagctggcgtatgccgatcttgacccaggcttgagcgaacgtctggacagcatgaagcgccttatttctcaattgtttcaactggtgcgagacgtcgccactgcattgcggccaccgattctcgacgctggcatcgcttccgctatcgagtggcaagcgcgccgtttcgaggcgcgtacgcagattccttgtctggtgcaggtgccggacaacctcccggcgcttagtgatgccagggccacgggcatgttccggattcttcaggaggcgctgaccaacgtcatgcgccacgctcaggcgcacacggtggagatcagcctgacgctgcaagacggcatgatgtgcatgaccgtcgccgatgacggtcaggggtttgtcgtcgagtcgggcagggcggtttcattcggtctggtcgggatgcgcgagcgggtgttgatgctgggcggcagactggaactggacagcgaggccggtgaaggcacaaccttgcgcgcctacattccgttggaccccaccgcacaggagcgaagccag

SEQ ID NO: 33421 - DNA, 1209 bp, Pseudomonas syringae
atgaagtcggttgaagaacagctggcgctgatcaagcgcggtgcagatgaactcctggtcgaggctgaactggtcgaaaagctcaagcgtggccagccgctgcgtatcaaggctggtttcgacccgacagcgcccgatctgcacctgggtcacacggtccttataaacaagctgcgccagtttcaggatctggggcatcaggtcatcttcctgatcggtgacttcaccggcatgatcggcgacccgagcggcaagagcgccacccgtccgccgctcacccgcgagcaggttctcgattatgccgagacctacaagtctcaggttttcaagattctcgatccggccaaaaccgaggtggcgttcaactcgacgtggatggacaaactcagcccggccgatttcattcgtctgtcctcgcagtacacggttgcgcgaatgcttgagcgcgatgatttcgacaagcgctataaaagcaaccagtccattgccatccatgagttcctttacccgttggtgcagggctatgactccgtggccttgaaggctgacgtcgaactgggcggcaccgatcagaaattcaatctgctgatggggcgtgagcttcagcgcgcctatgggcaggagccgcaatgcatcctgaccatgccattgctggaaggtctggatggcgtcaagaagatgtccaagtcgctcggcaactatgtcggcattcaggaagcgccgggcatcatgtacagcaagctggtgtctattcctgattcgctgatgtggcgctacttcgaactgctgagcttccgctcgatggaagagatcaacgggttgagggctgactgcgaagcgggtgccaatccgcgtgatatcaagatcaagctggctgaagagctggttgcgcgcttccatggtgaagaggcagcagccacagcgcatcgttctgcgggcaaccgtatgaaggaaggcgagctgccggacgatctcccggagatatccgtggctgctattgaggatatgccgatctcggccgtccttaataaagctggcctggtaaagaacgctgctgttgcgcgtgatctgctggcgtccggcggtgtgcgtatagatggtgaagtcgtggaccgcagctttatagtcaagctgggtgcgacgcatgtctgtcaggctggcaagaaggcttttgggcgcattactctggtttctgacgaaagttcaaaa

SEQ ID NO: 33422 - DNA, 531 bp, Pseudomonas syringae
gtggctaagcgttggtacgtagtgcatgcatactcgggttacgagaagcatgtcatgcgctcgttggtcgagcgtgtgaagctggcaggcatggaagatggcttcggcgaaattctggttcccactgaagaagtggttgaaatgcgtaatggccagaaacgcaaaagcgaacgcaagttcttccctggttatgtgctggttcagatggacatgaatgaaggtacttggcatttggtcaaggatacccctcgtgtcatgggcttcatcggtggtactgctgataagcctgctccgatcaccgacaaagaagcagaagcgattctgcgtcgcgttgctgacggtagcgacaagccgaagccgaagacgctgttcgagccgggtgaggttgttcgtgtcactgacggtccgttcgccgatttcaacggcaccgttgaagaagttaactacgaaaagagccgtatccaagttgcggtgctcattttcggacgctctaccccggtagagttagagttcagtcaggtcgagaaggcc

SEQ ID NO: 33423 - DNA, 498 bp, Pseudomonas syringae
gtggcaattaaactcgaagacaagaaggccatcgtcgctgaagtcaacgaggctgccaaagctggtctgtccgctgtcgtggctgatgcccgtggtgtgacagtcggcgctatgaccggactccgtaaagaggctcgtgaagctggcgtttacgtacgcgttgtacgtaacaccctactcaagcgcgctgttgctgacactgaattcagtgtcctcaacgacgtgttcaccggcccgaccttgatcgcgttctccaacgaacatcctggcgctgctgcccggttgttcaaggaattcgcgaaaggtcaggacaagttcgagatcaaggcagctgcgttcgagggcaagttcctcgcagctaatcagatcgacgtactggcaaccttgccgacccgtaacgaagcaatttctcagctgatgagcgtgattcaaggcgctaccagcaaattggctcgtactctggcggctgttcgcgaccaaaaagaagcagctgcagct

SEQ ID NO: 33424 - DNA, 4071 bp, Pseudomonas syringae
atggcttactcatatactgagaaaaaacgtatccgcaaggactttagcaagttgccggacgtaatggatgtgccgtatctcttggccatccagctggattcgtatcgcgaattcctgcaggcgggagcgaccaaagatcagttccgcgacgtcggtctgcatgcagccttcaaatccgttttcccgatcatcagctactccggcaatgctgcgctggagtatgtaggttatcgcttgggcgaaccggcatttgatgtcaaggaatgcgtgctgcgcggtgtgacttacgcagtacctctgcgagtcaaggtccgtctgatcattttcgacaaagaatcgtcgaacaaagcgatcaaggacatcaaagagcaagaagtctacatgggtgaaatccccctgatgactgaaaacggtacctttgtaatcaacggcaccgagcgcgttatcgtgtctcagcttcaccgctcgccaggcgtattcttcgaccacgaccgtggcaagacgcacagctccggtaagctgctttattccgcgcgtatcattccttaccgtggttcgtggctggacttcgagttcgatccgaaagactgcgtattcgtccgtatcgaccgtcgtcgcaagctgcctgcgtccgtgcttctgcgcgcgctgggctacaccaccgagcaagtgctcgatgctttctataccactaacgtattccatgttcgcggcgaaaacctgaacctggagctggtgcctcagcgcctgcgtggtgaaattgccgttctggatatcctggacgacaaaggcaaggtcattgtcgagcagggtcgtcgtatcactgcccgtcacatcaaccagctggaaaaagccgggatcaaagagctggaagtacctctggactacgtcctgggtcgtacgactgccaaggtcatcgtgcatccggcaaccggtgagatcattgccgagtgcaacaccgagctgaacaccgaaatcctcggcaagattgccaaggctcaggttgttcgcatcgagacgttgtacaccaacgacatcgattgcggcccgttcgtttcggacacgctgaaaatcgactccaccagcaatcagctggaagcgttggtcgagatctaccgcatgatgcgtcctggtgagccaccgaccaaggatgcagcagaaacgctgttcaacaacctgttcttcagtcctgagcgctatgacctgtctgctgtaggtcgtatgaagttcaaccgtcgtatcggtcggaccgaaatcgaaggttcgggcgtgctgtgcaaggaagacatcgtagcggtcctcaagaccctcgttgatatccgtaacggcaaaggcatcgtcgatgacatcgaccacctcggtaaccgtcgtgttcgttgcgtaggcgagatggccgagaaccagttccgtgtaggtctggtccgtgttgagcgtgcagtcaaagaacgcctttccatggcagaaagtgaaggcctgatgcctcaggacctgatcaacgccaagcctgttgcggcagcggtcaaggaattcttcggttccagccagctttcccagttcatggaccagaacaacccgctgtccgagattacttgcaagcgtcgtgtttctgcactcggccctggtggtttgactcgtgagcgtgccggctttgaagttcgagacgttcacccgactcactacggtcgcgtgtgccctatcgaaacgccggaaggtccgaacatcggcctgatcaactccctcgcggcctatgcccgcaccaaccagtacggtttcctcgagagcccgtaccgtgttgttaaggaaggtctggtcaccgacgaaatcgtgttcctttcagcgatcgaagaagctgaccacgtcattgcacaggcttcggccgcaatgaacgacaagcaagagctgatcgacgagctggttgctgtgcgtcacttgaacgaattcaccgtcaaggcgccagccgatgtcaccctgatggacgtttcgcccaagcaggttgtttcggtagccgcttcgttgattccgttcctcgagcacgatgacgccaaccgtgcgttgatgggttcgaacatgcagcgtcaggctgtaccaaccttgcgtgccgacaagccgctggtgggtaccggcatggagcgcaacgttgctcgcgactccggcgtttgcgtcgtggcccgtcgtggtggcgtgatcgactcggttgatgccagccgtatcgttgttcgcgttgccgatgatgaagttgaaacaggtgaggccggtgtagacatctacaacctgaccaaatacacccgttcgaaccagaacacctgcatcaaccagcgtccgctggtaagcaagggtgatcgtgttcagcgtagcgatatcatggccgacggcccgtccaccgatatgggtgagctggcgctgggtcagaacatgcgtatcgcgttcatggcctggaacggtttcaacttcgaagactccatctgtctctctgagcgtgtagttcaggaagaccgcttcaccacgatccacattcaggaactgacctgtgtggcgcgtgacaccaagcttgggcctgaggaaatcacagctgacatcccgaacgtgggtgaagctgctctgaacaagctggacgaagccggtatcgtttacgtaggtgccgaagtcggcgctggcgatatcctggtgggcaaggtcaccccgaaaggcgagacccagctgacgccggaagaaaaactgttgcgcgctatcttcggtgagaaggccagcgacgttaaggacacttccctgcgtgtgcctaccggcaccaaaggtactgtcatcgacgttcaggtcttcacccgtgatggtgtcgagcgtgatgcacgtgctctgtccattgagaagtcgcagctcgacgagatccgcaaggatctgaacgaagagttccgtattgtcgaaggcgctactttcgaacgtctgcgctctgcgctggtcggtcgtgtagcagaaggcggtgctggcctcaagaaaggtcaggaaatcaccaacgaagtgctcgacggccttgagcatggtcagtggttcaagctgcgcatggctgaagacgctctgaacgagcagcttgagaaagcacaggcttacatcgttgatcgtcgtcgccttctggatgacaagtttgaagacaagaagcgcaaactgcagcagggcgatgacctggctccaggcgttctgaaaatcgtcaaggtttacctggcaatccgtcgccgcattcagccgggcgacaagatggccggtcgtcacggtaacaagggtgtggtctctgtgatcatgccggttgaagacatgccgcacgatgccaatggcacgccggttgatatcgtcctcaacccgctgggcgtaccttcgcgtatgaacgttggtcagattctcgaaactcacctgggccttgcagccaaaggtctgggcgagaagatcaaccgcatgcttgaagagcagcgtaaagttatcgagttgcgcaagttcctcaacgagatctacaacgaaatcggtggtcgccaggaagccctggaagaccttaccgacaacgaaattctggacctcgccaagaacctgcgtaacggcgtaccaatggctaccccggtttttgacggtgccaaggaaagcgaaatcaaggcaatgctcaaactggcagatatgccggaaagcggccagatgcagctgtttgacggtcgtaccggcaacaagtttgagcgcccggttacagtcggctacatgtacatgctgaagctgaaccacttggtggacgacaagatgcacgcgcgttccactggttcgtacagcctggttacccagcagccgctgggtggtaaggcacagttcggtggtcagcgtttcggggagatggaagtgtgggcgctggaagcatacggcgcggcgtacactctgcaagaaatgctcacagtgaagtcggacgatgtgaacggccgtaccaagatgtacaaaaacatcgtggatggcgatcaccgtatggagccgggcatgcccgagtctttcaacgtgttgatcaaagaaattcgttcgctcggtatcgatatcgatctggaaaccgaa

SEQ ID NO: 33425 - DNA, 4197 bp, Pseudomonas syringae
ttgaaagacctactgaatttgctgaaaaaccagggtcaagtcgaagagttcgacgcaatccgtatcggacttgcatcgcctgagatgatccgctcttggtcgttcggtgaagttaaaaagccggaaaccatcaactaccgtacgttcaagcctgagcgtgacggtctgttctgcgccaagatctttggtccggtaaaagattacgagtgcctgtgcggtaagtacaagcgcctgaagcaccgcggtgtcatctgcgaaaagtgcggtgttgaagtggctctggccaaggttcgtcgcgagcgcatggctcacatcgaactggcttcgccggttgcccacatctggttcctgaaatcgctgccgtcccgtatcggcttgctgatggacatgaccctgcgcgatatcgagcgtgttctctacttcgagagctatgtcgttatcgatccaggcatgaccacccttgaaaaaggtcagttgctgaacgacgagcagtacttcgaagccctcgaagagttcggtgatgattttgacgcccgcatgggcgccgaagctgtccgtgaactgctgcacgctatcgatctggagcacgaaattggccgtctgcgtgaagagattccgcaaaccaattccgagaccaagatcaagaagctgtccaagcgtctgaaactgatggaagctttccagggttccggcaaccttcctgagtggatggtgctgaccgttctgccggttctgccgccagatctgcgtcctctggttccgcttgacggtggtcgtttcgcaacgtccgacctcaacgatctgtatcgtcgagtgatcaaccgtaacaaccgtctgaagcgtctgctggatctgtctgctcccgatatcatcgtgcgcaacgaaaagcgcatgctgcaggaagcggtcgatgcattgctcgacaacggtcgtcgtggtcgcgcaatcaccggttccaacaagcgccctctgaaatccctggctgacatgatcaagggtaagcagggtcgtttccgtcagaacttgctcggtaagcgtgttgactactcgggtcgttcggtaattaccgtaggtccgaccctgcgtctgcaccagtgcggtctgccgaagaaaatggctctcgagctgttcaagccgttcattttcggcaagctggaaatgcgtggcctggccacgaccatcaaagcagccaagaaaatggtcgagcgcgagctgccagaagtctgggacgttcttgcagaagtcattcgcgaacacccggtgcttctgaaccgtgcgccaacgcttcaccgtcttggcatccaggcatttgaaccggttctgatcgaaggtaaggctattcagcttcacccgctggtctgcgccgcgtacaacgccgacttcgacggtgaccagatggctgttcacgttcctttgacgctggaagcccagctcgaagcgcgtgcactgatgatgtcgaccaacaacatcctgtcgccagccaacggtgagccaatcatcgttccttcgcaggacgttgtactgggtctgtactacatgacccgtgaagcgatcaatgccaagggcgaaggtcgtgtgtttgcggacctgcaggaagtcgaccgggtatttcgcgccggcgaagcggctctgcacgccaaggtcaaggttcgtatccacgaaacggtcaacgaccgtgatggtggcagcgtcaagaacacccgtatcgtcgacaccactgtcggccgtgcgctgttgttccaggtggttccggccggtctgtcctacgacgtcgtcaaccagccgatgaagaaaaaggcgatctccaaactgatcaaccagtgctaccgcgtggttggtttgaaagagaccgttatcttcgctgaccagttgatgtacaccggttttgcctattcgaccatttcgggtgtctccatcggcgttaacgacttcgttatccctgatgagaaagctcgcatcatcgacgcagccaccgaagaagttaaagagatcgaaagccagtacgcttccggcctggtaacccagggcgagaagtacaacaaggtgatcgacctttggtccaaggcgaacgacgaagtctcgaaagcgatgatgtcgaacctgtccaaagaacgcgttatcgaccgtcacggcgtcgaagttgatcaggaatccttcaactcgatgtacatgatggctgactccggggcgcgtggttctgctgcccagattcgtcagctggccggtatgcgtggtctgatggccaagcctgatggctccattattgaaacgccgatcactgctaacttccgtgaaggtttgagcgtacttcagtacttcatctccactcacggtgctcgtaagggtcttgcggataccgcgttgaaaactgctaactccggttatctgacacgtcgtctggtagacgtggctcaggatctggtcgttaccgaagtggattgcggtaccgagcacggcctgctgatgactccgcacattgaaggcggcgacgttgtagagccgctgggtgagcgcgtactgggtcgagtcattgcccgtgacgtgttcaagccgggtacagaagaaatcatcgtgcctgcaggcactctggtggacgagaagtgggtcgagttcatcgagctgaacagcatcgacgaagtgatcgttcgctcgccaatcagctgtgaaacccgctatggcatatgcgccaagtgctacggtcgcgacctggctcgtggtcaccaggtcaacattggtgaagctgtcggcgtaattgctgcacagtcgatcggtgagccaggtacccagctgacaatgcgtaccttccacattggtggtgcggcaagccggacctcggcagctgacagtgttcaggtgaagaatggcggtactgtccgtctgcataacctgaagcacgtcgagcgtgtcgacggtcacctggttgcggtatcccgctctggtgagctggcaatcgcagacgatttcggtcgtgagcgcgagcgttacaagctgccttacggtgcagtgatttcggtgaaggaaggcgacaaggtcgacgctggttcgatcgtggccaagtgggatcctcacacccacccaatcgtcaccgagatgaaaggtactgttacctacgtcggcatggaagagggcatcacgatcaagcgtcagacagacgaattgaccggtatgaccaatattgaagtgcttgatgcgaaagaccgcccggctgctggcaaggacattcgtcctgctgtgaagatggtgggtctggatggcaaggatctgttgctgccgggtactgacgtgcctgcccagtacttcctgccggctaacgccctggttggtgtggctgacggtgcgcagatcgcgatcggtgatgttatcgctcgtattccgcaagagacttcgaagacccgtgacatcaccggtggtctgccgcgtgttgccgaccttttcgaagcacgtcgtccgaaagaggcttcgatccttgcagaagtcagcggtaccatcgcattcggtaaagagaccaaaggcaagcgtcgtctggtcattaccccgaacgacggtagcgatccgtacgaggagctgattccgaagtggcgtcacctgaacgtcttcgaaggcgaacaagtgaaccgcggcgaagttatctctgacggccctagcgatccacacgatatcctgcgtttgctgggtgtcagcgcgctggccaagtacatcgtcaacgagattcaagacgtataccgtctgcaaggcgtgaagatcaacgacaagcacatcgagaccattctgcgtcagatgttgcgtaaagttgagattgccgagtctggcgattccagtttcatcaagggcgaccagatggaattgactcacgttctggtagaaaacgagcgtttgggcgcagacgacaagtttgtctccaaattcactcgtgtgttgctgggtatcaccaaggcatcgttgtccaccgagtcgttcatttccgcggcctccttccaggagacaacccgcgtactgaccgaagcggctgtgacaggcaagcgcgactaccttcgcggcctgaaagaaaacgtggtcgtgggtcgtttgatcccggccggtaccggtctggcttatcacagcgagcgtaagcgtcgccgtgaaatggacaaaccgacccgtgtcagcgcgagcgaagtagaagctgctctgaccgaagcgttgaactccagcggtaat

SEQ ID NO: 33426 - DNA, 909 bp, Pseudomonas syringae
atgtacatccagattctaggttccgctgcgggcggtggattcccgcagtggaactgcaactgcgtcaattgtgcgggttttcgtgacggcagcctgcgggcgcaagcgcgtacccagtcgtccatcgcgctgtccgacgacggcgtgaactgggtgctgtgcaatgcctcgccggatattcgcgcgcaactgcagggttttgcgcccatgcagccggggcgggcgttacgcgataccggcatcagcgctatcgtgctgatggacagccagatcgaccacaccaccggcttgctcagtttgcgcgaaggctgcccgcatcaggtctggtgtaccgacatggtccatgaagacctgagtaccggcttcccgctgtttgaaatgctcaagcactggaacggcggcctgaactggaaccgcatcgagctgcaaggtagcttcgtgatcccggcctgtccgaacctgcgcttcacaccgttcccgctgcgcagcgcggcaccgccttactcgccgcaccggttcgacccgcatccgggcgataacatcggcctgctggtcgaagacacacgcaccggcggcaagctgttctacgcgccgggcctgggcaaggtcgatgaagcgctggccgagaaaatgcgcgacgccgactgcctgctggtcgatggcacgatgtgggacgatgacgagatgcagcgccgtggcgtcggcacccgcaccggccgggaaatgggccatctggcacagaacgggcctggcggcatgctcgacgtgctggaaggcttccccgagcagcgcaaggtgcttatccacatcaacaacaccaacccgattctcgacgaagactcgccggagcgcgccgaactggtccggcgcaacgttgaagtcgcctttgacggcatgagcatcgagctt

SEQ ID NO: 33427 - DNA, 972 bp, Pseudomonas syringae
atggctcacccgtttgcaacacttactcccgatctggttctcgatgccgtcgaaagcatcggttttctcagcgatgcccgcatcctggcactcaacagctacgaaaaccgcgtttatcaggtcggtatcgaagacggtcagccgctgatcgccaagttctatcgcccgcagcgctggaccaacgaggccattctcgaagagcacagcttcacgttcgaactggtggacgtcgaagtgcccgtggtcgcgcccatggtgcacaacggcgaaaccctgttcgagcacgccggctttcgtttcacgctattcccgcgcaggggcggacgcgcgccggagccgggcaatcttgatcagttgtatcgcctgggtcagttgctggggcgtatccatgcggtcggctcgaccaaaccgttcgcacatcgcgaagcgctgggcgtgaagaacttcggcaatgactcggtcaattacctgctggaaaacaactgcattccgcgcagcctgttaccggcctacgagtcggtggcccgcgatctgctcaagcgcgtagaggacgtttacgctgccacaccgcacaccaacatccgcatgcacggcgactgtcaccccggcaatatgatgtgccgcgacgaaatgttccacatcgtcgacctggacgattgccgtcttggtccagcggtccaggatatctggatgatgctcgccggcgaccgccaggaacgcctcggccagctctccgaattgatggacggttacaacgagtttcacgatttcgactcacgcgaactggccctcatcgaaccgctgcgtgccttgcgcctgatgcattacagcgcctggctggcccgccgctgggatgaccctgccttcccccacagtttcccgtggttcggcaccgagcgttactggggcgaccacatcctggccctgcgcgagcagatggccgcactgaatgaagagccgctgaaactgttt

SEQ ID NO: 33428 - DNA, 1956 bp, Pseudomonas syringae
atggccgggctgatcccccagagctttatcgacgaccttctgaaccgcaccgacattgtcgatgtcgtcagctcgcgcgtgcagctcaaaaaagccggcaagaactacagcgcgtgctgcccgttccacaaagaaaagacaccctctttcagcgtcagcccggacaaacagttctattactgctttggctgcggcgcaggtggcaacgcactgggcttcatcatggaccacgacaacctggatttcccccaggccgtcgaggaccttgccaaagccgccggcatggaagtgccacgcgagcaaggcgtcaagggtcagaaaccccgtcagccgaccgactcaccgctttacccgcttcttaacgctgcctccgagttttaccgccaggcactaaaaagccatccgtcgcgcaaagccgcagtggattacctcaagggccgcggcctgtccggtgaaatcgcccgggacttcggcctgggctttgcaccacccggctgggacaacctgtacaagcacctgagcagcgactcgctacagcaaaaggtcatgatagatgccggcttgctgatcgaaaacgctgaaaccggcaagcgctacgaccgcttccgtgaccgggtgatgtttccgatccgtgactcgcgcgggcgcatcatcgccttcggcggtcgcgtattgggcgacgacaagcccaagtacctgaactcgccggaaacgccggtattccacaagggtcaggagctgtacgggctgtttgaagcacgcaaattcaatcgcaacctcgatgaaatcatcgtcgttgaaggttacatggacgtcatcgctctggcccagcaaggcttgcgcaatgccgtggccacgctgggcacggccaccagcgaagaacacttgaaacgtttgttcagggtcgtgccgaacgtgttgttctgcttcgacggcgatcaggccggacgcaacgccgcatggcgagcgctggaggccgcgctgccaaacctgcaggacggaaggcgggcccgcttcctgtttctgcccgaaggcgaagacccggacacgctggtgcgctcggaaggcaccgacgccttcaaggcgcgcatcaatcagcacgcccagccgctggccgattattttttcgagcaactgaccaaagaatccgacccgcgctcactggaaggcaaagcgcacatggccacactcgccgcgccactgatcgacaaagtgcccggcgcgaacctgcggatcctgatgcgtcagcgcctcagtgaaattaccgggctcaccggcgaggccgtcagccaactggtgcagagcgcacccgcagacgcgcctccgagctacgacccgtatgtcgattacgacgccatgcccgactttgccgattaccagccacaaggcgggtacgaggcgcagcaggaatggacgccaaagaaagccggcggtccgaatcagaaaaaatgggacaacaacaagtcctggggcaagaaaggcaagcgtcaggagttcgaaccccgcacgccgcgtgtaccgaccgccgtcgagccgccaatgcaggccgcattgagaaccttgctgcaccacccggaactggccgaaaaggtcgaaaatgccagccatttcgctgcagaagaccaatcaaacgcacaactgctggtcgcccttatcgaagcccggcaaaagaatcccagcctgcggtcgttacagttgatagcgcgatggcacggaactgaacagggccgcttgctgcgtgcactggcagaaaaggaatggctgattgagaccgacaaccttgaacaacagtttttcgacactataactagcttatccgctcgccaacgcgagcgcagcctggaccatctgatcagcaaggctcggcagaccgagctgagcgcagaagagaaaattcagctaagggaactgctaaatcgcaatgttcccgcacaaaacccgacctcaactggcgcg

SEQ ID NO: 33429 - DNA, 1023 bp, Pseudomonas syringae
atgctagtactgggattagaaacctcctgcgacgaaaccggcgtcgcgttgtacgacagcgaacgcggtttgctggcggacgctttattcagtcagatcgacctgcaccgcgcttatggcggtgtggtgccggagctggcttcgcgtgatcacgtcaagcgcatgctgcccctgatccgccagacactggccgaggccgactgcgtcgcgaccgacatcgacgccatcgcctacaccgcagggccgggccttgtgggcgcgttgctggtcggcgcgtcgtgcgcgcaggcgctggcgtttgcctgggatattccggcgctgggtgttcaccacatggaaggccatctgctggccccgatgctggaagaaaacccgccgcagtttccgttcgtcgctttgttggtgtccggcgggcacacgcagctggtgcgcgtcgatggcatcggtcagtacgagctgctgggcgagacgctggatgatgccgcaggcgaggcgttcgacaagaccgccaagatgatgggcatgcagtatccgggcggcccggagatctcgaaagcggccttgcagggcgtgccggggcgttttgtcttccctcggccgatgaccgatcgccccgggttggcgttcagtttcagcggcctgaaaacctcggcgctcaacacctggcagcagtgccagagtgccggggacgacagtgagcaaacccgctgcgacatcgctctggccttccagcaggcggtagtggagactttgaccatcaagtgcaagcgcgcgctcaagcagaccgggctcaagagtctggtcatcgcaggcggcgtcagcgccaacaaggcgttgcgggtatcgctggaaagcatgctcggtgagttgcgcgggcacgtttactacgcgcggccggaattctgtactgacaacggcgcgatgatcgcctttgccggctgccagcgtctgcaggccgggcagaaagaagatttgagcatcagcgtgcaggcgcgctggcccatggagcagttgtcggggctc

SEQ ID NO: 33430 - DNA, 567 bp, Pseudomonas syringae
atgttttggttactggcgactttcgcctacctgctcggctcgctgtccttcgccatcctgctcagtcgcctgagcggcagcccggacccgcgcgccagtggttcggggaatgccggtgcgaccaacatgttgcgtctggccggaaagaaactggccgtcctgaccctgctcggcgacctctgcaaaggcctgattccggtagtgctcgccggcgcctggggccttgatccatcacagcaaggctggatcggcgtctgcgcagtgctgggccatctgtttccgctgtactttcgcttccgtggcggcaaaggtgtcgcgaccgccgccggcgtgctgctggggctttacccgcccgcagcggccctggcgatagcggcctggctgctgacgctctacctgacccgtaccagctcgctcgccgccctgatcgccaccccgctgacgctgccattactggcctggcaggaaccgcacgccttgttgccgatgagcgtgctaaccctgctcatcgtctggcgccatcgcggcaatctacgcgacctgctggccgggcgcgaacgacatttc

SEQ ID NO: 33431 - DNA, 1059 bp, Pseudomonas syringae
atgagcacccccatgaatatcaaaagcgcgctgaaccgcgtggtcaaccagctggacctgtccactgacgagatgcgcgacgtcatgcgcgagatcatgaccggccaatgcaccgaagcgcagatcggtgcgtttctgatgggcatgcgcatgaagagcgagaccatcgatgaaatcgtcggtgcggtttctgtcatgcgtgagctggccgacaaggttgaactgaaaacgctggatggcgttgtcgatatcgtcggcactggcggtgacggtgcgaacattttcaacgtgtccaccgcgtcggctttcgtgatttcagcggcgggctgcacggtggccaagcacggcaaccgcgcggtgtcgggtaaaagcggcagtgctgatttgctggaggcggcgggggtttatctgaacctgacgcctgtccaagtggcgcgctgcattgacagcgtcggcatcggcttcatgttcgcccagtcgcatcacagcgcgatgaaacacacggccggccctcgccgcgagctggggctgcgcacactgttcaatatgctcggtccgttgaccaacccggctggcgtgcgtcatcaggttgtcggcgtgttcaatcaggcactgtgccgcccgctggccgaagtgctgctgcgtctgggcagcaagcatgtgctggtggtgcactcgcaggacgggctggatgaattcagtctggcggcgccgacgttcgtcgctgaactgaaaaatggcgaagtgacggaatactgggtgcagcctgaagacctgggcatcaagagccagagcctgtatggcctggcggtggaaagtccggcgcagtcgctggagctgattcgcgatgctctgggtcggcgcaagaccgagatcgggcagaaggctgcggaaatgatcgtgctcaatgccggtgctgcgctttatgctgccgatcatgcgaccagcctgaaagaaggcgtggcgctggcccatgacgcactgcacaccggccttgcgcgggaaaaactggatgagttgggtgccttcacggcggtattcaagcaggagaacgaagca

SEQ ID NO: 33432 - DNA, 369 bp, Pseudomonas syringae
atggcaactatcaaccagctggtacgtcagccgcgtaagcgtatcgtcgagaaatccgacgtgcctgcgctgcagaactgcccgcaacgtcgcggtgtgtgcactcgtgtgtataccactacgccgaaaaaacctaactcggcattgcgtaaagtctgccgtgtgcgcctgaccaacggtttcgaggtttcctcgtacatcggtggtgaaggtcacaacctgcaagagcacagcgtggtactgatccgtggcggtcgtgtaaaagacttgccaggtgttcgctatcacaccgttcgtggttctctggatacctccggcgtcaaaggtcgtaaccagggtcgctcgaaatacggtaccaagaagcctaag

SEQ ID NO: 33433 - DNA, 1986 bp, Pseudomonas syringae
atgggcgaggtgcatgatggcgccgcgaccacggactggatggttcaggagcaggagcgtggtattaccattacttctgctgctatcactgccttttggcagggttccgagaagcaacacaaagaccaataccgcttcaacgtcattgacaccccgggtcacgtagacttcaccattgaagttgagcgttccctgcgtgtgctcgacggcgcggtcgttgtgttctgtggtacttccggcgtagaaccgcagtccgaaaccgtatggcgtcaagccaacaaatacggcgttccacgtatcgtctacgtgaacaagatggaccgtgccggtgccaactttttgcgcgtaatcgcccagatcaagcagcgcctgggtcacaccccggtgccgattcagttggccattggtgctgaagacaacttccagggtcaaattgacctgatggctatggaagctgtttactggaacgattccgacaaaggcatggttcctgttcgtaagccaatccctgctgaattgcaggagctggctgatgaatggcgtggcaacatggttgaggctgcggctgaagccagcgaagagctgatgaacaagtaccttgaaggtgaagagctcaccaacgaggaaatcaaggccgctctgcgtcagcgtactatcgctggtgagatcgttcttgctgtttgcggttcttccttcaagaacaagggtgttcccctggttctcgacgccgtgatcgactacctgcctgctccaatcgatattcctgctatcaagggttccgatcctgataatgaggaaattctgatggagcgtcatgcagacgacagcgagccgttctcggcgctggcgttcaagatcgctaccgacccattcgtgggtactttgactttcgtccgcgtttactcgggcgtgttggcatccggcgacggcgtgatcaactcggtcaaaggcaagaaagagcgcgtgggtcgtatggtgcaaatgcacgcaaacgcccgcgaagagatcaaggaagtacgcgctggcgacatcgcggccctgatcggcatgaaggacgtcaccactggtgaaaccttgtgcaacgctgacaagccaatcatcctcgttcgtatggacttcccggagccggttatttcggttgccgttgagccaaaaaccaaggatgaccaggaaaaaatgggtattgcactgggcaagcttgctcaggaagacccttctttccgcgtcaaaactgatgaagagactggtcaaacgatcatctctggcatgggcgagctccacctggacatcctggttgaccggatgcgccgtgagttcaacgtcgaagccaacatcggcaagccgcaggtttcctatcgtgagcgcatcacgaagaattgtgaaatcgaaggcaagttcgttcgtcagtccggcggtcgtggccagtttggtcattgctggatccgttttgctcctgctgacgaaggtcaggaaggtctgcaattcgtaaacgaagtggtgggtggtgttgttccgaaggaatacatcccggctatccagaagggtatcgaagagcagatgaagaacggcgttgttgccggctatccgctgatcggcctgaaggctaccgtgtttgatggttcctaccatgacgtcgactcgaacgagatggcgtttaaggtggctgcttccatggcgaccaagcagctggcccagaagggcggtggtgagttgcttgagccgatcatggcggtagaggttgttacgcctgaagactatatgggtgacgtgatgggcgaccttaaccgtcgtcgcggcatgatcctgggtatggaagacacggtttccggcaaagtaattcgtgccgaggttccgttgggtgagatgttcggttatgcgaccgacgtccgctccatgtcccaaggtcgcgcaagctactctatggaattcaaaaaatacaatacagcgccgtcgcacatcgtcgaaactgtaaccaaaaaacaaggc

SEQ ID NO: 33434 - DNA, 564 bp, Pseudomonas syringae
atggcaagaccgcttgacgatgcgatcagcacggcctttagcacgtggcatgatgcgcttcagcgaacgcccttcgttgacgaagacggtggagaccttgaggtcatcaacgtctgcgccttcgttatgctcggcgttggctacagccgactccagcactttcttcaggatctcggcggctttcttactgctgaaagccaacaggttgagcgcttcgcccaccttcttcccgcggatctggtcggcgaccaagcgggctttctgggcggagattcgagcgcccgacaacttagcggctacttccatcgttccttaccccttaacgcttggctttcttgtctgccacgtgcccacgatatgtgcgggtaccggcaaactcgcctagtttatggccgaccatgtcttcgctcacaagaactgggacatgttgacgaccgttatgcactgcaatggtcaaaccgaccatttgtggcagaatcatcgaacgacgcgaccaggttttcaccggtttgcgatcattcttttccgccgccacttcgatcttcttcagtaggtgaagatcaa

SEQ ID NO: 33435 - DNA, 684 bp, Pseudomonas syringae
atgggtcagaaagtacatcccattggcattcgcctgggaatcgtcaaggagcacacctccgtctggtacgcagacggtcggacttatgcggactatttgttcgctgatctgaaagtgcgtgagtacctccaagacaaattaaaaagcgcgtccgtcagccgtatcgatatccatcgtccggctcagacagcacgtatcaccatccacaccgctcgtcccggcatcgtgatcggcaagaaaggtgaagatgttgagaaactgcgtcaggacctgaccaagcaaatgggtgtgcctgtgcacatcaatatcgaagagatccgcaagccggagcttgacggtatgctggttgcgcagagcgtagctcagcagctggagcgtcgtgtaatgttccgtcgcgctatgaagcgcgctgttcagaacgccatgcgcattggtgccaaaggcatcaaaatccaagtgagcggtcgtctcggcggtgctgaaatcgcacgtactgaatggtatcgcgagggtcgtgtgccattgcacaccctgcgtgccgacatcgactatgccaactacgaagctcacaccacttatggtgtgatcggtgtaaaggtttggatcttcaaaggcgaagtaattggtggtcgccaagaagaactgaaaccacaagcaccagcgcctcgtaaaaaagctgctaag

SEQ ID NO: 33436 - DNA, 411 bp, Pseudomonas syringae
atgttgcaaccaaagcgtacgaagttccgcaagcagatgaccggccacaaccgtggtctggcactgcgcggtagcaaagtcagcttcggcgagttcgcgctgaagtctgttgctcgtggtcgtctcaccgctcgtcagatcgagtcagcgcgtcgtgctctgacccgtcacgttaaacgtggcggcaagatctggatccgtgtgttcccggacaagcctgttaccaagaagcccctcgaagttcggatgggtaaaggtaagggtaacgtggagtactgggttgcccagattcagccaggcaaagtcctgtatgaaatcgagggtgttactgaagagctggcgcgtgaggctttcgccctggctgctgcaaagctgccgctcgccacctcctttgttaagcggacggtgatg

SEQ ID NO: 33437 - DNA, 192 bp, Pseudomonas syringae
gtgatgaaagcgaatgaacttcgtgaaaaatcagcacagcagctgaacgagcaactgctcggcctgctgcgcgaccagttcaatctgcgtatgcagaaagcaactggccagttggggcagtctcatctgctctcgcaagttaagcgtgacatcgctcgcgtgaaaactgtgctcaaccagcaggcaggtaag

SEQ ID NO: 33438 - DNA, 1227 bp, Pseudomonas syringae
atgcagatttataaagttggcggtgctgtacgcgaccgcctgctgggtcaacctgtcactgatatcgattgggtggtggtcggcgcgagtaccgaggacatgctggtcaagggctatcgcccggtcggcaccgacttcccggtgttcctgcacccgctgactaacgaggagtacgcgctggcacgcaccgagcgcaagagcggcgtgggttatggaggcttcgtgtttcacgcaagccctgacgtcacactggagcaggacctgattcgccgcgacctgacgatcaatgccatggccgaagacaaggacggcaatctgaccgacccttacaatggccagcaggatcttgaagcgcgagtattgcgtcacgtttcgcccgcgttcgccgaagatccgctccgggtcttgcgtgtggcccggttcgccgcgcgctatgccggccatggcttcaccgtcgcgcccgagacccttgagctgatgcgtcagctcagcgaatccggcgaactcaaagcgctgacggccgagcgaagctggaaggaaatctctcgcgccctgatggaagaccagccgcaggtgttcattcaggtgctgcatgactgtggcgcgctgagtgagctgatgcccgaggtcgaagcgctgtttggcgtgccgcagccggctgcacaccacccggaaatcgacaccggcgtgcatgtgctcagcgtgcttgagcagtcggccatccacaaacacccgctgaccgtgcgctgggcctgcctgctgcatgatctgggcaaggggctgacgccagaatccgaatggcccaggcacatcgcccacgaacacaccggcctgcgcctgataaaagcggtcaacgagcgttttcgggtgccaagagactgccaggaactggcactactggtgggccaataccacacgcatggccaccgggcactggaactgaaaccatcgaccttgctggagctgctgcacagtttcgacgtctaccgccgaccgcaacgcttcgaggagtttattgcagcctgcgagatggacgcacgcggccgccatggcttcgagcaacgcagttatccacaggccgactacctgcgcggcgcggcacacgccgcccgaaccgtgtcagtgcaaccgctgctggagaaaggcctgaagggcaaggaactgggtgacgcgctgaagaacgagcgcttgaaggcactgaaaacctacaaggcggggcacgtcgcc

SEQ ID NO: 33439 - DNA, 1560 bp, Pseudomonas syringae
atgaccgccagagagcagaagcgccaacccctctccacgggttcagagtggacatttgaactgatccgggcctacgaccgtgaaatcggcagaattgccgaacggtacgctctggatacgtatcccaaccagatcgaagtgatcaccgccgagcagatgatggatgcctatgcctcggtgggcatgccgctgggctaccaccactggtcctacggcaagcacttcctcagcaccgaaaaatcctactcccggggccagatgggtctggcctacgagatcgtcatcaactcggacccttgcatcgcctacctgatggaagaaaacaccatctgcatgcaggccctggttgtcgcccatgcgtgctatgggcacaacagcttcttcaagggcaactacctgttccgcacctggaccgacgccagctcgatcatcgattacctggtgttcgccaagcagtacatcatgcagtgcgaggaacgccacggcattgatgccgtggaagacttgctcgactcctgccatgcgctgatgaactacggcgtggaccgctacaagcgtccgtatccgatctctgccgaagaagagcggcgcaggcagaaagatcgtgaagaacacctgcagcggcagatcaacgatctttggcgcacgattccgaagaacgccgataaaagcagcaaggaagacaacgcgcgcttccccgccgaaccgcaggaaaacatcctctatttcatcgaaaaacacgcgccactgctggaaccctggcagcgcgaagtggtgcgaatcgtacgcaagatcgcccagtacttttacccacagcgccagactcaggtgatgaacgaaggctgggcgacgttctggcactacacgctgatgaacgacctgtacgacgagggcctggtcaccgacggcttcatgatggagtttctgcagtcgcacaccagcgttatctatcagcctggcttcgacagcccgtattacagcggcatcaacccctacacgcttggctttgcgatgtatcaggacatccggcggatgtgcgaacaccccactgatgaggaccggcagtggtttccggaaatcgccgggaccgactggctgactgcgatcaagtttgcgatgagcagcttcaaggacgagagcttcatcctccagtacctgtcgcccaaggtcattcgtgatctcaaactgttcagcatcatggacgacgatcagaaagaagacctgctggtgcccgccatccatgatgagaacggctaccggaccattcgggaaattctggctgcgcagtacaacctcggcaatcgggaacccaacgtacagatctacagcattgaccgccgcggagatcgctcgctgaccctgcgccatcaacagcacaatcgcaaaccgctgggcgattcgacagacgaggtgctcaagcacctgcatcggctgtggggttttgatattcatctggaaaccctgcagggcgaccagttgatcaagacccatcacgtcccccctaaaggcgagcatgccgatggggaatatccccggcttgatatggcggtcgtccacctc

SEQ ID NO: 33440 - DNA, 1269 bp, Pseudomonas syringae
atgagctatgtgatcgaccgacgtctcaacggcaagaacaagagcacggtaaaccggcagcggtttctgcggcgttaccgtgaccacatcaagaaggcagtggaggaagccgtcagccgacgctccattaccgacatggagcacggcgaacagatcagtattcccggacgcgacatcgacgaaccggtcctgcaccacggtcgcggcggcaagcagaccgttgttcatcctggcaacaaggaattcaccacaggcgagcacatcgcccgccctcaaggcggtgcgggcggtaaagggcctggcaaggcgggtaattccggcgagggcatggacgagttctcgtttcagatcactcaggaagagtttcttgagttcatgttcgaagacctcgagctgccgaatctggtcaaacgcaatctgaccggtacggacaccttcaaaacagtgcgcgccggcatcagtaacgaaggcaatccatcgcgcatcaatattatccgtaccttgcgctccgcccatgcgcggcgcattgccctgtcgggcagcagccgcgcgaaactcagggaagcgaccagcgagcttgagcgcataaagcgcgaagagccggacaactttggtgacattcaggcgctggaagtcgagatcgaccgactcaaagcacgtattcgtcgggtgccctacctcgatacgttcgacctcaagtacaacctgctggtcaaacaacccaaccccagctccaaggccgtgatgttctgtctgatggacgtttccggctccatgacccaagcaaccaaggacatcgccaagcgcttcttcatcctgttgtacctgttcctgaaacgtaactacgacaagatcgacgttgttttcattcgccaccacaccagtgcccgcgaagtggacgaagaagagttcttttattcacgggaaaccggcggcaccatcgtttccagcgcgttgaaactgatgcaggaaatcatggctgcgcgttaccccagcagcgactggaacatctacgcggcccaggcctcggacggcgacaactggaatgacgactcgcctatctgccgggaaatcctcaccaaacaaatcatgcctttcgtgcagtactacacgtacgtggaaatcacgccgcgtgaacatcaggccctgtggtacgaatacgagcgcatcggtgatgacttcgccgacacgttcgcccagcagcagctggtctcggccggtgatatctatccggtattccgcgaactcttccagcgaaggttagtgtca

SEQ ID NO: 33441 - DNA, 804 bp, Pseudomonas syringae
atgaccgagcaattccaacaccgggcgcgcaagcgtttcgggcagaacttcctgcacgatgcaggcgttatcgacaagatcctgcgcgccatccgggccaagcctgaagaccgcctgctggaaatcggaccgggccagggcgcattgaccgaagggctgctcaacagcggcgcgcagctggacgtagtggagctggacaaggaccttattccgatcctcaacagccagttcgccagccagccgaacttcaacctgcatcagggtgatgcactgaaattcgacttcaacaccctgggtgccgagccccgcagcctgcgtgtcgtcggcaacctgccgtataacatctctaccccactgattttccatctgctgcagaacgccagcctgattcgcgacatgcacttcatgctgcagaaagaagtcgtcgagcgcatggccgcagggcctggtggtggcgactggggccgtctgtcaatcatggttcagtaccactgccgcgtggaacacctgttcaacgtcggaccgggagcgttcaatccgccaccgaaagtggactcggccatcgtgcgacttgtgccttacgaaacgctgccgcaccctgccaaggaccatcgcgtgcttgagcgagtggtacgtgaagcgttcaatcagcgccgcaagaccctgcgcaatacgctcaagctgctgctgagcagcgacgaaattacagcgtccggggtagacggcagcctgcgtcccgagcagctcgatctggccgcattcgttcgtctggcagacacgctcagcgaaaaagttctgaccgag

SEQ ID NO: 33442 - DNA, 651 bp, Pseudomonas syringae
gtgcccatggctaccgaacgtcaatattcccccatcgaccgtctgttactgcaagccgacagcgcaatgcgcacattgctgccatcgagcgctcattcacgccgcccttcccctgccatcgtccagcccgatcacaagatgagcgacgtcgacacacgccacgttgccggcctgatgcgcatcaaccacaccggcgaagtctgcgcccaggcgctgtaccaagggcaggcgctcacggccaagctgcccaaggtgcgcaaggcaatggagcatgcagccgaagaagaaatcgaccacctggtctggtgcgagcaacgcattcatcagctcggcagccacaccagcgtgctgaacccgctgttctacggcctgtctttcgggatcggcgcggtagccggggtgatcagcgaccgggtcagcctgggttttgtcgccgcgacagaggatcaggtgtgcaagcacctgggtgagcacctggagcaattgccgatcgaggacggaaagtcccgggcgattctggagcagatgctcagcgacgaagaacaccacgccgagtccgcgctggaagcaggcggtttccgcttcccggctccggtcaaattcggtatgggcgtgctggccaaggtcatgaccaagtccacctatcgcatc

SEQ ID NO: 33443 - DNA, 1974 bp, Pseudomonas syringae
gtgaactacgtcggcggccctcttttggtgctcgccggtgccggttccggcaagaccagtgtgatcacccgcaaaattgcccacctgatccagaactgcggcatccgtgctcaatacatcgtcgccatgaccttcaccaacaaggccgcgcgcgagatgaaagagcgcgtcggcacgctgctcaagggcggtgaagggcgtggcctgacggtctcgaccttccacaatctgggcctgaacatcatccgcaaggaacacacgcggctgggctataagccggggttttcgatctttgacgagaccgacgtcaaggctttgatgaccgacatcatgcaaaaagagtactcgggtgacgacggcgtcgacgcaatcaagaacatgatcggctcgtggaaaaacgatctgatcctgcctgccgaagctctggaaaacgctcgcaaccccaaagagcagactgccgccatcgtctacacccactaccagcgcacgctcaaggcgtacaacgcggtggacttcgatgacctgattctggtgccggtcaagctgttccaggagcaccccgacgttctggaaaaatggcagaacaaggtgcgctacctgctggtggacgagtatcaggacaccaacgccagtcagtacctgctggtgaaactgctgatcggcacgcgcaaccagttcaccgtggtgggcgacgacgaccagtcgatctacgcctggcgtggtgcgcggccggaaaacctgatgttgctcaaggacgactatccgtcgttgaaagtcgtcatgctggagcagaactaccgctccaccagccgcatcctgcgctgcgccaacgtgctgatctccaacaacccgcacgcctttgaaaaacaattgtggtccgagatgggccatggtgacgaaatccgcgtcatccgctgccgtaacgaagacgccgaagccgagcgggtggcgatggaaatcctcaccctgcacctgcgcaccgaccggccttacagcgacttcgccatcctctatcgcggtaactatcaagccaagctgatcgagctgaaattgcagcaccaccaggtgccgtatcgcctgtcgggtggcaacagctttttcgggcgccaggaagtcaaggacctgatggcctacttccgcctgctggtgaaccccgacgacgacaacgccttcctgcgggtgattaacgtgccgcgccgggaaatcggctcgaccacgctggaaaaactgggcaactacgccaccgagcgcaaagtgtcgatgtacgccgccaccgaagaaatcggcctgggcgagcatctggacagccgctacaccgaccggttgcagcgtttcaagcgctggatggacggcgtgcgccagcagtgcgcgcagaacgaccctatcgccgcgctgcgcagcatggtcatggacatcgattacgaaaactggctgcgccagaacagctccagcgaaaaggcggccgattaccggatgagcaacgtctggttcctgatcgaagcgttgaaaaacacgctggagaaggacgaagaaggcggcatgaccatcgaggaggccatcggcaagctggtcctgcgcgacatgctcgagcgtcagcaggaagaggaagacggtgccgaaggcgtacagatgatgaccctgcacgcgtccaagggcctggagtttccgtacgtgttcatcatgggcatggaggaagagatccttccgcaccgctccagcatcgaagccgacaccattgaagaagagcgccgtctggcctacgtgggcattacccgtgcgcggcagaccctggcgttcaccttcgccgccaaacgcaagcagtacggcgaaatcatcgactgcgcgcctagccgttttctggacgagctgcccccggacgatctggcctgggaaggcaacgatgacacgcctacggaagttaaagcggtgcgcggcaacaccgcactcgccgacattcgcgccatgctgaaacgc

SEQ ID NO: 33444 - DNA, 1410 bp, Pseudomonas syringae
gtggggcgttttgctatccgtcatttgtcctggagccggaccatgaacgttcctcgtgaaaccatcgccgccatcgctaccgcccaggggcgcggtggtgtcggtattgtccgtgtgtcggggcctttggccggcaaaaccgcgcaagccattaccggtcgaatgcccaagccacgattcgcgcactacggcccttttgccgacgagtcggggcaggtgctcgatgaaggcattgcgttgtatttccccgggccaaactcgttcaccggcgaggacgtgctggagcttcagggtcatggtgggcccatcgttctggatatgctgctgcaacgctgcctgcaactgggcagccgcctggcgcgtccgggtgaattcagcgaacgtgcgttcctcaatgacaagctcgatcttgcccaggccgaggccattgctgacctgatcgaggcgagttctgcacaggcagcgcgcaatgcgctgcgctcgttgcagggtgttttttcgcagcgtgtggataacttgaccgagaaattgatcagcctgcgtatctacgtcgaagccgccatcgactttccagaggaagaaatcgactttctcgccgacggccatgtgctgggtatgctcgacgatgtgcgtgccgagttatccacagtgctgcgtgaggcaggacagggtgcgttgctgcgtgacggcatgacggtggtgatcgccggtcgtcccaatgcgggcaagtccagcttgctgaacgctctggcgggcagagaagcggccatcgttaccgagattgccggcacgactcgcgatgtattgcgtgaacatatccacatagacggaatgcccttgcacgtcgtggacactgctggtttgcgcgacactcaggaccaggttgaaatgatcggcgtgcagcgtgcactcaaggctataggtgaagctgaccggatcctgctggtggtggacgcaaccgccccggaagctgcagatccgttcgccttgtggccggaattcctggagcagcgtccggaccctgcgaaggtcactctgatccgtaacaaggctgatttgagtggcgacagcattgccctgcaaacaagcgccgatggccatgtcacgatcagcctcagcgccaggtcaggaggagaggggcttgagctgctgcgtgagcatctgaaggcctgcatgggctatgagcagacatcggaaagcagctttagcgcgcgtcggcgccaccttgaggcgctgcgccacgccagtgactcgctggagcacggcagggcgcaattgaccctggctggcgctggagagctgttggccgaagacctgcgtcaggcgcaacaggcgcttggcgagattaccggggcattcagttccgatgacctgctcggcagaatcttttccagcttctgtatcggcaaa

SEQ ID NO: 33445 - DNA, 1101 bp, Pseudomonas syringae
atgtattccggtgtgatcgaaggcatcgggccgcgctactgcccgtcgatcgaagacaagattcatcgttttgccgacaaggaaagccatcaggttttcatcgagccagaaggcctgaccacccacgagctgtatccgaacgggatatccacctcgttgccgttcgacgtgcagttgcagatcgtacgttcgattcgtggcatggaaaacgcacatatcgtccgccccggttacgctatcgaatacgattatttcgacccgcgtgatctgaaatacagcctggaaaccaaggtcatcggcgggttgttctttgccggtcagatcaacggcacaactggttacgaagaagcgggagcccagggtttgttggctggaaccaacgctgcccttcgggcgcaaggccgagacagctggtgcccgcgtcgtgatgaagcgtacatcggcgtgctggttgacgacctgatcacgctcggcacgcaagagccctaccgaatgtttacgtccagggccgaataccgtctgatcctgcgcgaagacaacgctgatctgcgtctgaccgaaaaaggtcgcgagctgggcctggtcgacgatgcgcgctgggcagcgttctgcaccaagcgcgaaagcatcgagctggaagagcagcggctgaaaagtacctgggttcgccccggtacccagcagggtgatgcaatatccgcacatttcggcacgccgctcacccacgaatacaatttgctcaatctgctgacccgtccggaaatcgattacaacagcctgattgccctcacaggccagggctgtgctgatcctctggtggccgagcaggtcgagatcaagacaaaatacgccggttacattgatcggcagcaggaagaaattgcccgcttgcgcgccagcgaagacacacgtctgcccgaagacatcgactacaccggtatttctggcctgtcgaaagaaatccagagcaagctggggataactcgcccggaaacacttggccaggcctcgcgcattccaggcgtcacgccagccgctatttccctgttgatgattcatttgaaaaaacgcggcgcgggccgtcagttggagcaaagcgct

SEQ ID NO: 33446 - DNA, 690 bp, Pseudomonas syringae
gtgctgttgatcgatctcgatccccagggcaacgcgaccatgggcagcggtgtggataaacacactctggaaaactcggtctacgacctgttgatcggtgaatgcgatctgggcgaggccatgcagttctccgaacacggtggctaccaactgcttccggccaaccgcgacctgactgcaggcgaagtggtgctgctggaaatgcagatgaaagagagccgtctgcgcaatgcgctggcgccgatccgggaaaattacgattacattctgatcgactgcccaccttcgctgtcgatgctgacactgaacgcgctggttgccgccgacggcgtaatcatccccatgcagtgcgagtattttgcgctggaaggtctcagcgaccttgtggataacatcaagcgcatcggtgaactgctcaacccgcagttgaagatcgaaggcctgttgcgcaccatgtacgacccgcgtctgagcctgatcaacgacgtttcggcgcagcttcaggagcacttcggcgaacagctgtacgacaccgtgatccccagaaacatcaggctggccgaggcgccgagtttcggcatgcctgtgctggcgtatgacaaatcgtctcgcggtgcgctggcctatctggccctggcaagcgagctggttcgtcgtcaacgtcgcggcgcaaaaagcgctcagccaacc

SEQ ID NO: 33447 - DNA, 867 bp, Pseudomonas syringae
atggcagagcaaacagcttcgggctatatccagcaccacttgcagaaccttacattcgggcacctgcccaatggcgattggggctttgcccacaccgcagcagaagccaaggaaatgggtttctgggccttccacgtcgatacactcggctggtcggttgcgttgggtctgattttcgttctgatcttccgcatggcggccaagaaggcaacttccggtcagccaggcgccctgcagaacttcgttgaagttctggtcgagttcgtcgacggcagcgtgaaagacagtttccacggtcgtagcgcggtcatcgcgccactggctctgaccatcttcgtctgggttttcctgatgaacgcggtcgatctggtaccggtggactggattccacaactggcgatgatgatctcgggcgacgagcacattccgttccgcgccgtaccgaccaccgacccgaatgcgacgctgggcatggccctgtcggtgttcgcgctgatcattttctacagcatcaaggtcaagggcattggcggcttcatcggcgaactgacccttcacccgttcggcagcaagaacatcttcgttcaggcactgctgatcccggtcaacttcctgctcgaattcgtcacgctgatcgccaagccgatttctctggctctgcgtctgttcggcaacatgtatgctggcgagctggtcttcattctgatcgccgtgatgttcggcagcggtctgttgtggctcagcggtctgggtattgttctgcagtgggcgtgggctgtgttccacatcctgatcatcaccctgcaggcgtttatcttcatgatgctgaccatcgtctacctgtcgatggcgcacgaagacaaccat

SEQ ID NO: 33448 - DNA, 255 bp, Pseudomonas syringae
atggaaactgtagttggtctaaccgctatcgctgttgcactgttgatcggcctgggcgcactgggtactgcaatcggtttcggcctgttgggcggcaagttcctggaaggcgctgcgcgtcaaccggaaatggtcccaatgctgcaagtcaaaatgttcatcgttgcgggcctgctcgacgccgtgaccatgatcggtgtcggtatcgctctgttcttcacctttgcgaaccccttcgttggtcaactcgctggc

SEQ ID NO: 33449 - DNA, 468 bp, Pseudomonas syringae
gtgaacattaatgcaaccctgattggtcagtccgttgcgttcttcatctttgtgctgttctgcatgaagtacgtgtggcctccggtcatcgctgctttgcacgaacgtcagaagaagatcgcggatggactggacgctgcttcccgagcagctcgcgacctggagctggcccaagataaagtgggtcaacaactgcgcgaagctaaggctcaagcagccgagatcattgagcaagccaagaagcgcggaactcagattgtcgacgaggcccgtgaaacggcacgcgttgaagctgaccgtgtgaaggctcaggctcaggccgagatcgagcaggaactgaacggtgtcaaagacgccttgcgcgcccagttgggtagcctggcagtcaatggcgcagagaagattctgggcgccacaatcgatcaaaacgcgcacgcggagctggttaacaaactggctgctgaaatt

SEQ ID NO: 33450 - DNA, 516 bp, Pseudomonas syringae
ttggcccgaccttacgcgaaggcggccttcgagcatgcgcaggcccaccagcaactggccaattggtcagccatgctcggcctggctgctgcagtgtcgcaagacgacaccatgcagcgcatgctcaaggccccgcgagtgacgagcgcacaaaaggccaccacttttattgaagtgtgtggcgaaaagttcgatgccaaggcacagaatttcattcacgtcgttgctgaaaacgaccgtctcccgcttctgccggagatcgccgaactgttcgacctgtacaaggccgagcaggaaaaatcggtcgatgtggatgtcaccagtgcttttgcattgaaccaagaacagcaagacaaactcgccaaggttctcagtgcacggctcggccgggaagtgcgcctgcatgctgcggaggatgcctctcttatagggggtgtcgtaatccgcgccggcgacctggttatcgatggctcagttcgcggcaaaatcgcgaaactagccgaagcattgaaatct

SEQ ID NO: 33451 - DNA, 480 bp, Pseudomonas syringae
accgccgtatctgccaacaccggcactatcaactttgaaggccagatcaccggcagcacctgccctatcgaagtggtcaacccaggtgacggtgcagttggcaacctggtgaaaatgggctctgtcgacgctggccgcttcaccgccgtcggccaggaatacagcggcaagagctttgccctgcgcgtcaaagacaatggcagttgcggtcttacaggcaccgccgatgttgcaactgtaaagtttgacggtgccgcggacggttccagcagctactttgctgtcacaccaacggcagatggcgcaacgggcgtcgccattgccattcgtgactttagcggagactctatcgagcctggaaccgagtctgccccctaccctctggtcgttggcggtgtcaccgacatgaccttcgacgcctactatcgctcgacagccgccacagtgacgccgggcactgcctcggcagatatcaacttc

SEQ ID NO: 33452 - DNA, 975 bp, Pseudomonas syringae; identical to SEQ ID NO: 33042

SEQ ID NO: 33453 - DNA, 1365 bp, Pseudomonas syringae
atgtctctcgatatcgttattctcgctgctggccaaggtacccggatgcgttcggcgctgcccaaggttctacatccagtggcaggcaattccatgctcggccatgttatccacagcgcgcgtcagttatccccagtcggcatccatgtggtgattggccacggcgcggatgctgtgcgtgaacagcttgcggccgacgacctgaatttcgtgatgcaggacaaacagctgggcacaggccatgcggttgctcaggcattgcctgcgctgacggctgaaaccgtgttgattctgtacggcgatgtaccgctgatcgaagtggaaacccttcagcgtctgctcaagcgggtgacacccgagcaactcggcttgttgaccgtgaagctggatgaccccaccggctacggtcgtatcgttcgcgacgatcagcatcgcgtttgcgctatcgtcgagcacaaagatgccactgatgcgcagaaggcaatcaccgaaggcaacaccgggattctcgcggtgcctgcctcccatttgcaggactggctcgggcgcctctccaacaacaacgcccaaggcgagtattacctgaccgatgtcatcgcgatggcggtcaatgacggcctcgtggttgcgactgaacagccacacgacgcaatggaagtgcagggagccaatgatcgcaagcagctctcggaactggagcgtcattatcaactgcgcgaggcacgccgtctgatggcggcaggcgtcaccttgcgtgacccgtcgcgattcgatgtgcgcggtgaggtcagtgtcgggcgggatgtgctgatcgacatcaacgtgatcctcgaaggcaaggtgatcattgaagacgacgtggtgatcggccctaactgcgtcatcaaggacagcaccttgcgcaagggtgtggtcgtcaaagccaacagccatatcgacggcgcactattgggcgagtgcagcgatgccggcccgttcgcacgcttgcggcctggcagtgtgctgggtgccaaggcgcatgtgggtaactttgtcgagctcaagaatgcgaacctcggcgagggtgccaaggtcggccacctgacgtacctgggcgacgccgaagttggcgcacgcaccaatatcggtgccggcaccatcacctgtaactacgatggtgccaacaagcacaagaccacgttgggtgcagacgtcttcatcggttccaacaactctctggttgcgcctgtggatatcctggacggtgcgacgactgcagccggttcgaccatcacgcagaatgtgcctgctgaacagctcggcgtggcccgtgcccgccagcgcaacatcgaaggctggaagcggccggtgaaaatcacgaaagac

SEQ ID NO: 33454 - DNA, 1833 bp, Pseudomonas syringae
atgtgtggaatcgtcggcgccgttgctgaacgtaatatcacggctattttgctcgaaggcctcaagcgccttgaatatcgcggctatgacagcgcaggcgtggctgtcttcactaacgaaggcgttcttgaacgccgtcgtcgctccggcaaggtcagcgagctggaacaggcgctggccggcgagccactgatcggccgtctgggcattgctcacacccgctgggccacgcatggcgcaccgtgcgagcgtaatgcacacccacacttttcggccgacgagctggcagttgtccacaacggcatcatcgaaaaccacgaggccctgcgcgaacagctcaaaagcctgggctacgttttcgtgtccgatactgacaccgaagtcatcgttcacctgctgcaccacaaactcaaggacacgcctgatctggcggttgccctgaagtctgccgtgaaagaactgcacggtgcctacggccttgcggtgatcaacgccgcacagcctgatcgcctgctggccgcccgcagtggcagcccgctggtgatcggcgttggcatgggcgaaaacttcctggcctccgatcaactggcgctgcgtcaggtgaccgaccgtttcatgtacctggaagagggcgacatcgccgagatccgtcgcgacagcgtgcagatctggaccgttgacggcctgccggtcgtgcgtgaagtggtgcagtaccacgaaggtgcagaagccgccgacaaaggcgaataccgccacttcatgctcaaggaaatccacgaacaacctaaagttgtgcagcgcacgcttgaaggtcgtctgggccagcatcaggtattggtccacgcatttggtccacaggcagccgagctgttcgccaaggtccgcaacgttcagatcgtggcgtgtggcaccagctatcacgccggcatggtcgcgcgttactggctcgaaggccttgctggcataccttgccaggtagaagtggcaagcgagttccgctaccgcaaggttgtggttcagccagacaccctgttcgtctccatctcgcaatcaggcgaaaccgccgacacgctggccgcgctgcgcaatgccaaagagctgggctttctggccagcctggcaatctgcaacgtgggcatcagctcgctggtgcgggaatccgacctgaccctgctcacccaggccggtccggaaatcggcgtggcatccaccaaagccttcaccacgcaactggtcgccttgctgctgctgaccctgtcgctgggtcaggtcaaaggctcgttggaggagggcgtcgaagcgcaactggtcgaagaactgcgccgcctgccgacccgtttgggcgaagccctggcaatggacggcaccatcgagaaagtcgccgagctgttcgccgagaagcaccacaccctgttcctcgggcgcggcgcgcaattcccggtggccatggaaggcgcgctcaagctcaaagagatttcctacatccacgccgaagcctacccggctggcgaactcaaacacggcccgctggcattggtcgacgccgacatgccggttgtcaccgtcgcgcccaacaacgagctgctggaaaaactcaaatccaacctgcaggaagtccgcgcgcgcggtggagagttgatcgtattcgctgacgagcaagccggcatgaaaaacggcgaaggcacccacgtcatcgccatgccgcacatcatcgatgcgctggcgccgattctgtacaccattccgttgcagctgctttcgtattatgtggcagtgttgaaagggacggacgttgaccagccgcggaatctggcgaagtcggtgacggtggag

SEQ ID NO: 33455 - DNA, 1470 bp, Pseudomonas syringae
atggcccgttttgaattgcaaaaactctacatcgacggcggttatgtcgatgccagcaacactgaaaccttcgactcgatcaaccctgcgaacggcgaagttctggctaagatccagcgcgccagcaaggaagacgtcgagcgtgcggtggtcgccgccgagaagggccagaagatctgggccgcaatgactgcagtcgagcgttcgcgcatcctgcgtcgtgccgtcgatatcctgcgtgagcgcaacgatgagctggccgcgctcgaaacgctggacaccggtaaagccatttccgaaacccgttacgttgacatcgtgaccggcgccgacgtgctggaatactacgcaggcctggtgcctgccatcgaaggcgagcagattccgctgcgtgattcgtccttcgtctacacccgccgcgagccgctgggtgtggtcgccggtatcggtgcttggaactacccgatccagatcgccttgtggaagtccgccccggcattggctgcgggcaacgcgatgatcttcaagccgagcgaagtcacctcgctgaccaccctgaagctggcagaaatctacaccgaagccggcgtgccgaacggcgtgttcaacgtgttgactggcagcggccgtgaagtcggcacctggatcaccgagcacccgcgcatcgagaaagtctccttcaccggcggcaccgacaccggcaagaaagtcatggccagtgcgtcgagttcgtcgctcaaggaagtgacgatggagctgggcggcaagtcgccgctgatcgttttcgacgacgccgacctggatcgcgccgccgacatcgccatgatggccaacttctacagctccggtcaggtctgcaccaacggtacgcgcgtgttcgtaccgaatgccctgaaaggcgagttcgaagcgaaaatcctggagcgtgtgaagcgtattcgtcccggcaacccggaagacgaaaacatcaatttcggtccgctggtcagctttgaacacatggaaagcgtgctgggctacatcgccaagggcaaagagcagggcgcacgcctgttgtgcggcggcgaccgtttgaccggtggcgttttcgacaagggcgcgttcgtggctgcaaccgtgttcaccgactgcaccgacgagatgaccatcgtgcgcgaagagatcttcggcccggtgatgagcattcttggttacgacaccgaggacgaagtggtgcgccgcgccaacgacaccgacttcggcctggctgcgggcatcgtgacccgtgacctgaaccgcgcgcaccgcgtgattcacttgctggaagccggtatctgctggatcaacgcgtggggcgagtcggcggcgcaaatgccggtcggcggttacaagcagtcgggcgtcggtcgtgaaaacggcatcagctcgctggcccagtacacgcgcatcaagtcggttcagatcgagttgggcgactacgcctcggtgttc

SEQ ID NO: 33456 - DNA, 168 bp, Pseudomonas syringae
gtggcagcggcggtatgctgcgctgaagcacccctaaggttcgaggagttggtgatgaaagttcgtgcatcggtgaaaaagctgtgccgtaactgcaagattattcgccgcgaaggtgttgttcgagtaatttgcagcgcggaaccacgtcataagcagcgccaaggc

SEQ ID NO: 33457 - DNA, 975 bp, Pseudomonas syringae; identical to SEQ ID NO: 33042
